(19) United States
(12) Patent Application Publication
(10) Pub. No.: US 2007/0178451 A1
(43) Pub. Date: Aug. 2, 2007

(54) Nucleic acid sequences from Chlorella sarokiniana and uses thereof

(76) Inventors: Molian Deng, Grover, MO (US); Robin L. Staub, Wildwood, MO (US)

Correspondence Address: MONSANTO COMPANY, 800 N. LINDBERGH BLVD., ATTENTION: GAIL P. WUELLNER, IP PARALEGAL, (E2NA), ST. LOUIS, MO, 63167, US

(21) Appl. No.: 09/920,953

(22) Filed: Aug. 2, 2001

(51) Int. Cl. C12Q 1/68; C07H 21/04; C12N 1/12; C07K 14/405

(52) U.S. Cl. 435/6; 435/257.2; 530/350; 536/23.7

(57) ABSTRACT

Expressed Sequence Tags (ESTs) isolated from the unicellular green algae, Chlorella sarokiniana, are disclosed. The invention encompasses nucleic acid molecules that encode Chlorella protein homologs and fragments thereof. In addition, antibodies capable of binding the proteins are encompassed by the present invention. The disclosed ESTs have particular utility in isolating genes and promoters, identifying and mapping the genes involved in developmental and metabolic pathways, and determining gene function. The ESTs provide a unique molecular tool for the targeting and isolation of novel genes for plant protection and improvement. The invention also relates to methods of using the disclosed nucleic acid molecules, proteins, fragments of proteins, and antibodies, for example, for gene identification and analysis, and preparation of constructs.

### FIELD OF THE INVENTION

[0001] The present invention is in the field of molecular biology; more particularly, the present invention relates to nucleic acid sequences from the unicellular green algae, Chlorella sarokiniana. The invention encompasses nucleic acid molecules that encode proteins and fragments of proteins. In addition, proteins and fragments of proteins so encoded and antibodies capable of binding the proteins are encompassed by the present invention. The invention also relates to methods of using the disclosed nucleic acid molecules, proteins, fragments of proteins, and antibodies, for example, for gene identification and analysis, and preparation of constructs.

### INCORPORATION OF SEQUENCE LISTING

[0002] This application contains a sequence listing, which is contained on three identical CD-ROMs: two copies of a sequence listing (Copy 1 and Copy 2) and a sequence listing Computer Readable Form (CRF), all of which are herein incorporated by reference. All three CD-ROMs each contain one file called “pa_{—}00361.rpt” which is 6,949,411 bytes in size and was created on Jul. 26, 2001.

### BACKGROUND OF THE INVENTION

[0003] The present invention relates in part to DNA sequences from cDNA libraries from the unicellular green algae, Chlorella sorokiniana. The green algal genus Chlorella includes a variety of species (Fott and Novakova, In: Studies in Phycology: A Monograph of the Genus Chlorella, Fott, B. (ed.), Prag: Verlag Acad. Sissensch., pp. 10-74 (1969), herein incorporated by reference in its entirety), some of which have long been served as model organisms in plant physiological and biochemical studies (Govindjee and Braun, In: Algal Physiology and Biochemistry, W. D. P. Stewart (ed.), University of California Press, Berkeley and Los Angeles, pp. 346-390, herein incorporated by reference in its entirety). Chlorella belongs to the eucaryotic cell category of algae and lives in fresh water as a single cell plant. Its size is approximately 2-8 microns in diameter. Species of Chlorella have been classified by cell wall sugar composition (Takeda, Phytochemistry 27: 3823-6 (1988)) as well as other physiological and biochemical characters (Kessler, Plant Syst. Evol. 125:129-38 (1976)). The name Chlorella derives from two Latin words meaning ‘leaf’ (green) and ‘small’, referring to the unusually high content of chlorophyll which gives Chlorella its characteristic deep emerald-green color. Chlorella is also rich in protein, vitamins, minerals, “C.G.F.” (Chlorella Growth Factor) and other beneficial substances. Unicellular green algae Chlorella are currently being used to produce compounds of commercial value (Behrens et al., J. Applied Phycology 6: 113-122 (1994); Running et al., J. Applied Phycology 6: 99-104 (1994), both of which are herein incorporated by reference in their entirety).

[0004] It is generally believed that land plants evolved from green algae (Graham, J. Plant Res. 109: 241-251 (1996), herein incorporated by reference in its entirety) and that during this revolution, extensive rearrangements occurred within the chloroplast genome. The complete nucleotide sequence of the chloroplast genome (150613 bp) from the unicellular green alga Chlorella vulgaris, a species related to Chlorella sorokiniana, has been determined (Wakasugi, et al., Proc. Natl. Acad. Sci. USA 94:5967-5972 (1997), herein incorporated by reference in its entirety). The chloroplast genome of Chlorella vulgaris contains one copy of rRNA gene consisting of 16S, 23S, and 5S rRNA genes; thirty one tRNA gene, sixty-nine protein genes; eight ORFs conserved with those found in land chloroplasts; two adjacent genes homologous to bacterial genes (minD and mine) involved in cell division; genes encoding ribosomal proteins L5, L12, L19 and S9; and two long ORF's related to ycf1 and ycf2 that are exclusively found in land plants (Wakasugi, et al., Proc. Natl. Acad. Sci. USA 94: 5967-5972 (1997), herein incorporated by reference in its entirety). Chlorella is closer to land plants than the red and brown algae.

[0005] It is advantageous to identify and/or isolate chlorella genes for plant genetic engineering to produce plants with argonomically important characteristics or traits. A cDNA (or complementary DNA) library, which is constructed from mRNA purified from Chlorella cell culture, can be one valuable source for isolating genes of interest. Construction of cDNA libraries is well-known in the art and a number of cloning strategies exist. Random clones from a cDNA library can be sequenced from both 3′ and 5′ ends to generate expressed sequence tags (ESTs), which can represent copies of up to the full length transcript (McCombie, et al., Nature Genetics, 1:124-130 (1992); Kurata, et al., Nature Genetics, 8: 365-372 (1994); Okubo, et al., Nature Genetics, 2: 173-179 (1992)). Typically, only single run sequence data is obtained from the cDNA library (Adams, et al., Science 252:1651-1656 (1991)). Automated single run sequencing typically results in an approximately 2-3% error or base ambiguity rate. (Boguski, et al., Nature Genetics, 4:332-333 (1993)). Between 150-450 nucleotides of sequence information is usually generated as this is the length of sequence information that is routinely and reliably produced using single run sequence data.

[0006] ESTs have been found to be useful for similarity searches and mapping (Adams, et al., Science 252:1651-1656 (1991)). Sequence comparisons and similarity analysis would allow the identification of genes of interest and then full-length cDNA constructs can be obtained using several methods (Land, et al., Nucleic Acids Res. 9:2251-2266 (1981); Okayama and Berg, Mol. Cell Biol. 2:161 -170 (1982); Coleclough, et al., Gene 34:305-314 (1985); Krawinkel, et al., Nucleic Acids Res. 14:1913 (1986); Han, et al., Nucleic Acids Res. 15:6304 (1987)). Such isolated genes of interest can be used in plant genetic engineering to engineering to produce plants with argonomically important characteristics or traits.

### SUMMARY OF THE INVENTION

[0007] The present invention provides a substantially purified nucleic acid molecule having a nucleic acid sequence selected from the group consisting of SEQ ID NO: 1 through SEQ ID NO: 9395 or complements thereof.

[0008] The present invention also provides a substantially purified nucleic acid molecule, the nucleic acid molecule capable of specifically hybridizing to a second nucleic acid molecule having a nucleic acid sequence selected from the group consisting of SEQ ID NO: 1 through SEQ ID NO: 9395 or complements thereof.

[0009] The present invention further provides a substantially purified protein, peptide, or fragment thereof encoded by a nucleic acid sequence selected from the group consisting of SEQ ID NO: 1 through SEQ ID NO:9395 or complements thereof.

[0010] The present invention also provides a substantially purified nucleic acid molecule encoding an Chlorella sarokiniana protein homologue or fragment thereof, wherein the nucleic acid molecules comprises a nucleic acid sequence selected from the group consisting of SEQ ID NO: 1 through SEQ ID NO: 9395.

[0011] The present invention also provides a transformed cell having a nucleic acid molecule which comprises: (A) an exogenous promoter region which functions in the cell to cause the production of a mRNA molecule; which is operably linked to (B) a structural nucleic acid molecule, wherein the structural nucleic acid molecule comprises a nucleic acid sequence selected from the group consisting of SEQ ID NO: 1 through SEQ ID NO:9395 or complements thereof; which is operably linked to (C) a 3′ non-translated sequence that functions in the cell to cause termination of transcription and addition of polyadenylated ribonucleotides to a 3′ end of the mRNA molecule.

[0012] The present invention also provides a plant cell, a mammalian cell, a bacterial cell, an insect cell, a fungal cell and an algal cell transformed with a nucleic acid molecule of the present invention.

[0013] The present invention also provides a computer readable medium having recorded thereon one or more of the nucleotide sequences depicted in SEQ ID NO: 1 through SEQ ID NO: 9395 or complements thereof.

### DETAILED DESCRIPTION OF THE INVENTION

Agents of the Present Invention:

[0014] (a) Nucleic Acid Molecules

[0015] Agents of the present invention include substantially purified (or isolated) nucleic acid molecules and more specifically EST nucleic acid molecules or nucleic acid fragment molecules thereof. Fragment EST nucleic acid molecules may encode significant portion(s) of, or indeed most of, the EST nucleic acid molecule. Alternatively, the fragments may comprise smaller oligonucleotides (having from about 15 to about 250 nucleotide residues, and more preferably, about 15 to about 30 nucleotide residues).

[0016] In a preferred embodiment the nucleic acid molecules of the present invention are derived from a unicellular green alga and in an even more preferred embodiment the nucleic acid molecules of the present invention are derived from unicellular green algae belonging to the genus Chlorella. In a particularly preferred embodiment the nucleic acid molecules of the present invention are derived from Chlorella sarokiniana.

[0017] The term “nucleic acid molecule” or “nucleic acid” refers to a single or double-stranded polymer of deoxyribonucleotide or ribonucleotide bases read from the 5′ to the 3′ end. Nucleic acid molecules may also optionally contain synthetic, non-natural or altered nucleotide bases that permit correct read through by a polymerase and do not alter expression of a polypeptide encoded by that nucleic acid molecule.

[0018] As used herein “a substantially purified nucleic acid” or “an isolated nucleic acid” refers to a nucleic acid that is no longer accompanied by some of materials with which it is associated in its natural state or to a nucleic acid the structure of which is not identical to that of any of naturally occurring nucleic acid. Examples of a substantially purified nucleic acid include: (1) DNAs which have the sequence of part of a naturally occurring genomic DNA molecules but are not flanked by two coding sequences that flank that part of the molecule in the genome of the organism in which it naturally occurs; (2) a nucleic acid incorporated into a vector or into the genomic DNA of a prokaryote or eukaryote in a manner such that the resulting molecule is not identical to any naturally occurring vector or genomic DNA; (3) a separate molecule such as a cDNA, a genomic fragment, a fragment produced by polymerase chain reaction (PCR), or a restriction fragment; (4) recombinant DNAs; and (5) synthetic DNAs. A substantially purified nucleic acid may also be comprised of one or more segments of cDNA, genomic DNA or synthetic DNA.

[0019] It is also contemplated by the inventors that the substantially purified (or isolated) nucleic acids of the present invention also include known types of modifications, for example, labels which are known in the art, methylation, “caps”, substitution of one or more of the naturally occurring nucleotides with an analog. Other known modifications include internucleotide modifications, for example, those with uncharged linkages (methyl phosphonates, phosphotriesters, phosphoamidates, carbamates, etc.) and with charged linkages (phosphorothioates, phosphorodithioates, etc.), those containing pendant moieties, such as, proteins (including nucleases, toxins, antibodies, signal peptides, poly-L-lysine, etc.), those with intercalators (acridine, psoralen, etc.), those containing chelators (metals, radioactive metals, boron, oxidative metals, etc.), those containing alkylators, and those with modified linkages.

[0020] It is understood that the agents of the present invention may be labeled with reagents that facilitate detection of the agent (e.g. fluorescent labels (Prober, et al., Science 238:336-340 (1987), Albarella et al., EP 144914), chemical labels (Sheldon et a., U.S. Pat. No. 4,582,789; Albarella et al., U.S. Pat. No. 4,563,417), modified bases (Miyoshi et al., EP 119448).

[0021] The term “nucleotide sequence” or “nucleic acid sequence” refers to both the sense and antisense strands of a nucleic acid as either individual single strands or in the duplex. It includes, but is not limited to, self-replicating plasmids, chromosomal sequences, and infectious polymers of DNA or RNA.

[0022] A “coding sequence”, “structural nucleotide sequence” or “structural nucleic acid molecule” is a nucleotide sequence which is translated into a polypeptide, usually via mRNA, when placed under the control of appropriate regulatory sequences. The boundaries of the coding sequence are determined by a translation start codon at the 5′-terminus and a translation stop codon at the 3′-terminus. A coding sequence can include, but is not limited to, genomic DNA, cDNA, and recombinant nucleotide sequences.

[0023] The term “recombinant DNAs” refers to DNAs that contains a genetically engineered modification through manipulation via mutagenesis, restriction enzymes, and the like.

[0024] The term “synthetic DNAs” refers to DNAs assembled from oligonucleotide building blocks that are chemically synthesized using procedures known to those skilled in the art. These building blocks are ligated and annealed to form DNA segments which are then enzymatically assembled to construct the entire DNA. “Chemically synthesized”, as related to a sequence of DNA, means that the component nucleotides were assembled in vitro. Manual chemical synthesis of DNA may be accomplished using well established procedures, or automated chemical synthesis can be performed using one of a number of commercially available machines.

[0025] The agents of the present invention will preferably be “biologically active” with respect to either a structural attribute, such as the capacity of a nucleic acid to hybridize to another nucleic acid molecule, or the ability of a protein to be bound by antibody (or to compete with another molecule for such binding). Alternatively, such an attribute may be catalytic, and thus involve the capacity of the agent to mediate a chemical reaction or response.

[0026] It is further understood, that the present invention provides bacterial, viral, microbial, and plant cells comprising the agents of the present invention.

[0027] EST nucleic acid molecules or fragment EST nucleic acid molecules are capable of specifically hybridizing to other nucleic acid molecules under certain circumstances. As used herein, two nucleic acid molecules are said to be capable of specifically hybridizing to one another if the two molecules are capable of forming an anti-parallel, double-stranded nucleic acid structure. A nucleic acid molecule is said to be the “complement” of another nucleic acid molecule if they exhibit complete complementarity. As used herein, molecules are said to exhibit “complete complementarity” when every nucleotide of one of the molecules is complementary to a nucleotide of the other. Two molecules are said to be “minimally complementary” if they can hybridize to one another with sufficient stability to permit them to remain annealed to one another under at least conventional “low-stringency” conditions. Similarly, the molecules are said to be “complementary” if they can hybridize to one another with sufficient stability to permit them to remain annealed to one another under conventional “high-stringency” conditions. Conventional stringency conditions are described by Sambrook, et al., In: Molecular Cloning, A Laboratory Manual, 2nd Edition, Cold Spring Harbor Press, Cold Spring Harbor, N.Y. (1989), and by Haymes, et al. In: Nucleic Acid Hybridization, A Practical Approach, IRL Press, Washington, D.C. (1985), herein incorporated by reference in its entirety. Departures from complete complementarity are therefore permissible, as long as such departures do not completely preclude the capacity of the molecules to form a double-stranded structure. Thus, in order for an EST nucleic acid molecule or fragment EST nucleic acid molecule to serve as a primer or probe it need only be sufficiently complementary in sequence to be able to form a stable double-stranded structure under the particular solvent and salt concentrations employed.

[0028] Appropriate stringency conditions which promote DNA hybridization are, for example, 6.0×sodium chloride/sodium citrate (SSC) at about 45° C., followed by a wash of 2.0×SSC at 50° C., are known to those skilled in the art or can be found in Current Protocols in Molecular Biology, John Wiley & Sons, N.Y. (1989), 6.3.1-6.3.6, herein incorporated by reference in its entirety. For example, the salt concentration in the wash step can be selected from a low stringency of about 2.0×SSC at 50° C. to a high stringency of about 0.2×SSC at 50° C. In addition, the temperature in the wash step can be increased from low stringency conditions at room temperature, about 22° C., to high stringency conditions at about 65° C. Both temperature and salt may be varied, or either the temperature or the salt concentration may be held constant while the other variable is changed.

[0029] In a preferred embodiment, a nucleic acid of the present invention will specifically hybridize to one or more of the nucleic acid molecules set forth in SEQ ID NO: 1 through SEQ ID NO: 9395 or complements thereof under moderately stringent conditions, for example at about 2.0×SSC and about 65° C.

[0030] In a particularly preferred embodiment, a nucleic acid of the present invention will include those nucleic acid molecules that specifically hybridize to one or more of the nucleic acid molecules set forth in SEQ ID NO: 1 through SEQ ID NO: 9395 or complements thereof under high stringency conditions.

[0031] In one aspect of the present invention, the nucleic acid molecules of the present invention have one or more of the nucleic acid sequences set forth in SEQ ID NO: 1 through to SEQ ID NO:9395 or complements thereof. In another aspect of the present invention, one or more of the nucleic acid molecules of the present invention share between 100% and 90% sequence identity with one or more of the nucleic acid sequences set forth in SEQ ID NO: 1 through to SEQ ID NO:9395 or complements thereof. In a further aspect of the present invention, one or more of the nucleic acid molecules of the present invention share between 100% and 95% sequence identity with one or more of the nucleic acid sequences set forth in SEQ ID NO: 1 through to SEQ ID NO:9395 or complements thereof. In a more preferred aspect of the present invention, one or more of the nucleic acid molecules of the present invention share between 100% and 98% sequence identity with one or more of the nucleic acid sequences set forth in SEQ ID NO: 1 through to SEQ ID NO:9395 or complements thereof. In an even more preferred aspect of the present invention, one or more of the nucleic acid molecules of the present invention share between 100% and 99% sequence identity with one or more of the sequences set forth in SEQ ID NO: 1 through to SEQ ID NO:9395 or complements thereof. In a further, even more preferred aspect of the present invention, one or more of the nucleic acid molecules of the present invention exhibit 100% sequence identity with one or more nucleic acid molecules present within the cDNA library LIB3602, herein designated (Monsanto Company, St. Louis, Mo., United States of America).

[0032] “Percentage of sequence identity” is determined by comparing two optimally aligned sequences over a comparison window, wherein the portion of the nucleotide sequence in the comparison window may comprise additions or deletions (i.e., gaps) as compared to the reference sequence (which does not comprise additions or deletions) for optimal alignment of the two sequences. The percentage is calculated by determining the number of positions at which the identical nucleic acid base or amino acid residue occurs in both sequences to yield the number of matched positions, dividing the number of matched positions by the total number of positions in the window of comparison and multiplying the result by 100 to yield the percentage of sequence identity.

[0033] Polypeptides which are “substantially similar” share sequences as noted above except that residue positions which are not identical may differ by conservative amino acid changes. Conservative amino acid substitutions refer to the interchangeability of residues having similar side chains. “Conservative amino acid substitutions” refer to substitutions of one or more amino acids in a native amino acid sequence with another amino acid(s) having similar side chains, resulting in a silent change. Conserved substitutes for an amino acid within a native amino acid sequence can be selected from other members of the group to which the naturally occurring amino acid belongs. For example, a group of amino acids having aliphatic side chains is glycine, alanine, valine, leucine, and isoleucine; a group of amino acids having aliphatic-hydroxyl side chains is serine and threonine; a group of amino acids having amide-containing side chains is asparagine and glutamine; a group of amino acids having aromatic side chains is phenylalanine, tyrosine, and tryptophan; a group of amino acids having basic side chains is lysine, arginine, and histidine; and a group of amino acids having sulfur-containing side chains is cysteine and methionine. Preferred conservative amino acids substitution groups are: valine-leucine, valine-isoleucine, phenylalanine-tyrosine, lysine-arginine, alanine-valine, aspartic acid-glutamic acid, and asparagine-glutamine.

[0034] Optimal alignment of sequences for comparison can use any means to analyze sequence identity (homology) known in the art, e.g., by the progressive alignment method of termed “PILEUP” (Morrison, Mol. Biol. Evol. 14:428-441 (1997), as an example of the use of PILEUP); by the local homology algorithm of Smith & Waterman (Adv. Appl. Math. 2: 482 (1981)); by the homology alignment algorithm of Needleman & Wunsch (J. Mol. Biol. 48:443 (1970)); by the search for similarity method of Pearson (Proc. Natl. Acad. Sci. USA 85: 2444 (1988)); by computerized implementations of these algorithms (e.g., GAP, BESTFIT, FASTA, and TFASTA in the Wisconsin Genetics Software Package, Genetics Computer Group, 575 Science Dr., Madison, Wis.); ClustalW (CLUSTAL in the PC/Gene program by Intelligenetics, Mountain View, Calif., described by, e.g., Higgins, Gene 73: 237-244 (1988); Corpet, Nucleic Acids Res. 16:10881-10890 (1988); Huang, Computer Applications in the Biosciences 8:155-165 (1992); and Pearson, Methods in Mol. Biol. 24:307-331 (1994); Pfam (Sonnhammer, Nucleic Acids Res. 26:322-325 (1998); TreeAlign (Hein, Methods Mol. Biol. 25:349-364 (1994); MEG-ALIGN, and SAM sequence alignment computer programs; or, by manual visual inspection.

[0035] Another example of algorithm that is suitable for determining sequence similarity is the BLAST algorithm, which is described in Altschul et al, J. Mol. Biol. 215: 403-410 (1990). Software for performing BLAST analyses is publicly available through the National Center for Biotechnology Information, http://www.ncbi.nlm.nih.gov/; see also Zhang, Genome Res. 7:649-656 (1997) for the “PowerBLAST” variation. This algorithm involves first identifying high scoring sequence pairs (HSPs) by identifying short words of length W in the query sequence that either match or satisfy some positive valued threshold score T when aligned with a word of the same length in a database sequence. T is referred to as the neighborhood word score threshold (Altschul et al, J. Mol. Biol. 215: 403-410 (1990)). These initial neighborhood word hits act as seeds for initiating searches to find longer HSPs containing them. The word hits are extended in both directions along each sequence for as far as the cumulative alignment score can be increased. Extension of the word hits in each direction are halted when: the cumulative alignment score falls off by the quantity X from its maximum achieved value; the cumulative score goes to zero or below, due to the accumulation of one or more negative-scoring residue alignments; or the end of either sequence is reached. The BLAST algorithm parameters W, T and X determine the sensitivity and speed of the alignment. The BLAST program uses as defaults a wordlength (W) of 11, the BLOSUM62 scoring matrix (see Henikoff, Proc. Natl. Acad. Sci. USA 89:10915-10919(1992)) alignments (B) of 50, expectation (E) of 10, M=5, N=−4, and a comparison of both strands. The term BLAST refers to the BLAST algorithm which performs a statistical analysis of the similarity between two sequences; see, e.g., Karlin, Proc. Natl. Acad. Sci. USA 90:5873-5787 (1993). One measure of similarity provided by the BLAST algorithm is the smallest sum probability (P(N)), which provides an indication of the probability by which a match between two nucleotide or amino acid sequences would occur by chance. For example, a nucleic acid is considered similar to a reference sequence if the smallest sum probability in a comparison of the test nucleic acid to the reference nucleic acid is less than about 0.1, more preferably less than about 0.01, and most preferably less than about 0.001.

[0036] In a preferred embodiment of the present invention, a nucleic acid molecule of the present invention encodes the homologue of a known protein. Table 1 sets forth a list of nucleic acid molecules that encode Chlorella sarokiniana proteins or fragments thereof which are homologues of known proteins

[0037] In a preferred embodiment of the present invention, a Chlorella sarokiniana protein or fragment thereof of the present invention is a protein homologue of another alga. In another preferred embodiment of the present invention, a Chlorella sarokiniana protein or fragment thereof of the present invention is a homologue of a fungal protein. In another preferred embodiment of the present invention, a Chlorella sarokiniana protein or fragment thereof of the present invention is a homologue of a mammalian protein. In another preferred embodiment of the present invention, a Chlorella sarokiniana protein or fragment thereof of the present invention is a homologue of a bacterial protein. In another preferred embodiment of the present invention, a Chlorella sarokiniana protein or fragment thereof of the present invention is a homologue of an insect protein. In another preferred embodiment of the present invention, a Chlorella sarokiniana protein or fragment thereof of the present invention is a homologue of a plant protein.

[0038] In a preferred embodiment of the present invention, the nucleic molecule of the present invention encodes a Chlorella sarokiniana protein or fragment thereof where a Chlorella sarokiniana protein or fragment thereof exhibits a BLAST probability score of greater than 1E-12, preferably a BLAST probability score of between about 1E-30 and about 1E-12, even more preferably a BLAST probability score of greater than 1E-30 with its homologue.

[0039] In another preferred embodiment of the present invention, the nucleic acid molecule encoding a Chlorella sarokiniana protein or fragment thereof exhibits a percent identity with its homologue of between about 25% and about 40%, more preferably of between about 40% and about 70%, even more preferably of between about 70% and about 90% and even more preferably between about 90% and 99%. In another preferred embodiment, of the present invention, a Chlorella sarokiniana protein or fragment thereof exhibits a percent identity with its homologue of 100%.

[0040] In a preferred embodiment of the present invention, the nucleic molecule of the present invention encodes a Chlorella sarokiniana protein or fragment thereof where the Chlorella sarokiniana protein exhibits a BLAST score of greater than 120, preferably a BLAST score of between about 1450 and about 120, even more preferably a BLAST score of greater than 1450 with its homologue.

[0041] The degeneracy of the genetic code, which allows different nucleotide sequences to code for the same protein or peptide, is known in the literature. (U.S. Pat. No. 4,757,006).

[0042] In an aspect of the present invention, one or more of the nucleic acid molecules of the present invention differ in nucleotide sequence from those encoding a Chlorella sarokiniana protein or fragment thereof in SEQ ID NO: 1 through SEQ ID NO: 9395 due to the degeneracy in the genetic code in that they encode the same protein but differ in nucleotide sequence.

[0043] In another further aspect of the present invention, one or more of the nucleic acid molecules of the present invention differ in nucleotide sequence from those encoding a Chlorella sarokiniana protein or fragment thereof in SEQ ID NO: 1 through SEQ ID NO: 9395 due to fact that the different nucleotide sequence encodes a protein having one or more conservative amino acid changes. It is understood that codons capable of coding for such conservative amino acid substitutions are known in the art.

[0044] It is well known in the art that one or more amino acids in a native sequence can be substituted with another amino acid(s), the charge and polarity of which are similar to that of the native amino acid, i.e., a conservative amino acid substitution, resulting in a silent change. Biologically functional equivalents of the proteins or fragments thereof of the present invention can have 10 or fewer conservative amino acid changes, more preferably seven or fewer conservative amino acid changes, and most preferably five or fewer conservative amino acid changes. The encoding nucleotide sequence will thus have corresponding base substitutions, permitting it to encode biologically functional equivalent forms of the proteins or fragments of the present invention.

[0045] It is understood that certain amino acids may be substituted for other amino acids in a protein structure without appreciable loss of interactive binding capacity with structures such as, for example, antigen-binding regions of antibodies or binding sites on substrate molecules. Because it is the interactive capacity and nature of a protein that defines that protein's biological functional activity, certain amino acid sequence substitutions can be made in a protein sequence and, of course, its underlying DNA coding sequence and, nevertheless, obtain a protein with like or superior properties. It is thus contemplated by the inventors that various changes may be made in the amino acid sequences of the proteins or fragments of the present invention, or corresponding DNA sequences that encode said polypeptides, without appreciable loss of their biological utility or activity. It is understood that codons capable of coding for such amino acid changes are known in the art.

[0046] In making such changes, the hydropathic index of amino acids may be considered. The importance of the hydropathic amino acid index in conferring interactive biological function on a protein is generally understood in the art (Kyte and Doolittle, J. Mol. Biol. 157, 105-132 (1982)). It is accepted that the relative hydropathic character of the amino acid contributes to the secondary structure of the resultant protein, which in turn defines the interaction of the protein with other molecules, for example, enzymes, substrates, receptors, DNA, antibodies, antigens, and the like.

[0047] Each amino acid has been assigned a hydropathic index on the basis of its hydrophobicity and charge characteristics (Kyte and Doolittle, J. Mol. Biol. 157, 105-132 (1982)); these are isoleucine (+4.5), valine (+4.2), leucine (+3.8), phenylalanine (+2.8), cysteine/cystine (+2.5), methionine (+1.9), alanine (+1.8), glycine (−0.4), threonine (−0.7), serine (−0.8), tryptophan (−0.9), tyrosine (−1.3), proline (−1.6), histidine (−3.2), glutamate (−3.5), glutamine (−3.5), aspartate (−3.5), asparagine (−3.5), lysine (−3.9), and arginine (−4.5).

[0048] In making such changes, the substitution of amino acids whose hydropathic indices are within ±2 is preferred, those which are within ±1 are particularly preferred, and those within ±0.5 are even more particularly preferred.

[0049] It is also understood in the art that the substitution of like amino acids can be made effectively on the basis of hydrophilicity. U.S. Pat. No. 4,554,101, states that the greatest local average hydrophilicity of a protein, as govern by the hydrophilicity of its adjacent amino acids, correlates with a biological property of the protein.

[0050] As detailed in U.S. Pat. No. 4,554,101, the following hydrophilicity values have been assigned to amino acid residues: arginine (+3.0), lysine (+3.0), aspartate (+3.0±1), glutamate (+3.0±1), serine (+0.3), asparagine (+0.2), glutamine (+0.2), glycine (0), threonine (−0.4), proline (−0.5±1), alanine (−0.5), histidine (−0.5), cysteine (−1.0), methionine (−1.3), valine (−1.5), leucine (−1.8), isoleucine (−1.8), tyrosine (−2.3), phenylalanine (−2.5), and tryptophan (−3.4).

[0051] In making such changes, the substitution of amino acids whose hydrophilicity values are within ±2 is preferred, those which are within ±1 are particularly preferred, and those within ±0.5 are even more particularly preferred.

[0052] In a further aspect of the present invention, one or more of the nucleic acid molecules of the present invention differ in nucleotide sequence from those encoding a Chlorella sarokiniana protein or fragment thereof set forth in SEQ ID NO: 1 through SEQ ID NO: 9395 or fragment thereof due to the fact that one or more codons encoding an amino acid has been substituted for a codon that encodes a nonessential substitution of the amino acid originally encoded.

[0053] Isolation and identification of nucleic acids of the present invention are described in detail in Examples. All or a substantial portion of the nucleic acids of the present invention may be used to isolate cDNAs and nucleic acids encoding Chlorella sarokiniana protein homologues or fragments thereof from the same or other species.

[0054] A “substantial portion” of a nucleotide sequence comprises enough of the sequence to afford specific identification and/or isolation of a nucleic acid fragment comprising the sequence. In general, gene specific oligonucleotide probes comprising 20-30 contiguous nucleotides may be used in sequence-dependent methods of gene identification (e.g., Southern hybridization) and isolation (e.g., in situ hybridization of bacterial colonies or bacteriophage plaques). In addition, short oligonucleotides of 12-15 bases may be used as amplification primers in PCR in order to obtain a particular nucleic acid fragment comprising the primers. The skilled artisan, having the benefit of the sequences as reported herein, may now use all or a substantial portion of the disclosed sequences for purposes known to those skilled in this art. Accordingly, the instant invention comprises the complete sequences as reported in the accompanying Sequence Listing, as well as substantial portions of those sequences as defined above.

[0055] Isolation of nucleic acids encoding protein homologues using sequence-dependent protocols is well known in the art. Examples of sequence-dependent protocols include, but are not limited to, methods of nucleic acid hybridization, and methods of DNA and RNA amplification as exemplified by various uses of nucleic acid amplification technologies (e.g., polymerase chain reaction, ligase chain reaction).

[0056] For example, structural nucleic acids encoding a Chlorella sarokiniana protein or fragment thereof, either as cDNAs or genomic DNAs, could be isolated directly by using all or a portion of the nucleic acids of the present invention as DNA hybridization probes to screen cDNA or genomic libraries from any desired species employing methodology well known to those skilled in the art. Methods for forming such libraries are well known in the art. Specific oligonucleotide probes based upon the nucleic acids of the present invention can be designed and synthesized by methods known in the art. Moreover, the entire sequences of the nucleic acids can be used directly to synthesize DNA probes by methods known to the skilled artisan such as random primer DNA labeling, nick translation, or end-labeling techniques, or RNA probes using available in vitro transcription systems. In addition, specific primers can be designed and used to amplify a part or all of the sequences. The resulting amplification products can be labeled directly during amplification reactions or labeled after amplification reactions, and used as probes to isolate full length cDNA or genomic DNAs under conditions of appropriate stringency.

[0057] Alternatively, the nucleic acids of interest can be amplified from nucleic acid samples using amplification techniques. For instance, the disclosed nucleic acids may be used to define a pair of primers that can be used with the polymerase chain reaction (Mullis, et al., Cold Spring Harbor Symp. Quant. Biol. 51:263-273 (1986); Erlich et al., EP 50,424; EP 84,796, EP 258,017, EP 237,362; Mullis, EP 201,184; Mullis et al., U.S. Pat. No. 4,683,202; Erlich, U.S. Pat. No. 4,582,788; and Saiki, R. et al., U.S. Pat. No. 4,683,194) to amplify and obtain any desired nucleic acid or fragment directly from mRNA, from cDNA, from genomic libraries or cDNA libraries. PCR and other in vitro amplification methods may also be useful, for example, to clone nucleic in acid sequences that code for proteins to be expressed, to make nucleic acids to use as probes for detecting the presence of the desired mRNA in samples, for nucleic acid sequencing, or for other purposes.

[0058] In addition, two short segments of the nucleic acids of the present invention may be used in polymerase chain reaction protocols to amplify longer nucleic acids encoding Chlorella sarokiniana protein homologues from DNA or RNA. For example, the skilled artisan can follow the RACE protocol (Frohman et al., Proc. Natl. Acad. Sci. USA 85:8998 (1988)) to generate cDNAs by using PCR to amplify copies of the region between a single point in the transcript and the 3′ or 5′ end. Primers oriented in the 3′ and 5′ directions can be designed from the nucleic acids of the present invention. Using commercially available 3′RACE or 5′RACE systems (Gibco BRL, Life Technologies, Gaithersburg, Maryland U.S.A.), specific 3′ or 5′ cDNA fragments can be isolated (Ohara et al., Proc. Natl. Acad. Sci. USA 86:5673 (1989); Loh et al., Science 243:217 (1989)). Products generated by the 3′ and 5′ RACE procedures can be combined to generate full-length cDNAs (Frohman and Martin, Techniques 1: 165 (1989)).

[0059] Nucleic acids of interest may also be synthesized, either completely or in part, especially where it is desirable to provide plant-preferred sequences, by well-known techniques as described in the technical literature. See, e.g., Carruthers et al., Cold Spring Harbor Symp. Quant. Biol. 47:411-418 (1982), and Adams et al., J. Am. Chem. Soc. 105:661 (1983). Thus, all or a portion of the nucleic acids of the present invention may be synthesized using codons preferred by a selected host. Species-preferred codons may be determined, for example, from the codons used most frequently in the proteins expressed in a particular host species. Other modifications of the nucleotide sequences may result in mutants having slightly altered activity.

[0060] Availability of the nucleotide sequences encoding Chlorella sarokiniana proteins or fragments thereof facilitates immunological screening of cDNA expression libraries. Synthetic polypeptides representing portions of the amino acid sequences of Chlorella sarokiniana proteins or fragments thereof may be synthesized. These polypeptides can be used to immunize animals to produce polyclonal or monoclonal antibodies with specificity for polypeptides or proteins comprising the amino acid sequences. These antibodies can be then used to screen cDNA expression libraries to isolate full-length cDNA clones of interest (Lemer, Adv. ImmunoL 36: 1 (1984); Sambrook et al., Molecular Cloning: A Laboratory Manual; Cold Spring Harbor Laboratory Press: Cold Spring Harbor, (1989)). It is understood that people skilled in the art are familiar with the standard resource materials which describe specific conditions and procedures for the construction, manipulation and isolation of antibodies (see, for example, Harlow and Lane, In Antibodies: A Laboratory Manual, Cold Spring Harbor Press, Cold Spring Harbor, N.Y. (1988)).

[0061] Another aspect of the present invention relates to a method for obtaining a nucleic acid comprising a nucleotide sequence encoding a Chlorella sarokiniana protein homologue. In a preferred embodiment, the method of the present invention for obtaining a nucleic acid encoding all or a substantial portion of the amino acid sequence of a Chlorella sarokiniana protein comprising: (a) probing a cDNA or genomic library with a hybridization probe comprising all or a portion of a nucleotide sequence selected from the group consisting of SEQ ID NO: 1 through SEQ ID NO:9395; (b) identifying a DNA clone that hybridizes with the hybridization probe; (c) isolating the DNA clone identified in step (b); and (d) sequencing the cDNA or genomic fragment that comprises the clone isolated in step (c) wherein the sequenced nucleic acid molecule encodes all or a substantial portion of the amino acid sequence of the Chlorella sarokiniana protein homologue.

[0062] In another preferred embodiment, the method of the present invention for obtaining a nucleic acid fragment encoding a substantial portion of the amino acid sequence of a Chlorella sarokiniana protein homologue comprising: (a) synthesizing a first and a second oligonucleotide primers corresponding to a portion of one of the sequences set forth in SEQ ID NO: 1 through SEQ ID NO: 9395; and (b) amplifying a cDNA insert present in a cloning vector using the first and second oligonucleotide primers of step (a) wherein the amplified nucleic acid molecule encodes all or a substantial portion of the amino acid sequence of the Chlorella sarokiniana protein homologue.

[0063] (b) Protein and Peptide Molecules

[0064] A class of agents comprises one or more of the substantially purified protein or peptide molecules encoded by SEQ ID NO: 1 through SEQ ID NO:9395 or one or more of the protein or fragment thereof or peptide molecules encoded by other nucleic acid agents of the present invention. Protein and peptide molecules can be identified using known protein or peptide molecules as a target sequence or target motif in the BLAST programs of the present invention. In a preferred embodiment the protein or fragment molecules of the present invention are derived from Chlorella sarokiniana.

[0065] The term “substantially purified protein or peptide molecule”, as used herein, refers to a protein or peptide molecule separated from substantially all other molecules normally associated. with it in its native state. More preferably a substantially purified molecule is the predominant species present in a preparation. A substantially purified molecule may be greater than 60% free, preferably 75% free, more preferably 90% free, and most preferably 95% free from the other molecules (exclusive of solvent) present in the natural mixture.

[0066] The term “polypeptide”, “peptide”, or “protein”, as used herein, refers to a polymer composed of amino acids connected by peptide bonds. The term applies to any amino acid polymers in which one or more amino acid residue is an artificial chemical analogue of a corresponding naturally occurring amino acid, as well as to any naturally occurring amino acid polymers. The essential nature of such analogues of naturally occurring amino acids is that, when incorporated into a protein, that protein is specifically reactive to antibodies elicited to the same protein but consisting entirely of naturally occurring amino acids. It is well known in the art that proteins or polypeptides may undergo modification, including but not limited to, disulfide bond formation, gamma-carboxylation of glutamic acid residues, glycosylation, lipid attachment, phosphorylation, oligomerization, hydroxylation and ADP-ribosylation. Exemplary modifications are described in most basic texts, such as, for example, Proteins—Structure and Molecular Properties, 2nd ed., T. E. Creighton, W. H. Freeman and Company, New York (1993). Many detailed reviews are available on this subject, such as, for example, those provided by Wold, F., Post-translational Protein Modifications. Perspectives and Prospects, pp. 1-12 in Post-translational Covalent Modification of Proteins, B. C. Johnson, Ed., Academic Press, New York (1983); Seifter et al., Meth. Enzymol. 182:626-M (1990) and Rattan et al., Protein Synthesis: Post-translational Modifications and Aging, Ann. N.Y. Acad. Sci. 663:48-62 (1992). Modifications can occur anywhere in a polypeptide, including the peptide backbone, the amino acid side-chains and the amino or carboxyl termini. In fact, blockage of the amino or carboxyl group in a polypeptide, or both, by a covalent modification, is common in naturally occurring and synthetic polypeptides and such modifications may be present in polypeptides of the present invention, as well. For instance, the amino terminal residue of polypeptides made in E coli or other cells, prior to proteolytic processing, almost invariably will be N-formylmethionine. During post-translational modification of the polypeptide, a methionine residue at the NH₂ terminus may be deleted. Accordingly, this invention contemplates the use of both the methionine-containing and the methionin-less amino terminal variants of the protein of the invention. Thus, as used herein, the term “protein” or “polypeptide” includes any protein or polypeptide that is modified by any biological or non-biological process. The terms “amino acid” and “amino acids” refer to all naturally occurring amino acids and, unless otherwise limited, known analogs of natural amino acids that can function in a similar manner as naturally occurring amino acids. This definition is meant to include norleucine, omithine, homocysteine, and homoserine.

[0067] One or more of the protein or fragment of peptide molecules may be produced via chemical synthesis, or more preferably, by expressing in a suitable bacterial or eukaryotic host. Suitable methods for expression are described by Sambrook, et al., (In: Molecular Cloning, A Laboratory Manual, 2nd Edition, Cold Spring Harbor Press, Cold Spring Harbor, N.Y. (1989)), or similar texts.

[0068] A “protein fragment” is a peptide or polypeptide molecule whose amino acid sequence comprises a subset of the amino acid sequence of that protein. A protein or fragment thereof that comprises one or more additional peptide regions not derived from that protein is a “fusion” protein. Such molecules may be derivatized to contain carbohydrate or other moieties (such as keyhole limpet hemocyanin, etc.). Fusion proteins or peptide molecules of the present invention are preferably produced via recombinant means.

[0069] Another class of agents comprise protein or peptide molecules encoded by SEQ ID NO: 1 through SEQ ID NO:9395 or, fragments or fusions thereof in which non-essential, or not relevant, amino acid residues have been added, replaced, or deleted. Such a homologue can be obtained by any of a variety of methods. Most preferably, as indicated above, one or more of the disclosed sequences (e.g., SEQ ID NO: 1 through SEQ ID NO:9395 or complements thereof) will be used to define a pair of primers that may be used to isolate the homologue-encoding nucleic acid molecules from any desired species. Such molecules can be expressed to yield homologues by recombinant means.

[0070] (c) Antibodies

[0071] One aspect of the present invention concerns antibodies, single-chain antigen binding molecules, or other proteins that specifically bind to one or more of the protein or peptide molecules of the present invention and their homologues, fusions or fragments. Such antibodies may be used to quantitatively or qualitatively detect the protein or peptide molecules of the present invention. As used herein, an antibody or peptide is said to “specifically bind” to a protein or peptide molecule of the present invention if such binding is not competitively inhibited by the presence of non-related molecules. In a preferred embodiment the antibodies of the present invention bind to proteins of the present invention. In a more preferred embodiment the antibodies of the present invention bind to proteins derived from Chlorella sarokiniana.

[0072] Nucleic acid molecules that encode all or part of the protein of the present invention can be expressed, via recombinant means, to yield protein or peptides that can in turn be used to elicit antibodies that are capable of binding the expressed protein or peptide. Such antibodies may be used in immunoassays for that protein. Such protein-encoding molecules, or their fragments may be a “fusion” molecule (i.e., a part of a larger nucleic acid molecule) such that, upon expression, a fusion protein is produced. It is understood that any of the nucleic acid molecules of the present invention may be expressed, via recombinant means, to yield proteins or peptides encoded by these nucleic acid molecules.

[0073] The antibodies that specifically bind proteins and protein fragments of the present invention may be polyclonal or monoclonal, and may comprise intact immunoglobulins, or antigen binding portions of immunoglobulins (such as (F(ab′), F(ab′)₂) fragments, or single-chain immunoglobulins producible, for example, via recombinant means). It is understood that practitioners are familiar with the standard resource materials which describe specific conditions and procedures for the construction, manipulation and isolation of antibodies (see, for example, Harlow and Lane, In Antibodies: A Laboratory Manual, Cold Spring Harbor Press, Cold Spring Harbor, N.Y. (1988)).

[0074] As discussed below, such antibody molecules or their fragments may be used for diagnostic purposes. Where the antibodies are intended for diagnostic purposes, it may be desirable to derivatize them, for example with a ligand group (such as biotin) or a detectable marker group (such as a fluorescent group, a radioisotope or an enzyme).

[0075] The ability to produce antibodies that bind the protein or peptide molecules of the present invention permits the identification of mimetic compounds of those molecules. A “mimetic compound” is a compound that is not that compound, or a fragment of that compound, but which nonetheless exhibits an ability to specifically bind to antibodies directed against that compound.

[0076] It is understood that any of the agents of the present invention can be substantially purified and/or be biologically active and/or recombinant.

[0077] (d) Plant Constructs and Plant Transformants

[0078] The present invention also relates to a plant recombinant vector or construct comprising a structural nucleotide sequence encoding a C. sarokiniana protein or fragment thereof. The present invention also relates to a transformed plant cell or plant comprising in its genome an exogenous nucleic acid molecule encoding one or more C. sarokiniana proteins or fragments thereof. The present invention also relates to methods for creating a transgenic plant in which one or more C. sarokiniana proteins or fragments thereof are overexpressed.

[0079] By “exogenous” it is meant that a nucleic acid originates from outside a species into which the nucleic acid is introduced. An exogenous nucleic acid molecule can have a naturally occurring or non-naturally occurring nucleotide sequence. One skilled in the art understands that an exogenous nucleic acid molecule can be a heterologous nucleic acid derived from a different species than the species into which the nucleic acid is introduced or can be a nucleic acid derived from the same species as the species into which the nucleic acid is introduced.

[0080] The term “overexpression” refers to the expression of a polypeptide or protein encoded by an exogenous nucleic acid introduced into a host cell, wherein said polypeptide or protein is either not normally present in the-host cell, or wherein said polypeptide or protein thereof is present in said host cell at a higher level than that normally expressed from the endogenous gene encoding said polypeptide or protein. By “endogenous gene” refers to a native gene in its natural location in the genome of an organism.

[0081] The term “genome” as it applies to plant cells encompasses not only chromosomal DNA found within the nucleus, but organelle DNA found within subcellular components of the cell. DNAs of the present invention introduced into plant cells can therefore be either chromosomally integrated or organelle-localized. The term “genome” as it applies to bacteria encompasses both the chromosome and plasmids within a bacterial host cell. Encoding DNAs of the present invention introduced into bacterial host cells can therefore be either chromosomally integrated or plasmid-localized.

[0082] Method which are well known to those skilled in the art may be used to construct the plant recombinant construct or vector of the present invention. These method include in vitro recombinant DNA techniques, synthetic techniques, and in vivo genetic recombination. Such techniques are described in Sambrook et al., Molecular Cloning, A Laboratory Manual, Cold Spring Harbor Press, Plainview, N.Y. (1989); and Ausubel et al., Current Protocols in Molecular Biology, John Wiley & Sons, New York, N.Y. (1989).

[0083] A plant recombinant construct or vector of the present invention contains a structural nucleotide sequence encoding one or more C. sarokiniana proteins or fragments thereof and operably linked regulatory sequences or control elements.

[0084] The term “operably linked”, as used in reference to a regulatory sequence and a structural nucleotide sequence, means that the regulatory sequence causes regulated expression of the operably linked structural nucleotide sequence. “Expression” refers to the transcription and stable accumulation of sense or antisense RNA derived from the nucleic acid of the present invention. Expression may also refer to translation of mRNA into a polypeptide or protein. “Sense” RNA refers to RNA transcript that includes the mRNA and so can be translated into protein by the cell. “Antisense RNA” refers to a RNA transcript that is complementary to all or part of a target primary transcript or mRNA and that blocks the expression of a target gene (U.S. Pat. No. 5,107,065, incorporated herein by reference). The complementarity of an antisense RNA may be with any part of the specific gene transcript, i.e., at the 5′ non-coding sequence, 3′ non-translated sequence, a introns, or the coding sequence. “RNA transcript” refers to the product resulting from RNA polymerase-catalyzed transcription of a DNA sequence. When the RNA transcript is a perfect complementary copy of the DNA sequence, it is referred to as the primary transcript or it may be a RNA sequence derived from post-transcriptional processing of the primary transcript and is referred to as the mature RNA.

[0085] “Regulatory sequences” or “control elements” refer to nucleotide sequences located upstream (5′ noncoding sequences), within, or downstream (3′ non-translated sequences) of a structural nucleotide sequence, and which influence the transcription, RNA processing or stability, or translation of the associated structural nucleotide sequence. Regulatory sequences may include promoters, translation leader sequences, introns, and polyadenylation recognition sequences.

[0086] The promoter sequence may consist of proximal and more distal upstream elements, the latter elements often referred to as enhancers. Accordingly, an “enhancer” is a DNA sequence which can stimulate promoter activity and may be an innate element of the promoter or a heterologous element inserted to enhance the level or tissue-specificity of a promoter. Promoters may be derived in their entirety from a native gene, or be composed of different elements derived from different promoters found in nature, or even comprise synthetic DNA segments. It is understood by those skilled in the art that different promoters may direct the expression of a gene in different tissues or cell types, or at different stages of development, or in response to different environmental conditions.

[0087] Promoters which are known or are found to cause transcription of DNA in plant cells can be used in the present invention. Such promoters may be obtained from a variety of sources such as plants and plant viruses. A number of promoters, including constitutive promoters, inducible promoters and tissue-specific promoters, that are active in plant cells have been described in the literature. It is preferred that the particular promoter selected should be capable of causing sufficient expression to result in the production of an effective amount of a protein to cause the desired phenotype. In addition to promoters that are known to cause transcription of DNA in plant cells, other promoters may be identified for use in the current invention by screening a plant cDNA library for genes that are selectively or preferably expressed in the target tissues and then determine the promoter regions.

[0088] The term “constitutive promoter” means a regulatory sequence which causes expression of a structural nucleotide sequence in most cells or tissues at most times. Constitutive promoters are active under most environmental conditions and states of development or cell differentiation. A variety of constitutive promoters are well known in the art. Examples of constitutive promoters that are active in plant cells include but are not limited to the nopaline synthase (NOS) promoters; the cauliflower mosaic virus (CaMV) 19S and 35S; the tobacco mosaic virus promoter; the figwort mosaic virus promoters; and actin promoters, such as the Arabidopsis actin gene promoter (see, e.g., Huang, Plant Mol. Biol. 33:125-139 (1997)).

[0089] The term “inducible promoter” refers to a regulatory sequence which causes conditional expression of a structural nucleotide sequence under the influence of changing environmental conditions or developmental conditions. Examples of inducible promoters include but are not limited to the light-inducible promoter from the small subunit of ribulose-1,5-bis-phosphate carboxylase (ssRUBISCO); the drought-inducible promoter of maize (Busk, Plant J. 11: 1285-1295 (1997)); the cold, drought, and high salt inducible promoter from potato (Kirch, Plant Mol. Biol. 33:897-909 (1997)); a nitrate-inducible promoter derived from the spinach nitrite reductase gene (Back et al., Plant Mol. Biol. 17:9 (1991)); salicylic acid inducible promoter (Uknes et al., Plant Cell 5:159-169 (1993); Bi et al., Plant J. 8:235-245 (1995)); the auxin-response elements E1 promoter fragment (AuxREs) in the soybean (Glycine max L.) (Liu, Plant Physiol. 115 :397-407 (1997)); the auxin-responsive Arabidopsis GST6 promoter (also responsive to salicylic acid and hydrogen peroxide) (Chen, Plant J. 10: 955-966 (1996)); the auxin-inducible parC promoter from tobacco (Sakai, 37:906-913 (1996)); a plant biotin response element (Streit, Mol. Plant Microbe Interact. 10:933-937 (1997)); the promoter responsive to the stress hormone abscisic acid (Sheen, Science 274:1900-1902 (1996)); the maize In2-2 promoter activated by benzenesulfonamide herbicide safeners (De Veylder, Plant Cell Physiol. 38:568-577 (1997)); a tetracycline-inducible promoter, such as the promoter for the Avena sativa L. (oat) arginine decarboxylase gene (Masgrau, Plant J. 11:465-473 (1997)); and a salicylic acid-responsive element (Stange, Plant J. 11: 1315-1324 (1997)).

[0090] The term “tissue-specific promoter” means a regulatory sequence that causes transcriptions or enhanced transcriptions of DNA in specific cells or tissues at specific times during plant development, such as in vegetative tissues or reproductive tissues. Examples of tissue-specific promoters under developmental control include promoters that initiate transcription only (or primarily only) in certain tissues, such as vegetative tissues, e.g., roots, leaves or stems, or reproductive tissues, such as fruit, ovules, seeds, pollen, pistols, flowers, or any embryonic tissue. Reproductive tissue specific promoters may be, e.g., ovule-specific, embryo-specific, endosperm-specific, integument-specific, seed coat-specific, pollen-specific, petal-specific, sepal-specific, or some combination thereof. One of skill will recognize that a tissue-specific promoter may drive expression of operably linked sequences in tissues other than the target tissue. Thus, as used herein a tissue-specific promoter is one that drives expression preferentially in the target tissue, but may also lead to some expression in other tissues as well.

[0091] A variety of promoters specifically active in vegetative tissues, such as leaves, stems, roots and tubers, can also be used to express the nucleic acids of the invention. Examples of tuber-specific promoters include but are not limited to the class I and II patatin promoters (Bevan et al., EMBO J. 8: 1899-1906 (1986); Koster-Topfer et al., Mol Gen Genet. 219: 390-396 (1989); Mignery et al., Gene. 62: 27-44 (1988); Jefferson et al., Plant Mol. Biol. 14: 995-1006 (1990)), the promoter for the potato tuber ADPGPP genes, both the large and small subunits; the sucrose synthase promoter (Salanoubat and Belliard, Gene. 60: 47-56 (1987), Salanoubat and Belliard, Gene. 84: 181-185 (1989)); and the promoter for the major tuber proteins including the 22 kd protein complexes and proteinase inhibitors (Hannapel, Plant Physiol. 101: 703-704 (1993)). Examples of leaf-specific promoters include but are not limited to the ribulose biphosphate carboxylase (RBCS or RuBISCO) promoters (see, e.g., Matsuoka, Plant J. 6:311-319 (1994)); the light harvesting chlorophyll a/b binding protein gene promoter (see, e.g., Shiina, Plant Physiol. 115-.477-483 (1997); Casal, Plant Physiol. 116:1533-1538 (1998)); and the Arabidopsis thaliana myb-related gene promoter (Atmyb5) (Li, FEBS Lett. 379:117-121 (1996)). Examples of root-specific promoter include but are not limited to the promoter for the acid chitinase gene (Samac et al., Plant Mol. Biol. 25: 587-596 (1994)); the root specific subdomains of the CaMV35S promoter that have been identified (Lam et al., Proc. Natl. Acad. Sci. (U.S.A.) 86:7890-7894 (1989)); the ORF1 3 promoter from Agrobacterium rhizogenes which exhibits high activity in roots (Hansen, Mol. Gen. Genet. 254:337-343 (1997)); the promoter for the tobacco root-specific gene TobRB7 (Yamamoto, Plant Cell 3:371-382 (1991)); and the root cell specific promoters reported by Conkling et al. (Conkling et al., Plant Physiol. 93:1203-1211 (1990)).

[0092] Another class of useful vegetative tissue-specific promoters are meristematic (root tip and shoot apex) promoters. For example, the “SHOOTMERISTEMLESS” and “SCARECROW” promoters, which are active in the developing shoot or root apical meristems (Di Laurenzio, Cell 86:423-433 (1996); Long, Nature 379:66-69 (1996)), can be used. Another example of a useful promoter is that which controls the expression of 3-hydroxy-3-methylglutaryl coenzyme A reductase HMG2 gene, whose expression is restricted to meristematic and floral (secretory zone of the stigma, mature pollen grains, gynoecium vascular tissue, and fertilized ovules) tissues (see, e.g., Enjuto, Plant Cell. 7:517-527 (1995)). Also another example of a useful promoter is that which controls the expression of knl-related genes from maize and other species which show meristem-specific expression (see, e.g., Granger, Plant Mol. Biol. 31:373-378 (1996); Kerstetter, Plant Cell 6:1877-1887 (1994); Hake, Philos. Trans. R. Soc. Lond. B. Biol. Sci. 350:45-51 (1995). Another example of a meristematic promoter is the Arabidopsis thaliana KNAT1 promoter. In the shoot apex, KNAT1 transcript is localized primarily to the shoot apical meristem; the expression of KNATI in the shoot meristem decreases during the floral transition and is restricted to the cortex of the inflorescence stem (see, e.g., Lincoln, Plant Cell 6:1859-1876 (1994)).

[0093] Suitable seed-specific promoters can be derived from the following genes: MAC1 from maize (Sheridan, Genetics 142:1009-1020 (1996); Cat3 from maize (GenBank No. L05934, Abler, Plant Mol. Biol. 22:10131-1038 (1993); vivparous-1 from Arabidopsis (GenBank No. U93215); Atimycl from Arabidopsis (Urao, Plant Mol. Biol. 32:571-57 (1996); Conceicao, Plant 5:493-505 (1994); napA from Brassica napus (GenBank No. J02798); the napin gene family from Brassica napus (Sjodahl, Planta 197:264-271 (1995)).

[0094] The ovule-specific BEL1 gene described in Reiser (1995) Cell 83:735-742, GenBank No. U39944, can also be used. See also Ray (1994) Proc. Natl. Acad. Sci. USA 91:5761-5765. The egg and central cell specific FIEEI promoter is also a useful reproductive tissue-specific promoter.

[0095] A maize pollen-specific promoter has been identified in maize (Guerrero (1990) Mol. Gen. Genet. 224:161-168). Other genes specifically expressed in pollen are described, e.g., by Wakeley (1998) Plant Mol. Biol. 37:187-192; Ficker (1998) Mol. Gen. Genet. 257:132-142; Kulikauskas (1997) Plant Mol. B 34:809-814; Treacy (1997) Plant Mol. Biol. 34:603-611.

[0096] Promoters derived from genes encoding embryonic storage proteins, which includes the gene encoding the 2S storage protein from Brassica napus (Dasgupta, Gene 133:301-302 (1993); the 2s seed storage protein gene family from Arabidopsis; the gene encoding oleosin 2OkD from Brassica napus (GenBank No. M63985); the genes encoding oleosin A (GenBank No. U09118) and oleosin B (GenBank No. U09119) from soybean; the gene encoding oleosin from Arabidopsis (GenBank No. Z 17657); the gene encoding oleosin 18 kD from maize (GenBank No. J05212, Lee, Plant Mol. Biol. 26:1981-1987 (1994)); and the gene encoding low molecular weight sulphur rich protein from soybean (Choi, Mol Gen, Genet. 246:266-268 (1995)), can also be used.

[0097] Promoters derived from genes encoding for zein genes (including the 15 kD, 16 kD, 19 kD, 22 kD, 27 kD, and-gamma genes) (Pedersen et al., Cell 29: 1015-1026 (1982)) can be also used. The zeins are a group of storage proteins found in maize endosperm.

[0098] Other promoters known to function, for example, in maize, include the promoters for the following genes: waxy, Brittle, Shrunken 2, Branching enzymes I and II, starch synthases, debranching enzymes, oleosins, glutelins, and sucrose synthases. A particularly preferred promoter for maize endosperm expression is the promoter for the glutelin gene from rice, more particularly the Osgt-I promoter (Zheng et al., Mol. Cell Biol. 13: 5829-5842 (1993), herein incorporated by reference in its entirety). Examples of promoters suitable for expression in wheat include those promoters for the ADPglucose pyrophosphorylase (ADPGPP) subunits, the granule bound and other starch synthases, the branching and debranching enzymes, the embryogenesis-abundant proteins, the gliadins, and the glutenins. Examples of such promoters in rice include those promoters for the ADPGPP subunits, the granule bound and other starch synthases, the branching enzymes, the debranching enzymes, sucrose synthases, and the glutelins. A particularly preferred promoter is the promoter for rice glutelin, Osgt-1. Examples of such promoters for barley include those for the ADPGPP subunits, the granule bound and other starch synthases, the branching enzymes, the debranching enzymes, sucrose synthases, the hordeins, the embryo globulins, and the aleurone specific proteins.

[0099] A tomato promoter active during fruit ripening, senescence and abscission of leaves and, to a lesser extent, of flowers can be used (Blume, Plant J. 12:731-746 (1997)). Other exemplary promoters include the pistol specific promoter in the potato (Solarium tuberosum L.) SK2 gene, encoding a pistil-specific basic endochitinase (Ficker, Plant Mol. Biol. 35:425-431 (1997)); the Blec4 gene from pea (Pisum sativum cv. Alaska), active in epidermal tissue of vegetative and floral shoot apices of transgenic alfalfa. This makes it a useful tool to target the expression of foreign genes to the epidermal layer of actively growing shoots. The tissue specific E8 promoter from tomato is also useful for directing gene expression in fruits.

[0100] It is recognized that additional promoters that may be utilized are described, for example, in U.S. Pat. Nos. 5,378,619, 5,391,725, 5,428,147, 5,447,858, 5,608,144, 5,608,144, 5,614,399, 5,633,441, 5,633,435, and 4,633,436, all of which are herein incorporated in their entirety. In addition, a tissue specific enhancer may be used (Fromm et al., The Plant Cell 1:977-984 (1989), herein incorporated by reference in its entirety). It is further recognized that since in most cases the exact boundaries of regulatory sequences have not been completely defined, DNA fragments of different lengths may have identical promoter activity.

[0101] The “translation leader sequence” refers to a DNA sequence located between the promoter sequence of a gene and the coding sequence. The translation leader sequence is present in the fully processed mRNA upstream of the translation start sequence. The translation leader sequence may affect processing of the primary transcript to mRNA, mRNA stability or translation efficiency. Examples of translation leader sequences have been described (Turner, R. and Foster, G. D. (1995) Molecular Biotechnology 3:225).

[0102] The “3′ non-translated sequences” refer to DNA sequences located downstream of a structural nucleotide sequence and include sequences encoding polyadenylation and other regulatory signals capable of affecting mRNA processing or gene expression. The polyadenylation signal functions in plants to cause the addition of polyadenylate nucleotides to the 3′ end of the mRNA precursor. The polyadenylation sequence can be derived from the natural gene, from a variety of plant genes, or from T-DNA. An example of the polyadenylation sequence is the nopaline synthase 3′ sequence (NOS 3′; Fraley et al., Proc. Natl. Acad. Sci. USA 80: 4803-4807 (1983)). The use of different 3′ non-translated sequences is exemplified by Ingelbrecht et al., Plant Cell 1:671-680 (1989).

[0103] Generally, optimal expression in monocotyledonous and some dicotyledonous plants is obtained when an intron sequence is inserted between the promoter sequence and the structural gene sequence or, optionally, may be inserted in the structural coding sequence to provide an interrupted coding sequence. An example of such an intron sequence is the HSP 70 intron described in WO 93/19189.

[0104] A recombinant vector or construct of the present invention will typically comprise a selectable marker which confers a selectable phenotype on plant cells. Selectable markers may also be used to select for plants or plant cells that contain the exogenous nucleic acids encoding polypeptides or proteins of the present invention. The marker may encode biocide resistance, antibiotic resistance (e.g., kanamycin, G418 bleomycin, hygromycin, etc.), or herbicide resistance (e.g., glyphosate, etc.). Examples of selectable markers include, but are not limited to, a neo gene (Potrykus et al., Mol. Gen. Genet. 199: 183-188 (1985)) which codes for kanamycin resistance and can be selected for using kanamycin, G418, etc.; a bar gene which codes for bialaphos resistance; a mutant EPSP synthase gene (Hinchee et al., Bio/Technology 6:915-922 (1988)) which encodes glyphosate resistance; a nitrilase gene which confers resistance to bromoxynil (Stalker et al., J. Biol. Chem. 263:6310-6314 (1988)); a mutant acetolactate synthase gene (ALS) which confers imidazolinone or sulphonylurea resistance (European Patent Application 154,204 (Sep. 11, 1985)); and a methotrexate resistant DHFR gene (Thillet et al., J. Biol. Chem. 263:12500-12508 (1988)).

[0105] A recombinant vector or construct of the present invention may also include a screenable marker.

[0106] Screenable markers may be used to monitor expression. Exemplary screenable markers include β-glucuronidase or uidA gene (GUS) which encodes an enzyme for which various chromogenic substrates are known (Jefferson, Plant Mol. Biol, Rep. 5:387-405 (1987); Jefferson et al., EMBO J. 6:3901-3907 (1987)); an R-locus gene, which encodes a product that regulates the production of anthocyanin pigments (red color) in plant tissues (Dellaporta et al., Stadler Symposium 11:263-282 (1988)); a β-lactamase gene (Sutcliffe et al., Proc. Natl. Acad. Sci. (U.S.A.) 75:3737-3741 (1978)), a gene which encodes an enzyme for which various chromogenic substrates are known (e.g., PADAC, a chromogenic cephalosporin); a luciferase gene (Ow et al., Science 234:856-859 (1986)) a xylE gene (Zukowsky et al., Proc. Natl. Acad. Sci. (USA.) 80:1101-1105 (1983)) which encodes a catechol dioxygenase that can convert chromogenic catechols; an α-amylase gene (Ikatu et al., Bio/Technol. 8:241-242 (1990)); a tyrosinase gene (Katz et al., J. Gen. Microbiol. 129:2703-2714 (1983)) which encodes an enzyme capable of oxidizing tyrosine to DOPA and dopaquinone which in turn condenses to melanin; an a-galactosidase, which will turn a chromogenic α-galactose substrate.

[0107] Included within the terms “selectable or screenable marker genes” are also genes which encode a secretable marker whose secretion can be detected as a means of identifying or selecting for transformed cells. Examples include markers which encode a secretable antigen that can be identified by antibody interaction, or even secretable enzymes which can be detected catalytically. Secretable proteins fall into a number of classes, including small, diffusible proteins detectable, e.g., by ELISA, small active enzymes detectable in extracellular solution (e.g., α-amylase, β-lactamase, phosphinothricin transferase), or proteins which are inserted or trapped in the cell wall (such as proteins which include a leader sequence such as that found in the expression unit of extension or tobacco PR-S). Other possible selectable and/or screenable marker genes will be apparent to those of skill in the art.

[0108] In addition to a selectable marker, it may be desirous to use a reporter gene. In some instances a p reporter gene may be used with or without a selectable marker. Reporter genes are genes which are typically not present in the recipient organism or tissue and typically encode for proteins resulting in some phenotypic change or enzymatic property. Examples of such genes are provided in K. Wising et al. Ann. Rev. Genetics, 22, 421 (1988), which is incorporated herein by reference. Preferred reporter genes include the beta-glucuronidase (GUS) of the uidA locus of E. coli, the chloramphenicol acetyl transferase gene from Tn9 of E. coli, the green fluorescent protein from the bioluminescent jellyfish Aequorea victoria, and the luciferase genes from firefly Photinus pyralis. An assay for detecting reporter gene expression may then be performed at a suitable time after said gene has been introduced into recipient cells. A preferred such assay entails the use of the gene encoding beta-glucuronidase (GUS) of the uidA locus of E. coli as described by Jefferson et al., (1987 Biochem. Soc. Trans. 15, 17-19) to identify transformed cells.

[0109] In preparing the DNA constructs of the present invention, the various components of the construct or fragments thereof will normally be inserted into a convenient cloning vector, e.g., a plasmid that is capable of replication in a bacterial host, e.g., E. coli. Numerous vectors exist that have been described in the literature, many of which are commercially available. After each cloning, the cloning vector with the desired insert may be isolated and subjected to further manipulation, such as restriction digestion, insertion of new fragments or. nucleotides, ligation, deletion, mutation, resection, etc. so as to tailor the components of the desired sequence. Once the construct has been completed, it may then be transferred to an appropriate vector for further manipulation in accordance with the manner of transformation of the host cell.

[0110] A recombinant vector or construct of the present invention may also include a chloroplast transit peptide, in order to target the polypeptide or protein of the present invention to the plastid. The term “plastid” refers to the class of plant cell organelles that includes amyloplasts, chloroplasts, chromoplasts, elaioplasts, eoplasts, etioplasts, leucoplasts, and proplastids. These organelles are self-replicating, and contain what is commonly referred to as the “chloroplast genome,” a circular DNA molecule that ranges in size from about 120 to about 217 kb, depending upon the plant species, and which usually contains an inverted repeat region. Many plastid-localized proteins are expressed from nuclear genes as precursors and are targeted to the plastid by a chloroplast transit peptide (CTP), which is removed during the import steps. Examples of such chloroplast proteins include the small subunit of ribulose-1,5-biphosphate carboxylase (ssRUBISCO, SSU), 5-enolpyruvateshikimate-3-phosphate synthase (EPSPS), ferredoxin, ferredoxin oxidoreductase, the light-harvesting-complex protein I and protein II, and thioredoxin F. It has been demonstrated that non-plastid proteins may be targeted to the chloroplast by use of protein fusions with a CTP and that a CTP sequence is sufficient to target a protein to the plastid. Those skilled in the art will also recognize that various other chimeric constructs can be made that utilize the functionality of a particular plastid transit peptide to import the enzyme into the plant cell plastid depending on the promoter tissue specificity.

[0111] The present invention also provide a transgenic plant comprising in its genome an exogenous nucleic acid which comprises: (A) a 5′ non-coding sequence which functions in the cell to cause the production of a mRNA molecule; which is operably linked to (B) a structural nucleotide sequence, wherein the structural nucleotide sequence encodes a C. sarokiniana proteins or fragments thereof; which is operably linked to (C) a 3′ non-translated sequence that functions in said cell to cause termination of transcription.

[0112] The term “transgenic plant” refers to a plant that contains an exogenous nucleic acid, which can be derived from the same plant species or from a different plant species. Transgenic plants are also meant to comprise progeny (decendant, offspring, etc.) of any generation of such a transgenic plant. A seed of any generation of all such transgenic plants wherein said seed comprises a DNA sequence encoding the protein or fragment thereof of the present invention is also an important aspect of the invention.

[0113] The DNA constructs of the present invention may be introduced into the genome of a desired plant host by a variety of conventional transformation techniques, which are well known to those skilled in the art. Preferred methods of transformation of plant cells or tissues are the Agrobacterium mediated transformation method and the biolistics or particle-gun mediated transformation method. Suitable plant transformation vectors for the purpose of Agrobacterium mediated transformation include those derived from a Ti plasmid of Agrobacterium tumefaciens, as-well as those disclosed, e.g., by Herrera-Estrella et al., Nature 303:209 (1983); Bevan, Nucleic Acids Res. 12: 8711-8721 (1984); Klee et al., Bio-Technology 3(7): 637-642 (1985); and EPO publication 120,516. In addition to plant transformation vectors derived from the Ti or root-inducing (Ri) plasmids of Agrobacterium, alternative methods can be used to insert the DNA constructs of this invention into plant cells. Such methods may involve, but are not limited to, for example, the use of liposomes, electroporation, chemicals that increase free DNA uptake, free DNA delivery via microprojectile bombardment, and transformation using viruses or pollen.

[0114] A plasmid expression vector suitable for the introduction of a nucleic acid encoding a polypeptide or protein of the present invention in monocots using electroporation or particle-gun mediated transformation is composed of the following: a promoter that is constitutive or tissue-specific; an intron that provides a splice site to facilitate expression of the gene, such as the Hsp70 intron (PCT Publication WO93/19189); and a 3′ polyadenylation sequence such as the nopaline synthase 3′ sequence (NOS 3′; Fraley et al., Proc. Natl. Acad. Sci. USA 80: 4803-4807(1983)). This expression cassette may be assembled on high copy replicons suitable for the production of large quantities of DNA.

[0115] An example of a useful Ti plasmid cassette vector for plant transformation is pMON 17227. This vector is described in PCT Publication WO 92/04449 and contains a gene encoding an enzyme conferring glyphosate resistance (denominated CP4), which is an excellent selection marker gene for many plants. The gene is fused to the Arabidopsis EPSPS chloroplast transit peptide (CTP2) and expressed from the FMV promoter as described therein.

[0116] When adequate numbers of cells (or protoplasts) containing the exogenous nucleic acid encoding a polypeptide or protein of the present invention are obtained, the cells (or protoplasts) are regenerated into whole plants. Choice of methodology for the regeneration step is not critical, with suitable protocols being available for hosts from Leguminosae (alfalfa, soybean, clover, etc.), Umbelliferae (carrot, celery, parsnip), Cruciferae (cabbage, radish, canola/rapeseed, etc.), Cucurbitaceae (melons and cucumber), Gramineae (wheat, barley, rice, maize, etc.), Solanaceae (potato, tobacco, tomato, peppers), various floral crops, such as sunflower, and nut-bearing trees, such as almonds, cashews, walnuts, and pecans. See, for example, Ammirato et al., Handbook of Plant Cell Culture -Crop Species. Macmillan Publ. Co. (1984); Shimamoto et al., Nature 338:274-276 (1989); Fromm, UCLA Symposium on Molecular Strategies for Crop Improvement, Apr. 16-22, 1990. Keystone, Colo. (1990); Vasil et al., Bio/Technology 8:429-434 (1990); Vasil et al., Bio/Technology 10:667-674 (1992); Hayashimoto, Plant Physiol. 93:857-863 (1990); and Datta et al., Bio-technology 8:736-740 (1990). Regeneration can also be obtained from plant callus, explants, organs, or parts thereof. Such regenration techniques are described generally in Klee et al., Ann. Rev. Plant Phys. 38:467-486 (1987).

[0117] A transgenic plant formed using Agrobacterium transformation methods typically contains a single exogenous gene on one chromosome. Such transgenic plants can be referred to as being heterozygous for the added exogenous gene. More preferred is a transgenic plant that is homozygous for the added exogenous gene; i.e., a transgenic plant that contains two added exogenous genes, one gene at the same locus on each chromosome of a chromosome pair. A homozygous transgenic plant can be obtained by sexually mating (selfing) an independent segregant transgenic plant that contains a single exogenous gene, germinating some of the seed produced and analyzing the resulting plants produced for the exogenous gene of interest.

[0118] The development or regeneration of transgenic plants containing the exogenous nucleic acid that encodes a polypeptide or protein of interest is well known in the art. Preferably, the regenerated plants are self-pollinated to provide homozygous transgenic plants, as discussed above. Otherwise, pollen obtained from the regenerated plants is crossed to seed-grown plants of agronomically important lines. Conversely, pollen from plants of these important lines is used to pollinate regenerated plants. A transgenic plant of the present invention containing a desired polypeptide or protein of the present invention is cultivated using methods well known to one skilled in the art.

[0119] Transgenic plants, that can be generated by practice of the present invention, include but are not limited to Acacia, alfalfa, aneth, apple, apricot, artichoke, arugula, asparagus, avocado, banana, barley, beans, beet, blackberry, blueberry, broccoli, brussels sprouts, cabbage, canola, cantaloupe, carrot, cassava, cauliflower, celery, cherry, cilantro, citrus, clementines, coffee, corn, cotton, cucumber, Douglas fir, eggplant, endive, escarole, eucalyptus, fennel, figs, gourd, grape, grapefruit, honey dew, jicama, kiwifruit, lettuce, leeks, lemon, lime, Loblolly pine, mango, melon, mushroom, nut, oat, okra, onion, orange, an ornamental plant, papaya, parsley, pea, peach, peanut, pear, pepper, persimmon, pine, pineapple, plantain, plum, pomegranate, poplar, potato, pumpkin, quince, radiata pine, radicchio, radish, raspberry, rice, rye, sorghum, Southern pine, soybean, spinach, squash, strawberry, sugarbeet, sugarcane, sunflower, sweet potato, sweetgum, tangerine, tea, tobacco, tomato, turf, a vine, watermelon, wheat, yams, and zucchini.

[0120] The present invention also provides parts of the transgenic plants of present invention. Plant parts, without limitation, include seed, endosperm, ovule and pollen. In a particularly preferred embodiment of the present invention, the plant part is a seed.

[0121] The present invention also further provides method for generating a transgenic plant comprising the steps of: a) introducing into the genome of the plant an exogenous nucleic acid, wherein the exogenous nucleic acid comprises in the 5′ to 3′ direction i) a promoter that functions in the cells of said plant, said promoter operably linked to; ii) a structural nucleic acid sequence encoding a C. sarokiniana protein or fragment thereof, said structural nucleic acid sequence operably linked to; iii) a 3′ non-translated nucleic acid sequence that functions in said cells of said plant to cause transcriptional termination; b) obtaining transformed plant cells containing the nucleic acid sequence of step (a); and c) regenerating from said transformed plant cells a transformed plant in which said polypeptide or protein is overexpressed.

[0122] Any of the isolated nucleic acid molecules of the present invention may be introduced into a plant cell in a permanent or transient manner in combination with other genetic elements such as vectors, promoters, enhancers etc. Further any of the nucleic acid molecules encoding a C. sarokiniana protein or fragment thereof may be introduced into a plant cell in a manner that allows for over expression of the protein or polypeptide encoded by the nucleic acid molecule.

[0123] Antibodies have been expressed in plants (Hiatt et al, Nature 342:76-78 (1989); Conrad and Fielder, Plant Mol Biol. 26:1023-1030 (1994)). Cytoplasmic expression of a scFv (single-chain Fv antibodies) has been reported to delay infection by artichoke mottled crinkle virus. Transgenic plants that express antibodies directed against endogenous proteins may exhibit a physiological effect (Philips et al, EMBO J. 16:4489-4496 (1997); Marion-Poll, Trends in Plant Science 2:447-448 (1997)). For example, expressed anti-abscisic antibodies reportedly result in a general perturbation of seed development (Philips et al, EMBO J. 16:4489-4496 (1997)).

[0124] Antibodies that are catalytic may also be expressed in plants (abzymes). The principle behind 3 abzymes is that since antibodies may be raised against many molecules, this recognition ability can be directed toward generating antibodies that bind transition states to force a chemical reaction forward (Persidas, Nature Biotechnology 15:1313-1315 (1997); Baca et al, Ann. Rev. Biophys. Biomol. Struct. 26:461-493 (1997)). The catalytic abilities of abzymes may be enhanced by site directed mutagenesis. Examples of abzymes are, for example, set forth in U.S. Pat. Nos: 5,658,753; 5,632,990; 5,631,137; 5,602,015; 5,559,538; 5,576,174; 5,500,358; 5,318,897; 5,298,409; 5,258,289 and 5,194,585, all of which are herein incorporated in their entirety.

[0125] It is understood that any of the antibodies of the present invention may be expressed in plants and that such expression can result in a physiological effect. It is also understood that any of the expressed antibodies may be catalytic.

[0126] (e) Algal Constructs and Algal Transformants

[0127] The present invention also relates to an algal recombinant vector comprising exogenous genetic material. The present invention also relates to an algal cell comprising an algal recombinant vector. The present invention also relates to methods for obtaining a recombinant algal host cell comprising introducing into an algal host cell exogenous genetic material.

[0128] Exogenous genetic material is any genetic material, whether naturally occurring or otherwise, from any source that is capable of being inserted into any organism. Exogenous genetic material may be transferred into an algal cell. In a preferred embodiment the exogenous genetic material includes a nucleic acid molecule having a sequence selected from the group consisting of SEQ ID NO: 1 through SEQ ID NO: 9395 or complements thereof.

[0129] The algal recombinant vector may be any vector which can be conveniently subjected to recombinant DNA procedures. The choice of a vector will typically depend on the compatibility of the vector with the algal host cell into which the vector is to be introduced. The vector may be a linear or a closed circular plasmid. The vector system may be a single vector or plasmid or two or more vectors or plasmids which together contain the total DNA to be introduced into the genome of the algal host.

[0130] The algal vector may be an autonomously replicating vector, ie., a vector which exists as an extrachromosomal entity, the replication of which is independent of chromosomal replication, e.g., a plasmid, an extrachromosomal element, a minichromosome, or an artificial chromosome. The vector may contain any means for assuring self-replication. Alternatively, the vector may be one which, when introduced into the algal cell, is integrated into the genome and replicated together with the chromosome(s) into which it has been integrated. For integration, the vector may rely on the nucleic acid sequence of the vector for stable integration of the vector into the genome by homologous or nonhomologous recombination. Alternatively, the vector may contain additional nucleic acid sequences for directing integration by homologous recombination into the genome of the algal host. The additional nucleic acid sequences enable the vector to be integrated into the host cell genome at a precise location(s) in the chromosome(s). To increase the likelihood of integration at a precise location, there should be preferably two nucleic acid sequences which individually contain a sufficient number of nucleic acids, preferably 400 bp to 1500 bp, more preferably 800 bp to 1000 bp, which are highly homologous with the corresponding target sequence to enhance the probability of homologous recombination. These nucleic acid sequences may be any sequence that is homologous with a target sequence in the genome of the algal host cell, and, furthermore, may be non-encoding-or encoding sequences.

[0131] The vectors of the present invention preferably contain one or more selectable markers which permit easy selection of transformed cells. A selectable marker is a gene, the product of which confers upon an algal cell resistance to a compound to which the algal would otherwise be sensitive. The compound can be selected from the group consisting of antibiotics, fungicides, herbicides, and heavy metals. The selectable marker may be selected from any known or subsequently identified selectable markers, including markers derived from algal, fungal, and bacterial sources. Preferred selectable markers can be selected from the group including, but not limited to, amdS (acetamidase), argB (ornithine carbamoyltransferase), bar (phosphinothricin acetyltransferase), ble (bleomycin binding protein), cat (chloramphenicol acetyltransferase), hygB (hygromycin B phosphotransferase), nat (nourseothricin acetyltransferase), niaD (nitrate reductase), neo (neomycin phosphotransferase),pac (puromycin acetyltransferase), pyrG (orotidine-5′-phosphate decarboxylase), sat (streptothricin acetyltransferase), sC (sulfate adenyltransferase), trpC (anthranilate synthase), and glyphosate resistant EPSPS genes. Furthermore, selection may be accomplished by co-transformation, e.g., as described in WO 91/17243, herein incorporated by reference in its entirety.

[0132] A nucleic acid sequence of the present invention may be operably linked to a suitable promoter sequence. The promoter sequence is a nucleic acid sequence which is recognized by the algal host cell for expression of the nucleic acid sequence. The promoter sequence contains transcription and translation control sequences which mediate the expression of the protein or fragment thereof.

[0133] A promoter may be any nucleic acid sequence which shows transcriptional activity in the algal host cell of choice and may be obtained from genes encoding polypeptides either homologous or heterologous to the host cell. Examples of suitable promoters for directing the transcription of a nucleic acid construct of the invention in an algal host are light harvesting protein promoters obtained from photosynthetic organisms, Chlorella virus methyltransferase promoters, CaMV 35 S promoter, PL promoter from bacteriophage λ, nopaline synthase promoter from the Ti plasmid of Agrobacterium tumefaciens, and bacterial trp promotor.

[0134] A protein or fragment thereof encoding nucleic acid molecule of the present invention may also be operably linked to a terminator sequence at its 3′ terminus. The terminator sequence may be native to the nucleic acid sequence encoding the protein or fragment thereof or may be obtained from foreign sources. Any terminator which is functional in the algal host cell of choice may be used in the present invention.

[0135] A protein or fragment thereof encoding nucleic acid molecule of the present invention may also be operably linked to a suitable leader sequence. A leader sequence is a nontranslated region of a mRNA which is important for translation by the algal host. The leader sequence is operably linked to the 5′ terminus of the nucleic acid sequence encoding the protein or fragment thereof. The leader sequence may be native to the nucleic acid sequence encoding the protein or fragment thereof or may be obtained from foreign sources. Any leader sequence which is functional in the algal host cell of choice may be used in the present invention.

[0136] A polyadenylation sequence may also be operably linked to the 3′ terminus of the nucleic acid sequence of the present invention. The polyadenylation sequence is a sequence which when transcribed is recognized by the algal host to add polyadenosine residues to transcribed mRNA. The polyadenylation sequence may be native to the nucleic acid sequence encoding the protein or fragment thereof or may be obtained from foreign sources. Any polyadenylation sequence which is functional in the algal host of choice may be used in the present invention.

[0137] To avoid the necessity of disrupting the cell to obtain the protein or fragment thereof, and to minimize the amount of possible degradation of the expressed protein or fragment thereof within the cell, it is preferred that expression of the protein or fragment thereof gives rise to a product secreted outside the cell. To this end, the protein or fragment thereof of the present invention may be linked to a signal peptide linked to the amino terminus of the protein or fragment thereof. A signal peptide is an amino acid sequence which permits the secretion of the protein or fragment thereof from the algal host into the culture medium. The signal peptide may be native to the protein or fragment thereof of the invention or may be obtained from foreign sources. The 5′ end of the coding sequence of the nucleic acid sequence of the present invention may inherently contain a signal peptide coding region naturally linked in translation reading frame with the segment of the coding region which encodes the secreted protein or fragment thereof. Alternatively, the 5′ end of the coding sequence may contain a signal peptide coding region which is foreign to that portion of the coding sequence which encodes the secreted protein or fragment thereof. The foreign signal peptide may be required where the coding sequence does not normally contain a signal peptide coding region. Alternatively, the foreign signal peptide may simply replace the natural signal peptide to obtain enhanced secretion of the desired protein or fragment thereof. Any signal peptide capable of permitting secretion of the protein or fragment thereof in an algal host of choice may be used in the present invention.

[0138] A protein or fragment thereof encoding nucleic acid molecule of the present invention may also be linked to a propeptide coding region. A propeptide is an amino acid sequence found at the amino terminus of aproprotein or proenzyme. Cleavage of the propeptide from the proprotein yields a mature biochemically active protein. The resulting polypeptide is known as a propolypeptide or proenzyme (or a zymogen in some cases). Propolypeptides are generally inactive and can be converted to mature active polypeptides by catalytic or autocatalytic cleavage of the propeptide from the propolypeptide or proenzyme. The propeptide coding region may be native to the protein or fragment thereof or may be obtained from foreign sources. The foreign propeptide coding region may be obtained from the Saccharomyces cerevisiae alpha-factor gene or Myceliophthora thermophila laccase gene (WO 95/33836, herein incorporated by reference in its entirety).

[0139] The procedures used to ligate the elements described above to construct the recombinant expression vector of the present invention are well known to one skilled in the art (see, for example, Sambrook, 2nd ed., et al., Molecular Cloning, A Laboratory Manual Cold Spring Harbor, N.Y., (1989), herein incorporated by reference in its entirety).

[0140] The present invention also relates to recombinant algal host cells produced by the methods of the present invention which are advantageously used with the recombinant vector of the present invention. The cell is preferably transformed with a vector comprising a. nucleic acid sequence of the invention followed by integration of the vector into the host chromosome. The choice of algal host cells will to a large extent depend upon the gene encoding the protein or fragment thereof and its source.

[0141] Algal cells may be transformed by a variety of known techniques, including but not limit to, microprojectile bombardment, protoplast fusion, electroporation, microinjection, and vigorous agitation in the presence of glass beads. Suitable procedures for transformation of green algal host cells are described in EP 108 580, herein incorporated by reference in its entirety. A suitable method of transforming Chlorella species is described by Jarvis and Brown, Curr. Genet. 19: 317-321 (1991), herein incorporated by reference in its entirety. A suitable method of transforming cells of diatom Phaeodactylum tricornutum species is described in WO 97/39106, herein incorporated by reference in its entirety. Chlorophyll C-containing algae may be transformed using the procedures described in U.S. Pat. No. 5,661,017, herein incorporated by reference in its entirety.

[0142] The expressed protein or fragment thereof may be detected using methods known in the art that are specific for the particular protein or fragment. These detection methods may include the use of specific antibodies, formation of an enzyme product, or disappearance of an enzyme substrate. For example, if the protein or fragment thereof has enzymatic activity, an enzyme assay may be used. Alternatively, if polyclonal or monoclonal antibodies specific to the protein or fragment thereof are available, immunoassays may be employed using the antibodies to the protein or fragment thereof. The techniques of enzyme assay and immunoassay are well known to those skilled in the art.

[0143] The resulting protein or fragment thereof may be recovered by methods known in the arts. For example, the protein or fragment thereof may be recovered from the nutrient medium by conventional procedures including, but not limited to, centrifugation, filtration, extraction, spray-drying, evaporation, or precipitation. The recovered protein or fragment thereof may then be further purified by a variety of chromatographic procedures, e.g., ion exchange chromatography, gel filtration chromatography, affinity chromatography, or the like.

[0144] (f) Microbial Constructs and Transformed Microbial Cells

[0145] The nucleotide sequences of the present invention may be introduced into a wide variety of prokaryotic and eukaryotic microorganism hosts to express the C. sarokiniana proteins or fragments thereof of interest. The term “microorganism” includes prokaryotic and eukaryotic microbial species such as bacteria and fungi. Fungi include yeast and filamentous fungi. Illustrative prokaryotes, both Gram-negative and Gram-positive, include Enterobacteriaceae, such as Escherichia, Erwinia, Shigella, Salmonella, and Proteus; Bacillaceae; Rhizobiceae, such as Rhizobium; Spirillaceae, such as photobacterium, Zymomonas, Serratia, Aeromonas, Vibrio, Desulfovibrio, Spirillum; Lactobacillaceae; Pseudomonadaceae, such as Pseudomonas and Acetobacter; Azotobacteraceae, Actinomycetales, and Nitrobacteraceae. Among eukaryotes are fungi, such as Phycomycetes and Ascomycetes, which includes yeast, such as Saccharomyces and Schizosaccharomyces; and Basidiomycetes yeast, such as Rhodotorula, Aureobasidium, Sporobolomyces, and the like.

[0146] It is well known that exogenous nucleic acids encoding polypeptides of interest can be introduced into a microbial host cell, such as a bacterial cell or a fungal cell, using a recombinant construct. The present invention also relates to a fungal or bacterial recombinant construct comprising a structural nucleotide sequence encoding a C. sarokiniana protein or fragment thereof. The present invention also relates to a bacterial or fungal cell comprising a bacterial or fungal recombinant vector of the present invention. The present invention also relates to methods for obtaining a recombinant bacterial or fungal host cell, comprising introducing into a bacterial or fungal host cell an exogenous nucleic acid molecule of the present invention.

[0147] The bacterial recombinant vector may be a linear or a closed circular plasmid. The vector system may be a single vector or plasmid or two or more vectors or plasmids which together contain the total DNA to be introduced into the genome of the bacterial host. In addition, the bacterial vector may be an expression by vector. Nucleic acid molecules encoding C. sarokiniana proteins or fragments thereof can, for example, be suitably inserted into a replicable vector for expression in a bacterium under the control of a suitable promoter for that bacterium. Many vectors are available for this purpose, and selection of the appropriate vector will depend mainly on the size of the nucleic acid to be inserted into the vector and the particular host cell to be transformed with the vector. Each vector contains various components depending on its function (amplification of DNA or expression of DNA) and the particular host cell with which it is compatible. The vector components for bacterial transformation generally include, but are not limited to, one or more of the following: a signal sequence, an origin of replication, one or more selectable marker genes, and an inducible promoter allowing the expression of exogenous DNA.

[0148] In general, plasmid vectors containing replicon and control sequences that are derived from species compatible with the host cell are used in connection with bacterial hosts. The vector ordinarily carries a replication site, as well as marking sequences that are capable of providing phenotypic selection in transformed cells. For example, E. coli is typically transformed using pBR322, a plasmid derived from an E. coli species (see, e.g., Bolivar et al., Gene 2:95 (1977)). pBR322 contains genes for ampicillin and tetracycline resistance and thus provides easy means for identifying transformed cells. The pBR322 plasmid, or other microbial plasmid or phage, also generally contains, or is modified to contain, promoters that can be used by the microbial organism for expression of the selectable marker genes.

[0149] Nucleic acid molecules encoding C. sarokiniana proteins or fragments thereof may be expressed not only directly, but also as a fusion with another polypeptide, preferably a signal sequence or other polypeptide having a specific cleavage site at the N-terminus of the mature polypeptide. In general, the signal sequence may be a component of the vector, or it may be a part of the polypeptide encoding DNA that is inserted into the vector. The heterologous signal sequence selected should be one that is recognized and processed (i.e., cleaved by a signal peptidase) by the host cell. For bacterial host cells that do not recognize and process the native polypeptide signal sequence, the signal sequence is substituted by a bacterial signal sequence selected, for example, from the group consisting of the alkaline phosphatase, β-lactamase, , or heat-stable enterotoxin II leaders and the like.

[0150] Both expression and cloning vectors contain a nucleotide sequence that enables the vector to replicate in one or more selected host cells. Generally, in cloning vectors this sequence is one that enables the vector to replicate independently of the host chromosomal DNA, and includes origins of replication or autonomously replicating sequences. Such sequences are well known for a variety of bacteria.

[0151] Expression and cloning vectors also generally contain a selection gene, also termed a selectable marker. This gene encodes a protein necessary for the survival or growth of transformed host cells grown in a selective culture medium. Host cells not transformed with the vector containing the selection gene will not survive in the culture medium. Typical selection genes encode proteins that (a) confer resistance to antibiotics or other toxins, e.g., ampicillin, neomycin, methotrexate, or tetracycline, (b) complement auxotrophic deficiencies, or (c) supply critical nutrients not available from complex media, e.g., the gene encoding D-alanine racemase for Bacilli. One example of a selection scheme utilizes a drug to arrest growth of a host cell. Those cells that are successfully transformed with a heterologous protein or fragment thereof produce a protein conferring drug resistance and thus survive the selection regimen.

[0152] The expression vector for producing a polypeptide can also contains an inducible promoter that is recognized by the host bacterial organism and is operably linked to the nucleic acid encoding, for example, the nucleic acid molecule encoding the C. sarokiniana protein or fragment thereof of interest. Inducible promoters suitable for use with bacterial hosts include the β-lactamase, E. coli λ phage PL and PR, and E. coli galactose, arabinose, alkaline phosphatase, tryptophan (trp), and lactose operon promoter systems and variations thereof(Chang et al., Nature 275:615 (1978); Goeddel et al., Nature 281:544 (1979); Guzman et al., J. Bacteriol. 174:7716-7728 (1992); Goeddel, Nucleic Acids Res. 8:4057 (1980); EP 36,776) and hybrid promoters such as the tac promoter (deBoer et al., Proc. Natl. Acad. Sci. (USA) 80:21-25 (1983)). However, other known bacterial inducible promoters are suitable (Siebenlist et al., Cell 20:269 (1980)).

[0153] Promoters for use in bacterial systems also generally contain a Shine-Dalgarno (S.D.) sequence or a consensus sequence thereof operably linked to the DNA encoding the polypeptide of interest. The promoter can be removed from the bacterial source DNA by restriction enzyme digestion and inserted into the vector containing the desired DNA coding sequence, or vice versa.

[0154] Alternatively, the expression constructs can be integrated into the bacterial genome with an integrating vector. Integrating vectors typically contain at least one sequence homologous to the bacterial chromosome that allows the vector to integrate. Integrations appear to result from recombinations between homologous DNA in the vector and the bacterial chromosome. For example, integrating vectors constructed with DNA from various Bacillus strains integrate into the Bacillus chromosome (E.P.O. Pub. No. 127,328). Integrating vectors may also be comprised of bacteriophage or transposon sequences.

[0155] Construction of suitable vectors containing one or more of the above-listed components employs standard recombinant DNA techniques. Isolated plasmids or DNA fragments are cleaved, tailored, and re-ligated in the form desired to generate the plasmids required. Examples of available bacterial expression vectors include, but are not limited to, the multifunctional E. coli cloning and expression vectors such as Bluescript™ (Stratagene, La Jolla, Calif.), in which, for example, a C. sarokiniana protein or fragment thereof, may be ligated into the vector in frame with sequences for the amino-terminal Met and the subsequent 7 residues of β-galactosidase so that a hybrid protein is produced; pfN vectors (Van Heeke and Schuster J. Biol. Chem. 264:5503-5509 (1989)); and the like. pGEX vectors (Promega, Madison Wis.) may also be used to express foreign polypeptides as fusion proteins with glutathione S-transferase (GST). In general, such fusion proteins are soluble and can easily be purified from lysed cells by adsorption to glutathione-agarose beads followed by elution in the presence of free glutathione. Proteins made in such systems are designed to include heparin, thrombin or factor XA protease cleavage sites so that the cloned polypeptide of interest can be released from the GST moiety at will.

[0156] It is, of course, necessary to select the appropriate bacteria taking into consideration replicability of the replicon in the cells of a bacterium. For example, E. coli, Serratia, or Salmonella species can be suitably used as the host when well known plasmids such as pBR322, pBR325, pACYC177, or pKN410 are used to supply the replicon. E. coli strain W3110 is a preferred host or parent host because it is a common host strain for recombinant DNA product fermentations. Preferably, the host cell should secrete minimal amounts of proteolytic enzymes.

[0157] Host cells are transfected and preferably transformed with the above-described vectors and cultured in conventional nutrient media modified as appropriate for inducing promoters, selecting transformants, or amplifying the genes encoding the desired sequences.

[0158] Numerous methods of transfection are known to the ordinarily skilled artisan, for example, calcium phosphate and electroporation. Depending on the host cell used, transformation is done using standard techniques appropriate to such cells. The calcium treatment employing calcium chloride, as described in section 1.82 of Sambrook et al., Molecular Cloning: A Laboratory Manual, New York: Cold Spring Harbor Laboratory Press, (1989), is generally used for bacterial cells that contain substantial cell-wall barriers. Another method for transformation employs polyethylene glycol/DMSO, as described in Chung and Miller (Chung and Miller, Nucleic Acids Res. 16:3580 (1988)). Yet another method is the use of the technique termed electroporation. In addition, bacterial cells can be readily transformed using various forms of phages (i.e., transducing, temperate, lytic and lysogenic), suicide vectors for inserting DNA directly into the chromosome, and through homologous recombination using either phages, suicide vectors or linear DNA.

[0159] Bacterial cells used to produce the polypeptide of interest for purposes of this invention are cultured in suitable media in which the promoters for the nucleic acid encoding the heterologous polypeptide can be artificially induced as described generally, e.g., in Sambrook et al., Molecular Cloning: A Laboratory Manual, New York: Cold Spring Harbor Laboratory Press, (1989). Examples of suitable media are given in U.S. Pat. Nos. 5,304,472 and 5,342,763.

[0160] A yeast recombinant construct can typically include one or more of the following: a promoter sequence, fusion partner sequence, leader sequence, transcription termination sequence, a selectable marker. These elements can be combined into an expression cassette, which may be maintained in a replicon, such as an extrachromosomal element (e.g., plasmids) capable of stable maintenance in a host, such as yeast or bacteria. The replicon may have two replication systems, thus allowing it to be maintained, for example, in yeast for expression and in a procaryotic host for cloning and amplification. Examples of such yeast-bacteria shuttle vectors include YEp24 (Botstein et al., Gene, 8:17-24 (1979)), pC1/1 (Brake et al., Proc. Natl. Acad. Sci USA, 81:4642-4646 (1984)), and YRpl7 (Stinchcomb et al., J. Mol. Biol., 158:157 (1982)). In addition, a replicon may be either a high or low copy number plasmid. A high copy number plasmid will generally have a copy number ranging from about 5 to about 200, and typically about 10 to about 150. A host containing a high copy number plasmid will preferably have at least about 10, and more preferably at least about 20.

[0161] Useful yeast promoter sequences can be derived from genes encoding enzymes in the metabolic pathway. Examples of such genes include alcohol dehydrogenase (ADH) (E.P.O. Pub. No. 284044), enolase, glucokinase, glucose-6-phosphate isomerase, glyceraldehyde-3-phosphate-dehydrogenase (GAP or GAPDH), hexokinase, phosphofructokinase, 3-phosphoglycerate mutase, and pyruvate kinase (PyK) (E.P.O. Pub. No. 329203). The yeast PHO5 gene, encoding acid phosphatase, also provides useful promoter sequences (Myanohara et al., Proc. Natl. Acad. Sci. USA, 80:1 (1983)). In addition, synthetic promoters which do not occur in nature also function as yeast promoters. Examples of such hybrid promoters include the ADH regulatory sequence linked to the GAP transcription activation region (U.S. Pat. Nos. 4,876,197 and 4,880,734). Other examples of hybrid promoters include promoters which consist of the regulatory sequences of either the ADH2, GAL4, GAL10, or PHO5 genes, combined with the transcriptional activation region of a glycolytic enzyme gene such as GAP or PyK (E.P.O. Pub. No. 164556). Furthermore, a yeast promoter can include naturally occurring promoters of non-yeast origin that have the ability to bind yeast RNA polymerase and initiate transcription. Examples of such promoters include, inter alia, (Cohen et al., Proc. Natl. Acad. Sci. USA, 77:1078 (1980); Henikoffet al., Nature 283:835 (1981); Hollenberg et al., Curr.

[0162] Topics Microbiol. Immunol., 96:119 (1981); Mercerau-Puigalon et al., Gene, 11:163 (1980); and Panthier et al., Curr. Genet., 2:109 (1980)).

[0163] Intracellularly expressed fusion proteins provide an alternative to direct expression of the polypeptides of interest. Typically, a DNA sequence encoding the N-terminal portion of a stable protein, a fusion partner, is fused to the 5′ end of heterologous structural nucleotide sequence encoding the desired polypeptide. Upon expression, this construct will provide a fusion of the two amino acid sequences. The DNA sequence at the junction of the two amino acid sequences may or may not encode a cleavable site. See, e.g., E.P.O. Pub. No. 196056. Another example is a ubiquitin fusion protein. Such a ubiquitin fusion protein preferably retains a site for a processing enzyme (e.g. ubiquitin-specific processing protease) to cleave the ubiquitin from the polypeptide of the present invention. Through this method, therefore, a mature polypeptide can be isolated [see, P.C.T. WO 88/024066].

[0164] Alternatively, polypeptides or proteins can also be secreted from the cell into the growth media by creating chimeric DNA molecules that encode a fusion protein comprised of a leader sequence fragment that provides for secretion in yeast of the polypeptides. Preferably, there are processing sites encoded between the leader fragment and the polypeptide-encoding sequence fragment that can be cleaved either in vivo or in vitro. The leader sequence fragment typically encodes a signal peptide comprised of hydrophobic amino acids which direct the secretion of the protein from the cell.

[0165] DNA encoding suitable signal sequences can be derived from genes for secreted yeast proteins, such as the yeast invertase gene (E.P.O. Pub. No. 12873; J.P.O. Pub. No. 62,096,086) and the A-factor gene (U.S. Pat. No. 4,588,684). Alternatively, leaders of non-yeast origin, such as an interferon leader, exist that also provide for secretion in yeast (E.P.O. Pub. No. 60057).

[0166] A preferred class of secretion leaders are those that employ a fragment of the yeast alpha-factor gene, which contains both a “pre” signal sequence, and a “pro” region. The types of alpha-factor fragments that can be employed include the full-length pre-pro alpha factor leader (about 83 amino acid residues) as well as truncated alpha-factor leaders (typically about 25 to about 50 amino acid residues) (U.S. Pat. Nos. 4,546,083 and 4,870,008; and E.P.O. Pub. No. 324274). Additional leaders employing an alpha-factor leader fragment that provides for secretion include hybrid alpha-factor leaders made with a pre-sequence of a first yeast, but a pro-region from a second yeast alpha factor. See, e.g., P.C.T. WO 89/02463.

[0167] Examples of transcription terminator sequence and other yeast-recognized termination sequences, such as those coding for glycolytic enzymes, are known to those of skill in the art.

[0168] Alternatively, the expression constructs can be integrated into the yeast genome with an integrating vector. Integrating vectors typically contain at least one sequence homologous to a yeast chromosome that allows the vector to integrate, and preferably contain two homologous sequences flanking the expression construct. Integrations appear to result from recombinations between homologous DNA in the vector and the yeast chromosome (Orr-Weaver et al., Methods in Enzymol., 101:228-245 (1983)). An integrating vector may be directed to a specific locus in yeast by selecting the appropriate homologous sequence for inclusion in the vector. See Orr-Weaver et al., supra. One or more expression constructs may integrate, possibly affecting levels of recombinant protein produced (Rine et al., Proc. Natl. Acad. Sci. USA, 80:6750 (1983)). The chromosomal sequences included in the vector can occur either as a single segment in the vector, which results in the integration of the entire vector, or as two segments homologous to adjacent segments in the chromosome and flanking the expression construct in the vector, which results in the stable integration of only the expression construct.

[0169] Expression and transformation vectors, either extrachromosomal replicons or integrating vectors, have been developed for transformation into many yeasts. For example, expression vectors have been developed for, inter alia, the following yeasts: Candida albicans (Kurtz, et al., Mol. Cell. Biol., 6:142 (1986)), Candida maltosa (Kunze et al., J. Basic Microbiol., 25:141 (1985)); Hansenula polymorpha (Gleeson et al., J. Gen. Microbiol. 132:3459 (1986); Roggenkamp et al., Mol. Gen. Genet. 202:302 (1986)); Kluyveromyces fragilis (Das et al., J. Bacteriol. 158:1165 (1984)); Kluyveromyces lactis (De Louvencourt et al., J. Bacteriol. 154:737 (1983); Van den Berg et al., Bio/Technology 8:135 (1990)); Pichia guillerimondii (Kunze et al., J. Basic Microbi-ol. 25:141 (1985)); Pichia pastoris (Cregg et al., Mol. Cell. Biol. 5:3376 (1985); U.S. Pat. Nos. 4,837,148 and 4,929,555); Saccharomyces cerevisiae (Hinnen et al., Proc. Natl. Acad. Sci. USA 75:1929 (1978); Ito et al., J. Bacteriol. 153:163 (1983)); Schizosaccharomyces pombe (Beach and Nurse, Nature 300:706 (1981)); and Yarrowia lipolytica (Davidow, et al., Curr. Genet. 10:380471 (1985); and Gaillardin et al., Curr. Genet. 10:49 (1985)).

[0170] Methods of introducing exogenous nucleic acids into yeast hosts are well-known in the art, and typically include either the transformation of spheroplasts or of intact yeast cells treated with alkali cations. Transformation procedures usually vary with the yeast species to be transformed. See e.g., Kurtz et al., Mol. Cell. Biol. 6:142 (1986); Kunzeetal., J. Basic Microbiol. 25:141 (1985) for Candida. See, e.g., Gleeson et al., J. Gen. Microbiol. 132:3459 (1986); Roggenkamp et al., Mol. Gen. Genet. 202:302 (1986) for Hansenula. See, e.g., Das et al., J. Bacteriol. 158:1165 (1984); De Louvencourt et al., J. Bacteriol. 154:1165 (1983); Van den Berg et al., Bio/Technology 8:135 (1990) for Kluyveromyces. See, e.g., Cregg et al., Mol. Cell. Biol. 5:3376 (1985); Kunze et al., J. Basic Microbiol. 25:141 (1985); U.S. Pat. Nos. 4,837,148 and 4,929,555 for Pichia. See, e.g., Hinnen et al., Proc. Natl. Acad. Sci. USA 75:1929 (1978); Ito et al., J. Bacteriol. 153:163 (1983) for Saccharomyces. See, e.g., Beach and Nurse, Nature 300:706 (1981) for Schizosaccharomyces. See, e.g., Davidow et al., Curr. Genet. 10:39 (1985); Gaillardin et al., Curr. Genet. 10:49 (1985) for Yarrowia.

[0171] In order to obtain expression polypeptides or proteins of interest, recombinant microbial host cells derived from the transformants are incubated under conditions which allow expression of the recombinant polypeptide-encoding sequence. These conditions will vary, dependent upon the host cell selected. However, the conditions are readily ascertainable to those of ordinary skill and knowledge in the art.

[0172] Detection of polypeptides expressed in the transformed host cell may be performed by several methods. For example, a polypeptide or protein may be detected by its immunological reactivity with antibodies.

[0173] Polypeptides or proteins of the present invention may be isolated from the cell by lysis, if formed intracellularly, or isolated from the culture medium, if secreted, by conventional methods.

[0174] (g) Mammalian Constructs and Transformed Mammalian Cells

[0175] The present invention also relates to a mammalian recombinant expression vector comprising exogenous genetic material. The present invention also relates to a mammalian cell comprising a mammalian recombinant expression vector. The present invention also relates to methods for obtaining a recombinant mammalian host cell, comprising introducing into a mammalian cell exogenous genetic material.

[0176] The mammalian recombinant expression vector may be any vector which can be conveniently subjected to recombinant DNA procedures. Many vectors are available for this purpose, and a suitable expression vector is one that is compatible with the desired function (e.g., transient expression, long term expression, integration, replication, amplification) and in which the control elements are compatible with the host cell. The control elements are those non-translated regions of the vector -promoters, enhancers, 5′ and 3′ untranslated regions—which interact with host celluar proteins to carry out transcription and translation.

[0177] Vectors suitable for replication in mammalian cells may include viral replicons, or sequences that ensure integration of the sequence encoding C. sarokiniana protein homologues or fragments thereof into the host genome. Suitable vectors may include, for example, those derived from simian virus SV40, retroviruses, bovine papilloma virus, vaccinia virus, and adenovirus. The components of the vectors, e.g. replicons, selection genes, enhancers, promoters, and the like, may be obtained from natural sources or synthesized by known procedures. (See, Kaufman et al, J. Mol. Biol., 159:511-521 (1982); and Kaufman, Proc. Nati. Acad. Sci., USA, 82:689-693 (1985)).

[0178] A suitable vector may be one derived from vaccinia viruses. In this case, a nucleic acid molecule encoding a C. sarokiniana protein homologue or fragment thereof is inserted into the vaccinia genome. Techniques for the insertion of foreign DNA into the vaccinia virus genome are known in the art, and utilize, for example, homologous recombination. The insertion of the foreign DNA is generally into a gene which is non-essential in nature, for example, the thymidine kinase gene (tk), which also provides a selectable marker. Plasmid shuttle vectors that greatly facilitate the construction of recombinant viruses have been described (see, for example, Mackett et al, J. Virol. 49: 857 (1984); Chakrabarti et al., Mol. Cell. Biol. 5: 3403 (1985); Moss, In: Gene Transfer Vectors For Mammalian Cells (Miller and Calos, eds., Cold Spring Harbor Laboratory, N.Y., p. 10, (1987)). Expression of the C. sarokiniana protein homologues or fragments thereof then occurs in cells or animals which are infected with the live recombinant vaccinia virus.

[0179] Suitable mammalian expression vectors usually contain one or more eukaryotic control elements that are capable of expression in mammalian cells. The control element is comprised of at least a promoter to mediate transcription of foreign DNA sequences. Suitable promoters for mammalian cells are known in the art and include viral promoters such as that from simian virus 40 (SV40), cytomegalovirus (CMV), Rous sarcoma virus (RSV), adenovirus (ADV), and bovine papilloma virus (BPV).

[0180] In addition, the control element may also be comprised of a termination sequence and poly(A) addition sequences which are operably linked to nucleotide sequences encoding C. sarokiniana protein homologues or fragments thereof. The control element may also be comprised of an enhancer sequence which increases the expression of C. sarokiniana protein homologues or fragments thereof.

[0181] Furthermore, the control element may also be comprised of an enhancer, which is any regulatory DNA sequence that can stimulate transcription up to 1000-fold when linked to endogenous or heterologous promoters, with synthesis beginning at the normal mRNA start site. Enhancers are also active when they are placed upstream or downstream from the transcription initiation site, in either normal or flipped orientation, or at a distance of more than 1000 nucleotides from the promoter (Maniatis et al. Science, 236:1237 (1987); Alberts et al., Molecular Biology of the Cell, 2nd ed. (1989)). Enhancers derived from viruses may be particularly useful, because they typically have a broader host range. Examples include the SV40 early gene enhancer (Dijkema et al, EMBO J., 4:761 (1985)) and the enhancer/promoters derived from the long terminal repeat (LTR) of the Rous Sarcoma Virus (Gorman et al., Proc. Natl. Acad. Sci. 79:6777 (1982b)) and from human cytomegalovirus (Boshart et al., Cell, 41:521 (1985)). Additionally, some enhancers are regulatable and become active only in the presence of an inducer, such as a hormone or metal ion (Sassone-Corsi and Borelli, Trends Genet. 2:215 (1986); Maniatis et al. Science, 236:1237 (1987)).

[0182] Where selection is intended, sequences which encode selectable markers may also be included in the vector. Selectable markers for mammalian cells are known in the art, and include for example, thymidine kinase, dihydrofolate reductase (together with methotrexate as a DHFR amplifier), aminoglycoside phosphotransferase, hygromycin B phosphotransferase, asparagine synthetase, adenosine deaminase, metallothionien, and antibiotic resistant genes such as neomycin.

[0183] For homologous recombination, constructs can be prepared where the amplifiable gene will be flanked, normally on both sides with DNA homologous with the DNA of the target region. Depending upon the nature of the integrating DNA and the purpose of the integration, the homologous DNA will generally be within 100 kb, usually 50 kb, preferably about 25 kb, of the transcribed region of the target gene, more preferably within 2 kb of the target gene. Where modeling of the gene is intended, homology will usually be present proximal to the site of the mutation. By gene is intended the coding region and those sequences required for transcription of a mature mRNA. The homologous DNA may include the 5′-upstream region outside of the transcriptional regulatory region or comprising any enhancer sequences, transcriptional initiation sequences, adjacent sequences, or the like. The homologous region may include a portion of the coding region, where the coding region may be comprised only of an open reading frame or combination of no exons and introns. The homologous region may comprise all or a portion of an intron, where all or a portion of one or more exons may also be present. Alternatively, the homologous region may comprise the 3′-region, so as to comprise all or a portion of the transcriptional termination region, or the region 3′ of this region. The homologous regions may extend over all or a portion of the target gene or be outside the target gene comprising all or a portion of the transcriptional regulatory regions and/or the structural gene.

[0184] The integrating constructs may be prepared in accordance with conventional ways, where sequences may be synthesized, isolated from natural sources, manipulated, cloned, ligated, subjected to in vitro mutagenesis, primer repair, or the like. At various stages, the joined sequences may be cloned, and analyzed by restriction analysis, sequencing, or the like. Usually during the preparation of a construct where various fragments are joined, the fragments, intermediate constructs and constructs will be carried on a cloning vector comprising a replication system functional in a prokaryotic host, e.g., E. Coli, and a marker for selection, e.g., biocide resistance, complementation to an auxotrophic host, etc. Other functional sequences may also be present, such as polylinkers, for ease of introduction and excision of the construct or portions thereof, or the like. A large number of cloning vectors are available such as pBR322, the pUC series, etc. These constructs may then be used for integration into the primary mammalian host.

[0185] The mammalian cell expression vectors described herein may be synthesized by techniques well known to those skilled in this art. Other appropriate expression vectors of which numerous types are known in the art for mammalian expression can also be used for this purpose.

[0186] Mammalian cell lines available as hosts for expression are known in the art and include many immortalized cell lines available from the American Type Culture Collection (ATCC). Exemplary mammalian host cells include particularly primate cell lines and rodent cell lines, including transformed cell lines. Suitable cell lines include, but are not limited to, Chinese hamster ovary (CHO) cells, HeLa cells, baby hamster kidney (BHK) cells, monkey kidney cells (COS-1), human hepatocellular carcinoma cells (e.g., Hep G2), human adenovirus transformed 293 cells, mouse L-929 cells, HaK hamster cell lines, murine 3T3 cells derived from Swiss, Balb-c or NIH mice and a number of other cell lines.

[0187] The DNA can be introduced into the expression host by a variety of techniques that include calcium phosphate/DNA co-precipitates, microinjection of DNA into the nucleus, electroporation, yeast protoplast fusion with intact cells, transfection, polycations, e.g., polybrene, polyornithine, etc., or the like. The DNA may be single or double stranded DNA, linear or circular. The various techniques for transforming mammalian cells are well known (see Keown et al., Methods Enzymol. (1989), Keown et al., Methods Enzymol. 185:527-537 (1990); Mansour et al., Nature 336:348-352, (1988)).

[0188] (h) Insect Constructs and Transformed Insect Cells

[0189] The present invention also relates to an insect recombinant expression vectors comprising exogenous genetic material. The present invention also relates to an insect cell comprising an insect recombinant vector. The present invention also relates to methods for obtaining a recombinant insect host cell, comprising introducing into an insect cell exogenous genetic material.

[0190] The insect recombinant vector may be any vector which can be conveniently subjected to recombinant DNA procedures and can bring about the expression of the nucleic acid sequence. The choice of a vector will typically depend on the compatibility of the vector with the insect host cell into which the vector is to be introduced. The vector may be a linear or a closed circular plasmid. The vector system may be a single vector or plasmid or two or more vectors or plasmids which together contain the total DNA to be introduced into the genome of the insect host. In addition, the insect vector may be an expression vector. Nucleic acid molecules can be suitable inserted into a replication vector for expression in the insect cell under a suitable promoter for insect cells. Many vectors are available for this purpose, and selection of the appropriate vector will depend mainly on the size of the nucleic acid molecule to be inserted into the vector and the particular host cell to be transformed with the vector. Each vector contains various components depending on its function (amplification of DNA or expression of DNA) and the particular host cell with which it is compatible. The vector components for insect cell transformation generally include, but not limited to, one or more of the following: a signal sequence, and origin of replication, one or more marker genes, and an inducible promoter.

[0191] The insect vector may be an autonomously replicating vector, i.e., a vector which exists as an extrachromosomal entity, the replication of which is independent of chromosomal replication, e.g., a plasmid, an extrachromosomal element, a minichromosome, or an artificial chromosome. The vector may contain any means for assuring self-replication. Alternatively, the vector may be one which, when introduced into the insect cell, is integrated into the genome and replicated together with the chromosome(s) into which it has been integrated. For integration, the vector may rely on the nucleic acid sequence of the vector for stable integration of the vector into the genome by homologous or nonhomologous recombination. Alternatively, the vector may contain additional nucleic acid sequences for directing integration by homologous recombination into the genome of the insect host. The additional nucleic acid sequences enable the vector to be integrated into the host cell genome at a precise location(s) in the chromosome(s). To increase the likelihood of integration at a precise location, there should be preferably two nucleic acid sequences which individually contain a sufficient number of nucleic acids, preferably 400 bp to 1500 bp, more preferably 800 bp to 1000 bp, which are highly homologous with the corresponding target sequence to enhance the probability of homologous recombination. These nucleic acid sequences may be any sequence that is homologous with a target sequence in the genome of the insect host cell, and, furthermore, may be non-encoding or encoding sequences.

[0192] Baculovirus expression vectors (BEVs) have become important tools for the expression of foreign genes, both for basic research and for the production of proteins with direct clinical applications in human and veterinary medicine (Doerfler, Curr. Top. Microbiol. Immunol. 131: 51-68 (1968); Luckow and Summers, Bio/Technology 6: 47-55 (1988a); Miller, Annual Review of Microbiol. 42: 177-199 (1988); Summers, Curr. Comm. Molecular Biology, Cold Spring Harbor Press, Cold Spring Harbor, N.Y. (1988); all of which are herein incorporated by reference in their entirety). BEVs are recombinant insect viruses in which the coding sequence for a chosen foreign gene has been inserted behind a baculovirus promoter in place of the viral gene, e.g., polyhedrin (Smith and Summers, U.S. Pat. No., 4,745,051, herein incorporated by reference in its entirety).

[0193] The use of baculovirus vectors relies upon the host cells being derived from Lepidopteran insects such as Spodoptera frugiperda or Trichoplusia ni. The preferred Spodoptera frugiperda cell line is the cell line Sf9. The Spodoptera frugiperda Sf9 cell line was obtained from American Type Culture Collection (Manassas, Va.) and is assigned accession number ATCC CRL 1711 (Summers and Smith, A Manual of Methods for Baculovirus Vectors and Insect Cell Culture Procedures, Texas Ag. Exper. Station Bulletin No. 1555 (1988), herein incorporated by reference in its entirety). Other insect cell systems, such as the silkworm B. mori may also be used.

[0194] The proteins expressed by the BEVs are, therefore, synthesized, modified and transported in host cells derived from Lepidopteran insects. Most of the genes that have been inserted and produced in the baculovirus expression vector system have been derived from vertebrate species. Other baculovirus genes in addition to the polyhedrin promoter may be employed to advantage in a baculovirus expression system. These include immediate-early (alpha), delayed-early (beta), late (gamma), or very late (delta), according to the phase of the viral infection during which they are expressed. The expression of these genes occurs sequentially, probably as the result of a “cascade” mechanism of transcriptional regulation. (Guarino and Summers, J. Virol. 57:563-571 (1986); Guarino and Summers, J. Virol. 61:2091-2099 (1987); Guarino and Summers, Virol. 162:444-451 (1988); all of which are herein incorporated by reference in their entirety).

[0195] Insect recombinant vectors are useful as an intermediates for the infection or transformation of insect cell systems. For example, an insect recombinant vector containing a nucleic acid molecule encoding a baculovirus transcriptional promoter followed downstream by an insect signal DNA sequence is capable of directing the secretion of the desired biologically active protein from the insect cell. The vector may utilize a baculovirus transcriptional promoter region derived from any of the over 500 baculoviruses generally infecting insects, such as for example the Orders Lepidoptera, Diptera, Orthoptera, Coleoptera and Hymenoptera, including for example but not limited to the viral DNAs of Autographa californica MNPV, Bombyx mori NPV, Trichoplusia ni MNPV, Rachiplusia ou MNPV or Galleria mellonella MNPV, wherein said baculovirus transcriptional promoter is a baculovirus immediate-early gene IE1 or IEN promoter; an immediate-early gene in combination with a baculovirus delayed-early gene promoter region selected from the group consisting of 39K and a HindIII-k fragment delayed-early gene; or a baculovirus late gene promoter. The immediate-early or delayed-early promoters can be enhanced with transcriptional enhancer elements. The insect signal DNA sequence may code for a signal peptide of a Lepidopteran adipokinetic hormone precursor or a signal peptide of the Manduca sexta adipokinetic hormone precursor (Summers, U.S. Pat. No. 5,155,037; herein incorporated by reference in its entirety). Other insect signal DNA sequences include a signal peptide of the Orthoptera Schistocerca gregaria locust adipokinetic hormone precurser and the Drosophila melanogaster cuticle genes CP1, CP2, CP3 or CP4 or for an insect signal peptide having substantially a similar chemical composition and function (Summers, U.S. Pat. No. 5,155,037).

[0196] Insect cells are distinctly different from animal cells. Insects have a unique life cycle and have distinct cellular properties such as the lack of intracellular plasminogen activators in insect cells which are present in vertebrate cells. Another difference is the high expression levels of protein products ranging from 1 to greater than 500 mg/liter and the ease at which cDNA can be cloned into cells (Frasier, In Vitro Cell. Dev. Biol. 25:225 (1989); Summers and Smith, In: A Manual of Methodsfor Baculovirus Vectors and Insect Cell Culture Procedures, Texas Ag. Exper. Station Bulletin No. 1555 (1988), both of which are incorporated by reference in their entirety).

[0197] Recombinant protein expression in insect cells is achieved by viral infection or stable transformation. For viral infection, the desired gene is cloned into baculovirus at the site of the wild-type polyhedron gene (Webb and Summers, Technique 2:173 (1990); Bishop and Posse, Adv. Gene Technol 1:55 (1990); both of which are incorporated by reference in their entirety). The polyhedron gene is a component of a protein coat in occlusions which encapsulate virus particles. Deletion or insertion in the polyhedron gene results the failure to form occlusion bodies. Occlusion negative viruses are morphologically different from occlusion positive viruses and enable one skilled in the art to identify and purify recombinant viruses.

[0198] The vectors of present invention preferably contain one or more selectable markers which permit easy selection of transformed cells. A-selectable marker is a gene the product of which provides, for example biocide or viral resistance, resistance to heavy metals, prototrophy to auxotrophs, and the like. Selection may be accomplished by co-transformation, e.g., as described in WO 91/17243, a nucleic acid sequence of the present invention may be operably linked to a suitable promoter sequence. The promoter sequence is a nucleic acid sequence which is recognized by the insect host cell for expression of the nucleic acid sequence. The promoter sequence contains transcription and translation control sequences which mediate the expression of the protein or fragment thereof. The promoter may be any nucleic acid sequence which shows transcriptional activity in the insect host cell of choice and may be obtained from genes encoding polypeptides either homologous or heterologous to the host cell.

[0199] For example, a nuclec acid molecule encoding a C. sarokiniana protein homologue or fragment thereof may also be operably linked to a suitable leader sequence. A leader sequence is a nontranslated region of a mRNA which is important for translation by the insect host. The leader sequence is operably linked to the 5′ terminus of the nucleic acid sequence encoding the protein or fragment thereof. The leader sequence may be native to the nucleic acid sequence encoding the protein or fragment thereof or may be obtained from foreign sources. Any leader sequence which is functional in the insect host cell of choice may be used in the present invention.

[0200] A polyadenylation sequence may also be operably linked to the 3′ terminus of the nucleic acid sequence of the present invention. The polyadenylation sequence is a sequence which when transcribed is recognized by the insect host to add polyadenosine residues to transcribed mRNA. The polyadenylation sequence may be native to the nucleic acid sequence encoding the protein or fragment thereof or may be obtained from foreign sources. Any polyadenylation sequence which is functional in the fungal host of choice may be used in the present invention.

[0201] To avoid the necessity of disrupting the cell to obtain the protein or fragment thereof, and to minimize the amount of possible degradation of the expressed polypeptide within the cell, it is preferred that expression of the polypeptide gene gives rise to a product secreted outside the cell. To this end, the protein or fragment thereof of the present invention may be linked to a signal peptide linked to the amino terminus of the protein or fragment thereof. A signal peptide is an amino acid sequence which permits the secretion of the protein or fragment thereof from the insect host into the culture medium. The signal peptide may be native to the protein or fragment thereof of the invention or may be obtained from foreign sources. The 5′ end of the coding sequence of the nucleic acid sequence of the present invention may inherently contain a signal peptide coding region naturally linked in translation reading frame with the segment of the coding region which encodes the secreted protein or fragment thereof.

[0202] At present, a mode of achieving secretion of a foreign gene product in insect cells is by way of the foreign gene's native signal peptide. Because the foreign genes are usually from non-insect organisms, their signal sequences may be poorly recognized by insect cells, and hence, levels of expression may be suboptimal. However, the efficiency of expression of foreign gene products seems to depend primarily on the characteristics of the foreign protein. On average, nuclear localized or non-structural proteins are most highly expressed, secreted proteins are intermediate, and integral membrane proteins are the least expressed. One factor generally affecting the efficiency of the production of foreign gene products in a heterologous host system is the presence of native signal sequences (also termed presequences, targeting signals, or leader sequences) associated with the foreign gene. The signal sequence is generally coded by a DNA sequence immediately following (5′ to 3′) the translation start site of the desired foreign gene.

[0203] The expression dependence on the type of signal sequence associated with a gene product can be represented by the following example: If a foreign gene is inserted at a site downstream from the translational start site of the baculovirus polyhedrin gene so as to produce a fusion protein (containing the N-terminus of the polyhedrin structural gene), the fused gene is highly expressed. But less expression is achieved when a foreign gene is inserted in a baculovirus expression vector immediately following the transcriptional start site and totally replacing the polyhedrin structural gene.

[0204] Insertions into the region −50 to −1 significantly alter (reduce) steady state transcription which, in turn, reduces translation of the foreign gene product. Use of the pVL941 vector optimizes transcription of foreign genes to the level of the polyhedrin gene transcription. Even though the transcription of a foreign gene may be optimal, optimal translation may vary because of several factors involving processing: signal peptide recognition, mRNA and ribosome binding, glycosylation, disulfide bond formation, sugar processing, oligomerization, for example.

[0205] The properties of the insect signal peptide are expected to be more optimal for the efficiency of the translation process in insect cells than those from vertebrate proteins. This phenomenon can generally be explained by the fact that proteins secreted from cells are synthesized as precursor molecules containing hydrophobic N-terminal signal peptides. The signal peptides direct transport of the select protein to its target membrane and are then cleaved by a peptidase on the membrane, such as the endoplasmic reticulum, when the protein passes through it.

[0206] Another exemplary insect signal sequence is the sequence encoding for Drosophila cuticle proteins such as CP1, CP2, CP3 or CP4 (Summers, U.S. Pat. No. 5,278,050; herein incorporated by reference in its entirety). Most of the 9 kb region of the Drosophila genome contains genes for the cuticle proteins has been sequenced. Four of the five cuticle genes contain a signal peptide coding sequence interrupted by a short intervening sequence (about 60 base pairs) at a conserved site. Conserved sequences occur in the 5′ mRNA untranslated region, in the adjacent 35 base pairs of upstream flanking sequence and at −200 base pairs from the mRNA start position in each of the cuticle genes.

[0207] Standard methods of insect cell culture, cotransfection and preparation of plasmids are set forth in Summers and Smith (Summers and Smith, A Manual of Methods for Baculovirus Vectors and Insect Cell Culture Procedures, Texas Agricultural Experiment Station Bulletin No. 1555, Texas A&M University (1987)). Procedures for the cultivation of viruses and cells are described in Volkman and Summers, J. Virol 19: 820-832 (1975) and Volkman et al., J. Virol 19: 820-832 (1976); both of which are herein incorporate by reference in their entirety.

[0208] (i) Computer Media

[0209] The nucleotide sequence provided in SEQ ID NO: 1, through SEQ ID NO:9395 or fragment thereof, or complement thereof, or a nucleotide sequence at least 90% identical, preferably 95%, identical even more preferably 99% or 100% identical to the sequence provided in SEQ ID NO: 1 through SEQ ID NO:9395 or fragment thereof, or complement thereof, can be “provided” in a variety of mediums to facilitate use. Such a medium can also provide a subset thereof in a form that allows a skilled artisan to examine the sequences.

[0210] In one application of this embodiment, a nucleotide sequence of the present invention can be recorded on computer readable media. As used herein, “computer readable media” refers to any medium that can be read and accessed directly by a computer. Such media include, but are not limited to: magnetic storage media, such as floppy discs, hard disc, storage medium, and magnetic tape: optical storage media such as CD-ROM; electrical storage media such as RAM and ROM; and hybrids of these categories such as magnetic/optical storage media. A skilled artisan can readily appreciate how any of the presently known computer readable mediums can be used to create a manufacture comprising computer readable medium having recorded thereon a nucleotide sequence of the present invention.

[0211] As used herein, “recorded” refers to a process for storing information on computer readable medium. A skilled artisan can readily adopt any of the presently known methods for recording information on computer readable medium to generate media comprising the nucleotide sequence information of the present invention. A variety of data storage structures are available to a skilled artisan for creating a computer readable medium having recorded thereon a nucleotide sequence of the present invention. The choice of the data storage structure will generally be based on the means chosen to access the stored information. In addition, a variety of data processor programs and formats can be used to store the nucleotide sequence information of the present invention on computer readable medium. The sequence information can be represented in a word processing text file, formatted in commercially-available software such as WordPerfect and Microsoft Word, or represented in the form of an ASCII file, stored in a database application, such as DB2, Sybase, Oracle, or the like. A skilled artisan can readily adapt any number of data processor structuring formats (e.g. text file or database) in order to obtain computer readable medium having recorded thereon the nucleotide sequence information of the present invention.

[0212] By providing one or more of nucleotide sequences of the present invention, a skilled artisan can routinely access the sequence information for a variety of purposes. Computer software is publicly available which allows a skilled artisan to access sequence information provided in a computer readable medium. The examples which follow demonstrate how software which implements the BLAST (Altschul et al., J. Mol. Biol. 215: 403-410 (1990), herein incorporated by reference in its entirety) and BLAZE (Brutlag, et al., Comp. Chem. 17: 203-207 (1993), herein incorporated by reference in its entirety) search algorithms on a Sybase system can be used to identify open reading frames (ORFs) within the genome that contain homology to ORFs or proteins from other organisms. Such ORFs are protein-encoding fragments within the sequences of the present invention and are useful in producing commercially important proteins such as enzymes used in amino acid biosynthesis, metabolism, transcription, translation, RNA processing, nucleic acid and a protein degradation, protein modification, and DNA replication, restriction, modification, recombination, and repair.

[0213] The present invention further provides systems, particularly computer-based systems, which contain the sequence information described herein. Such systems are designed to identify commercially important fragments of the nucleic acid molecule of the present invention. As used herein, “a computer-based system” refers to the hardware means, software means, and data storage means used to analyze the nucleotide sequence information of the present invention. The minimum hardware means of the computer-based systems of the present invention comprises a central processing unit (CPU), input means, output means, and data storage means. A skilled artisan can readily appreciate that any one of the currently available computer-based system are suitable for use in the present invention.

[0214] As indicated above, the computer-based systems of the present invention comprise a data storage means having stored therein a nucleotide sequence of the present invention and the necessary hardware means and software means for supporting and implementing a search means. As used herein, “data storage means” refers to memory that can store nucleotide sequence information of the present invention, or a memory access means which can access manufactures having recorded thereon the nucleotide sequence information of the present invention. As used herein, “search means” refers to one or more programs which are implemented on the computer-based system to compare a target sequence or target structural motif with the sequence information stored within the data storage means. Search means are used to identify fragments or regions of the sequence of the present invention that match a particular target sequence or target motif. A variety of known algorithms are disclosed publicly and a variety of commercially available software for conducting search means are available can be used in the computer-based systems of the present invention. Examples of such software include, but are not limited to, MacPattern (EMBL), BLASTIN and BLASTIX (NCBIA). One of the available algorithms or implementing software packages for conducting homology searches can be adapted for use in the present computer-based systems.

[0215] The most preferred sequence length of a target sequence is from about 10 to 100 amino acids or from about 30 to 300 nucleotide residues. However, it is well recognized that during searches for commercially important fragments of the nucleic acid molecules of the present invention, such as sequence fragments involved in gene expression and protein processing, may be of shorter length.

[0216] As used herein, “a target structural motif,” or “target motif,” refers to any rationally selected sequence or combination of sequences in which the sequences the sequence(s) are chosen based on a three-dimensional configuration which is formed upon the folding of the target motif. There are a variety of target motifs known in the art. Protein target motifs include, but are not limited to, enzymatic active sites and signal sequences. Nucleic acid target motifs include, but are not limited to, promoter sequences, cis elements, hairpin structures and inducible expression elements (protein binding sequences).

[0217] Thus, the present invention further provides an input means for receiving a target sequence, a data storage means for storing the target sequences of the present invention sequence identified using a search means as described above, and an output means for outputting the identified homologous sequences. A variety of structural formats for the input and output means can be used to input and output information in the computer-based systems of the present invention. A preferred format for an output means ranks fragments of the sequence of the present invention by varying degrees of homology to the target sequence or target motif. Such presentation provides a skilled artisan with a ranking of sequences which contain various amounts of the target sequence or target motif and identifies the degree of homology contained in the identified fragment.

[0218] A variety of comparing means can be used to compare a target sequence or target motif with the data storage means to identify sequence fragments sequence of the present invention. For example, implementing software which implement the BLAST and BLAZE algorithms (Altschul et al., J. Mol. Biol. 215: 403-410 (1990), herein incorporated by reference in its entirety) can be used to identify open frames within the nucleic acid molecules of the present invention. A skilled artisan can readily recognize that any one of the publicly available homology search programs can be used as the search means for the computer-based systems of the present invention.

Uses of the Agents of the Present Invention

[0219] Nucleic acid molecules and fragments thereof of the present invention may be employed to obtain other nucleic acid molecules from the same species. Such nucleic acid molecules include the nucleic acid molecules that encode the complete coding sequence of a protein and promoters and flanking sequences of such molecules. In addition, such nucleic acid molecules include nucleic acid molecules that encode for other isozymes or gene family members. Such molecules can be readily obtained by using the above-described nucleic acid molecules or fragments thereof to screen cDNA or genomic libraries obtained from C. sarokiniana. Methods for forming such libraries are well known in the art.

[0220] Nucleic acid molecules and fragments thereof of the present invention may also be employed to obtain other nucleic acid molecules such as nucleic acid homologues. Such homologues include the nucleic acid molecules that encode, in whole or in part, protein homologues of other species, plants or other organisms. Such molecules can be readily obtained by using the above-described nucleic acid molecules or El-fragments thereof to screen cDNA or genomic libraries. Methods for forming such libraries are well known in the art. Such homologue molecules may differ in their nucleotide sequences from those found in one or more of SEQ ID NO: 1 through SEQ ID NO:9395 or complements thereof because complete complementarity is not needed for stable hybridization. The nucleic acid molecules of the present invention therefore also include molecules that, although capable of specifically hybridizing with the nucleic acid molecules may lack “complete complementarity.” In a particular embodiment, methods or 3′ or 5′RACE may be used to obtain such sequences (Frohman, M. A. et al., Proc. Natl. Acad. Sci. (U.S.A.) 85:8998-9002 (1988); Ohara, 0. et al., Proc. Natl. Acad. Sci. (U.S.A.) 86:5673-5677 (1989), both of which are herein incorporated by reference in their entirety).

[0221] Any of a variety of methods may be used to obtain one or more of the above-described nucleic acid molecules (Zamechik et al, Proc. Natl. Acad. Sci. (U.S.A.) 83: 4143-4146 (1986); Goodchild et al., Proc. Natl. Acad. Sci. (U.S.A.) 85: 5507-5511 (1988); Wickstrom et al., Proc. Nati. Acad. Sci. (U.S.A.) 85: 1028-1032 (1988),; Holt et al., Molec. Cell. Biol. 8: 963-973 (1988); Gerwirtz et al., Science 242: 1303-1306 (1988); Anfossi et al., Proc. Natl. Acad. Sci. (U.S.A.) 86: 3379-3383 (1989); Becker et al., EMBO J. 8: 36853691 (1989); all of which are herein incorporated by reference in their entirety). Automated nucleic acid synthesizers may be employed for this purpose. In lieu of such synthesis, the disclosed nucleic acid molecules may be used to define a pair of primers that can be used with the polymerase chain reaction (Mullis et al., Cold Spring Harbor Symp. Quant. Biol. 51: 263-273 (1986); Erlich et al., European Patent 50,424; European Patent 84,796, European Patent 258,017, European Patent 237,362; Mullis, European Patent 201,184; Mullis et al., U.S. Pat. No. 4,683,202; Erlich, U.S. Pat. No. 4,582,788; and Saiki, R. et al., U.S. Pat. No. 4,683,194, all of which are herein incorporated by reference in their entirety) to amplify and obtain any desired nucleic acid molecule or fragment.

[0222] Promoter sequence(s) and other genetic elements including but not limited to transcriptional regulatory elements associated with one or more of the disclosed nucleic acid sequences can also be obtained using the disclosed nucleic acid sequences provided herein. In one embodiment, such sequences are obtained by incubating EST nucleic acid molecules or preferably fragments thereof with members of genomic libraries and recovering clones that hybridize to the EST nucleic acid molecule or fragment thereof. In a second embodiment, methods of “chromosome walking,” or inverse PCR may be used to obtain such sequences (Frohman, et al., Proc. Natl. Acad. Sci. (U.S.A.) 85:8998-9002 (1988); Ohara, et al., Proc. Natl. Acad. Sci. (U.S.A.) 86: 5673-5677 (1989); Pang et al., Biotechniques, 22(6); 1046-1048 (1977); Huang et al., Methods Mol. Biol. 69: 89-96 (1977); Hartl et al., Methods Mol. Biol. 58: 293-301(1996), all of which are herein incorporated by reference in their entirety). In one embodiment, the disclosed ESTs are used to identify cDNAs whose analogous genes contain promoters with desirable expression patterns. Isolation and functional analysis of the 5′ flanking promoter sequences of these genes from genomic libraries, for example, using genomic screening methods and PCR techniques would result in the isolation of useful promoters and transcriptional regulatory elements. These methods are known to those of skill in the art and have been described (See for example Birren et al., Genome Analysis:Analyzing DNA, 1, (1997), Cold Spring Harbor Laboratory Press, Cold Spring Harbor, N.Y., herein incorporated by reference in its entirety). Promoters obtained utilizing the ESTs of the present invention could also be modified to affect their control characteristics. Examples of such modifications would include but are not limited to enhancer sequences as reported by Kay et al., Science 236:1299 (1987), herein incorporated by reference in its entirety.

[0223] In an aspect of the present invention, one or more of the agents of the present invention may be used to detecting the presence, absence or level of a organism, preferably a green alga and more preferably Chlorella, and even more preferably an C. sarokiniana in a sample. In another aspect of the present invention, one or more of the nucleic molecules of the present invention are used to determine the level (i.e., the concentration of mRNA in a sample, etc.) or pattern (i.e., the kinetics of expression, rate of decomposition, stability profile, etc.) of the expression encoded in part or whole by one or more of the nucleic acid molecule of the present invention (collectively, the “Expression Response” of a cell or tissue). As used herein, the Expression Response manifested by a cell or tissue is said to be “altered” if it differs from the Expression Response of cells or tissues of organisms not exhibiting the phenotype. To determine whether a Expression Response is altered, the Expression Response manifested by the cell or tissue of the organism exhibiting the phenotype is compared with that of a similar cell or tissue sample of a organism not exhibiting the phenotype. As will be appreciated, it is not necessary to re-determine the Expression Response of the cell or tissue sample of organisms not exhibiting the phenotype each time such a comparison is made; rather, the Expression Response of a particular organism may be compared with previously obtained values of normal organism. As used herein, the phenotype of the organism is any of one or more characteristics of an organism.

[0224] In one sub-aspect, such an analysis is conducted by determining the presence and/or identity of polymorphism(s) by one or more of the nucleic acid molecules of the present invention and more specifically, one or more of the EST nucleic acid molecule or fragment thereof which are associated with phenotype, or a predisposition to phenotype.

[0225] Any of a variety of molecules can be used to identify such polymorphism(s). In one embodiment, one or more of the EST nucleic acid molecules (or a sub-fragment thereof) may be employed as a marker nucleic acid molecule to identify such polymorphism(s). Alternatively, such polymorphisms can be detected through the use of a marker nucleic acid molecule or a marker protein that is genetically linked to (i.e., a polynucleotide that co-segregates with) such polymorphism(s).

[0226] In an alternative embodiment, such polymorphisms can be detected through the use of a marker nucleic acid molecule that is physically linked to such polymorphism(s). For this purpose, marker nucleic acid molecules comprising a nucleotide sequence of a polynucleotide located within 1 mb of the polymorphism(s), and more preferably within 100 kb of the polymorphism(s), and most preferably within 10 kb of the polymorphism(s) can be employed.

[0227] The genomes of animals and plants naturally undergo spontaneous mutation in the course of their continuing evolution (Gusella, Ann. Rev. Biochem. 55:831-854 (1986), herein incorporated by reference in its entirety). A “polymorphism” is a variation or difference in the sequence of the gene or its flanking regions that arises in some of the members of a species. The variant sequence and the “original” sequence co-exist in the species' population. In some instances, such co-existence is in stable or quasi-stable equilibrium.

[0228] A polymorphism is thus said to be “allelic,” in that, due to the existence of the polymorphism, some members of a species may have the original sequence (i.e., the original “allele”) whereas other members may have the variant sequence (i.e., the variant “allele”). In the simplest case, only one variant sequence may exist, and the polymorphism is thus said to be di-allelic. In other cases, the species' population may contain multiple alleles, and the polymorphism is termed tri-allelic, etc. A single gene may have multiple different unrelated polymorphisms. For example, it may have a di-allelic polymorphism at one site, and a multi-allelic polymorphism at another site.

[0229] The variation that defines the polymorphism may range from a single nucleotide variation to the insertion or deletion of extended regions within a gene. In some cases, the DNA sequence variations are in regions of the genome that are characterized by short tandem repeats (STRs) that include tandem di- or tri-nucleotide repeated motifs of nucleotides. Polymorphisms characterized by such tandem repeats are referred to as “variable number tandem repeat” (“VNTR”) polymorphisms. VNTRs have been used in identity analysis (Weber, U.S. Pat. No. 5,075,217; Armour, et al., FEBS Lett. 307:113-115 (1992); Jones, et al., Eur. J. Haematol. 39:144-147 (1987); Horn, et al., PCT Application WO91/14003; Jeffreys, European Patent Application 370,719; Jeffreys, U.S. Pat. No. 5,175,082; Jeffreys. et al., Amer. J. Hum. Genet. 39:11-24 (1986); Jeffreys. et al., Nature 316:76-79 (1985); Gray, et al., Proc. k Acad. Soc. Lond. 243:241-253 (1991); Moore, et al., Genomics 10:654-660 (1991); Jeffreys, et al., Anim. Genet. 18:1-15 (1987); Hillel, et al., Anim. Genet. 20:145-155 (1989); Hillel, et al., Genet. 124:783-789 (1990), all of which are herein incorporated by reference in their entirety).

[0230] The detection of polymorphic sites in a sample of DNA may be facilitated through the use of nucleic acid amplification methods. Such methods specifically increase the concentration of polynucleotides that span the polymorphic site, or include that site and sequences located either distal or proximal to it. Such amplified molecules can be readily detected by gel electrophoresis or other means.

[0231] The most preferred method of achieving such amplification employs the polymerase chain reaction (“PCR”) (Mullis, et al., Cold Spring Harbor Symp. Quant. Biol. 51:263-273 (1986); Erlich, et al., European Patent Appln. 50,424; European Patent Appln. 84,796, European Patent Application 258,017, European Patent Appln. 237,362; Mullis, European Patent Appln. 201,184; Mullis, etal., U.S. Pat. No. 4,683,202; Erlich., U.S. Pat. No. 4,582,788; and Saiki, et al., U.S. Pat. No. 4,683,194, all of which are herein incorporated by reference in their entirety), using primer pairs that are capable of hybridizing to the proximal sequences that define a polymorphism in its double-stranded form.

[0232] In lieu of PCR, alternative methods, such as the “Ligase Chain Reaction” (“LCR”) may be used (Barany, Proc. Natl. Acad. Sci. (U.S.A.) 88:189-193 (1991), herein incorporated by reference in its entirety). LCR uses two pairs of oligonucleotide probes to exponentially amplify a specific target. The sequences of each pair of oligonucleotides is selected to permit the pair to hybridize to abutting sequences of the same strand of the target. Such hybridization forms a substrate for a template-dependent ligase. As with PCR, the resulting products thus serve as a template in subsequent cycles and an exponential amplification of the desired sequence is obtained.

[0233] LCR can be performed with oligonucleotides having the proximal and distal sequences of the same strand of a polymorphic site. In one embodiment, either oligonucleotide will be designed to include the actual polymorphic site of the polymorphism. In such an embodiment, the reaction conditions are selected such that the oligonucleotides can be ligated together only if the target molecule either contains or lacks the specific nucleotide that is complementary to the polymorphic site present on the oligonucleotide. Alternatively, the oligonucleotides may be selected such that they do not include the polymorphic site (see, Segev, PCT Application WO 90/01069, herein incorporated by reference in its entirety).

[0234] The “Oligonucleotide Ligation Assay” (“OLA”) may alternatively be employed (Landegren, et al., Science 241:1077-1080 (1988), herein incorporated by reference in its entirety). The OLA protocol uses two oligonucleotides which are designed to be capable of hybridizing to abutting sequences of a single strand of a target. OLA, like LCR, is particularly suited for the detection of point mutations. Unlike LCR, however, OLA results in “linear” rather than exponential amplification of the target sequence.

[0235] Nickerson, et al. have described a nucleic acid detection assay that combines attributes of PCR and OLA (Nickerson, et al., Proc. Natl. Acad. Sci. (U.S.A.) 87:8923-8927 (1990), herein incorporated by reference in its entirety). In this method, PCR is used to achieve the exponential amplification of target DNA, which is then detected using OLA. In addition to requiring multiple, and separate, processing steps, one problem associated with such combinations is that they inherit all of the problems associated with PCR and OLA.

[0236] Schemes based on ligation of two (or more) oligonucleotides in the presence of nucleic acid having the sequence of the resulting “di-oligonucleotide”, thereby amplifying the di-oligonuclebtide, are also known (Wu et al., Genomics 4:560 (1989), herein incorporated by reference in its entirety), and may be readily adapted to the purposes of the present invention.

[0237] Other known nucleic acid amplification procedures, such as allele-specific oligomers, branched DNA technology, transcription-based amplification systems, or isothermal amplification methods may also be used to amplify and analyze such polymorphisms (Malek, et al., U.S. Pat. No. 5,130,238; Davey, et al., European Patent Application 329,822; Schuster et al., U.S. Pat. No. 5,169,766; Miller, et al., PCT Application WO 89/06700; Kwoh, et al., Proc. Natl. Acad. Sci. (U.S.A.) 86:1173-1177 (1989); Gingeras, et al., PCT Application WO 88/10315; Walker, et al., Proc. Natl. Acad. Sci. (U.S.A.) 89:392-396 (1992), all of which are herein incorporated by reference in their entirety).

[0238] The identification of a polymorphism can be determined in a variety of ways. By correlating the presence or absence of it in an plant with the presence or absence of a phenotype, it is possible to predict the phenotype of that plant. If a polymorphism creates or destroys a restriction endonuclease cleavage site, or if it results in the loss or insertion of DNA (e.g., a VNTR polymorphism), it will alter the size or profile of the DNA fragments that are generated by digestion with that restriction endonuclease. As such, individuals that possess a variant sequence can be distinguished from those having the original sequence by restriction fragment analysis. Polymorphisms that can be identified in this manner are termed “restriction fragment length polymorphisms” (“RFLPs”). RFLPs have been widely used in human and plant genetic analyses (Glassberg, UK Patent Application 2135774; Skolnick, et al., Cytogen. Cell Genet. 32:58-67 (1982); Botstein, etal., Ann. J. Hum. Genet. 32:314-331 (1980); Fischer, etal. PCT Application WO90/13668; Uhlen, PCT Application WO90/11369, all of which are herein incorporated by reference in their entirety).

[0239] Polymorphisms can also be identified by Single Strand Conformation Polymorphism (SSCP) analysis. The SSCP technique is a method capable of identifying most sequence variations in a single strand of DNA, typically between 150 and 250 nucleotides in length (Elles, Methods in Molecular Medicine: Molecular Diagnosis of Genetic Diseases, Humana Press (1996); Orita et al., Genomics 5: 874-879 (1989), both of which are herein incorporated by reference in their entirety). Under denaturing conditions a single strand of DNA will adopt a conformation that is uniquely dependent on its sequence conformation. This conformation usually will be different, even if only a single base is changed. Most conformations have been reported to alter the physical configuration or size sufficiently to be detectable by electrophoresis. A number of protocols have been described for SSCP including, but not limited to Lee et al., Anal. Biochem. 205: 289-293 (1992); Suzuki et al., Anal. Biochem. 192: 82-84 (1991); Lo et al., Nucleic Acids Research 20: 1005-1009 (1992); Sarkar et al., Genomics 13: 441-443 (1992), all of which are herein incorporated by reference in their entirety). It is understood that one or more of the nucleic acids of the present invention, may be utilized as markers or probes to detect polymorphisms by SSCP analysis.

[0240] Polymorphisms may also be found using a DNA fingerprinting technique called amplified fragment length polymorphism (AFLP), which is based on the selective PCR amplification of restriction fragments from a total digest of genomic DNA to profile that DNA (Vos, et al., Nucleic Acids Res. 23:4407-4414 (1995), herein incorporated by reference in its entirety). This method allows for the specific co-amplification of high numbers of restriction fragments, which can be visualized by PCR without knowledge of the nucleic acid sequence.

[0241] AFLP employs basically three steps. Initially, a sample of genomic DNA is cut with restriction enzymes and oligonucleotide adapters are ligated to the restriction fragments of the DNA. The restriction fragments are then amplified using PCR by using the adapter and restriction sequence as target sites for primer annealing. The selective amplification is achieved by the use of primers that extend into the restriction fragments, amplifying only those fragments in which the primer extensions match the nucleotide flanking the restriction sites. These amplified fragments are then visualized on a denaturing polyacrylamide gel.

[0242] AFLP analysis has been performed on Salix (Beismann, et al., Mol. Ecol. 6:989-993 (1997); Acinetobacter (Janssen, et al., Int. J. Syst. Bacteriol 47:1179-1187 (1997), both of which are herein incorporated by reference in their entirety), Aeromonas popoffi (Huys, et al., Int. J. Syst. Bacteriol. 47:1165-1171 (1997), herein incorporated by reference in its entirety), rice (McCouch, et al., Plant Mol. Biol. 35:89-99 (1997); Nandi, et al., Mol. Gen. Genet. 255:1-8 (1997); Cho, et al., Genome 39:373-378 (1996), all of which are herein incorporated by reference in their entirety), barley (Hordeum vulgare) (Simons, et al., Genomics 44:61-70 (1997); Waugh, et al., Mol. Gen. Genet. 255:311-321 (1997); Qi, et al., Mol. Genet. 254:330-336 (1997); Becker, et al., Mol. Gen. Genet. 249:65-73 (1995), all of which are herein incorporated by reference in their entirety), potato (Van der Voort, et al., Mol. Gen. Genet. 255:438-447 (1997); Meksem, et al., Mol. Gen. Genet. 249:74-81 (1995), both of which are herein incorporated by reference in their entirety), Phytophthora infestans (Van der Lee, et al., Fungal Genet. Biol. 21:278-291 (1997), herein incorporated by reference in its entirety), Bacillus anthracis (Keim, et al., J. Bacteriol. 179:818-824 (1997), herein incorporated by reference in its entirety), Astragalus cremnophylax (Travis, et al., Mol. Ecol. 5:735-745 (1996), herein incorporated by reference in its entirety), Arabidopsis (Cnops, et al., Mol. Gen. Genet. 253:32-41 (1996), herein incorporated by reference in its entirety), Escherichia coli (Lin, et al., Nucleic Acids Res. 24:3649-3650 (1996), herein incorporated by reference in its entirety), Aeromonas (Huys, et al., Int. J. Syst. Bacteriol. 46:572-580 (1996), herein incorporated by reference in its entirety), nematode (Folkertsma, et al., Mol. Plant Microbe Interact. 9:47-54 (1996), herein incorporated by reference in its entirety), tomato (Thomas, et al., Plant J. 8:785-794 (1995), herein incorporated by reference in its entirety), and human (Latorra, et al., PCR Methods Appl. 3:351-358 (1994), herein incorporated by reference in its entirety). AFLP analysis has also been used for fingerprinting mRNA (Money, et al., Nucleic Acids Res. 24:2616-2617 (1996); Bachem, et al., Plant J. 9:745-753 (1996), both of which are herein incorporated by 30 reference in their entirety). It is understood that one or more of the nucleic acid molecules of the present invention, may be utilized as markers or probes to detect polymorphisms by AFLP analysis for fingerprinting mRNA.

[0243] Polymorphisms may also be found using random amplified polymorphic DNA (RAPD) (Williams et al., Nucl. Acids Res. 18: 6531-6535 (1990), herein incorporated by reference in its entirety) and cleaveable amplified polymorphic sequences (CAPS) (Lyamichev et al., Science 260: 778-783 (1993), herein incorporated by reference in its entirety). It is understood that one or more of the nucleic acid molecules of the present invention, may be utilized as markers or probes to detect polymorphisms by RAPD or CAPS analysis.

[0244] Polymorphisms are useful, through linkage analysis, to define the genetic distances or physical distances between polymorphic traits. A physical map or ordered array of genomic DNA fragments in the desired region containing the gene may be used to characterize and isolate genes corresponding to desirable traits. For this purpose, yeast artificial chromosomes (YACs), bacterial artificial chromosomes (BACs), and cosmids are appropriate vectors for cloning large segments of DNA molecules. Although fewer clones are needed to make a contig for a specific genomic region by using YACs (Agyare et al., Genome Res. 7: 1-9 (1997); James et al., Genomics 32: 425-430 (1996), both of which are herein incorporated by reference in their entirety), chimerism in the inserted DNA fragment can arise. Cosmids are convenient for handling smaller-size DNA molecules and may be used for transformation in developing transgenic plants. BACs also carry DNA fragments and are less prone to chimerism.

[0245] Through genetic mapping, a fine scale linkage map can be developed using DNA markers, and, then, a genomic DNA library of large-sized fragments can be screened with molecular markers linked to the desired trait. Molecular markers are advantageous for agronomic traits that are otherwise difficult to tag, such as resistance to pathogens, insects and nematodes, tolerance to abiotic stresses, quality parameters and quantitative traits. The essential requirements for marker-assisted selection in a plant breeding program are: (1) the marker(s) should co-segregate or be closely linked with the desired trait; (2) an efficient means of screening large populations for the molecular marker(s) should be available; and (3) the screening technique should have high reproducibility across laboratories, be economical to use and be user-friendly. Molecular marker studies using near-isogenic lines (NILs) (Martin et al., Proc. Natl. Acad. Sci. (U.S.A). 88: 2336-2340 (1991); Young et al., Genetics 120: 579-585. (1988), both of which are herein incorporated by reference in their entirety), bulked segregant analysis (Michelmore et al., Proc. Natl. Acad. Sci. (U.S.A) 88: 9828-9832 (1991), herein incorporated by reference in its entirety) or recombinant inbred lines (Mohan et al., Theor. Appl. Genet. 87: 782-788 (1994), herein incorporated by reference in its entirety) have been used to map genes in different plant species (Coe and Neuffer, In: Genetic maps: locus maps of complex genomes, ed. S. J. O'Brien, Cold Spring Harbor Laboratory, Cold Spring Harbor, N.Y., 157-189 (1993), herein incorporated by reference in its entirety). It is understood that one or more of the nucleic acid molecules of the present invention may be used as molecular markers.

[0246] In accordance with this aspect of the present invention, a sample nucleic acid is obtained from cells. Any source of nucleic acid may be used. Preferably, the nucleic acid is genomic DNA. The nucleic acid is subjected to restriction endonuclease digestion. For example, one or more EST nucleic acid molecule or fragment thereof can be used as a probe in accordance with the above-described polymorphic methods. The polymorphism obtained in this approach can then be cloned to identify the mutation at the coding region which alters the protein's structure or regulatory region of the gene which affects its expression level.

[0247] In one aspect of the present invention, an evaluation can be conducted to determine whether a particular mRNA molecule is present. One or more of the nucleic acid molecules of the present invention, preferably one or more of the EST nucleic acid molecules of the present invention are utilized to detect the presence or quantity of the mRNA species. Such molecules are then incubated with cell or tissue extracts of a plant under conditions sufficient to permit nucleic acid hybridization. The detection of double-stranded probe-mRNA hybrid molecules is indicative of the presence of the mRNA; the amount of such hybrid formed is proportional to the amount of mRNA. Thus, such probes may be used to ascertain the level and extent of the mRNA production in a plant's cells or tissues. Such nucleic acid hybridization may be conducted under quantitative conditions (thereby providing a numerical value of the amount of the mRNA present). Alternatively, the assay may be conducted as a qualitative assay that indicates either that the mRNA is present, or that its level exceeds a user set, predefined value.

[0248] A principle of in situ hybridization is that a labeled, single-stranded nucleic acid probe will hybridize to a complementary strand of cellular DNA or RNA and, under the appropriate conditions, these molecules will form a stable hybrid. When nucleic acid hybridization is combined with histological techniques, specific DNA or RNA sequences can be identified within a single cell. An advantage of in situ hybridization over more conventional techniques for the detection of nucleic acids is that it allows an investigator to determine the precise spatial population (Angerer et al., Dev. Biol. 101: 477-484 (1984); Angerer et al., Dev. Biol. 112: 157-166 (1985); Dixon etal., EMBO J. 10: 1317-1324 (1991), all of which are herein incorporated by reference in their entirety). In situ hybridization may be used to measure the steady-state level of RNA accumulation. It is a sensitive technique and RNA sequences present in as few as 5-10 copies per cell can be detected (Hardin et al., J. Mol. Biol. 202: 417-431. (1989), herein incorporated by reference in its entirety). A number of protocols have been devised for in situ hybridization, each with tissue preparation, hybridization, and washing conditions (Meyerowitz, Plant Mol. Biol. Rep. 5: 242-250 (1987); Cox and Goldberg, In: Plant Molecular Biology: A Practical Approach (ed. C. H. Shaw), pp. 1-35. IRL Press, Oxford (1988); Raikhel et al., In situ RNA hybridization in plant tissues. In Plant Molecular Biology Manual, vol. B9: 1-32. Kluwer Academic Publisher, Dordrecht, Belgium (1989), all of which are herein incorporated by reference in their entirety).

[0249] In situ hybridization also allows for the localization of proteins within a tissue or cell (Wilkinson, In Situ Hybridization, Oxford University Press, Oxford (1992); Langdale, In Situ Hybridization 165-179 In: The Maize Handbook, eds. Freeling and Walbot, Springer-Verlag, New York (1994), both of which are herein incorporated by reference in their entirety). It is understood that one or more of the molecules of the present invention, preferably one or more of the EST nucleic acid molecules of the present invention or one or more of the antibodies of the present invention may be utilized to detect the expression level or pattern of a protein or mRNA thereof by in situ hybridization.

[0250] Fluorescent in situ hybridization also enables the localization of a particular DNA sequence along a chromosome which is useful, among other uses, for gene mapping, following chromosomes in hybrid lines or detecting chromosomes with translocations, transversions or deletions. In situ hybridization has been used to identify chromosomes in several plant species (Griffor et al., Plant Mol. Biol. 17: 101-109 (1991); Gustafson et al., Proc. Nat'l. Acad. Sci. (U.S.A). 87: 1899-1902 (1990); Mukai and Gill, Genome 34: 448-452. (1991); Schwarzacher and Heslop-Harrison, Genome 34: 317-323 (1991); Wang et al., Jpn. J. Genet. 66: 313-316 (1991); Parra and Windle, Nature Genetics, 5: 17-21 (1993), all of which are herein incorporated by reference in their entirety). It is understood that the nucleic acid molecules of the present L invention may be used as probes or markers to localize sequences along a chromosome.

[0251] It is also understood that one or more of the molecules of the present invention, preferably one or more of the EST nucleic acid molecules of the present invention or one or more of the antibodies of the present invention may be utilized to detect the expression level or pattern of a protein or mRNA thereof by in situ hybridization.

[0252] Further, it is also understood that any of the nucleic acid molecules of the present invention may be used as marker nucleic acids and or probes in connection with methods that require probes or marker nucleic acids. As used herein, a probe is an agent that is utilized to determine an attribute or feature (e.g. presence or absence, location, correlation, identity, etc.) or a molecule, cell, tissue or plant. As used herein, a marker nucleic acid is a nucleic acid molecule that is utilized to determine an attribute or feature (e.g., presence or absence, location, correlation, etc.) or a molecule, cell, tissue or plant.

[0253] Nucleic acid molecules of the present invention can be used to monitor expression. A microarray-based method for high-throughput monitoring of gene expression may be utilized to measure gene-specific hybridization targets. This ‘chip’-based approach involves using microarrays of nucleic acid molecules as gene-specific hybridization targets to quantitatively measure expression of the corresponding genes (Schena et al., Science 270: 467-470 (1995); Shalon, Ph.D. Thesis, Stanford University (1996), both of which are herein incorporated by reference in their entirety). Every nucleotide in a large sequence can be queried at the same time. Hybridization can be used to efficiently analyze nucleotide sequences.

[0254] Several microarray methods have been described. One method compares the sequences to be analyzed by hybridization to a set of oligonucleotides or cDNA molecules representing all possible subsequences (Bains and Smith, J. Theor. Biol. 135: 303 (1989), herein incorporated by reference in its entirety). A second method hybridizes the sample to an array of oligonucleotide or cDNA probes. An array consisting of oligonucleotides or cDNA molecules complementary to subsequences of a target sequence can be used to determine the identity of a target sequence, measure its amount, and detect differences between the target and a reference sequence. Nucleic acid molecules microarrays may also be screened with protein molecules or fragments thereof to determine nucleic acid molecules that specifically bind protein molecules or fragments thereof.

[0255] The microarray approach may also be used with polypeptide targets (U.S. Pat. Nos. 5,445,934; 5,143,854; 5,079,600; 4,923,901, all of which are herein incorporated by reference in their entirety). Essentially, polypeptides are synthesized on a substrate (microarray) and these polypeptides can be screened with either protein molecules or fragments thereof or nucleic acid molecules in order to screen for either protein molecules or fragments thereof or nucleic acid molecules that specifically bind the target polypeptides (Fodor et al., Science 251: 767-773 (1991), herein incorporated by reference in its entirety).

[0256] It is understood that one or more of the molecules of the present invention, preferably one or more of the nucleic acid molecules or protein molecules or fragments thereof of the present invention may be utilized in a microarray based method. In a preferred embodiment of the present invention, one or more of the C. sarokiniana nucleic acid molecules or protein molecules or fragments thereof of the present invention may be utilized in a microarray based method. A particular preferred microarray embodiment of the present invention is a microarray comprising nucleic acid molecules encoding genes or fragments thereof that are homologues of known genes or nucleic acid molecules that comprise genes or fragment thereof that elicit only limited or no matches to known genes. A further preferred microarray embodiment of the present invention is a microarray comprising nucleic acid molecules having genes or fragments thereof that are homologues of known genes and nucleic acid molecules that comprise genes or fragment thereof that elicit only limited or no matches to known genes.

[0257] Nucleic acid molecules of the present invention may be used in site directed mutagenesis. Site-directed mutagenesis may be utilized to modify nucleic acid sequences, particularly as it is a technique that allows one or more of the amino acids encoded by a nucleic acid molecule to be altered (e.g. a threonine to be replaced by a methionine). Three basic methods for site-directed mutagenesis are often employed. These are cassette mutagenesis (Wells et al., Gene 34: 315-23 (1985), herein incorporated by reference in its entirety), primer extension (Gilliam et al., Gene 12: 129-137 (1980); Zoller and Smith, Methods Enzymol, 100: 468-500 (1983); Dalbadie-McFarland et al., Proc. Natl. Acad. Sci. (U.S.A). 79: 6409-6413 (1982), all of which are herein incorporated by reference in their entirety) and methods based upon PCR (Scharf et al., Science 233: 1076-1078 (1986); Higuchi et al., Nucleic Acids Res. 16: 7351-7367 (1988), both of which are herein incorporated by reference in their entirety). Site-directed mutagenesis approaches are also described in EP 0 385 962, EP 0 359 472, and PCT Patent Application WO 93/07278, all of which are herein incorporated by reference by reference in their entirety.

[0258] Site-directed mutagenesis strategies have been applied to plants for both in vitro as well as in vivo site-directed mutagenesis (Lanz et al., J. Biol. Chem. 266: 9971-9976 (1991); Kovgan and Zhdanov, Biotekhnologiya 5: 148-154, No. 207160n, Chemical Abstracts 110: 225 (1989); Ge et al., Proc. Natl. Acad. Sci. (U.S.A.) 86: 4037-4041 (1989); Zhu et al., J. Biol. Chem. 271: 18494-18498 (1996); Chu et al., Biochemistry 33: 6150-6157 (1994), Small et al., EMBO J. 11: 1291-1296 (1992); Cho et al., Mol. Biotechnol. 8: 13-16 (1997); Kita et al., J. Biol. Chem. 271: 26529-26535 (1996); Jin et al., Mol. Microbiol 7: 555-562 (1993); Hatfield and Vierstra, J. Biol. Chem. 267: 14799-14803 (1992); Zhao et al., Biochemistry 31: 5093-5099 (1992), all of which are herein incorporated by reference in their entirety).

[0259] Any of the nucleic acid molecules of the present invention may either be modified by site-directed mutagenesis or used as, for example, nucleic acid molecules that are used to target other nucleic acid molecules for modification. It is understood that mutants with more than one altered nucleotide can be constructed using techniques that practitioners skilled in the art are familiar with such as isolating restriction fragments and ligating such fragments into an expression vector (see, for example, Sambrook et al., Molecular Cloning: A Laboratory Manual, Cold Spring Harbor Press (1989)). In a preferred embodiment of the present invention, one or more of the nucleic acid molecules or fragments thereof of the present invention may be modified by site-directed mutagenesis.

[0260] In addition to the above discussed procedures, practitioners are familiar with the standard resource materials which describe specific conditions and procedures for the construction, manipulation and isolation of macromolecules (e.g., DNA molecules, plasmids, etc.), generation of recombinant organisms and the screening and isolating of clones, (see for example, Sambrook et al., Molecular Cloning: A Laboratory Manual, Cold Spring Harbor Press (1989); Mailga et al., Methods in Plant Molecular Biology, Cold Spring Harbor Press (1995); Birren et al., Genome Analysis: Analyzing DNA, 1, Cold Spring Harbor, N.Y., all of which are herein incorporated by reference in their entirety).

[0261] Having now generally described the invention, the same will be more readily understood through reference to the following examples which are provided by way of illustration, and are not intended to be limiting of the present invention, unless specified.

### EXAMPLE 1

[0262] The cDNA library (LIB3602) is prepared from the cell cultures of the eukaryotic unicellular green alga Chlorella sarokiniana. Chlorella cultures were grown under light in ammonium media (29 mM, NH₄Cl, 18.4 mM KH₂PO₄, 0.3 mM EDTA, 6.0 mM K₂SO₄, 0.34 mM CaCl₂·2 H ₂O, 1.5 mM MgCl·6 H₂O, 0.733 mM ZnCl₂, 0.189 mM CoCl₂·6H₂O, 0.351 mM CuCl₂·2 H₂O, 10.11 mM MnCl·4 H₂O, 0.190 mM NiCl₂·6 H₂O, 0.196 mM NH₄VO₃, 0.190 mM SnCl₂·2 H₂O, 38.82 mM H₃BO₃, 4.186 mM (NH₄)₆Mo₇O₂₄·4H₂O). The illuminated cultures were bubbled continuously with a CO₂-air mixture and kept in constant motion with a stir bar powered by a magnetic stirrer. Cells were harvested by centrifugation

[0263] Total RNA was purified from the harvested cell culture using Trizol reagent from Life Technologies (Gibco BRL, Life Technologies, Gaithersburg, Md. U.S.A.), essentially as recommended by the manufacturer. Poly A+ mRNA was purified by oligo dT chromatography (Oligotex kit by Qiagen).

[0264] Construction of cDNA libraries is well-known in the art and a number of cloning strategies exist. A number of cDNA library construction kits are commercially available. The Superscript™ Plasmid System for cDNA synthesis and Plasmid Cloning (Gibco BRL, Life Technologies, Gaithersburg, Md. U.S.A.) was used, following the conditions suggested by the manufacturer. The cDNA was ligated into the pSPORT 1 cloning vector.

### EXAMPLE 2

[0265] The cDNA library of the present invention, LIB3602, is plated on LB agar containing the appropriate antibiotics for selection and incubated at 37° C. for a sufficient time to allow the growth of individual colonies. Single colonies are individually placed in each well of 96-well microtiter plates containing LB liquid including the selective antibiotics. The plates are incubated overnight at approximately 37° C. with gentle shaking to promote growth of the cultures. The plasmid DNA is isolated from each clone using a commercially available kit such as Qiaprep plasmid isolation kits, using the conditions recommended by the manufacturer (Qiagen Inc., Santa Clarita, Calif.). Avariety of plasmid isolation kits are commercially available.

[0266] The template plasmid DNA clones are used for subsequent sequencing. For sequencing the cDNA library LIB3602, a commercially available sequencing kit, such as the ABI PRISM dRhodamine Terminator Cycle Sequencing Ready Reaction Kit with AmpliTaq® DNA Polymerase, FS, is used under the conditions recommended by the manufacturer (PE Applied Biosystems, Foster City, Calif.). The ESTs of the present invention are generated by sequencing initiated from the 5′ end of each cDNA clone.

[0267] Two basic methods can be used for DNA sequencing, the chain termination method of Sanger et al., Proc. Natl. Acad. Sci. (U.S.A.) 74: 5463-5467 (1977), herein incorporated by reference in its entirety and the chemical degradation method of Maxam and Gilbert, Proc. Natl. Acad. Sci. (U.S.A.) 74: 560-564 (1977), herein incorporated by reference in its entirety. Automation and advances in technology such as the replacement of radioisotopes with fluorescence-based sequencing have reduced the effort required to sequence DNA (Craxton, Method, 2: 20-26 (1991); Ju et al., Proc. Natl. Acad. Sci. (U.S.A.) 92: 4347-4351 (1995); Tabor and Richardson, Proc. Natl. Acad. Sci. (U.S.A.) 92: 6339-6343 (1995), all of which are herein incorporated by reference in their entirety). Automated sequencers are available from, for example, Pharmacia Biotech, Inc., Piscataway, N.J. (Pharmacia ALF), LI-COR, Inc., Lincoln, Nebr. (LI-COR 4,000) and Millipore, Bedford, Mass. (Millipore BaseStation).

[0268] In addition, advances in capillary gel electrophoresis have also reduced the effort required to sequence DNA and such advances provide a rapid high resolution approach for sequencing DNA samples (Swerdlow and Gesteland, Nucleic Acids Res. 18: 1415-1419(1990); Smith, Nature 349: 812-813 (1991); Luckey et al., Methods Enzymol. 218: 154-172 (1993); Lu et al., J. Chromatog. A. 680: 497-501 (1994); Carson etal., Anal. Chem. 65:3219-3226(1993); Huang etal., Anal. Chem. 64:2149-2154(1992); Kheterpal et al., Electrophoresis 17: 1852-1859 (1996); Quesada and Zhang, Electrophoresis 17: 1841-1851 (1996); Baba, Yakugaku Zasshi 117: 265-281 (1997), all of which are herein incorporated by reference in their entirety).

[0269] A number of sequencing techniques are known in the art, including fluorescence-based sequencing methodologies. These methods have the detection, automation and instrumentation capability necessary for the analysis of large volumes of sequence data. Currently, the 377 DNA Sequencer (Perkin-Elmer Corp., Applied Biosystems Div., Foster City, Calif.) allows the most rapid electrophoresis and data collection. With u these types of automated systems, fluorescent dye-labeled sequence reaction products are detected and data entered directly into the computer, producing a chromatogram that is subsequently viewed, stored, and analyzed using the corresponding software programs. These methods are known to those of skill in the art and have been described and reviewed (Birren et al., Genome Analysis: Analyzing DNA, 1, Cold Spring Harbor, N.Y., herein incorporated by reference in its entirety).

### EXAMPLE 3

[0270] This example illustrates sequence comparison to determine the similarity/identitiy of the test or query sequence with sequences in publicly available or proprietary databases. A characteristic feature of a protein or DNA sequence is that it can be compared with other known protein or DNA sequences. Sequence comparisons can be undertaken by determining the similarity of the test or query sequence with sequences in publicly available or proprietary databases (“similarity analysis”) or by searching for certain motifs (“intrinsic sequence analysis”)(e.g. cis elements)(Coulson, Trends in Biotechnology, 12: 76-80 (1994); Birren, et al., Genome Analysis, 1: 543-559 (1997); both of which are herein incorporated by reference in their entirety).

[0271] Similarity analysis includes database search and alignment. Examples of public databases include the DNA Database of Japan (DDBJ)(http://www.ddbj.nig.ac.jp/); GeneBank (http://www.ncbi.nlm.nih.gov/web/GenBank/Index.htlm); and the European Molecular Biology Laboratory Nucleotide sequence Database (EMBL) (http://www.ebi.ac.uk/ebi docs/embl db.html).

[0272] A number of different search algorithms have been developed, one example of which are the suite of programs referred to as BLAST programs. There are five implementations of BLAST, three designed for nucleotide sequences queries (BLASTN, BLASTX, and TBLASTX) and two designed for protein sequence queries (BLASTP and TBLASTN) (Coulson, Trends in Biotechnology, 12: 76-80 (1994); Birren, et al., Genome Analysis, 1: 543-559 (1997)).

[0273] BLASTN takes a nucleotide sequence (the query sequence) and its reverse complement and searches them against a nucleotide sequence database. BLASTN was designed for speed, not maximum sensitivity, and may not find distantly related coding sequences. BLASTX takes a nucleotide sequence, translates it in three forward reading frames and three reverse complement reading frames, and then compares the six translations against a protein sequence database. BLASTX is useful for sensitive analysis of preliminary (single-pass) sequence data and is tolerant of sequencing errors (Gish and States, Nature Genetics, 3: 266-272 (1993), herein incorporated by reference). BLASTN and BLASTX may be used in concert for analyzing EST data (Coulson, Trends in Biotechnology, 12: 76-80 (1994); Birren et al., Genome Analysis, 1: 543-559 (1997)).

[0274] Given a coding nucleotide sequence and the protein it encodes, it is often preferable to use the protein as the query sequence to search a database because of the greatly increased sensitivity to detect more subtle relationships. This is due to the larger alphabet of proteins (20 amino acids) compared with the alphabet of nucleotide sequences (4 bases), where it is far easier to obtain a match by chance. In addition, with nucleotide alignments, only a match (positive score) or a mismatch (negative score) is obtained, but with proteins, the presence of conservative amino acid substitutions can be taken into account. Here, a mismatch may yield a positive score if the non-identical residue has physicauchemical properties similar to the one it replaced. Various scoring matrices are used to supply the substitution scores of all possible amino acid pairs. A general purpose scoring system is the BLOSUM62 matrix (Henikoff and Henikoff, Proteins, 17: 49-61 (1993), herein incorporated by reference in its entirety), which is currently the default choice for BLAST programs. BLOSUM62 is tailored for alignments of moderately diverged sequences and thus may not yield the best results under all conditions. Altschul, J. Mol. Biol. 36: 290-300 (1993), herein incorporated by reference in its entirety, uses a combination of three matrices to cover all contingencies. This may improve sensitivity, but at the expense of slower searches. In practice, a single BLOSUM62 matrix is often used but others (PAM40 and PAM250) may be attempted when additional analysis is necessary. Low PAM matrices are directed at detecting very strong but localized sequence similarities, whereas high PAM matrices are directed at detecting long but weak alignments between very distantly related sequences.

[0275] Homologues in other organisms are available that can be used for comparative sequence analysis. Multiple alignments are performed to study similarities and differences in a group of related sequences. CLUSTAL W is a multiple sequence alignment package available that performs progressive multiple sequence alignments based on the method of Feng and Doolittle, J. Mol. Evol. 25: 351-360 (1987), the entirety of which is herein incorporated by reference. Each pair of sequences is aligned and the distance between each pair is calculated; from this distance matrix, a guide tree is calculated, and all of the sequences are progressively aligned based on this tree. A feature of the program is its sensitivity to the effect of gaps on the alignment; gap penalties are varied to encourage the insertion of gaps in probable loop regions instead of in the middle of structured regions. Users can specify gap penalties, choose between a number of scoring matrices, or supply their own scoring matrix for both the pairwise alignments and the multiple alignments. CLUSTAL W for UNIX and VMS systems is available at: ftp.ebi.ac.uk. Another program is MACAW (Schuler et al., Proteins, Struct. Func. Genet, 9:180-190 (1991), the entirety of which is herein incorporated by reference, for which both Macintosh and Microsoft Windows versions are available. MACAW uses a graphical interface, provides a choice of several alignment algorithms, and is available by anonymous ftp at: ncbi.nlm.nih.gov (directory/pub/macaw).

[0276] Sequence motifs are derived from multiple alignments and can be used to examine individual sequences or an entire database for subtle patterns. With motifs, it is sometimes possible to detect distant relationships that may not be demonstrable based on comparisons of primary sequences alone. Currently, the largest collection of sequence motifs in the world is PROSITE (Bairoch and Bucher, Nucleic Acid Research, 22: 3583-3589 (1994), the entirety of which is herein incorporated by reference.) PROSITE may be accessed via either the ExPASy server on the World Wide Web or anonymous ftp site. Many commercial sequence analysis packages also provide search programs that use PROSITE data.

[0277] A resource for searching protein motifs is the BLOCKS E-mail server developed by S. Henikoff, Trends Biochem Sci., 18:267-268 (1993); Henikoff and Henikoff, Nucleic Acid Research, 19:6565-6572 (1991); Henikoff and Henikoff, Proteins, 17: 49-61 (1993); all of which are herein incorporated by reference in their entirety). BLOCKS searches a protein or nucleotide sequence against a database of protein motifs or “blocks.” Blocks are defined as short, ungapped multiple alignments that represent highly conserved protein patterns. The blocks themselves are derived from entries in PROSITE as well as other sources. Either a protein or nucleotide query can be submitted to the BLOCKS server; if a nucleotide sequence is submitted, the sequence is translated in all six reading frames and motifs are sought in these conceptual translations. Once the search is completed, the server will return a ranked list of significant matches, along with an alignment of the query sequence to the matched BLOCKS entries.

[0278] Conserved protein domains can be represented by two-dimensional matrices, which measure either the frequency or probability of the occurrences of each amino acid residue and deletions or insertions in each position of the domain. This type of model, when used to search against protein databases, is sensitive and usually yields more accurate results than simple motif searches. Two popular implementations of this approach are profile searches (such as GCG program ProfileSearch) and Hidden Markov Models (HMMs)(Krough et al., J. Mol. Biol. 235:1501-1531 (1994); Eddy, Current Opinion in Structural Biology 6:361-365 (1996), both of which are herein incorporated by reference in their entirety). In both cases, a large number of common protein domains have been converted into profiles, as present in the PROSITE library, or HHM models, as in the Pfam protein domain library (Sonnhammer et al., Proteins 28:405-420 (1997), the entirety of which is herein incorporated by reference). Pfam contains more than 500 HMM models for enzymes, transcription factors, signal transduction molecules, and structural proteins. Protein databases can be queried with these profiles or HMM models, which will identify proteins containing the w domain of interest. For example, HMMSW or HMMFS, two programs in a public domain package called HMMER (Sonnhammer et al., Proteins 28:405-420 (1997)) can be used.

[0279] PROSITE and BLOCKS represent collected families of protein motifs. Thus, searching these -databases entails submitting a single sequence to determine whether or not that sequence is similar to the members of an established family. Programs working in the opposite direction compare a collection of sequences with individual entries in the protein databases. An example of such a program is the Motif Search Tool, or MoST (Tatusov et al. Proc. Natl. Acad. Sci. 91: 12091-12095 (1994), the entirety of which is herein incorporated by reference.) On the basis of an aligned set of input sequences, a weight matrix is calculated by using one of four methods (selected by the user); a weight matrix is simply a representation, position by position in an alignment, of how likely a particular amino acid will appear. The calculated weight matrix is then used to search the databases. To increase sensitivity, newly found sequences are added to the original data set, the weight matrix is recalculated, and the search is performed again. This procedure continues until no new sequences are found.

[0280] Table 1 lists the nucleic acid molecules encoding homologs of known proteins.

TABLE 1

| SEQ | | | | BLAST | | % | |
|---|---|---|---|---|---|---|---|
| ID No. | Clone ID | NCBI gi | Method | Score | E value | Ident | NCBI gi Description |
| 1 | LIB3602-077-Q6-K6-F1 | 2500354 | BLASTX | 866 | 3.00E−93 | 81 | 60S RIBOSOMAL PROTEIN L10 (EQM) |
| | | | | | | | >gi\|1902894\|dbj\|BAA19462.1\| (AB001891) QM |
| | | | | | | | family protein [Solanum melongena] |
| 2 | LIB3602-006-Q1-K1-B6 | 2500354 | BLASTX | 862 | 8.00E−93 | 81 | 60S RIBOSOMAL PROTEIN L10 (EQM) |
| | | | | | | | >gi\|1902894\|dbj\|BAA19462.1\| (AB001891) QM |
| | | | | | | | family protein [Solanum melongena] |
| 3 | LIB3602-076-Q6-K6-F1 | 2500354 | BLASTX | 844 | 1.00E−90 | 84 | 60S RIBOSOMAL PROTEIN L10 (EQM) |
| | | | | | | | >gi\|1902894\|dbj\|BAA19462.1\| (AB001891) QM |
| | | | | | | | family protein [Solanum melongena] |
| 4 | LIB3602-092-Q6-K6-H1 | 2500354 | BLASTX | 844 | 1.00E−90 | 84 | 60S RIBOSOMAL PROTEIN L10 (EQM) |
| | | | | | | | >gi\|1902894\|dbj\|BAA19462.1\| (AB001891) QM |
| | | | | | | | family protein [Solanum melongena] |
| 5 | LIB3602-066-Q1-K6-G9 | 2500354 | BLASTX | 840 | 3.00E−90 | 82 | 60S RIBOSOMAL PROTEIN L10 (EQM) |
| | | | | | | | >gi\|1902894\|dbj\|BAA19462.1\| (AB001891) QM |
| | | | | | | | family protein [Solanum melongena] |
| 6 | LIB3602-074-Q1-K1-B8 | 2500354 | BLASTX | 828 | 8.00E−89 | 80 | 60S RIBOSOMAL PROTEIN L10 (EQM) |
| | | | | | | | >gi\|1902894\|dbj\|BAA19462.1\| (AB001891) QM |
| | | | | | | | family protein [Solanum melongena] |
| 7 | LIB3602-018-Q6-K1-D3 | 2500354 | BLASTX | 807 | 2.00E−86 | 81 | 60S RIBOSOMAL PROTEIN L10 (EQM) |
| | | | | | | | >gi\|1902894\|dbj\|BAA19462.1\| (AB001891) QM |
| | | | | | | | family protein [Solanum melongena] |
| 8 | LIB3602-049-Q6-K1-H3 | 2500354 | BLASTX | 769 | 6.00E−82 | 81 | 60S RIBOSOMAL PROTEIN L10 (EQM) |
| | | | | | | | >gi\|1902894\|dbj\|BAA19462.1\| (AB001891) QM |
| | | | | | | | family protein [Solanum melongena] |
| 9 | LIB3602-093-Q6-K6-G1 | 2500354 | BLASTX | 758 | 1.00E−80 | 79 | 60S RIBOSOMAL PROTEIN L10 (EQM) |
| | | | | | | | >gi\|1902894\|dbj\|BAA19462.1\| (AB001891) QM |
| | | | | | | | family protein [Solanum melongena] |
| 10 | LIB3602-080-Q6-K6-A8 | 2500354 | BLASTX | 758 | 2.00E−80 | 79 | 60S RIBOSOMAL PROTEIN L10 (EQM) |
| | | | | | | | >gi\|1902894\|dbj\|BAA19462.1\| (AB001891) QM |
| | | | | | | | family protein [Solanum melongena] |
| 11 | LIB3602-090-Q6-K6-H7 | 2500354 | BLASTX | 757 | 2.00E−80 | 79 | 60S RIBOSOMAL PROTEIN L10 (EQM) |
| | | | | | | | >gi\|1902894\|dbj\|BAA19462.1\| (AB001891) QM |
| | | | | | | | family protein [Solanum melongena] |
| 12 | LIB3602-028-Q6-K1-D12 | 2500354 | BLASTX | 715 | 1.00E−75 | 81 | 60S RIBOSOMAL PROTEIN L10 (EQM) |
| | | | | | | | >gi\|1902894\|dbj\|BAA19462.1\| (AB001891) QM |
| | | | | | | | family protein [Solanum melongena] |
| 13 | LIB3602-091-Q6-K6-H7 | 2500354 | BLASTX | 595 | 2.00E−75 | 79 | 60S RIBOSOMAL PROTEIN L10 (EQM) |
| | | | | | | | >gi\|1902894\|dbj\|BAA19462.1\| (AB001891) QM |
| | | | | | | | family protein [Solanum melongena] |
| 14 | LIB3602-094-Q6-K6-H7 | 2500354 | BLASTX | 583 | 2.00E−75 | 78 | 60S RIBOSOMAL PROTEIN L10 (EQM) |
| | | | | | | | >gi\|1902894\|dbj\|BAA19462.1\| (AB001891) QM |
| | | | | | | | family protein [Solanum melongena] |
| 15 | LIB3602-058-Q6-K1-G2 | 2500354 | BLASTX | 694 | 3.00E−73 | 80 | 60S RIBOSOMAL PROTEIN L10 (EQM) |
| | | | | | | | >gi\|1902894\|dbj\|BAA19462.1\| (AB001891) QM |
| | | | | | | | family protein [Solanum melongena] |
| 16 | LIB3602-106-Q1-K1-F7 | 2500354 | BLASTX | 666 | 3.00E−73 | 78 | 60S RIBOSOMAL PROTEIN L10 (EQM) |
| | | | | | | | >gi\|1902894\|dbj\|BAA19462.1\| (AB001891) QM |
| | | | | | | | family protein [Solanum melongena] |
| 17 | LIB3602-093-Q6-K6-B12 | 2500354 | BLASTX | 666 | 2.00E−72 | 78 | 60S RIBOSOMAL PROTEIN L10 (EQM) |
| | | | | | | | >gi\|1902894\|dbj\|BAA19462.1\| (AB001891) QM |
| | | | | | | | family protein [Solanum melongena] |
| 18 | LIB3602-046-Q6-K1-H6 | 2500354 | BLASTX | 660 | 3.00E−69 | 80 | 60S RIBOSOMAL PROTEIN L10 (EQM) |
| | | | | | | | >gi\|1902894\|dbj\|BAA19462.1\| (AB001891) QM |
| | | | | | | | family protein [Solanum melongena] |
| 19 | LIB3602-018-Q6-K1-C3 | 2500354 | BLASTX | 620 | 1.00E−64 | 73 | 60S RIBOSOMAL PROTEIN L10 (EQM) |
| | | | | | | | >gi\|1902894\|dbj\|BAA19462.1\| (AB001891) QM |
| | | | | | | | family protein [Solanum melongena] |
| 20 | LIB3602-095-Q6-K6-A11 | 2500354 | BLASTX | 586 | 1.00E−64 | 78 | 60S RIBOSOMAL PROTEIN L10 (EQM) |
| | | | | | | | >gi\|1902894\|dbj\|BAA19462.1\| (AB001891) QM |
| | | | | | | | family protein [Solanum melongena] |
| 21 | LIB3602-057-Q6-K1-F8 | 2500354 | BLASTX | 609 | 3.00E−63 | 78 | 60S RIBOSOMAL PROTEIN L10 (EQM) |
| | | | | | | | >gi\|1902894\|dbj\|BAA19462.1\| (AB001891) QM |
| | | | | | | | family protein [Solanum melongena] |
| 22 | LIB3602-076-Q6-K6-A12 | 2500354 | BLASTX | 584 | 3.00E−60 | 80 | 60S RIBOSOMAL PROTEIN L10 (EQM) |
| | | | | | | | >gi\|1902894\|dbj\|BAA19462.1\| (AB001891) QM |
| | | | | | | | family protein [Solanum melongena] |
| 23 | LIB3602-034-Q6-K1-F12 | 2500354 | BLASTX | 581 | 4.00E−60 | 80 | 60S RIBOSOMAL PROTEIN L10 (EQM) |
| | | | | | | | >gi\|1902894\|dbj\|BAA19462.1\| (AB001891) QM |
| | | | | | | | family protein [Solanum melongena] |
| 24 | LIB3602-094-Q6-K6-A11 | 2500354 | BLASTX | 572 | 8.00E−59 | 76 | 60S RIBOSOMAL PROTEIN L10 (EQM) |
| | | | | | | | >gi\|1902894\|dbj\|BAA19462.1\| (AB001891) QM |
| | | | | | | | family protein [Solanum melongena] |
| 25 | LIB3602-032-Q6-K1-A5 | 2500354 | BLASTX | 523 | 3.00E−53 | 78 | 60S RIBOSOMAL PROTEIN L10 (EQM) |
| | | | | | | | >gi\|1902894\|dbj\|BAA19462.1\| (AB001891) QM |
| | | | | | | | family protein [Solanum melongena] |
| 26 | LIB3602-058-Q6-K1-E12 | 2500354 | BLASTX | 502 | 9.00E−51 | 77 | 60S RIBOSOMAL PROTEIN L10 (EQM) |
| | | | | | | | >gi\|1902894\|dbj\|BAA19462.1\| (AB001891) QM |
| | | | | | | | family protein [Solanum melongena] |
| 27 | LIB3602-035-Q1-K1-F12 | 2500354 | BLASTX | 494 | 9.00E−50 | 77 | 60S RIBOSOMAL PROTEIN L10 (EQM) |
| | | | | | | | >gi\|1902894\|dbj\|BAA19462.1\| (AB001891) QM |
| | | | | | | | family protein [Solanum melongena] |
| 28 | LIB3602-038-Q6-K1-B9 | 2500354 | BLASTX | 481 | 2.00E−48 | 76 | 60S RIBOSOMAL PROTEIN L10 (EQM) |
| | | | | | | | >gi\|1902894\|dbj\|BAA19462.1\| (AB001891) QM |
| | | | | | | | family protein [Solanum melongena] |
| 29 | LIB3602-056-Q6-K1-D4 | 2500354 | BLASTX | 466 | 1.00E−46 | 76 | 60S RIBOSOMAL PROTEIN L10 (EQM) |
| | | | | | | | >gi\|1902894\|dbj\|BAA19462.1\| (AB001891) QM |
| | | | | | | | family protein [Solanum melongena] |
| 30 | LIB3602-070-Q1-K1-E9 | 2500354 | BLASTX | 462 | 6.00E−46 | 72 | 60S RIBOSOMAL PROTEIN L10 (EQM) |
| | | | | | | | >gi\|1902894\|dbj\|BAA19462.1\| (AB001891) QM |
| | | | | | | | family protein [Solanum melongena] |
| 31 | LIB3602-023-Q6-K1-H11 | 2500354 | BLASTX | 440 | 1.00E−43 | 75 | 60S RIBOSOMAL PROTEIN L10 (EQM) |
| | | | | | | | >gi\|1902894\|dbj\|BAA19462.1\| (AB001891) QM |
| | | | | | | | family protein [Solanum melongena] |
| 32 | LIB3602-095-Q6-K6-D8 | 2500354 | BLASTX | 419 | 4.00E−41 | 74 | 60S RIBOSOMAL PROTEIN L10 (EQM) |
| | | | | | | | >gi\|1902894\|dbj\|BAA19462.1\| (AB001891) QM |
| | | | | | | | family protein [Solanum melongena] |
| 33 | LIB3602-002-P1-K6-E9 | 2500354 | BLASTX | 419 | 6.00E−41 | 74 | 60S RIBOSOMAL PROTEIN L10 (EQM) |
| | | | | | | | >gi\|1902894\|dbj\|BAA19462.1\| (AB001891) QM |
| | | | | | | | family protein [Solanum melongena] |
| 34 | LIB3602-079-Q6-K6-E1 | 2500354 | BLASTX | 390 | 1.00E−37 | 66 | 60S RIBOSOMAL PROTEIN L10 (EQM) |
| | | | | | | | >gi\|1902894\|dbj\|BAA19462.1\| (AB001891) QM |
| | | | | | | | family protein [Solanum melongena] |
| 35 | LIB3602-055-Q6-K1-A8 | 2500354 | BLASTX | 367 | 5.00E−35 | 71 | 60S RIBOSOMAL PROTEIN L10 (EQM) |
| | | | | | | | >gi\|1902894\|dbj\|BAA19462.1\| (AB001891) QM |
| | | | | | | | family protein [Solanum melongena] |
| 36 | LIB3602-032-Q6-K1-B3 | 2500354 | BLASTX | 335 | 3.00E−31 | 70 | 60S RIBOSOMAL PROTEIN L10 (EQM) |
| | | | | | | | >gi\|1902894\|dbj\|BAA19462.1\| (AB001891) QM |
| | | | | | | | family protein [Solanum melongena] |
| 37 | LIB3602-106-Q1-K1-D7 | 2500354 | BLASTX | 186 | 4.00E−29 | 66 | 60S RIBOSOMAL PROTEIN L10 (EQM) |
| | | | | | | | >gi\|1902894\|dbj\|BAA19462.1\| (AB001891) QM |
| | | | | | | | family protein [Solanum melongena] |
| 38 | LIB3602-018-Q6-K1-B7 | 2500354 | BLASTX | 311 | 1.00E−28 | 69 | 60S RIBOSOMAL PROTEIN L10 (EQM) |
| | | | | | | | >gi\|1902894\|dbj\|BAA19462.1\| (AB001891) QM |
| | | | | | | | family protein [Solanum melongena] |
| 39 | LIB3602-093-Q6-K6-E6 | 2500354 | BLASTX | 301 | 2.00E−27 | 69 | 60S RIBOSOMAL PROTEIN L10 (EQM) |
| | | | | | | | >gi\|1902894\|dbj\|BAA19462.1\| (AB001891) QM |
| | | | | | | | family protein [Solanum melongena] |
| 40 | LIB3602-008-Q6-K1-G11 | 2500354 | BLASTX | 274 | 3.00E−24 | 68 | 60S RIBOSOMAL PROTEIN L10 (EQM) |
| | | | | | | | >gi\|1902894\|dbj\|BAA19462.1\| (AB001891) QM |
| | | | | | | | family protein [Solanum melongena] |
| 41 | LIB3602-018-Q6-K1-B1 | 2500354 | BLASTX | 202 | 1.00E−15 | 50 | 60S RIBOSOMAL PROTEIN L10 (EQM) |
| | | | | | | | >gi\|1902894\|dbj\|BAA19462.1\| (AB001891) QM |
| | | | | | | | family protein [Solanum melongena] |
| 42 | LIB3602-028-Q6-K1-H6 | 2851508 | BLASTX | 541 | 3.00E−55 | 62 | 60S RIBOSOMAL PROTEIN L21 |
| | | | | | | | >gi\|2160162\|gb\|AAB60725.1\| (AC000132) Similar |
| | | | | | | | to ribosomal protein L21 (gb\|L38826). ESTs |
| | | | | | | | gb\|AA395597, gb\|ATTS5197 come from this gene. |
| | | | | | | | [Arabidopsis thaliana] |
| | | | | | | | >gi\|3482935\|gb\|AAC33220.1\| (AC003970) Putative |
| | | | | | | | ribosomal protein L21 [Ar |
| 43 | LIB3602-101-Q1-K1-B12 | 2851508 | BLASTX | 541 | 3.00E−55 | 62 | 60S RIBOSOMAL PROTEIN L21 |
| | | | | | | | >gi\|2160162\|gb\|AAB60725.1\| (AC000132) Similar |
| | | | | | | | to ribosomal protein L21 (gb\|L38826). ESTs |
| | | | | | | | gb\|AA395597, gb\|ATTS5197 come from this gene. |
| | | | | | | | [Arabidopsis thaliana] |
| | | | | | | | >gi\|3482935\|gb\|AAC33220.1\| (AC003970) Putative |
| | | | | | | | ribosomal protein L21 [Ar |
| 44 | LIB3602-062-Q6-K1-G12 | 2851508 | BLASTX | 541 | 3.00E−55 | 62 | 60S RIBOSOMAL PROTEIN L21 |
| | | | | | | | >gi\|2160162\|gb\|AAB60725.1\| (AC000132) Similar |
| | | | | | | | to ribosomal protein L21 (gb\|L38826). ESTs |
| | | | | | | | gb\|AA395597, gb\|ATTS5197 come from this gene. |
| | | | | | | | [Arabidopsis thaliana] |
| | | | | | | | >gi\|3482935\|gb\|AAC33220.1\| (AC003970) Putative |
| | | | | | | | ribosomal protein L21 [Ar |
| 45 | LIB3602-009-Q6-K1-D1 | 2851508 | BLASTX | 541 | 3.00E−55 | 62 | 60S RIBOSOMAL PROTEIN L21 |
| | | | | | | | >gi\|2160162\|gb\|AAB60725.1\| (AC000132) Similar |
| | | | | | | | to ribosomal protein L21 (gb\|L38826). ESTs |
| | | | | | | | gb\|AA395597, gb\|ATTS5197 come from this gene. |
| | | | | | | | [Arabidopsis thaliana] |
| | | | | | | | >gi\|3482935\|gb\|AAC33220.1\| (AC003970) Putative |
| | | | | | | | ribosomal protein L21 [Ar |
| 46 | LIB3602-078-Q6-K6-G1 | 2851508 | BLASTX | 541 | 4.00E−55 | 62 | 60S RIBOSOMAL PROTEIN L21 |
| | | | | | | | >gi\|2160162\|gb\|AAB60725.1\| (AC000132) Similar |
| | | | | | | | to ribosomal protein L21 (gb\|L38826). ESTs |
| | | | | | | | gb\|AA395597, gb\|ATTS5197 come from this gene. |
| | | | | | | | [Arabidopsis thaliana] |
| | | | | | | | >gi\|3482935\|gb\|AAC33220.1\| (AC003970) Putative |
| | | | | | | | ribosomal protein L21 [Ar |
| 47 | LIB3602-073-Q1-K1-E10 | 2851508 | BLASTX | 536 | 1.00E−54 | 61 | 60S RIBOSOMAL PROTEIN L21 |
| | | | | | | | >gi\|2160162\|gb\|AAB60725.1\| (AC000132) Similar |
| | | | | | | | to ribosomal protein L21 (gb\|L38826). ESTs |
| | | | | | | | gb\|AA395597, gb\|ATTS5197 come from this gene. |
| | | | | | | | [Arabidopsis thaliana] |
| | | | | | | | >gi\|3482935\|gb\|AAC33220.1\| (AC003970) Putative |
| | | | | | | | ribosomal protein L21 [Ar |
| 48 | LIB3602-067-Q1-K1-G5 | 2851508 | BLASTX | 536 | 1.00E−54 | 61 | 60S RIBOSOMAL PROTEIN L21 |
| | | | | | | | >gi\|2160162\|gb\|AAB60725.1\| (AC000132) Similar |
| | | | | | | | to ribosomal protein L21 (gb\|L38826). ESTs |
| | | | | | | | gb\|AA395597, gb\|ATTS5197 come from this gene. |
| | | | | | | | [Arabidopsis thaliana] |
| | | | | | | | >gi\|3482935\|gb\|AAC33220.1\| (AC003970) Putative |
| | | | | | | | ribosomal protein L21 [Ar |
| 49 | LIB3602-072-Q1-K1-D10 | 2851508 | BLASTX | 536 | 1.00E−54 | 61 | 60S RIBOSOMAL PROTEIN L21 |
| | | | | | | | >gi\|2160162\|gb\|AAB60725.1\| (AC000132) Similar |
| | | | | | | | to ribosomal protein L21 (gb\|L38826). ESTs |
| | | | | | | | gb\|AA395597, gb\|ATTS5197 come from this gene. |
| | | | | | | | [Arabidopsis thaliana] |
| | | | | | | | >gi\|3482935\|gb\|AAC33220.1\| (AC003970) Putative |
| | | | | | | | ribosomal protein L21 [Ar |
| 50 | LIB3602-036-Q6-K1-H11 | 2851508 | BLASTX | 536 | 1.00E−54 | 61 | 60S RIBOSOMAL PROTEIN L21 |
| | | | | | | | >gi\|2160162\|gb\|AAB60725.1\| (AC000132) Similar |
| | | | | | | | to ribosomal protein L21 (gb\|L38826). ESTs |
| | | | | | | | gb\|AA395597, gb\|ATTS5197 come from this gene. |
| | | | | | | | [Arabidopsis thaliana] |
| | | | | | | | >gi\|3482935\|gb\|AAC33220.1\| (AC003970) Putative |
| | | | | | | | ribosomal protein L21 [Ar |
| 51 | LIB3602-112-Q1-K1-B2 | 2851508 | BLASTX | 536 | 1.00E−54 | 61 | 60S RIBOSOMAL PROTEIN L21 |
| | | | | | | | >gi\|2160162\|gb\|AAB60725.1\| (AC000132) Similar |
| | | | | | | | to ribosomal protein L21 (gb\|L38826). ESTs |
| | | | | | | | gb\|AA395597, gb\|ATTS5197 come from this gene. |
| | | | | | | | [Arabidopsis thaliana] |
| | | | | | | | >gi\|3482935\|gb\|AAC33220.1\| (AC003970) Putative |
| | | | | | | | ribosomal protein L21 [Ar |
| 52 | LIB3602-092-Q6-K6-C1 | 2851508 | BLASTX | 531 | 5.00E−54 | 61 | 60S RIBOSOMAL PROTEIN L21 |
| | | | | | | | >gi\|2160162\|gb\|AAB60725.1\| (AC000132) Similar |
| | | | | | | | to ribosomal protein L21 (gb\|L38826). ESTs |
| | | | | | | | gb\|AA395597, gb\|ATTS5197 come from this gene. |
| | | | | | | | [Arabidopsis thaliana] |
| | | | | | | | >gi\|3482935\|gb\|AAC33220.1\| (AC003970) Putative |
| | | | | | | | ribosomal protein L21 [Ar |
| 53 | LIB3602-058-Q6-K1-E10 | 2851508 | BLASTX | 521 | 6.00E−53 | 62 | 60S RIBOSOMAL PROTEIN L21 |
| | | | | | | | >gi\|2160162\|gb\|AAB60725.1\| (AC000132) Similar |
| | | | | | | | to ribosomal protein L21 (gb\|L38826). ESTs |
| | | | | | | | gb\|AA395597, gb\|ATTS5197 come from this gene. |
| | | | | | | | [Arabidopsis thaliana] |
| | | | | | | | >gi\|3482935\|gb\|AAC33220.1\| (AC003970) Putative |
| | | | | | | | ribosomal protein L21 [Ar |
| 54 | LIB3602-009-Q6-K1-B10 | 2851508 | BLASTX | 497 | 4.00E−50 | 65 | 60S RIBOSOMAL PROTEIN L21 |
| | | | | | | | >gi\|2160162\|gb\|AAB60725.1\| (AC000132) Similar |
| | | | | | | | to ribosomal protein L21 (gb\|L38826). ESTs |
| | | | | | | | gb\|AA395597, gb\|ATTS5197 come from this gene. |
| | | | | | | | [Arabidopsis thaliana] |
| | | | | | | | >gi\|3482935\|gb\|AAC33220.1\| (AC003970) Putative |
| | | | | | | | ribosomal protein L21 [Ar |
| 55 | LIB3602-020-Q6-K1-B7 | 2851508 | BLASTX | 495 | 6.00E−50 | 60 | 60S RIBOSOMAL PROTEIN L21 |
| | | | | | | | >gi\|2160162\|gb\|AAB60725.1\| (AC000132) Similar |
| | | | | | | | to ribosomal protein L21 (gb\|L38826). ESTs |
| | | | | | | | gb\|AA395597, gb\|ATTS5197 come from this gene. |
| | | | | | | | [Arabidopsis thaliana] |
| | | | | | | | >gi\|3482935\|gb\|AAC33220.1\| (AC003970) Putative |
| | | | | | | | ribosomal protein L21 [Ar |
| 56 | LIB3602-102-Q1-K1-B7 | 2851508 | BLASTX | 494 | 8.00E−50 | 66 | 60S RIBOSOMAL PROTEIN L21 |
| | | | | | | | >gi\|2160162\|gb\|AAB60725.1\| (AC000132) Similar |
| | | | | | | | to ribosomal protein L21 (gb\|L38826). ESTs |
| | | | | | | | gb\|AA395597, gb\|ATTS5197 come from this gene. |
| | | | | | | | [Arabidopsis thaliana] |
| | | | | | | | >gi\|3482935\|gb\|AAC33220.1\| (AC003970) Putative |
| | | | | | | | ribosomal protein L21 [Ar |
| 57 | LIB3602-070-Q1-K1-F1 | 2851508 | BLASTX | 490 | 3.00E−49 | 60 | 60S RIBOSOMAL PROTEIN L21 |
| | | | | | | | >gi\|2160162\|gb\|AAB60725.1\| (AC000132) Similar |
| | | | | | | | to ribosomal protein L21 (gb\|L38826). ESTs |
| | | | | | | | gb\|AA395597, gb\|ATTS5197 come from this gene. |
| | | | | | | | [Arabidopsis thaliana] |
| | | | | | | | >gi\|3482935\|gb\|AAC33220.1\| (AC003970) Putative |
| | | | | | | | ribosomal protein L21 [Ar |
| 58 | LIB3602-056-Q6-K1-B2 | 2851508 | BLASTX | 485 | 9.00E−49 | 65 | 60S RIBOSOMAL PROTEIN L21 |
| | | | | | | | >gi\|2160162\|gb\|AAB60725.1\| (AC000132) Similar |
| | | | | | | | to ribosomal protein L21 (gb\|L38826). ESTs |
| | | | | | | | gb\|AA395597, gb\|ATTS5197 come from this gene. |
| | | | | | | | [Arabidopsis thaliana] |
| | | | | | | | >gi\|3482935\|gb\|AAC33220.1\| (AC003970) Putative |
| | | | | | | | ribosomal protein L21 [Ar |
| 59 | LIB3602-040-Q6-K1-G5 | 2851508 | BLASTX | 468 | 9.00E−47 | 60 | 60S RIBOSOMAL PROTEIN L21 |
| | | | | | | | >gi\|2160162\|gb\|AAB60725.1\| (AC000132) Similar |
| | | | | | | | to ribosomal protein L21 (gb\|L38826). ESTs |
| | | | | | | | gb\|AA395597, gb\|ATTS5197 come from this gene. |
| | | | | | | | [Arabidopsis thaliana] |
| | | | | | | | >gi\|3482935\|gb\|AAC33220.1\| (AC003970) Putative |
| | | | | | | | ribosomal protein L21 [Ar |
| 60 | LIB3602-116-Q1-K1-G12 | 2851508 | BLASTX | 468 | 1.00E−46 | 60 | 60S RIBOSOMAL PROTEIN L21 |
| | | | | | | | >gi\|2160162\|gb\|AAB60725.1\| (AC000132) Similar |
| | | | | | | | to ribosomal protein L21 (gb\|L38826). ESTs |
| | | | | | | | gb\|AA395597, gb\|ATTS5197 come from this gene. |
| | | | | | | | [Arabidopsis thaliana] |
| | | | | | | | >gi\|3482935\|gb\|AAC33220.1\| (AC003970) Putative |
| | | | | | | | ribosomal protein L21 [Ar |
| 61 | LIB3602-108-Q1-K1-B3 | 2851508 | BLASTX | 364 | 7.00E−45 | 65 | 60S RIBOSOMAL PROTEIN L21 |
| | | | | | | | >gi\|2160162\|gb\|AAB60725.1\| (AC000132) Similar |
| | | | | | | | to ribosomal protein L21 (gb\|L38826). ESTs |
| | | | | | | | gb\|AA395597, gb\|ATTS5197 come from this gene. |
| | | | | | | | [Arabidopsis thaliana] |
| | | | | | | | >gi\|3482935\|gb\|AAC33220.1\| (AC003970) Putative |
| | | | | | | | ribosomal protein L21 [Ar |
| 62 | LIB3602-051-Q6-K1-E3 | 2851508 | BLASTX | 443 | 9.00E−44 | 58 | 60S RIBOSOMAL PROTEIN L21 |
| | | | | | | | >gi\|2160162\|gb\|AAB60725.1\| (AC000132) Similar |
| | | | | | | | to ribosomal protein L21 (gb\|L38826). ESTs |
| | | | | | | | gb\|AA395597, gb\|ATTS5197 come from this gene. |
| | | | | | | | [Arabidopsis thaliana] |
| | | | | | | | >gi\|3482935\|gb\|AAC33220.1\| (AC003970) Putative |
| | | | | | | | ribosomal protein L21 [Ar |
| 63 | LIB3602-020-Q6-K1-A2 | 2851508 | BLASTX | 435 | 5.00E−43 | 64 | 60S RIBOSOMAL PROTEIN L21 |
| | | | | | | | >gi\|2160162\|gb\|AAB60725.1\| (AC000132) Similar |
| | | | | | | | to ribosomal protein L21 (gb\|L38826). ESTs |
| | | | | | | | gb\|AA395597, gb\|ATTS5197 come from this gene. |
| | | | | | | | [Arabidopsis thaliana] |
| | | | | | | | >gi\|3482935\|gb\|AAC33220.1\| (AC003970) Putative |
| | | | | | | | ribosomal protein L21 [Ar |
| 64 | LIB3602-095-Q6-K6-G12 | 2851508 | BLASTX | 429 | 4.00E−42 | 58 | 60S RIBOSOMAL PROTEIN L21 |
| | | | | | | | >gi\|2160162\|gb\|AAB60725.1\| (AC000132) Similar |
| | | | | | | | to ribosomal protein L21 (gb\|L38826). ESTs |
| | | | | | | | gb\|AA395597, gb\|ATTS5197 come from this gene. |
| | | | | | | | [Arabidopsis thaliana] |
| | | | | | | | >gi\|3482935\|gb\|AAC33220.1\| (AC003970) Putative |
| | | | | | | | ribosomal protein L21 [Ar |
| 65 | LIB3602-044-Q6-K1-C10 | 2851508 | BLASTX | 418 | 4.00E−41 | 67 | 60S RIBOSOMAL PROTEIN L21 |
| | | | | | | | >gi\|2160162\|gb\|AAB60725.1\| (AC000132) Similar |
| | | | | | | | to ribosomal protein L21 (gb\|L38826). ESTs |
| | | | | | | | gb\|AA395597, gb\|ATTS5197 come from this gene. |
| | | | | | | | [Arabidopsis thaliana] |
| | | | | | | | >gi\|3482935\|gb\|AAC33220.1\| (AC003970) Putative |
| | | | | | | | ribosomal protein L21 [Ar |
| 66 | LIB3602-004-Q1-K1-G2 | 2851508 | BLASTX | 419 | 5.00E−41 | 60 | 60S RIBOSOMAL PROTEIN L21 |
| | | | | | | | >gi\|2160162\|gb\|AAB60725.1\| (AC000132) Similar |
| | | | | | | | to ribosomal protein L21 (gb\|L38826). ESTs |
| | | | | | | | gb\|AA395597, gb\|ATTS5197 come from this gene. |
| | | | | | | | [Arabidopsis thaliana] |
| | | | | | | | >gi\|3482935\|gb\|AAC33220.1\| (AC003970) Putative |
| | | | | | | | ribosomal protein L21 [Ar |
| 67 | LIB3602-082-Q6-K6-G1 | 2851508 | BLASTX | 416 | 1.00E−40 | 59 | 60S RIBOSOMAL PROTEIN L21 |
| | | | | | | | >gi\|2160162\|gb\|AAB60725.1\| (AC000132) Similar |
| | | | | | | | to ribosomal protein L21 (gb\|L38826). ESTs |
| | | | | | | | gb\|AA395597, gb\|ATTS5197 come from this gene. |
| | | | | | | | [Arabidopsis thaliana] |
| | | | | | | | >gi\|3482935\|gb\|AAC33220.1\| (AC003970) Putative |
| | | | | | | | ribosomal protein L21 [Ar |
| 68 | LIB3602-109-Q1-K1-D10 | 2851508 | BLASTX | 411 | 4.00E−40 | 60 | 60S RIBOSOMAL PROTEIN L21 |
| | | | | | | | >gi\|2160162\|gb\|AAB60725.1\| (AC000132) Similar |
| | | | | | | | to ribosomal protein L21 (gb\|L38826). ESTs |
| | | | | | | | gb\|AA395597, gb\|ATTS5197 come from this gene. |
| | | | | | | | [Arabidopsis thaliana] |
| | | | | | | | >gi\|3482935\|gb\|AAC33220.1\| (AC003970) Putative |
| | | | | | | | ribosomal protein L21 [Ar |
| 69 | LIB3602-049-Q6-K1-D8 | 2851508 | BLASTX | 394 | 2.00E−38 | 71 | 60S RIBOSOMAL PROTEIN L21 |
| | | | | | | | >gi\|2160162\|gb\|AAB60725.1\| (AC000132) Similar |
| | | | | | | | to ribosomal protein L21 (gb\|L38826). ESTs |
| | | | | | | | gb\|AA395597, gb\|ATTS5197 come from this gene. |
| | | | | | | | [Arabidopsis thaliana] |
| | | | | | | | >gi\|3482935\|gb\|AAC33220.1\| (AC003970) Putative |
| | | | | | | | ribosomal protein L21 [Ar |
| 70 | LIB3602-015-Q6-K1-E7 | 2851508 | BLASTX | 391 | 9.00E−38 | 59 | 60S RIBOSOMAL PROTEIN L21 |
| | | | | | | | >gi\|2160162\|gb\|AAB60725.1\| (AC000132) Similar |
| | | | | | | | to ribosomal protein L21 (gb\|L38826). ESTs |
| | | | | | | | gb\|AA395597, gb\|ATTS5197 come from this gene. |
| | | | | | | | [Arabidopsis thaliana] |
| | | | | | | | >gi\|3482935\|gb\|AAC33220.1\| (AC003970) Putative |
| | | | | | | | ribosomal protein L21 [Ar |
| 71 | LIB3602-093-Q6-K6-C9 | 2851508 | BLASTX | 374 | 1.00E−35 | 52 | 60S RIBOSOMAL PROTEIN L21 |
| | | | | | | | >gi\|2160162\|gb\|AAB60725.1\| (AC000132) Similar |
| | | | | | | | to ribosomal protein L21 (gb\|L38826). ESTs |
| | | | | | | | gb\|AA395597, gb\|ATTS5197 come from this gene. |
| | | | | | | | [Arabidopsis thaliana] |
| | | | | | | | >gi\|3482935\|gb\|AAC33220.1\| (AC003970) Putative |
| | | | | | | | ribosomal protein L21 [Ar |
| 72 | LIB3602-021-Q6-K1-H6 | 2851508 | BLASTX | 347 | 5.00E−33 | 71 | 60S RIBOSOMAL PROTEIN L21 |
| | | | | | | | >gi\|2160162\|gb\|AAB60725.1\| (AC000132) Similar |
| | | | | | | | to ribosomal protein L21 (gb\|L38826). ESTs |
| | | | | | | | gb\|AA395597, gb\|ATTS5197 come from this gene. |
| | | | | | | | [Arabidopsis thaliana] |
| | | | | | | | >gi\|3482935\|gb\|AAC33220.1\| (AC003970) Putative |
| | | | | | | | ribosomal protein L21 [Ar |
| 73 | LIB3602-102-Q1-K1-C1 | 2851508 | BLASTX | 327 | 3.00E−30 | 56 | 60S RIBOSOMAL PROTEIN L21 |
| | | | | | | | >gi\|2160162\|gb\|AAB60725.1\| (AC000132) Similar |
| | | | | | | | to ribosomal protein L21 (gb\|L38826). ESTs |
| | | | | | | | gb\|AA395597, gb\|ATTS5197 come from this gene. |
| | | | | | | | [Arabidopsis thaliana] |
| | | | | | | | >gi\|3482935\|gb\|AAC33220.1\| (AC003970) Putative |
| | | | | | | | ribosomal protein L21 [Ar |
| 74 | LIB3602-102-Q1-K1-D2 | 2851508 | BLASTX | 261 | 1.00E−22 | 55 | 60S RIBOSOMAL PROTEIN L21 |
| | | | | | | | >gi\|2160162\|gb\|AAB60725.1\| (AC000132) Similar |
| | | | | | | | to ribosomal protein L21 (gb\|L38826). ESTs |
| | | | | | | | gb\|AA395597, gb\|ATTS5197 come from this gene. |
| | | | | | | | [Arabidopsis thaliana] |
| | | | | | | | >gi\|3482935\|gb\|AAC33220.1\| (AC003970) Putative |
| | | | | | | | ribosomal protein L21 [Ar |
| 75 | LIB3602-059-Q6-K1-A8 | 2851508 | BLASTX | 255 | 7.00E−22 | 54 | 60S RIBOSOMAL PROTEIN L21 |
| | | | | | | | >gi\|2160162\|gb\|AAB60725.1\| (AC000132) Similar |
| | | | | | | | to ribosomal protein L21 (gb\|L38826). ESTs |
| | | | | | | | gb\|AA395597, gb\|ATTS5197 come from this gene. |
| | | | | | | | [Arabidopsis thaliana] |
| | | | | | | | >gi\|3482935\|gb\|AAC33220.1\| (AC003970) Putative |
| | | | | | | | ribosomal protein L21 [Ar |
| 76 | LIB3602-040-Q6-K1-G9 | 2851508 | BLASTX | 246 | 6.00E−21 | 53 | 60S RIBOSOMAL PROTEIN L21 |
| | | | | | | | >gi\|2160162\|gb\|AAB60725.1\| (AC000132) Similar |
| | | | | | | | to ribosomal protein L21 (gb\|L38826). ESTs |
| | | | | | | | gb\|AA395597, gb\|ATTS5197 come from this gene. |
| | | | | | | | [Arabidopsis thaliana] |
| | | | | | | | >gi\|3482935\|gb\|AAC33220.1\| (AC003970) Putative |
| | | | | | | | ribosomal protein L21 [Ar |
| 77 | LIB3602-109-Q1-K1-H11 | 2851508 | BLASTX | 215 | 1.00E−17 | 57 | 60S RIBOSOMAL PROTEIN L21 |
| | | | | | | | >gi\|2160162\|gb\|AAB60725.1\| (AC000132) Similar |
| | | | | | | | to ribosomal protein L21 (gb\|L38826). ESTs |
| | | | | | | | gb\|AA395597, gb\|ATTS5197 come from this gene. |
| | | | | | | | [Arabidopsis thaliana] |
| | | | | | | | >gi\|3482935\|gb\|AAC33220.1\| (AC003970) Putative |
| | | | | | | | ribosomal protein L21 [Ar |
| 78 | LIB3602-009-Q6-K1-D2 | 2851508 | BLASTX | 200 | 1.00E−15 | 62 | 60S RIBOSOMAL PROTEIN L21 |
| | | | | | | | >gi\|2160162\|gb\|AAB60725.1\| (AC000132) Similar |
| | | | | | | | to ribosomal protein L21 (gb\|L38826). ESTs |
| | | | | | | | gb\|AA395597, gb\|ATTS5197 come from this gene. |
| | | | | | | | [Arabidopsis thaliana] |
| | | | | | | | >gi\|3482935\|gb\|AAC33220.1\| (AC003970) Putative |
| | | | | | | | ribosomal protein L21 [Ar |
| 79 | LIB3602-080-Q6-K6-H6 | 4139216 | BLASTX | 800 | 1.00E−85 | 79 | (AF104630) light harvesting complex II protein |
| | | | | | | | precursor [Chlamydomonas reinhardtii] |
| 80 | LIB3602-088-Q6-K6-C6 | 4139216 | BLASTX | 732 | 1.00E−77 | 75 | (AF104630) light harvesting complex II protein |
| | | | | | | | precursor [Chlamydomonas reinhardtii] |
| 81 | LIB3602-090-Q6-K6-H2 | 4139216 | BLASTX | 713 | 2.00E−75 | 75 | (AF104630) light harvesting complex II protein |
| | | | | | | | precursor [Chlamydomonas reinhardtii] |
| 82 | LIB3602-071-Q1-K1-C6 | 4139216 | BLASTX | 707 | 1.00E−74 | 74 | (AF104630) light harvesting complex II protein |
| | | | | | | | precursor [Chlamydomonas reinhardtii] |
| 83 | LIB3602-027-Q6-K1-E8 | 4139216 | BLASTX | 694 | 3.00E−73 | 74 | (AF104630) light harvesting complex II protein |
| | | | | | | | precursor [Chlamydomonas reinhardtii] |
| 84 | LIB3602-074-Q1-K1-F10 | 4139216 | BLASTX | 689 | 2.00E−72 | 75 | (AF104630) light harvesting complex II protein |
| | | | | | | | precursor [Chlamydomonas reinhardtii] |
| 85 | LIB3602-028-Q6-K1-F7 | 4139216 | BLASTX | 688 | 2.00E−72 | 75 | (AF104630) light harvesting complex II protein |
| | | | | | | | precursor [Chlamydomonas reinhardtii] |
| 86 | LIB3602-106-Q1-K1-E11 | 4139216 | BLASTX | 686 | 3.00E−72 | 74 | (AF104630) light harvesting complex II protein |
| | | | | | | | precursor [Chlamydomonas reinhardtii] |
| 87 | LIB3602-113-Q1-K1-A8 | 4139216 | BLASTX | 668 | 5.00E−70 | 72 | (AF104630) light harvesting complex II protein |
| | | | | | | | precursor [Chlamydomonas reinhardtii] |
| 88 | LIB3602-063-Q1-K6-B5 | 4139216 | BLASTX | 656 | 1.00E−68 | 74 | (AF104630) light harvesting complex II protein |
| | | | | | | | precursor [Chlamydomonas reinhardtii] |
| 89 | LIB3602-092-Q6-K6-A8 | 4139216 | BLASTX | 643 | 4.00E−67 | 72 | (AF104630) light harvesting complex II protein |
| | | | | | | | precursor [Chlamydomonas reinhardtii] |
| 90 | LIB3602-118-Q1-K1-H5 | 4139216 | BLASTX | 479 | 4.00E−65 | 77 | (AF104630) light harvesting complex II protein |
| | | | | | | | precursor [Chlamydomonas reinhardtii] |
| 91 | LIB3602-103-Q1-K1-E7 | 4139216 | BLASTX | 611 | 2.00E−63 | 77 | (AF104630) light harvesting complex II protein |
| | | | | | | | precursor [Chlamydomonas reinhardtii] |
| 92 | LIB3602-046-Q6-K1-B10 | 4139216 | BLASTX | 605 | 8.00E−63 | 78 | (AF104630) light harvesting complex II protein |
| | | | | | | | precursor [Chlamydomonas reinhardtii] |
| 93 | LIB3602-040-Q6-K1-H5 | 4139216 | BLASTX | 603 | 2.00E−62 | 78 | (AF104630) light harvesting complex II protein |
| | | | | | | | precursor [Chlamydomonas reinhardtii] |
| 94 | LIB3602-015-Q6-K1-D11 | 4139216 | BLASTX | 583 | 4.00E−60 | 80 | (AF104630) light harvesting complex II protein |
| | | | | | | | precursor [Chlamydomonas reinhardtii] |
| 95 | LIB3602-035-Q1-K1-D5 | 4139216 | BLASTX | 580 | 8.00E−60 | 80 | (AF104630) light harvesting complex II protein |
| | | | | | | | precursor [Chlamydomonas reinhardtii] |
| 96 | LIB3602-063-Q1-K6-F12 | 4139216 | BLASTX | 569 | 2.00E−58 | 68 | (AF104630) light harvesting complex II protein |
| | | | | | | | precursor [Chlamydomonas reinhardtii] |
| 97 | LIB3602-088-Q6-K6-A2 | 4139216 | BLASTX | 561 | 1.00E−57 | 64 | (AF104630) light harvesting complex II protein |
| | | | | | | | precursor [Chlamydomonas reinhardtii] |
| 98 | LIB3602-111-Q1-K1-D10 | 4139216 | BLASTX | 437 | 4.00E−57 | 68 | (AF104630) light harvesting complex II protein |
| | | | | | | | precursor [Chlamydomonas reinhardtii] |
| 99 | LIB3602-094-Q6-K6-D5 | 4139216 | BLASTX | 544 | 2.00E−55 | 71 | (AF104630) light harvesting complex II protein |
| | | | | | | | precursor [Chlamydomonas reinhardtii] |
| 100 | LIB3602-011-Q6-K1-H9 | 4139216 | BLASTX | 538 | 7.00E−55 | 71 | (AF104630) light harvesting complex II protein |
| | | | | | | | precursor [Chlamydomonas reinhardtii] |
| 101 | LIB3602-073-Q1-K1-B7 | 4139216 | BLASTX | 538 | 8.00E−55 | 71 | (AF104630) light harvesting complex II protein |
| | | | | | | | precursor [Chlamydomonas reinhardtii] |
| 102 | LIB3602-037-Q6-K1-G7 | 4139216 | BLASTX | 530 | 4.00E−54 | 74 | (AF104630) light harvesting complex II protein |
| | | | | | | | precursor [Chlamydomonas reinhardtii] |
| 103 | LIB3602-113-Q1-K1-E12 | 4139216 | BLASTX | 531 | 5.00E−54 | 71 | (AF104630) light harvesting complex II protein |
| | | | | | | | precursor [Chlamydomonas reinhardtii] |
| 104 | LIB3602-071-Q1-K1-B11 | 4139216 | BLASTX | 517 | 2.00E−52 | 74 | (AF104630) light harvesting complex II protein |
| | | | | | | | precursor [Chlamydomonas reinhardtii] |
| 105 | LIB3602-026-Q6-K1-E12 | 4139216 | BLASTX | 503 | 9.00E−51 | 71 | (AF104630) light harvesting complex II protein |
| | | | | | | | precursor [Chlamydomonas reinhardtii] |
| 106 | LIB3602-085-Q6-K1-F8 | 4139216 | BLASTX | 499 | 3.00E−50 | 71 | (AF104630) light harvesting complex II protein |
| | | | | | | | precursor [Chlamydomonas reinhardtii] |
| 107 | LIB3602-034-Q6-K1-D5 | 4139216 | BLASTX | 469 | 4.00E−47 | 85 | (AF104630) light harvesting complex II protein |
| | | | | | | | precursor [Chlamydomonas reinhardtii] |
| 108 | LIB3602-120-Q1-K1-E1 | 4139216 | BLASTX | 450 | 2.00E−44 | 70 | (AF104630) light harvesting complex II protein |
| | | | | | | | precursor [Chlamydomonas reinhardtii] |
| 109 | LIB3602-108-Q1-K1-D3 | 4139216 | BLASTX | 446 | 3.00E−44 | 62 | (AF104630) light harvesting complex II protein |
| | | | | | | | precursor [Chlamydomonas reinhardtii] |
| 110 | LIB3602-117-Q1-K1-D10 | 4139216 | BLASTX | 215 | 1.00E−21 | 73 | (AF104630) light harvesting complex II protein |
| | | | | | | | precursor [Chlamydomonas reinhardtii] |
| 111 | LIB3602-043-Q6-K1-G6 | 548774 | BLASTX | 665 | 1.00E−69 | 59 | 60S RIBOSOMAL PROTEIN L7A |
| | | | | | | | >gi\|542158\|pir\|\|S38360 ribosomal protein L7a, |
| | | | | | | | cytosolic - rice >gi\|303855\|dbj\|BAA02156.1\| |
| | | | | | | | (D12631) ribosomal protein L7A [Oryza sativa] |
| 112 | LIB3602-074-Q1-K1-G11 | 548774 | BLASTX | 634 | 5.00E−66 | 59 | 60S RIBOSOMAL PROTEIN L7A |
| | | | | | | | >gi\|542158\|pir\|\|S38360 ribosomal protein L7a, |
| | | | | | | | cytosolic - rice >gi\|303855\|dbj\|BAA02156.1\| |
| | | | | | | | (D12631) ribosomal protein L7A [Oryza sativa] |
| 113 | LIB3602-041-Q6-K1-D5 | 548774 | BLASTX | 631 | 9.00E−66 | 62 | 60S RIBOSOMAL PROTEIN L7A |
| | | | | | | | >gi\|542158\|pir\|\|S38360 ribosomal protein L7a, |
| | | | | | | | cytosolic - rice >gi\|303855\|dbj\|BAA02156.1\| |
| | | | | | | | (D12631) ribosomal protein L7A [Oryza sativa] |
| 114 | LIB3602-086-Q6-K1-E6 | 548774 | BLASTX | 598 | 7.00E−62 | 64 | 60S RIBOSOMAL PROTEIN L7A |
| | | | | | | | >gi\|542158\|pir\|\|S38360 ribosomal protein L7a, |
| | | | | | | | cytosolic - rice >gi\|303855\|dbj\|BAA02156.1\| |
| | | | | | | | (D12631) ribosomal protein L7A [Oryza sativa] |
| 115 | LIB3602-012-Q6-K1-A6 | 548774 | BLASTX | 596 | 1.00E−61 | 60 | 60S RIBOSOMAL PROTEIN L7A |
| | | | | | | | >gi\|542158\|pir\|\|S38360 ribosomal protein L7a, |
| | | | | | | | cytosolic - rice >gi\|303855\|dbj\|BAA02156.1\| |
| | | | | | | | (D12631) ribosomal protein L7A [Oryza sativa] |
| 116 | LIB3602-039-Q6-K1-G5 | 548774 | BLASTX | 592 | 3.00E−61 | 65 | 60S RIBOSOMAL PROTEIN L7A |
| | | | | | | | >gi\|542158\|pir\|\|S38360 ribosomal protein L7a, |
| | | | | | | | cytosolic - rice >gi\|303855\|dbj\|BAA02156.1\| |
| | | | | | | | (D12631) ribosomal protein L7A [Oryza sativa] |
| 117 | LIB3602-107-Q1-K1-B7 | 548774 | BLASTX | 570 | 1.00E−58 | 59 | 60S RIBOSOMAL PROTEIN L7A |
| | | | | | | | >gi\|542158\|pir\|\|S38360 ribosomal protein L7a, |
| | | | | | | | cytosolic - rice >gi\|303855\|dbj\|BAA02156.1\| |
| | | | | | | | (D12631) ribosomal protein L7A [Oryza sativa] |
| 118 | LIB3602-047-Q6-K1-C12 | 548774 | BLASTX | 568 | 2.00E−58 | 65 | 60S RIBOSOMAL PROTEIN L7A |
| | | | | | | | >gi\|542158\|pir\|\|S38360 ribosomal protein L7a, |
| | | | | | | | cytosolic - rice >gi\|303855\|dbj\|BAA02156.1\| |
| | | | | | | | (D12631) ribosomal protein L7A [Oryza sativa] |
| 119 | LIB3602-094-Q6-K6-H9 | 548774 | BLASTX | 546 | 9.00E−56 | 56 | 60S RIBOSOMAL PROTEIN L7A |
| | | | | | | | >gi\|542158\|pir\|\|S38360 ribosomal protein L7a, |
| | | | | | | | cytosolic - rice >gi\|303855\|dbj\|BAA02156.1\| |
| | | | | | | | (D12631) ribosomal protein L7A [Oryza sativa] |
| 120 | LIB3602-091-Q6-K6-H9 | 548774 | BLASTX | 539 | 6.00E−55 | 55 | 60S RIBOSOMAL PROTEIN L7A |
| | | | | | | | >gi\|542158\|pir\|\|S38360 ribosomal protein L7a, |
| | | | | | | | cytosolic - rice >gi\|303855\|dbj\|BAA02156.1\| |
| | | | | | | | (D12631) ribosomal protein L7A [Oryza sativa] |
| 121 | LIB3602-108-Q1-K1-C12 | 548774 | BLASTX | 530 | 6.00E−54 | 58 | 60S RIBOSOMAL PROTEIN L7A |
| | | | | | | | >gi\|542158\|pir\|\|S38360 ribosomal protein L7a, |
| | | | | | | | cytosolic - rice >gi\|303855\|dbj\|BAA02156.1\| |
| | | | | | | | (D12631) ribosomal protein L7A [Oryza sativa] |
| 122 | LIB3602-077-Q6-K6-H6 | 548774 | BLASTX | 526 | 2.00E−53 | 55 | 60S RIBOSOMAL PROTEIN L7A |
| | | | | | | | >gi\|542158\|pir\|\|S38360 ribosomal protein L7a, |
| | | | | | | | cytosolic - rice >gi\|303855\|dbj\|BAA02156.1\| |
| | | | | | | | (D12631) ribosomal protein L7A [Oryza sativa] |
| 123 | LIB3602-116-Q1-K1-H9 | 548774 | BLASTX | 414 | 2.00E−53 | 62 | 60S RIBOSOMAL PROTEIN L7A |
| | | | | | | | >gi\|542158\|pir\|\|S38360 ribosomal protein L7a, |
| | | | | | | | cytosolic - rice >gi\|303855\|dbj\|BAA02156.1\| |
| | | | | | | | (D12631) ribosomal protein L7A [Oryza sativa] |
| 124 | LIB3602-043-Q6-K1-G4 | 548774 | BLASTX | 524 | 3.00E−53 | 59 | 60S RIBOSOMAL PROTEIN L7A |
| | | | | | | | >gi\|542158\|pir\|\|S38360 ribosomal protein L7a, |
| | | | | | | | cytosolic - rice >gi\|303855\|dbj\|BAA02156.1\| |
| | | | | | | | (D12631) ribosomal protein L7A [Oryza sativa] |
| 125 | LIB3602-052-Q6-K1-F5 | 548774 | BLASTX | 494 | 8.00E−50 | 64 | 60S RIBOSOMAL PROTEIN L7A |
| | | | | | | | >gi\|542158\|pir\|\|S38360 ribosomal protein L7a, |
| | | | | | | | cytosolic - rice >gi\|303855\|dbj\|BAA02156.1\| |
| | | | | | | | (D12631) ribosomal protein L7A [Oryza sativa] |
| 126 | LIB3602-001-P1-K6-G6 | 548774 | BLASTX | 471 | 5.00E−47 | 59 | 60S RIBOSOMAL PROTEIN L7A |
| | | | | | | | >gi\|542158\|pir\|\|S38360 ribosomal protein L7a, |
| | | | | | | | cytosolic - rice >gi\|303855\|dbj\|BAA02156.1\| |
| | | | | | | | (D12631) ribosomal protein L7A [Oryza sativa] |
| 127 | LIB3602-007-Q1-K1-C12 | 548774 | BLASTX | 459 | 2.00E−45 | 52 | 60S RIBOSOMAL PROTEIN L7A |
| | | | | | | | >gi\|542158\|pir\|\|S38360 ribosomal protein L7a, |
| | | | | | | | cytosolic - rice >gi\|303855\|dbj\|BAA02156.1\| |
| | | | | | | | (D12631) ribosomal protein L7A [Oryza sativa] |
| 128 | LIB3602-006-Q1-K1-H5 | 548774 | BLASTX | 444 | 8.00E−44 | 52 | 60S RIBOSOMAL PROTEIN L7A |
| | | | | | | | >gi\|542158\|pir\|\|S38360 ribosomal protein L7a, |
| | | | | | | | cytosolic - rice >gi\|303855\|dbj\|BAA02156.1\| |
| | | | | | | | (D12631) ribosomal protein L7A [Oryza sativa] |
| 129 | LIB3602-059-Q6-K1-F12 | 548774 | BLASTX | 427 | 7.00E−42 | 56 | 60S RIBOSOMAL PROTEIN L7A |
| | | | | | | | >gi\|542158\|pir\|\|S38360 ribosomal protein L7a, |
| | | | | | | | cytosolic - rice >gi\|303855\|dbj\|BAA02156.1\| |
| | | | | | | | (D12631) ribosomal protein L7A [Oryza sativa] |
| 130 | LIB3602-103-Q1-K1-C12 | 548774 | BLASTX | 383 | 2.00E−41 | 59 | 60S RIBOSOMAL PROTEIN L7A |
| | | | | | | | >gi\|542158\|pir\|\|S38360 ribosomal protein L7a, |
| | | | | | | | cytosolic - rice >gi\|303855\|dbj\|BAA02156.1\| |
| | | | | | | | (D12631) ribosomal protein L7A [Oryza sativa] |
| 131 | LIB3602-029-Q6-K1-F9 | 548774 | BLASTX | 414 | 2.00E−40 | 62 | 60S RIBOSOMAL PROTEIN L7A |
| | | | | | | | >gi\|542158\|pir\|\|S38360 ribosomal protein L7a, |
| | | | | | | | cytosolic - rice >gi\|303855\|dbj\|BAA02156.1\| |
| | | | | | | | (D12631) ribosomal protein L7A [Oryza sativa] |
| 132 | LIB3602-019-Q6-K1-B5 | 548774 | BLASTX | 389 | 1.00E−37 | 72 | 60S RIBOSOMAL PROTEIN L7A |
| | | | | | | | >gi\|542158\|pir\|\|S38360 ribosomal protein L7a, |
| | | | | | | | cytosolic - rice >gi\|303855\|dbj\|BAA02156.1\| |
| | | | | | | | (D12631) ribosomal protein L7A [Oryza sativa] |
| 133 | LIB3602-056-Q6-K1-B8 | 548774 | BLASTX | 386 | 3.00E−37 | 58 | 60S RIBOSOMAL PROTEIN L7A |
| | | | | | | | >gi\|542158\|pir\|\|S38360 ribosomal protein L7a, |
| | | | | | | | cytosolic - rice >gi\|303855\|dbj\|BAA02156.1\| |
| | | | | | | | (D12631) ribosomal protein L7A [Oryza sativa] |
| 134 | LIB3602-080-Q6-K6-B9 | 548774 | BLASTX | 298 | 4.00E−36 | 60 | 60S RIBOSOMAL PROTEIN L7A |
| | | | | | | | >gi\|542158\|pir\|\|S38360 ribosomal protein L7a, |
| | | | | | | | cytosolic - rice >gi\|303855\|dbj\|BAA02156.1\| |
| | | | | | | | (D12631) ribosomal protein L7A [Oryza sativa] |
| 135 | LIB3602-048-Q6-K1QA-B9 | 548774 | BLASTX | 374 | 8.00E−36 | 62 | 60S RIBOSOMAL PROTEIN L7A |
| | | | | | | | >gi\|542158\|pir\|\|S38360 ribosomal protein L7a, |
| | | | | | | | cytosolic - rice >gi\|303855\|dbj\|BAA02156.1\| |
| | | | | | | | (D12631) ribosomal protein L7A [Oryza sativa] |
| 136 | LIB3602-053-Q6-K1-H1 | 548774 | BLASTX | 366 | 8.00E−35 | 63 | 60S RIBOSOMAL PROTEIN L7A |
| | | | | | | | >gi\|542158\|pir\|\|S38360 ribosomal protein L7a, |
| | | | | | | | cytosolic - rice >gi\|303855\|dbj\|BAA02156.1\| |
| | | | | | | | (D12631) ribosomal protein L7A [Oryza sativa] |
| 137 | LIB3602-076-Q6-K6-H10 | 548774 | BLASTX | 357 | 1.00E−33 | 62 | 60S RIBOSOMAL PROTEIN L7A |
| | | | | | | | >gi\|542158\|pir\|\|S38360 ribosomal protein L7a, |
| | | | | | | | cytosolic - rice >gi\|303855\|dbj\|BAA02156.1\| |
| | | | | | | | (D12631) ribosomal protein L7A [Oryza sativa] |
| 138 | LIB3602-063-Q1-K6-F1 | 548774 | BLASTX | 348 | 8.00E−33 | 54 | 60S RIBOSOMAL PROTEIN L7A |
| | | | | | | | >gi\|542158\|pir\|\|S38360 ribosomal protein L7a, |
| | | | | | | | cytosolic - rice >gi\|303855\|dbj\|BAA02156.1\| |
| | | | | | | | (D12631) ribosomal protein L7A [Oryza sativa] |
| 139 | LIB3602-032-Q6-K1-E6 | 548774 | BLASTX | 315 | 6.00E−29 | 76 | 60S RIBOSOMAL PROTEIN L7A |
| | | | | | | | >gi\|542158\|pir\|\|S38360 ribosomal protein L7a, |
| | | | | | | | cytosolic - rice >gi\|303855\|dbj\|BAA02156.1\| |
| | | | | | | | (D12631) ribosomal protein L7A [Oryza sativa] |
| 140 | LIB3602-077-Q6-K6-C12 | 548774 | BLASTX | 304 | 2.00E−27 | 62 | 60S RIBOSOMAL PROTEIN L7A |
| | | | | | | | >gi\|542158\|pir\|\|S38360 ribosomal protein L7a, |
| | | | | | | | cytosolic - rice >gi\|303855\|dbj\|BAA02156.1\| |
| | | | | | | | (D12631) ribosomal protein L7A [Oryza sativa] |
| 141 | LIB3602-081-Q6-K6-E9 | 548774 | BLASTX | 166 | 2.00E−11 | 57 | 60S RIBOSOMAL PROTEIN L7A |
| | | | | | | | >gi\|542158\|pir\|\|S38360 ribosomal protein L7a, |
| | | | | | | | cytosolic - rice >gi\|303855\|dbj\|BAA02156.1\| |
| | | | | | | | (D12631) ribosomal protein L7A [Oryza sativa] |
| 142 | LIB3602-094-Q6-K6-B5 | 6440817 | BLASTX | 391 | 1.00E−37 | 62 | (AU066512) hypothetical protein [Chlamydomonas |
| | | | | | | | sp.] |
| 143 | LIB3602-054-Q6-K1-E10 | 6440817 | BLASTX | 383 | 8.00E−37 | 61 | (AU066512) hypothetical protein [Chlamydomonas |
| | | | | | | | sp.] |
| 144 | LIB3602-045-Q6-K1-E3 | 6440817 | BLASTX | 383 | 9.00E−37 | 61 | (AU066512) hypothetical protein [Chlamydomonas |
| | | | | | | | sp.] |
| 145 | LIB3602-103-Q1-K1-B9 | 6440817 | BLASTX | 383 | 9.00E−37 | 61 | (AU066512) hypothetical protein [Chlamydomonas |
| | | | | | | | sp.] |
| 146 | LIB3602-070-Q1-K1-D3 | 6440817 | BLASTX | 383 | 1.00E−36 | 61 | (AU066512) hypothetical protein [Chlamydomonas |
| | | | | | | | sp.] |
| 147 | LIB3602-094-Q6-K6-G5 | 6440817 | BLASTX | 383 | 1.00E−36 | 61 | (AU066512) hypothetical protein [Chlamydomonas |
| | | | | | | | sp.] |
| 148 | LIB3602-087-Q6-K1-G6 | 6440817 | BLASTX | 383 | 1.00E−36 | 61 | (AU066512) hypothetical protein [Chlamydomonas |
| | | | | | | | sp.] |
| 149 | LIB3602-104-Q1-K1-E12 | 6440817 | BLASTX | 383 | 1.00E−36 | 61 | (AU066512) hypothetical protein [Chlamydomonas |
| | | | | | | | sp.] |
| 150 | LIB3602-029-Q6-K1-F4 | 6440817 | BLASTX | 383 | 1.00E−36 | 61 | (AU066512) hypothetical protein [Chlamydomonas |
| | | | | | | | sp.] |
| 151 | LIB3602-065-Q1-K6-E9 | 6440817 | BLASTX | 383 | 1.00E−36 | 61 | (AU066512) hypothetical protein [Chlamydomonas |
| | | | | | | | sp.] |
| 152 | LIB3602-084-Q6-K1-E1 | 6440817 | BLASTX | 379 | 3.00E−36 | 60 | (AU066512) hypothetical protein [Chlamydomonas |
| | | | | | | | sp.] |
| 153 | LIB3602-066-Q1-K6-A4 | 6440817 | BLASTX | 379 | 4.00E−36 | 62 | (AU066512) hypothetical protein [Chlamydomonas |
| | | | | | | | sp.] |
| 154 | LIB3602-107-Q1-K1-C11 | 6440817 | BLASTX | 378 | 4.00E−36 | 64 | (AU066512) hypothetical protein [Chlamydomonas |
| | | | | | | | sp.] |
| 155 | LIB3602-060-Q6-K1-H8 | 6440817 | BLASTX | 377 | 5.00E−36 | 61 | (AU066512) hypothetical protein [Chlamydomonas |
| | | | | | | | sp.] |
| 156 | LIB3602-060-Q6-K1-F2 | 6440817 | BLASTX | 370 | 3.00E−35 | 60 | (AU066512) hypothetical protein [Chlamydomonas |
| | | | | | | | sp.] |
| 157 | LIB3602-058-Q6-K1-H10 | 6440817 | BLASTX | 365 | 1.00E−34 | 62 | (AU066512) hypothetical protein [Chlamydomonas |
| | | | | | | | sp.] |
| 158 | LIB3602-005-Q1-K1-E11 | 6440817 | BLASTX | 360 | 6.00E−34 | 63 | (AU066512) hypothetical protein [Chlamydomonas |
| | | | | | | | sp.] |
| 159 | LIB3602-048-Q6-K1QA-G5 | 6440817 | BLASTX | 354 | 2.00E−33 | 64 | (AU066512) hypothetical protein [Chlamydomonas |
| | | | | | | | sp.] |
| 160 | LIB3602-037-Q6-K1-H2 | 6440817 | BLASTX | 350 | 6.00E−33 | 73 | (AU066512) hypothetical protein [Chlamydomonas |
| | | | | | | | sp.] |
| 161 | LIB3602-111-Q1-K1-E3 | 6440817 | BLASTX | 339 | 6.00E−33 | 63 | (AU066512) hypothetical protein [Chlamydomonas |
| | | | | | | | sp.] |
| 162 | LIB3602-085-Q6-K1-E8 | 6440817 | BLASTX | 289 | 2.00E−29 | 66 | (AU066512) hypothetical protein [Chlamydomonas |
| | | | | | | | sp.] |
| 163 | LIB3602-079-Q6-K6-H11 | 6440817 | BLASTX | 290 | 8.00E−26 | 70 | (AU066512) hypothetical protein [Chlamydomonas |
| | | | | | | | sp.] |
| 164 | LIB3602-059-Q6-K1-B9 | 6440817 | BLASTX | 285 | 1.00E−25 | 72 | (AU066512) hypothetical protein [Chlamydomonas |
| | | | | | | | sp.] |
| 165 | LIB3602-071-Q1-K1-E7 | 6440817 | BLASTX | 277 | 2.00E−24 | 69 | (AU066512) hypothetical protein [Chlamydomonas |
| | | | | | | | sp.] |
| 166 | LIB3602-116-Q1-K1-B5 | 6440817 | BLASTX | 271 | 2.00E−23 | 78 | (AU066512) hypothetical protein [Chlamydomonas |
| | | | | | | | sp.] |
| 167 | LIB3602-012-Q6-K1-D10 | 6440817 | BLASTX | 263 | 1.00E−22 | 69 | (AU066512) hypothetical protein [Chlamydomonas |
| | | | | | | | sp.] |
| 168 | LIB3602-045-Q6-K1-E4 | 6440817 | BLASTX | 196 | 6.00E−15 | 44 | (AU066512) hypothetical protein [Chlamydomonas |
| | | | | | | | sp.] |
| 169 | LIB3602-049-Q6-K1-F3 | 6440817 | BLASTX | 184 | 2.00E−13 | 65 | (AU066512) hypothetical protein [Chlamydomonas |
| | | | | | | | sp.] |
| 170 | LIB3602-029-Q6-K1-F5 | 6440817 | BLASTX | 155 | 5.00E−10 | 75 | (AU066512) hypothetical protein [Chlamydomonas |
| | | | | | | | sp.] |
| 171 | LIB3602-022-Q6-K1-C12 | 485518 | BLASTX | 620 | 1.00E−64 | 96 | ubiquitin/ribosomal protein CEP52 - rice |
| | | | | | | | >gi\|303857\|dbj\|BAA02154.1\| (D12629) |
| | | | | | | | ubiquitin/ribosomal polyprotein [Oryza sativa] |
| 172 | LIB3602-054-Q6-K1-C6 | 485518 | BLASTX | 620 | 1.00E−64 | 96 | ubiquitin/ribosomal protein CEP52 - rice |
| | | | | | | | >gi\|303857\|dbj\|BAA02154.1\| (D12629) |
| | | | | | | | ubiquitin/ribosomal polyprotein [Oryza sativa] |
| 173 | LIB3602-079-Q6-K6-F2 | 485518 | BLASTX | 620 | 2.00E−64 | 96 | ubiquitin/ribosomal protein CEP52 - rice |
| | | | | | | | >gi\|303857\|dbj\|BAA02154.1\| (D12629) |
| | | | | | | | ubiquitin/ribosomal polyprotein [Oryza sativa] |
| 174 | LIB3602-034-Q6-K1-F6 | 485518 | BLASTX | 620 | 2.00E−64 | 96 | ubiquitin/ribosomal protein CEP52 - rice |
| | | | | | | | >gi\|303857\|dbj\|BAA02154.1\| (D12629) |
| | | | | | | | ubiquitin/ribosomal polyprotein [Oryza sativa] |
| 175 | LIB3602-038-Q6-K1-H6 | 485518 | BLASTX | 620 | 2.00E−64 | 96 | ubiquitin/ribosomal protein CEP52 - rice |
| | | | | | | | >gi\|303857\|dbj\|BAA02154.1\| (D12629) |
| | | | | | | | ubiquitin/ribosomal polyprotein [Oryza sativa] |
| 176 | LIB3602-042-Q6-K1-D8 | 485518 | BLASTX | 620 | 2.00E−64 | 96 | ubiquitin/ribosomal protein CEP52 - rice |
| | | | | | | | >gi\|303857\|dbj\|BAA02154.1\| (D12629) |
| | | | | | | | ubiquitin/ribosomal polyprotein [Oryza sativa] |
| 177 | LIB3602-077-Q6-K6-C3 | 485518 | BLASTX | 620 | 2.00E−64 | 96 | ubiquitin/ribosomal protein CEP52 - rice |
| | | | | | | | >gi\|303857\|dbj\|BAA02154.1\| (D12629) |
| | | | | | | | ubiquitin/ribosomal polyprotein [Oryza sativa] |
| 178 | LIB3602-029-Q6-K1-G1 | 485518 | BLASTX | 620 | 2.00E−64 | 96 | ubiquitin/ribosomal protein CEP52 - rice |
| | | | | | | | >gi\|303857\|dbj\|BAA02154.1\| (D12629) |
| | | | | | | | ubiquitin/ribosomal polyprotein [Oryza sativa] |
| 179 | LIB3602-111-Q1-K1-G1 | 485518 | BLASTX | 614 | 9.00E−64 | 95 | ubiquitin/ribosomal protein CEP52 - rice |
| | | | | | | | >gi\|303857\|dbj\|BAA02154.1\| (D12629) |
| | | | | | | | ubiquitin/ribosomal polyprotein [Oryza sativa] |
| 180 | LIB3602-112-Q1-K1-E1 | 485518 | BLASTX | 611 | 2.00E−63 | 95 | ubiquitin/ribosomal protein CEP52 - rice |
| | | | | | | | >gi\|303857\|dbj\|BAA02154.1\| (D12629) |
| | | | | | | | ubiquitin/ribosomal polyprotein [Oryza sativa] |
| 181 | LIB3602-056-Q6-K1-G9 | 485518 | BLASTX | 594 | 1.00E−61 | 90 | ubiquitin/ribosomal protein CEP52 - rice |
| | | | | | | | >gi\|303857\|dbj\|BAA02154.1\| (D12629) |
| | | | | | | | ubiquitin/ribosomal polyprotein [Oryza sativa] |
| 182 | LIB3602-035-Q1-K1-F6 | 485518 | BLASTX | 588 | 1.00E−60 | 94 | ubiquitin/ribosomal protein CEP52 - rice |
| | | | | | | | >gi\|303857\|dbj\|BAA02154.1\| (D12629) |
| | | | | | | | ubiquitin/ribosomal polyprotein [Oryza sativa] |
| 183 | LIB3602-023-Q6-K1-B9 | 485518 | BLASTX | 582 | 5.00E−60 | 96 | ubiquitin/ribosomal protein CEP52 - rice |
| | | | | | | | >gi\|303857\|dbj\|BAA02154.1\| (D12629) |
| | | | | | | | ubiquitin/ribosomal polyprotein [Oryza sativa] |
| 184 | LIB3602-091-Q6-K6-B8 | 485518 | BLASTX | 577 | 2.00E−59 | 96 | ubiquitin/ribosomal protein CEP52 - rice |
| | | | | | | | >gi\|303857\|dbj\|BAA02154.1\| (D12629) |
| | | | | | | | ubiquitin/ribosomal polyprotein [Oryza sativa] |
| 185 | LIB3602-041-Q6-K1-D4 | 485518 | BLASTX | 577 | 2.00E−59 | 96 | ubiquitin/ribosomal protein CEP52 - rice |
| | | | | | | | >gi\|303857\|dbj\|BAA02154.1\| (D12629) |
| | | | | | | | ubiquitin/ribosomal polyprotein [Oryza sativa] |
| 186 | LIB3602-085-Q6-K1-F1 | 485518 | BLASTX | 572 | 8.00E−59 | 95 | ubiquitin/ribosomal protein CEP52 - rice |
| | | | | | | | >gi\|303857\|dbj\|BAA02154.1\| (D12629) |
| | | | | | | | ubiquitin/ribosomal polyprotein [Oryza sativa] |
| 187 | LIB3602-005-Q1-K1-C4 | 485518 | BLASTX | 560 | 2.00E−57 | 93 | ubiquitin/ribosomal protein CEP52 - rice |
| | | | | | | | >gi\|303857\|dbj\|BAA02154.1\| (D12629) |
| | | | | | | | ubiquitin/ribosomal polyprotein [Oryza sativa] |
| 188 | LIB3602-108-Q1-K1-B6 | 485518 | BLASTX | 411 | 2.00E−57 | 96 | ubiquitin/ribosomal protein CEP52 - rice |
| | | | | | | | >gi\|303857\|dbj\|BAA02154.1\| (D12629) |
| | | | | | | | ubiquitin/ribosomal polyprotein [Oryza sativa] |
| 189 | LIB3602-047-Q6-K1-D10 | 485518 | BLASTX | 553 | 1.00E−56 | 95 | ubiquitin/ribosomal protein CEP52 - rice |
| | | | | | | | >gi\|303857\|dbj\|BAA02154.1\| (D12629) |
| | | | | | | | ubiquitin/ribosomal polyprotein [Oryza sativa] |
| 190 | LIB3602-101-Q1-K1-D1 | 485518 | BLASTX | 420 | 2.00E−56 | 96 | ubiquitin/ribosomal protein CEP52 - rice |
| | | | | | | | >gi\|303857\|dbj\|BAA02154.1\| (D12629) |
| | | | | | | | ubiquitin/ribosomal polyprotein [Oryza sativa] |
| 191 | LIB3602-009-Q6-K1-B12 | 485518 | BLASTX | 511 | 9.00E−52 | 96 | ubiquitin/ribosomal protein CEP52 - rice |
| | | | | | | | >gi\|303857\|dbj\|BAA02154.1\| (D12629) |
| | | | | | | | ubiquitin/ribosomal polyprotein [Oryza sativa] |
| 192 | LIB3602-094-Q6-K6-D11 | 485518 | BLASTX | 504 | 7.00E−51 | 95 | ubiquitin/ribosomal protein CEP52 - rice |
| | | | | | | | >gi\|303857\|dbj\|BAA02154.1\| (D12629) |
| | | | | | | | ubiquitin/ribosomal polyprotein [Oryza sativa] |
| 193 | LIB3602-113-Q1-K1-A5 | 485518 | BLASTX | 482 | 2.00E−48 | 94 | ubiquitin/ribosomal protein CEP52 - rice |
| | | | | | | | >gi\|303857\|dbj\|BAA02154.1\| (D12629) |
| | | | | | | | ubiquitin/ribosomal polyprotein [Oryza sativa] |
| 194 | LIB3602-112-Q1-K1-A5 | 485518 | BLASTX | 482 | 3.00E−48 | 94 | ubiquitin/ribosomal protein CEP52 - rice |
| | | | | | | | >gi\|303857\|dbj\|BAA02154.1\| (D12629) |
| | | | | | | | ubiquitin/ribosomal polyprotein [Oryza sativa] |
| 195 | LIB3602-108-Q1-K1-D2 | 485518 | BLASTX | 298 | 3.00E−47 | 93 | ubiquitin/ribosomal protein CEP52 - rice |
| | | | | | | | >gi\|303857\|dbj\|BAA02154.1\| (D12629) |
| | | | | | | | ubiquitin/ribosomal polyprotein [Oryza sativa] |
| 196 | LIB3602-032-Q6-K1-F10 | 485518 | BLASTX | 470 | 5.00E−47 | 96 | ubiquitin/ribosomal protein CEP52 - rice |
| | | | | | | | >gi\|303857\|dbj\|BAA02154.1\| (D12629) |
| | | | | | | | ubiquitin/ribosomal polyprotein [Oryza sativa] |
| 197 | LIB3602-025-Q6-K1-G12 | 485518 | BLASTX | 456 | 2.00E−45 | 89 | ubiquitin/ribosomal protein CEP52 - rice |
| | | | | | | | >gi\|303857\|dbj\|BAA02154.1\| (D12629) |
| | | | | | | | ubiquitin/ribosomal polyprotein [Oryza sativa] |
| 198 | LIB3602-038-Q6-K1-F12 | 485518 | BLASTX | 423 | 8.00E−42 | 92 | ubiquitin/ribosomal protein CEP52 - rice |
| | | | | | | | >gi\|303857\|dbj\|BAA02154.1\| (D12629) |
| | | | | | | | ubiquitin/ribosomal polyprotein [Oryza sativa] |
| 199 | LIB3602-014-Q6-K1-G3 | 485518 | BLASTX | 386 | 3.00E−37 | 96 | ubiquitin/ribosomal protein CEP52 - rice |
| | | | | | | | >gi\|303857\|dbj\|BAA02154.1\| (D12629) |
| | | | | | | | ubiquitin/ribosomal polyprotein [Oryza sativa] |
| 200 | LIB3602-079-Q6-K6-B12 | 7440926 | BLASTX | 715 | 1.00E−75 | 73 | ribosomal protein L18a, cytosolic - Arabidopsis |
| | | | | | | | thaliana >gi\|3128228\|gb\|AAC26708.1\| (AC004077) |
| | | | | | | | 60S ribosomal protein L18A [Arabidopsis thaliana] |
| 201 | LIB3602-065-Q1-K6-E3 | 7440926 | BLASTX | 712 | 3.00E−75 | 72 | ribosomal protein L18a, cytosolic - Arabidopsis |
| | | | | | | | thaliana >gi\|3128228\|gb\|AAC26708.1\| (AC004077) |
| | | | | | | | 60S ribosomal protein L18A [Arabidopsis thaliana] |
| 202 | LIB3602-002-P1-K6-B1 | 7440926 | BLASTX | 712 | 3.00E−75 | 72 | ribosomal protein L18a, cytosolic - Arabidopsis |
| | | | | | | | thaliana >gi\|3128228\|gb\|AAC26708.1\| (AC004077) |
| | | | | | | | 60S ribosomal protein L18A [Arabidopsis thaliana] |
| 203 | LIB3602-023-Q6-K1-F5 | 7440926 | BLASTX | 690 | 1.00E−72 | 74 | ribosomal protein L18a, cytosolic - Arabidopsis |
| | | | | | | | thaliana >gi\|3128228\|gb\|AAC26708.1\| (AC004077) |
| | | | | | | | 60S ribosomal protein L18A [Arabidopsis thaliana] |
| 204 | LIB3602-105-Q1-K1-B12 | 7440926 | BLASTX | 669 | 3.00E−70 | 68 | ribosomal protein L18a, cytosolic - Arabidopsis |
| | | | | | | | thaliana >gi\|3128228\|gb\|AAC26708.1\| (AC004077) |
| | | | | | | | 60S ribosomal protein L18A [Arabidopsis thaliana] |
| 205 | LIB3602-028-Q6-K1-B11 | 7440926 | BLASTX | 646 | 1.00E−67 | 74 | ribosomal protein L18a, cytosolic - Arabidopsis |
| | | | | | | | thaliana >gi\|3128228\|gb\|AAC26708.1\| (AC004077) |
| | | | | | | | 60S ribosomal protein L18A [Arabidopsis thaliana] |
| 206 | LIB3602-045-Q6-K1-A3 | 7440926 | BLASTX | 625 | 4.00E−65 | 76 | ribosomal protein L18a, cytosolic - Arabidopsis |
| | | | | | | | thaliana >gi\|3128228\|gb\|AAC26708.1\| (AC004077) |
| | | | | | | | 60S ribosomal protein L18A [Arabidopsis thaliana] |
| 207 | LIB3602-045-Q6-K1-B11 | 7440926 | BLASTX | 611 | 2.00E−63 | 77 | ribosomal protein L18a, cytosolic - Arabidopsis |
| | | | | | | | thaliana >gi\|3128228\|gb\|AAC26708.1\| (AC004077) |
| | | | | | | | 60S ribosomal protein L18A [Arabidopsis thaliana] |
| 208 | LIB3602-056-Q6-K1-D10 | 7440926 | BLASTX | 603 | 1.00E−62 | 75 | ribosomal protein L18a, cytosolic - Arabidopsis |
| | | | | | | | thaliana >gi\|3128228\|gb\|AAC26708.1\| (AC004077) |
| | | | | | | | 60S ribosomal protein L18A [Arabidopsis thaliana] |
| 209 | LIB3602-091-Q6-K6-H8 | 7440926 | BLASTX | 410 | 2.00E−61 | 69 | ribosomal protein L18a, cytosolic - Arabidopsis |
| | | | | | | | thaliana >gi\|3128228\|gb\|AAC26708.1\| (AC004077) |
| | | | | | | | 60S ribosomal protein L18A [Arabidopsis thaliana] |
| 210 | LIB3602-094-Q6-K6-H8 | 7440926 | BLASTX | 420 | 5.00E−61 | 71 | ribosomal protein L18a, cytosolic - Arabidopsis |
| | | | | | | | thaliana >gi\|3128228\|gb\|AAC26708.1\| (AC004077) |
| | | | | | | | 60S ribosomal protein L18A [Arabidopsis thaliana] |
| 211 | LIB3602-032-Q6-K1-A3 | 7440926 | BLASTX | 588 | 7.00E−61 | 79 | ribosomal protein L18a, cytosolic - Arabidopsis |
| | | | | | | | thaliana >gi\|3128228\|gb\|AAC26708.1\| (AC004077) |
| | | | | | | | 60S ribosomal protein L18A [Arabidopsis thaliana] |
| 212 | LIB3602-115-Q1-K1-H9 | 7440926 | BLASTX | 420 | 1.00E−60 | 71 | ribosomal protein L18a, cytosolic - Arabidopsis |
| | | | | | | | thaliana >gi\|3128228\|gb\|AAC26708.1\| (AC004077) |
| | | | | | | | 60S ribosomal protein L18A [Arabidopsis thaliana] |
| 213 | LIB3602-019-Q6-K1-B10 | 7440926 | BLASTX | 566 | 3.00E−58 | 74 | ribosomal protein L18a, cytosolic - Arabidopsis |
| | | | | | | | thaliana >gi\|3128228\|gb\|AAC26708.1\| (AC004077) |
| | | | | | | | 60S ribosomal protein L18A [Arabidopsis thaliana] |
| 214 | LIB3602-101-Q1-K1-B10 | 7440926 | BLASTX | 547 | 4.00E−56 | 74 | ribosomal protein L18a, cytosolic - Arabidopsis |
| | | | | | | | thaliana >gi\|3128228\|gb\|AAC26708.1\| (AC004077) |
| | | | | | | | 60S ribosomal protein L18A [Arabidopsis thaliana] |
| 215 | LIB3602-072-Q1-K1-D6 | 7440926 | BLASTX | 420 | 5.00E−55 | 71 | ribosomal protein L18a, cytosolic - Arabidopsis |
| | | | | | | | thaliana >gi\|3128228\|gb\|AAC26708.1\| (AC004077) |
| | | | | | | | 60S ribosomal protein L18A [Arabidopsis thaliana] |
| 216 | LIB3602-037-Q6-K1-G3 | 7440926 | BLASTX | 503 | 1.00E−54 | 79 | ribosomal protein L18a, cytosolic - Arabidopsis |
| | | | | | | | thaliana >gi\|3128228\|gb\|AAC26708.1\| (AC004077) |
| | | | | | | | 60S ribosomal protein L18A [Arabidopsis thaliana] |
| 217 | LIB3602-068-Q1-K1-C4 | 7440926 | BLASTX | 364 | 6.00E−52 | 65 | ribosomal protein L18a, cytosolic - Arabidopsis |
| | | | | | | | thaliana >gi\|3128228\|gb\|AAC26708.1\| (AC004077) |
| | | | | | | | 60S ribosomal protein L18A [Arabidopsis thaliana] |
| 218 | LIB3602-028-Q6-K1-A7 | 7440926 | BLASTX | 492 | 1.00E−49 | 72 | ribosomal protein L18a, cytosolic - Arabidopsis |
| | | | | | | | thaliana >gi\|3128228\|gb\|AAC26708.1\| (AC004077) |
| | | | | | | | 60S ribosomal protein L18A [Arabidopsis thaliana] |
| 219 | LIB3602-046-Q6-K1-G4 | 7440926 | BLASTX | 489 | 3.00E−49 | 71 | ribosomal protein L18a, cytosolic - Arabidopsis |
| | | | | | | | thaliana >gi\|3128228\|gb\|AAC26708.1\| (AC004077) |
| | | | | | | | 60S ribosomal protein L18A [Arabidopsis thaliana] |
| 220 | LIB3602-023-Q6-K1-F3 | 7440926 | BLASTX | 395 | 4.00E−38 | 71 | ribosomal protein L18a, cytosolic - Arabidopsis |
| | | | | | | | thaliana >gi\|3128228\|gb\|AAC26708.1\| (AC004077) |
| | | | | | | | 60S ribosomal protein L18A [Arabidopsis thaliana] |
| 221 | LIB3602-015-Q6-K1-D2 | 7440926 | BLASTX | 333 | 7.00E−31 | 69 | ribosomal protein L18a, cytosolic - Arabidopsis |
| | | | | | | | thaliana >gi\|3128228\|gb\|AAC26708.1\| (AC004077) |
| | | | | | | | 60S ribosomal protein L18A [Arabidopsis thaliana] |
| 222 | LIB3602-028-Q6-K1-H3 | 7440926 | BLASTX | 333 | 7.00E−31 | 69 | ribosomal protein L18a, cytosolic - Arabidopsis |
| | | | | | | | thaliana >gi\|3128228\|gb\|AAC26708.1\| (AC004077) |
| | | | | | | | 60S ribosomal protein L18A [Arabidopsis thaliana] |
| 223 | LIB3602-021-Q6-K1-A12 | 7440926 | BLASTX | 320 | 8.00E−30 | 73 | ribosomal protein L18a, cytosolic - Arabidopsis |
| | | | | | | | thaliana >gi\|3128228\|gb\|AAC26708.1\| (AC004077) |
| | | | | | | | 60S ribosomal protein L18A [Arabidopsis thaliana] |
| 224 | LIB3602-028-Q6-K1-B5 | 7440926 | BLASTX | 253 | 3.00E−22 | 83 | ribosomal protein L18a, cytosolic - Arabidopsis |
| | | | | | | | thaliana >gi\|3128228\|gb\|AAC26708.1\| (AC004077) |
| | | | | | | | 60S ribosomal protein L18A [Arabidopsis thaliana] |
| 225 | LIB3602-003-Q1-K1-H9 | 7440926 | BLASTX | 254 | 9.00E−22 | 64 | ribosomal protein L18a, cytosolic - Arabidopsis |
| | | | | | | | thaliana >gi\|3128228\|gb\|AAC26708.1\| (AC004077) |
| | | | | | | | 60S ribosomal protein L18A [Arabidopsis thaliana] |
| 226 | LIB3602-089-Q6-K6-A11 | 7440926 | BLASTX | 171 | 5.00E−12 | 56 | ribosomal protein L18a, cytosolic - Arabidopsis |
| | | | | | | | thaliana >gi\|3128228\|gb\|AAC26708.1\| (AC004077) |
| | | | | | | | 60S ribosomal protein L18A [Arabidopsis thaliana] |
| 227 | LIB3602-094-Q6-K6-B6 | 266945 | BLASTX | 606 | 8.00E−63 | 64 | 60S RIBOSOMAL PROTEIN L9 (GIBBERELLIN- |
| | | | | | | | REGULATED PROTEIN GA) |
| | | | | | | | >gi\|100065\|pir\|\|S19978 ribosomal protein L9, |
| | | | | | | | cytosolic - garden pea >gi\|20727\|emb\|CAA46273.1\| |
| | | | | | | | (X65155) GA [Pisum sativum] |
| 228 | LIB3602-095-Q6-K6-B6 | 266945 | BLASTX | 601 | 3.00E−62 | 64 | 60S RIBOSOMAL PROTEIN L9 (GIBBERELLIN- |
| | | | | | | | REGULATED PROTEIN GA) |
| | | | | | | | >gi\|100065\|pir\|\|S19978 ribosomal protein L9, |
| | | | | | | | cytosolic - garden pea >gi\|20727\|emb\|CAA46273.1\| |
| | | | | | | | (X65155) GA [Pisum sativum] |
| 229 | LIB3602-089-Q6-K6-B6 | 266945 | BLASTX | 595 | 2.00E−61 | 64 | 60S RIBOSOMAL PROTEIN L9 (GIBBERELLIN- |
| | | | | | | | REGULATED PROTEIN GA) |
| | | | | | | | >gi\|100065\|pir\|\|S19978 ribosomal protein L9, |
| | | | | | | | cytosolic - garden pea >gi\|20727\|emb\|CAA46273.1\| |
| | | | | | | | (X65155) GA [Pisum sativum] |
| 230 | LIB3602-018-Q6-K1-C6 | 266945 | BLASTX | 587 | 1.00E−60 | 63 | 60S RIBOSOMAL PROTEIN L9 (GIBBERELLIN- |
| | | | | | | | REGULATED PROTEIN GA) |
| | | | | | | | >gi\|100065\|pir\|\|S19978 ribosomal protein L9, |
| | | | | | | | cytosolic - garden pea >gi\|20727\|emb\|CAA46273.1\| |
| | | | | | | | (X65155) GA [Pisum sativum] |
| 231 | LIB3602-015-Q6-K1-D1 | 266945 | BLASTX | 586 | 2.00E−60 | 65 | 60S RIBOSOMAL PROTEIN L9 (GIBBERELLIN- |
| | | | | | | | REGULATED PROTEIN GA) |
| | | | | | | | >gi\|100065\|pir\|\|S19978 ribosomal protein L9, |
| | | | | | | | cytosolic - garden pea >gi\|20727\|emb\|CAA46273.1\| |
| | | | | | | | (X65155) GA [Pisum sativum] |
| 232 | LIB3602-073-Q1-K1-F6 | 266945 | BLASTX | 584 | 3.00E−60 | 64 | 60S RIBOSOMAL PROTEIN L9 (GIBBERELLIN- |
| | | | | | | | REGULATED PROTEIN GA) |
| | | | | | | | >gi\|100065\|pir\|\|S19978 ribosomal protein L9, |
| | | | | | | | cytosolic - garden pea >gi\|20727\|emb\|CAA46273.1\| |
| | | | | | | | (X65155) GA [Pisum sativum] |
| 233 | LIB3602-113-Q1-K1-F7 | 266945 | BLASTX | 583 | 4.00E−60 | 64 | 60S RIBOSOMAL PROTEIN L9 (GIBBERELLIN- |
| | | | | | | | REGULATED PROTEIN GA) |
| | | | | | | | >gi\|100065\|pir\|\|S19978 ribosomal protein L9, |
| | | | | | | | cytosolic - garden pea >gi\|20727\|emb\|CAA46273.1\| |
| | | | | | | | (X65155) GA [Pisum sativum] |
| 234 | LIB3602-018-Q6-K1-C5 | 266945 | BLASTX | 581 | 6.00E−60 | 63 | 60S RIBOSOMAL PROTEIN L9 (GIBBERELLIN- |
| | | | | | | | REGULATED PROTEIN GA) |
| | | | | | | | >gi\|100065\|pir\|\|S19978 ribosomal protein L9, |
| | | | | | | | cytosolic - garden pea >gi\|20727\|emb\|CAA46273.1\| |
| | | | | | | | (X65155) GA [Pisum sativum] |
| 235 | LIB3602-073-Q1-K1-C6 | 266945 | BLASTX | 579 | 1.00E−59 | 64 | 60S RIBOSOMAL PROTEIN L9 (GIBBERELLIN- |
| | | | | | | | REGULATED PROTEIN GA) |
| | | | | | | | >gi\|100065\|pir\|\|S19978 ribosomal protein L9, |
| | | | | | | | cytosolic - garden pea >gi\|20727\|emb\|CAA46273.1\| |
| | | | | | | | (X65155) GA [Pisum sativum] |
| 236 | LIB3602-091-Q6-K6-G2 | 266945 | BLASTX | 567 | 3.00E−58 | 64 | 60S RIBOSOMAL PROTEIN L9 (GIBBERELLIN- |
| | | | | | | | REGULATED PROTEIN GA) |
| | | | | | | | >gi\|100065\|pir\|\|S19978 ribosomal protein L9, |
| | | | | | | | cytosolic - garden pea >gi\|20727\|emb\|CAA46273.1\| |
| | | | | | | | (X65155) GA [Pisum sativum] |
| 237 | LIB3602-004-Q1-K1-B9 | 266945 | BLASTX | 566 | 5.00E−58 | 65 | 60S RIBOSOMAL PROTEIN L9 (GIBBERELLIN- |
| | | | | | | | REGULATED PROTEIN GA) |
| | | | | | | | >gi\|100065\|pir\|\|S19978 ribosomal protein L9, |
| | | | | | | | cytosolic - garden pea >gi\|20727\|emb\|CAA46273.1\| |
| | | | | | | | (X65155) GA [Pisum sativum] |
| 238 | LIB3602-069-Q1-K1-B6 | 266945 | BLASTX | 533 | 3.00E−54 | 66 | 60S RIBOSOMAL PROTEIN L9 (GIBBERELLIN- |
| | | | | | | | REGULATED PROTEIN GA) |
| | | | | | | | >gi\|100065\|pir\|\|S19978 ribosomal protein L9, |
| | | | | | | | cytosolic - garden pea >gi\|20727\|emb\|CAA46273.1\| |
| | | | | | | | (X65155) GA [Pisum sativum] |
| 239 | LIB602-015-Q6-K1-D8 | 266945 | BLASTX | 528 | 1.00E−53 | 66 | 60S RIBOSOMAL PROTEIN L9 (GIBBERELLIN- |
| | | | | | | | REGULATED PROTEIN GA) |
| | | | | | | | >gi\|100065\|pir\|\|S19978 ribosomal protein L9, |
| | | | | | | | cytosolic - garden pea >gi\|20727\|emb\|CAA46273.1\| |
| | | | | | | | (X65155) GA [Pisum sativum] |
| 240 | LIB3602-076-Q6-K6-E6 | 266945 | BLASTX | 521 | 8.00E−53 | 66 | 60S RIBOSOMAL PROTEIN L9 (GIBBERELLIN- |
| | | | | | | | REGULATED PROTEIN GA) |
| | | | | | | | >gi\|100065\|pir\|\|S19978 ribosomal protein L9, |
| | | | | | | | cytosolic - garden pea >gi\|20727\|emb\|CAA46273.1\| |
| | | | | | | | (X65155) GA [Pisum sativum] |
| 241 | LIB3602-011-Q6-K1-B8 | 266945 | BLASTX | 518 | 2.00E−52 | 62 | 60S RIBOSOMAL PROTEIN L9 (GIBBERELLIN- |
| | | | | | | | REGULATED PROTEIN GA) |
| | | | | | | | >gi\|100065\|pir\|\|S19978 ribosomal protein L9, |
| | | | | | | | cytosolic - garden pea >gi\|20727\|emb\|CAA46273.1\| |
| | | | | | | | (X65155) GA [Pisum sativum] |
| 242 | LIB3602-102-Q1-K1-A8 | 266945 | BLASTX | 515 | 3.00E−52 | 66 | 60S RIBOSOMAL PROTEIN L9 (GIBBERELLIN- |
| | | | | | | | REGULATED PROTEIN GA) |
| | | | | | | | >gi\|100065\|pir\|\|S19978 ribosomal protein L9, |
| | | | | | | | cytosolic - garden pea >gi\|20727\|emb\|CAA46273.1\| |
| | | | | | | | (X65155) GA [Pisum sativum] |
| 243 | LIB3602-070-Q1-K1-B6 | 266945 | BLASTX | 513 | 7.00E−52 | 66 | 60S RIBOSOMAL PROTEIN L9 (GIBBERELLIN- |
| | | | | | | | REGULATED PROTEIN GA) |
| | | | | | | | >gi\|100065\|pir\|\|S19978 ribosomal protein L9, |
| | | | | | | | cytosolic - garden pea >gi\|20727\|emb\|CAA46273.1\| |
| | | | | | | | (X65155) GA [Pisum sativum] |
| 244 | LIB3602-045-Q6-K1-A6 | 266945 | BLASTX | 505 | 4.00E−51 | 65 | 60S RIBOSOMAL PROTEIN L9 (GIBBERELLIN- |
| | | | | | | | REGULATED PROTEIN GA) |
| | | | | | | | >gi\|100065\|pir\|\|S19978 ribosomal protein L9, |
| | | | | | | | cytosolic - garden pea >gi\|20727\|emb\|CAA46273.1\| |
| | | | | | | | (X65155) GA [Pisum sativum] |
| 245 | LIB3602-041-Q6-K1-H1 | 266945 | BLASTX | 494 | 9.00E−50 | 67 | 60S RIBOSOMAL PROTEIN L9 (GIBBERELLIN- |
| | | | | | | | REGULATED PROTEIN GA) |
| | | | | | | | >gi\|100065\|pir\|\|S19978 ribosomal protein L9, |
| | | | | | | | cytosolic - garden pea >gi\|20727\|emb\|CAA46273.1\| |
| | | | | | | | (X65155) GA [Pisum sativum] |
| 246 | LIB3602-045-Q6-K1-G6 | 266945 | BLASTX | 487 | 6.00E−49 | 63 | 60S RIBOSOMAL PROTEIN L9 (GIBBERELLIN- |
| | | | | | | | REGULATED PROTEIN GA) |
| | | | | | | | >gi\|100065\|pir\|\|S19978 ribosomal protein L9, |
| | | | | | | | cytosolic - garden pea >gi\|20727\|emb\|CAA46273.1\| |
| | | | | | | | (X65155) GA [Pisum sativum] |
| 247 | LIB3602-013-Q6-K1-F2 | 266945 | BLASTX | 486 | 7.00E−49 | 63 | 60S RIBOSOMAL PROTEIN L9 (GIBBERELLIN- |
| | | | | | | | REGULATED PROTEIN GA) |
| | | | | | | | >gi\|100065\|pir\|\|S19978 ribosomal protein L9, |
| | | | | | | | cytosolic - garden pea >gi\|20727\|emb\|CAA46273.1\| |
| | | | | | | | (X65155) GA [Pisum sativum] |
| 248 | LIB3602-012-Q6-K1-C2 | 266945 | BLASTX | 463 | 5.00E−46 | 62 | 60S RIBOSOMAL PROTEIN L9 (GIBBERELLIN- |
| | | | | | | | REGULATED PROTEIN GA) |
| | | | | | | | >gi\|100065\|pir\|\|S19978 ribosomal protein L9, |
| | | | | | | | cytosolic - garden pea >gi\|20727\|emb\|CAA46273.1\| |
| | | | | | | | (X65155) GA [Pisum sativum] |
| 249 | LIB3602-092-Q6-K6-D9 | 266945 | BLASTX | 203 | 4.00E−29 | 57 | 60S RIBOSOMAL PROTEIN L9 (GIBBERELLIN- |
| | | | | | | | REGULATED PROTEIN GA) |
| | | | | | | | >gi\|100065\|pir\|\|S19978 ribosomal protein L9, |
| | | | | | | | cytosolic - garden pea >gi\|20727\|emb\|CAA46273.1\| |
| | | | | | | | (X65155) GA [Pisum sativum] |
| 250 | LIB3602-015-Q6-K1-D9 | 266945 | BLASTX | 214 | 2.00E−21 | 42 | 60S RIBOSOMAL PROTEIN L9 (GIBBERELLIN- |
| | | | | | | | REGULATED PROTEIN GA) |
| | | | | | | | >gi\|100065\|pir\|\|S19978 ribosomal protein L9, |
| | | | | | | | cytosolic - garden pea >gi\|20727\|emb\|CAA46273.1\| |
| | | | | | | | (X65155) GA [Pisum sativum] |
| 251 | LIB3602-115-Q1-K1-E1 | 266945 | BLASTX | 192 | 9.00E−15 | 74 | 60S RIBOSOMAL PROTEIN L9 (GIBBERELLIN- |
| | | | | | | | REGULATED PROTEIN GA) |
| | | | | | | | >gi\|100065\|pir\|\|S19978 ribosomal protein L9, |
| | | | | | | | cytosolic - garden pea >gi\|20727\|emb\|CAA46273.1\| |
| | | | | | | | (X65155) GA [Pisum sativum] |
| 252 | LIB3602-100-Q1-K1-B9 | 115826 | BLASTX | 489 | 4.00E−49 | 77 | CHLOROPHYLL A-B BINDING PROTEIN OF |
| | | | | | | | LHCII TYPE I PRECURSOR (CAB) (LHCP) |
| | | | | | | | >gi\|99371\|pir\|\|S14518 chlorophyll a/b-binding |
| | | | | | | | protein - Chlamydomonas moewusii |
| | | | | | | | >gi\|18063\|emb\|CAA38635.1\| (X54856) chlorophyll |
| | | | | | | | a/b-binding protein [Chlamydomonas moewusii] |
| 253 | LIB3602-107-Q1-K1-D5 | 115826 | BLASTX | 464 | 4.00E−46 | 77 | CHLOROPHYLL A-B BINDING PROTEIN OF |
| | | | | | | | LHCII TYPE I PRECURSOR (CAB) (LHCP) |
| | | | | | | | >gi\|99371\|pir\|\|S14518 chlorophyll a/b-binding |
| | | | | | | | protein - Chlamydomonas moewusii |
| | | | | | | | >gi\|18063\|emb\|CAA38635.1\| (X54856) chlorophyll |
| | | | | | | | a/b-binding protein [Chlamydomonas moewusii] |
| 254 | LIB3602-044-Q6-K1-B10 | 115826 | BLASTX | 463 | 4.00E−46 | 77 | CHLOROPHYLL A-B BINDING PROTEIN OF |
| | | | | | | | LHCII TYPE I PRECURSOR (CAB) (LHCP) |
| | | | | | | | >gi\|99371\|pir\|\|S14518 chlorophyll a/b-binding |
| | | | | | | | protein - Chlamydomonas moewusii |
| | | | | | | | >gi\|18063\|emb\|CAA38635.1\| (X54856) chlorophyll |
| | | | | | | | a/b-binding protein [Chlamydomonas moewusii] |
| 255 | LIB3602-115-Q1-K1-D6 | 115826 | BLASTX | 414 | 4.00E−41 | 80 | CHLOROPHYLL A-B BINDING PROTEIN OF |
| | | | | | | | LHCII TYPE I PRECURSOR (CAB) (LHCP) |
| | | | | | | | >gi\|99371\|pir\|\|S14518 chlorophyll a/b-binding |
| | | | | | | | protein - Chlamydomonas moewusii |
| | | | | | | | >gi\|18063\|emb\|CAA38635.1\| (X54856) chlorophyll |
| | | | | | | | a/b-binding protein [Chlamydomonas moewusii] |
| 256 | LIB3602-070-Q1-K1-G8 | 115826 | BLASTX | 414 | 1.00E−40 | 80 | CHLOROPHYLL A-B BINDING PROTEIN OF |
| | | | | | | | LHCII TYPE I PRECURSOR (CAB) (LHCP) |
| | | | | | | | >gi\|99371\|pir\|\|S14518 chlorophyll a/b-binding |
| | | | | | | | protein - Chlamydomonas moewusii |
| | | | | | | | >gi\|18063\|emb\|CAA38635.1\| (X54856) chlorophyll |
| | | | | | | | a/b-binding protein [Chlamydomonas moewusii] |
| 257 | LIB3602-102-Q1-K1-A2 | 115826 | BLASTX | 302 | 2.00E−40 | 82 | CHLOROPHYLL A-B BINDING PROTEIN OF |
| | | | | | | | LHCII TYPE I PRECURSOR (CAB) (LHCP) |
| | | | | | | | >gi\|99371\|pir\|\|S14518 chlorophyll a/b-binding |
| | | | | | | | protein - Chlamydomonas moewusii |
| | | | | | | | >gi\|18063\|emb\|CAA38635.1\| (X54856) chlorophyll |
| | | | | | | | a/b-binding protein [Chlamydomonas moewusii] |
| 258 | LIB3602-118-Q1-K1-D5 | 115826 | BLASTX | 211 | 3.00E−34 | 86 | CHLOROPHYLL A-B BINDING PROTEIN OF |
| | | | | | | | LHCII TYPE I PRECURSOR (CAB) (LHCP) |
| | | | | | | | >gi\|99371\|pir\|\|S14518 chlorophyll a/b-binding |
| | | | | | | | protein - Chlamydomonas moewusii |
| | | | | | | | >gi\|18063\|emb\|CAA38635.1\| (X54856) chlorophyll |
| | | | | | | | a/b-binding protein [Chlamydomonas moewusii] |
| 259 | LIB3602-044-Q6-K1-F3 | 115826 | BLASTX | 344 | 3.00E−32 | 76 | CHLOROPHYLL A-B BINDING PROTEIN OF |
| | | | | | | | LHCII TYPE I PRECURSOR (CAB) (LHCP) |
| | | | | | | | >gi\|99371\|pir\|\|S14518 chlorophyll a/b-binding |
| | | | | | | | protein - Chlamydomonas moewusii |
| | | | | | | | >gi\|18063\|emb\|CAA38635.1\| (X54856) chlorophyll |
| | | | | | | | a/b-binding protein [Chlamydomonas moewusii] |
| 260 | LIB3602-052-Q6-K1-D11 | 115826 | BLASTX | 331 | 9.00E−31 | 77 | CHLOROPHYLL A-B BINDING PROTEIN OF |
| | | | | | | | LHCII TYPE I PRECURSOR (CAB) (LHCP) |
| | | | | | | | >gi\|99371\|pir\|\|S14518 chlorophyll a/b-binding |
| | | | | | | | protein - Chlamydomonas moewusii |
| | | | | | | | >gi\|18063\|emb\|CAA38635.1\| (X54856) chlorophyll |
| | | | | | | | a/b-binding protein [Chlamydomonas moewusii] |
| 261 | LIB3602-083-Q6-K6-E3 | 115826 | BLASTX | 330 | 1.00E−30 | 61 | CHLOROPHYLL A-B BINDING PROTEIN OF |
| | | | | | | | LHCII TYPE I PRECURSOR (CAB) (LHCP) |
| | | | | | | | >gi\|99371\|pir\|\|S14518 chlorophyll a/b-binding |
| | | | | | | | protein - Chlamydomonas moewusii |
| | | | | | | | >gi\|18063\|emb\|CAA38635.1\| (X54856) chlorophyll |
| | | | | | | | a/b-binding protein [Chlamydomonas moewusii] |
| 262 | LIB3602-118-Q1-K1-F7 | 115826 | BLASTX | 329 | 2.00E−30 | 79 | CHLOROPHYLL A-B BINDING PROTEIN OF |
| | | | | | | | LHCII TYPE I PRECURSOR (CAB) (LHCP) |
| | | | | | | | >gi\|99371\|pir\|\|S14518 chlorophyll a/b-binding |
| | | | | | | | protein - Chlamydomonas moewusii |
| | | | | | | | >gi\|18063\|emb\|CAA38635.1\| (X54856) chlorophyll |
| | | | | | | | a/b-binding protein [Chlamydomonas moewusii] |
| 263 | LIB3602-037-Q6-K1-C3 | 115826 | BLASTX | 329 | 2.00E−30 | 79 | CHLOROPHYLL A-B BINDING PROTEIN OF |
| | | | | | | | LHCII TYPE I PRECURSOR (CAB) (LHCP) |
| | | | | | | | >gi\|99371\|pir\|\|S14518 chlorophyll a/b-binding |
| | | | | | | | protein - Chlamydomonas moewusii |
| | | | | | | | >gi\|18063\|emb\|CAA38635.1\| (X54856) chlorophyll |
| | | | | | | | a/b-binding protein [Chlamydomonas moewusii] |
| 264 | LIB3602-022-Q6-K1-H7 | 115826 | BLASTX | 319 | 2.00E−29 | 76 | CHLOROPHYLL A-B BINDING PROTEIN OF |
| | | | | | | | LHCII TYPE I PRECURSOR (CAB) (LHCP) |
| | | | | | | | >gi\|99371\|pir\|\|S14518 chlorophyll a/b-binding |
| | | | | | | | protein - Chlamydomonas moewusii |
| | | | | | | | >gi\|18063\|emb\|CAA38635.1\| (X54856) chlorophyll |
| | | | | | | | a/b-binding protein [Chlamydomonas moewusii] |
| 265 | LIB3602-112-Q1-K1-A10 | 115826 | BLASTX | 319 | 2.00E−29 | 76 | CHLOROPHYLL A-B BINDING PROTEIN OF |
| | | | | | | | LHCII TYPE I PRECURSOR (CAB) (LHCP) |
| | | | | | | | >gi\|99371\|pir\|\|S14518 chlorophyll a/b-binding |
| | | | | | | | protein - Chlamydomonas moewusii |
| | | | | | | | >gi\|18063\|emb\|CAA38635.1\| (X54856) chlorophyll |
| | | | | | | | a/b-binding protein [Chlamydomonas moewusii] |
| 266 | LIB3602-089-Q6-K6-A10 | 115826 | BLASTX | 315 | 6.00E−29 | 75 | CHLOROPHYLL A-B BINDING PROTEIN OF |
| | | | | | | | LHCII TYPE I PRECURSOR (CAB) (LHCP) |
| | | | | | | | >gi\|99371\|pir\|\|S14518 chlorophyll a/b-binding |
| | | | | | | | protein - Chlamydomonas moewusii |
| | | | | | | | >gi\|18063\|emb\|CAA38635.1\| (X54856) chlorophyll |
| | | | | | | | a/b-binding protein [Chlamydomonas moewusii] |
| 267 | LIB3602-017-Q6-K1-A10 | 115826 | BLASTX | 293 | 2.00E−26 | 75 | CHLOROPHYLL A-B BINDING PROTEIN OF |
| | | | | | | | LHCII TYPE I PRECURSOR (CAB) (LHCP) |
| | | | | | | | >gi\|99371\|pir\|\|S14518 chlorophyll a/b-binding |
| | | | | | | | protein - Chlamydomonas moewusii |
| | | | | | | | >gi\|18063\|emb\|CAA38635.1\| (X54856) chlorophyll |
| | | | | | | | a/b-binding protein [Chlamydomonas moewusii] |
| 268 | LIB3602-004-Q1-K1-B10 | 115826 | BLASTX | 278 | 1.00E−24 | 57 | CHLOROPHYLL A-B BINDING PROTEIN OF |
| | | | | | | | LHCII TYPE I PRECURSOR (CAB) (LHCP) |
| | | | | | | | >gi\|99371\|pir\|\|S14518 chlorophyll a/b-binding |
| | | | | | | | protein - Chlamydomonas moewusii |
| | | | | | | | >gi\|18063\|emb\|CAA38635.1\| (X54856) chlorophyll |
| | | | | | | | a/b-binding protein [Chlamydomonas moewusii] |
| 269 | LIB3602-027-Q6-K1-G9 | 115826 | BLASTX | 266 | 3.00E−23 | 78 | CHLOROPHYLL A-B BINDING PROTEIN OF |
| | | | | | | | LHCII TYPE I PRECURSOR (CAB) (LHCP) |
| | | | | | | | >gi\|99371\|pir\|\|S14518 chlorophyll a/b-binding |
| | | | | | | | protein - Chlamydomonas moewusii |
| | | | | | | | >gi\|18063\|emb\|CAA38635.1\| (X54856) chlorophyll |
| | | | | | | | a/b-binding protein [Chlamydomonas moewusii] |
| 270 | LIB3602-106-Q1-K1-B9 | 115826 | BLASTX | 225 | 2.00E−20 | 49 | CHLOROPHYLL A-B BINDING PROTEIN OF |
| | | | | | | | LHCII TYPE I PRECURSOR (CAB) (LHCP) |
| | | | | | | | >gi\|99371\|pir\|\|S14518 chlorophyll a/b-binding |
| | | | | | | | protein - Chlamydomonas moewusii |
| | | | | | | | >gi\|18063\|emb\|CAA38635.1\| (X54856) chlorophyll |
| | | | | | | | a/b-binding protein [Chlamydomonas moewusii] |
| 271 | LIB3602-044-Q6-K1-G12 | 115826 | BLASTX | 224 | 2.00E−18 | 76 | CHLOROPHYLL A-B BINDING PROTEIN OF |
| | | | | | | | LHCII TYPE I PRECURSOR (CAB) (LHCP) |
| | | | | | | | >gi\|99371\|pir\|\|S14518 chlorophyll a/b-binding |
| | | | | | | | protein - Chlamydomonas moewusii |
| | | | | | | | >gi\|18063\|emb\|CAA38635.1\| (X54856) chlorophyll |
| | | | | | | | a/b-binding protein [Chlamydomonas moewusii] |
| 272 | LIB3602-063-Q1-K6-E3 | 115826 | BLASTX | 223 | 3.00E−18 | 74 | CHLOROPHYLL A-B BINDING PROTEIN OF |
| | | | | | | | LHCII TYPE I PRECURSOR (CAB) (LHCP) |
| | | | | | | | >gi\|99371\|pir\|\|S14518 chlorophyll a/b-binding |
| | | | | | | | protein - Chlamydomonas moewusii |
| | | | | | | | >gi\|18063\|emb\|CAA38635.1\| (X54856) chlorophyll |
| | | | | | | | a/b-binding protein [Chlamydomonas moewusii] |
| 273 | LIB3602-067-Q1-K1-A10 | 115826 | BLASTX | 193 | 9.00E−16 | 70 | CHLOROPHYLL A-B BINDING PROTEIN OF |
| | | | | | | | LHCII TYPE I PRECURSOR (CAB) (LHCP) |
| | | | | | | | >gi\|99371\|pir\|\|S14518 chlorophyll a/b-binding |
| | | | | | | | protein - Chlamydomonas moewusii |
| | | | | | | | >gi\|18063\|emb\|CAA38635.1\| (X54856) chlorophyll |
| | | | | | | | a/b-binding protein [Chlamydomonas moewusii] |
| 274 | LIB3602-058-Q6-K1-C11 | 115826 | BLASTX | 201 | 1.00E−15 | 74 | CHLOROPHYLL A-B BINDING PROTEIN OF |
| | | | | | | | LHCII TYPE I PRECURSOR (CAB) (LHCP) |
| | | | | | | | >gi\|99371\|pir\|\|S14518 chlorophyll a/b-binding |
| | | | | | | | protein - Chlamydomonas moewusii |
| | | | | | | | >gi\|18063\|emb\|CAA38635.1\| (X54856) chlorophyll |
| | | | | | | | a/b-binding protein [Chlamydomonas moewusii] |
| 275 | LIB3602-029-Q6-K1-B10 | 115826 | BLASTX | 201 | 1.00E−15 | 74 | CHLOROPHYLL A-B BINDING PROTEIN OF |
| | | | | | | | LHCII TYPE I PRECURSOR (CAB) (LHCP) |
| | | | | | | | >gi\|99371\|pir\|\|S14518 chlorophyll a/b-binding |
| | | | | | | | protein - Chlamydomonas moewusii |
| | | | | | | | >gi\|18063\|emb\|CAA38635.1\| (X54856) chlorophyll |
| | | | | | | | a/b-binding protein [Chlamydomonas moewusii] |
| 276 | LIB3602-054-Q6-K1-E4 | 115826 | BLASTX | 162 | 5.00E−11 | 70 | CHLOROPHYLL A-B BINDING PROTEIN OF |
| | | | | | | | LHCII TYPE I PRECURSOR (CAB) (LHCP) |
| | | | | | | | >gi\|99371\|pir\|\|S14518 chlorophyll a/b-binding |
| | | | | | | | protein - Chlamydomonas moewusii |
| | | | | | | | >gi\|18063\|emb\|CAA38635.1\| (X54856) chlorophyll |
| | | | | | | | a/b-binding protein [Chlamydomonas moewusii] |
| 277 | LIB3602-015-Q6-K1-G2 | 7440560 | BLASTX | 296 | 8.00E−27 | 73 | ribosomal protein S25, cytosolic - Arabidopsis |
| | | | | | | | thaliana >gi\|4914432\|emb\|CAB43635.1\| |
| | | | | | | | (AL050351) ribosomal protein S25 [Arabidopsis |
| | | | | | | | thaliana] >gi\|7270903\|emb\|CAB80583.1\| |
| | | | | | | | (AL161594) ribosomal protein S25 [Arabidopsis |
| | | | | | | | thaliana] |
| 278 | LIB3602-017-Q6-K1-G10 | 7440560 | BLASTX | 292 | 2.00E−26 | 72 | ribosomal protein S25, cytosolic - Arabidopsis |
| | | | | | | | thaliana >gi\|4914432\|emb\|CAB43635.1\| |
| | | | | | | | (AL050351) ribosomal protein S25 [Arabidopsis |
| | | | | | | | thaliana] >gi\|7270903\|emb\|CAB80583.1\| |
| | | | | | | | (AL161594) ribosomal protein S25 [Arabidopsis |
| | | | | | | | thaliana] |
| 279 | LIB3602-107-Q1-K1-C9 | 7440560 | BLASTX | 272 | 6.00E−24 | 71 | ribosomal protein S25, cytosolic - Arabidopsis |
| | | | | | | | thaliana >gi\|4914432\|emb\|CAB43635.1\| |
| | | | | | | | (AL050351) ribosomal protein S25 [Arabidopsis |
| | | | | | | | thaliana] >gi\|7270903\|emb\|CAB80583.1\| |
| | | | | | | | (AL161594) ribosomal protein S25 [Arabidopsis |
| | | | | | | | thaliana] |
| 280 | LIB3602-039-Q6-K1-H8 | 7440560 | BLASTX | 247 | 6.00E−21 | 71 | ribosomal protein S25, cytosolic - Arabidopsis |
| | | | | | | | thaliana >gi\|4914432\|emb\|CAB43635.1\| |
| | | | | | | | (AL050351) ribosomal protein S25 [Arabidopsis |
| | | | | | | | thaliana] >gi\|7270903\|emb\|CAB80583.1\| |
| | | | | | | | (AL161594) ribosomal protein S25 [Arabidopsis |
| | | | | | | | thaliana] |
| 281 | LIB3602-049-Q6-K1-D5 | 7440560 | BLASTX | 247 | 6.00E−21 | 71 | ribosomal protein S25, cytosolic - Arabidopsis |
| | | | | | | | thaliana >gi\|4914432\|emb\|CAB43635.1\| |
| | | | | | | | (AL050351) ribosomal protein S25 [Arabidopsis |
| | | | | | | | thaliana] >gi\|7270903\|emb\|CAB80583.1\| |
| | | | | | | | (AL161594) ribosomal protein S25 [Arabidopsis |
| | | | | | | | thaliana] |
| 282 | LIB3602-042-Q6-K1-B2 | 7440560 | BLASTX | 247 | 6.00E−21 | 71 | ribosomal protein S25, cytosolic - Arabidopsis |
| | | | | | | | thaliana >gi\|4914432\|emb\|CAB43635.1\| |
| | | | | | | | (AL050351) ribosomal protein S25 [Arabidopsis |
| | | | | | | | thaliana] >gi\|7270903\|emb\|CAB80583.1\| |
| | | | | | | | (AL161594) ribosomal protein S25 [Arabidopsis |
| | | | | | | | thaliana] |
| 283 | LIB3602-061-Q6-K1-H5 | 7440560 | BLASTX | 247 | 6.00E−21 | 71 | ribosomal protein S25, cytosolic - Arabidopsis |
| | | | | | | | thaliana >gi\|4914432\|emb\|CAB43635.1\| |
| | | | | | | | (AL050351) ribosomal protein S25 [Arabidopsis |
| | | | | | | | thaliana] >gi\|7270903\|emb\|CAB80583.1\| |
| | | | | | | | (AL161594) ribosomal protein S25 [Arabidopsis |
| | | | | | | | thaliana] |
| 284 | LIB3602-077-Q6-K6-F9 | 7440560 | BLASTX | 247 | 6.00E−21 | 71 | ribosomal protein S25, cytosolic - Arabidopsis |
| | | | | | | | thaliana >gi\|4914432\|emb\|CAB43635.1\| |
| | | | | | | | (AL050351) ribosomal protein S25 [Arabidopsis |
| | | | | | | | thaliana] >gi\|7270903\|emb\|CAB80583.1\| |
| | | | | | | | (AL161594) ribosomal protein S25 [Arabidopsis |
| | | | | | | | thaliana] |
| 285 | LIB3602-079-Q6-K6-A3 | 7440560 | BLASTX | 247 | 6.00E−21 | 71 | ribosomal protein S25, cytosolic - Arabidopsis |
| | | | | | | | thaliana >gi\|4914432\|emb\|CAB43635.1\| |
| | | | | | | | (AL050351) ribosomal protein S25 [Arabidopsis |
| | | | | | | | thaliana] >gi\|7270903\|emb\|CAB80583.1\| |
| | | | | | | | (AL161594) ribosomal protein S25 [Arabidopsis |
| | | | | | | | thaliana] |
| 286 | LIB3602-047-Q6-K1-A2 | 7440560 | BLASTX | 247 | 6.00E−21 | 71 | ribosomal protein S25, cytosolic - Arabidopsis |
| | | | | | | | thaliana >gi\|4914432\|emb\|CAB43635.1\| |
| | | | | | | | (AL050351) ribosomal protein S25 [Arabidopsis |
| | | | | | | | thaliana] >gi\|7270903\|emb\|CAB80583.1\| |
| | | | | | | | (AL161594) ribosomal protein S25 [Arabidopsis |
| | | | | | | | thaliana] |
| 287 | LIB3602-017-Q6-K1-F8 | 7440560 | BLASTX | 247 | 6.00E−21 | 71 | ribosomal protein S25, cytosolic - Arabidopsis |
| | | | | | | | thaliana >gi\|4914432\|emb\|CAB43635.1\| |
| | | | | | | | (AL050351) ribosomal protein S25 [Arabidopsis |
| | | | | | | | thaliana] >gi\|7270903\|emb\|CAB80583.1\| |
| | | | | | | | (AL161594) ribosomal protein S25 [Arabidopsis |
| | | | | | | | thaliana] |
| 288 | LIB3602-017-Q6-K1-C12 | 7440560 | BLASTX | 247 | 6.00E−21 | 71 | ribosomal protein S25, cytosolic - Arabidopsis |
| | | | | | | | thaliana >gi\|4914432\|emb\|CAB43635.1\| |
| | | | | | | | (AL050351) ribosomal protein S25 [Arabidopsis |
| | | | | | | | thaliana] >gi\|7270903\|emb\|CAB80583.1\| |
| | | | | | | | (AL161594) ribosomal protein S25 [Arabidopsis |
| | | | | | | | thaliana] |
| 289 | LIB3602-018-Q6-K1-E12 | 7440560 | BLASTX | 247 | 6.00E−21 | 71 | ribosomal protein S25, cytosolic - Arabidopsis |
| | | | | | | | thaliana >gi\|4914432\|emb\|CAB43635.1\| |
| | | | | | | | (AL050351) ribosomal protein S25 [Arabidopsis |
| | | | | | | | thaliana] >gi\|7270903\|emb\|CAB80583.1\| |
| | | | | | | | (AL161594) ribosomal protein S25 [Arabidopsis |
| | | | | | | | thaliana] |
| 290 | LIB3602-012-Q6-K1-E12 | 7440560 | BLASTX | 247 | 6.00E−21 | 71 | ribosomal protein S25, cytosolic - Arabidopsis |
| | | | | | | | thaliana >gi\|4914432\|emb\|CAB43635.1\| |
| | | | | | | | (AL050351) ribosomal protein S25 [Arabidopsis |
| | | | | | | | thaliana] >gi\|7270903\|emb\|CAB80583.1\| |
| | | | | | | | (AL161594) ribosomal protein S25 [Arabidopsis |
| | | | | | | | thaliana] |
| 291 | LIB3602-026-Q6-K1-A12 | 7440560 | BLASTX | 247 | 6.00E−21 | 71 | ribosomal protein S25, cytosolic - Arabidopsis |
| | | | | | | | thaliana >gi\|4914432\|emb\|CAB43635.1\| |
| | | | | | | | (AL050351) ribosomal protein S25 [Arabidopsis |
| | | | | | | | thaliana] >gi\|7270903\|emb\|CAB80583.1\| |
| | | | | | | | (AL161594) ribosomal protein S25 [Arabidopsis |
| | | | | | | | thaliana] |
| 292 | LIB3602-026-Q6-K1-A5 | 7440560 | BLASTX | 247 | 6.00E−21 | 71 | ribosomal protein S25, cytosolic - Arabidopsis |
| | | | | | | | thaliana >gi\|4914432\|emb\|CAB43635.1\| |
| | | | | | | | (AL050351) ribosomal protein S25 [Arabidopsis |
| | | | | | | | thaliana] >gi\|7270903\|emb\|CAB80583.1\| |
| | | | | | | | (AL161594) ribosomal protein S25 [Arabidopsis |
| | | | | | | | thaliana] |
| 293 | LIB3602-015-Q6-K1-C12 | 7440560 | BLASTX | 247 | 7.00E−21 | 71 | ribosomal protein S25, cytosolic - Arabidopsis |
| | | | | | | | thaliana >gi\|4914432\|emb\|CAB43635.1\| |
| | | | | | | | (AL050351) ribosomal protein S25 [Arabidopsis |
| | | | | | | | thaliana] >gi\|7270903\|emb\|CAB80583.1\| |
| | | | | | | | (AL161594) ribosomal protein S25 [Arabidopsis |
| | | | | | | | thaliana] |
| 294 | LIB3602-109-Q1-K1-H2 | 7440560 | BLASTX | 239 | 5.00E−20 | 69 | ribosomal protein S25, cytosolic - Arabidopsis |
| | | | | | | | thaliana >gi\|4914432\|emb\|CAB43635.1\| |
| | | | | | | | (AL050351) ribosomal protein S25 [Arabidopsis |
| | | | | | | | thaliana] >gi\|7270903\|emb\|CAB80583.1\| |
| | | | | | | | (AL161594) ribosomal protein S25 [Arabidopsis |
| | | | | | | | thaliana] |
| 295 | LIB3602-109-Q1-K1-C2 | 7440560 | BLASTX | 238 | 6.00E−20 | 69 | ribosomal protein S25, cytosolic - Arabidopsis |
| | | | | | | | thaliana >gi\|4914432\|emb\|CAB43635.1\| |
| | | | | | | | (AL050351) ribosomal protein S25 [Arabidopsis |
| | | | | | | | thaliana] >gi\|7270903\|emb\|CAB80583.1\| |
| | | | | | | | (AL161594) ribosomal protein S25 [Arabidopsis |
| | | | | | | | thaliana] |
| 296 | LIB3602-101-Q1-K1-A1 | 7440560 | BLASTX | 237 | 9.00E−20 | 68 | ribosomal protein S25, cytosolic - Arabidopsis |
| | | | | | | | thaliana >gi\|4914432\|emb\|CAB43635.1\| |
| | | | | | | | (AL050351) ribosomal protein S25 [Arabidopsis |
| | | | | | | | thaliana] >gi\|7270903\|emb\|CAB80583.1\| |
| | | | | | | | (AL161594) ribosomal protein S25 [Arabidopsis |
| | | | | | | | thaliana] |
| 297 | LIB3602-087-Q6-K1-H9 | 7440560 | BLASTX | 229 | 1.00E−18 | 70 | ribosomal protein S25, cytosolic - Arabidopsis |
| | | | | | | | thaliana >gi\|4914432\|emb\|CAB43635.1\| |
| | | | | | | | (AL050351) ribosomal protein S25 [Arabidopsis |
| | | | | | | | thaliana] >gi\|7270903\|emb\|CAB80583.1\| |
| | | | | | | | (AL161594) ribosomal protein S25 [Arabidopsis |
| | | | | | | | thaliana] |
| 298 | LIB3602-021-Q6-K1-D5 | 7440560 | BLASTX | 215 | 2.00E−17 | 76 | ribosomal protein S25, cytosolic - Arabidopsis |
| | | | | | | | thaliana >gi\|4914432\|emb\|CAB43635.1\| |
| | | | | | | | (AL050351) ribosomal protein S25 [Arabidopsis |
| | | | | | | | thaliana] >gi\|7270903\|emb\|CAB80583.1\| |
| | | | | | | | (AL161594) ribosomal protein S25 [Arabidopsis |
| | | | | | | | thaliana] |
| 299 | LIB3602-106-Q1-K1-D12 | 7440560 | BLASTX | 212 | 1.00E−16 | 74 | ribosomal protein S25, cytosolic - Arabidopsis |
| | | | | | | | thaliana >gi\|4914432\|emb\|CAB43635.1\| |
| | | | | | | | (AL050351) ribosomal protein S25 [Arabidopsis |
| | | | | | | | thaliana] >gi\|7270903\|emb\|CAB80583.1\| |
| | | | | | | | (AL161594) ribosomal protein S25 [Arabidopsis |
| | | | | | | | thaliana] |
| 300 | LIB3602-058-Q6-K1-C7 | 7440560 | BLASTX | 160 | 3.00E−11 | 67 | ribosomal protein S25, cytosolic - Arabidopsis |
| | | | | | | | thaliana >gi\|4914432\|emb\|CAB43635.1\| |
| | | | | | | | (AL050351) ribosomal protein S25 [Arabidopsis |
| | | | | | | | thaliana] >gi\|7270903\|emb\|CAB80583.1\| |
| | | | | | | | (AL161594) ribosomal protein S25 [Arabidopsis |
| | | | | | | | thaliana] |
| 301 | LIB3602-017-Q6-K1-E11 | 6094037 | BLASTX | 595 | 1.00E−61 | 81 | 60S RIBOSOMAL PROTEIN L23 |
| | | | | | | | >gi\|7440854\|pir\|\|T11639 ribosomal protein L17 - |
| | | | | | | | fission yeast (Schizosaccharomyces pombe) |
| | | | | | | | >gi\|7490001\|pir\|\|T40942 60s ribosomal protein - |
| | | | | | | | fission yeast (Schizosaccharomyces pombe) |
| | | | | | | | >gi\|2706454\|emb\|CAA15912.1\| (AL021046) 60s |
| | | | | | | | riboso |
| 302 | LIB3602-067-Q1-K1-H1 | 6094037 | BLASTX | 595 | 2.00E−61 | 81 | 60S RIBOSOMAL PROTEIN L23 |
| | | | | | | | >gi\|7440854\|pir\|\|T11639 ribosomal protein L17 - |
| | | | | | | | fission yeast (Schizosaccharomyces pombe) |
| | | | | | | | >gi\|7490001\|pir\|\|T40942 60s ribosomal protein - |
| | | | | | | | fission yeast (Schizosaccharomyces pombe) |
| | | | | | | | >gi\|2706454\|emb\|CAA15912.1\| (AL021046) 60s |
| | | | | | | | riboso |
| 303 | LIB3602-074-Q1-K1-H1 | 6094037 | BLASTX | 595 | 2.00E−61 | 81 | 60S RIBOSOMAL PROTEIN L23 |
| | | | | | | | >gi\|7440854\|pir\|\|T11639 ribosomal protein L17 - |
| | | | | | | | fission yeast (Schizosaccharomyces pombe) |
| | | | | | | | >gi\|7490001\|pir\|\|T40942 60s ribosomal protein - |
| | | | | | | | fission yeast (Schizosaccharomyces pombe) |
| | | | | | | | >gi\|2706454\|emb\|CAA15912.1\| (AL021046) 60s |
| | | | | | | | riboso |
| 304 | LIB3602-041-Q6-K1-G12 | 6094037 | BLASTX | 591 | 5.00E−61 | 81 | 60S RIBOSOMAL PROTEIN L23 |
| | | | | | | | >gi\|7440854\|pir\|\|T11639 ribosomal protein L17 - |
| | | | | | | | fission yeast (Schizosaccharomyces pombe) |
| | | | | | | | >gi\|7490001\|pir\|\|T40942 60s ribosomal protein - |
| | | | | | | | fission yeast (Schizosaccharomyces pombe) |
| | | | | | | | >gi\|2706454\|emb\|CAA15912.1\| (AL021046) 60s |
| | | | | | | | riboso |
| 305 | LIB3602-007-Q1-K1-B11 | 6094037 | BLASTX | 573 | 5.00E−59 | 84 | 60S RIBOSOMAL PROTEIN L23 |
| | | | | | | | >gi\|7440854\|pir\|\|T11639 ribosomal protein L17 - |
| | | | | | | | fission yeast (Schizosaccharomyces pombe) |
| | | | | | | | >gi\|7490001\|pir\|\|T40942 60s ribosomal protein - |
| | | | | | | | fission yeast (Schizosaccharomyces pombe) |
| | | | | | | | >gi\|2706454\|emb\|CAA15912.1\| (AL021046) 60s |
| | | | | | | | riboso |
| 306 | LIB3602-069-Q1-K1-H8 | 6094037 | BLASTX | 564 | 7.00E−58 | 85 | 60S RIBOSOMAL PROTEIN L23 |
| | | | | | | | >gi\|7440854\|pir\|\|T11639 ribosomal protein L17 - |
| | | | | | | | fission yeast (Schizosaccharomyces pombe) |
| | | | | | | | >gi\|7490001\|pir\|\|T40942 60s ribosomal protein - |
| | | | | | | | fission yeast (Schizosaccharomyces pombe) |
| | | | | | | | >gi\|2706454\|emb\|CAA15912.1\| (AL021046) 60s |
| | | | | | | | riboso |
| 307 | LIB3602-050-Q6-K1-A1 | 6094037 | BLASTX | 560 | 1.00E−57 | 84 | 60S RIBOSOMAL PROTEIN L23 |
| | | | | | | | >gi\|7440854\|pir\|\|T11639 ribosomal protein L17 - |
| | | | | | | | fission yeast (Schizosaccharomyces pombe) |
| | | | | | | | >gi\|7490001\|pir\|\|T40942 60s ribosomal protein - |
| | | | | | | | fission yeast (Schizosaccharomyces pombe) |
| | | | | | | | >gi\|2706454\|emb\|CAA15912.1\| (AL021046) 60s |
| | | | | | | | riboso |
| 308 | LIB3602-009-Q6-K1-H7 | 6094037 | BLASTX | 536 | 8.00E−55 | 82 | 60S RIBOSOMAL PROTEIN L23 |
| | | | | | | | >gi\|7440854\|pir\|\|T11639 ribosomal protein L17 - |
| | | | | | | | fission yeast (Schizosaccharomyces pombe) |
| | | | | | | | >gi\|7490001\|pir\|\|T40942 60s ribosomal protein - |
| | | | | | | | fission yeast (Schizosaccharomyces pombe) |
| | | | | | | | >gi\|2706454\|emb\|CAA15912.1\| (AL021046) 60s |
| | | | | | | | riboso |
| 309 | LIB3602-053-Q6-K1-G11 | 6094037 | BLASTX | 526 | 1.00E−53 | 73 | 60S RIBOSOMAL PROTEIN L23 |
| | | | | | | | >gi\|7440854\|pir\|\|T11639 ribosomal protein L17 - |
| | | | | | | | fission yeast (Schizosaccharomyces pombe) |
| | | | | | | | >gi\|7490001\|pir\|\|T40942 60s ribosomal protein - |
| | | | | | | | fission yeast (Schizosaccharomyces pombe) |
| | | | | | | | >gi\|2706454\|emb\|CAA15912.1\| (AL021046) 60s |
| | | | | | | | riboso |
| 310 | LIB3602-014-Q6-K1-F6 | 6094037 | BLASTX | 513 | 4.00E−52 | 80 | 60S RIBOSOMAL PROTEIN L23 |
| | | | | | | | >gi\|7440854\|pir\|\|T11639 ribosomal protein L17 - |
| | | | | | | | fission yeast (Schizosaccharomyces pombe) |
| | | | | | | | >gi\|7490001\|pir\|\|T40942 60s ribosomal protein - |
| | | | | | | | fission yeast (Schizosaccharomyces pombe) |
| | | | | | | | >gi\|2706454\|emb\|CAA15912.1\| (AL021046) 60s |
| | | | | | | | riboso |
| 311 | LIB3602-009-Q6-K1-H8 | 6094037 | BLASTX | 487 | 5.00E−49 | 85 | 60S RIBOSOMAL PROTEIN L23 |
| | | | | | | | >gi\|7440854\|pir\|\|T11639 ribosomal protein L17 - |
| | | | | | | | fission yeast (Schizosaccharomyces pombe) |
| | | | | | | | >gi\|7490001\|pir\|\|T40942 60s ribosomal protein - |
| | | | | | | | fission yeast (Schizosaccharomyces pombe) |
| | | | | | | | >gi\|2706454\|emb\|CAA15912.1\| (AL021046) 60s |
| | | | | | | | riboso |
| 312 | LIB3602-023-Q6-K1-H4 | 6094037 | BLASTX | 487 | 6.00E−49 | 85 | 60S RIBOSOMAL PROTEIN L23 |
| | | | | | | | >gi\|7440854\|pir\|\|T11639 ribosomal protein L17 - |
| | | | | | | | fission yeast (Schizosaccharomyces pombe) |
| | | | | | | | >gi\|7490001\|pir\|\|T40942 60s ribosomal protein - |
| | | | | | | | fission yeast (Schizosaccharomyces pombe) |
| | | | | | | | >gi\|2706454\|emb\|CAA15912.1\| (AL021046) 60s |
| | | | | | | | riboso |
| 313 | LIB3602-042-Q6-K1-D1 | 6094037 | BLASTX | 473 | 2.00E−47 | 84 | 60S RIBOSOMAL PROTEIN L23 |
| | | | | | | | >gi\|7440854\|pir\|\|T11639 ribosomal protein L17 - |
| | | | | | | | fission yeast (Schizosaccharomyces pombe) |
| | | | | | | | >gi\|7490001\|pir\|\|T40942 60s ribosomal protein - |
| | | | | | | | fission yeast (Schizosaccharomyces pombe) |
| | | | | | | | >gi\|2706454\|emb\|CAA15912.1\| (AL021046) 60s |
| | | | | | | | riboso |
| 314 | LIB3602-101-Q1-K1-A6 | 6094037 | BLASTX | 391 | 1.00E−46 | 87 | 60S RIBOSOMAL PROTEIN L23 |
| | | | | | | | >gi\|7440854\|pir\|\|T11639 ribosomal protein L17 - |
| | | | | | | | fission yeast (Schizosaccharomyces pombe) |
| | | | | | | | >gi\|7490001\|pir\|\|T40942 60s ribosomal protein - |
| | | | | | | | fission yeast (Schizosaccharomyces pombe) |
| | | | | | | | >gi\|2706454\|emb\|CAA15912.1\| (AL021046) 60s |
| | | | | | | | riboso |
| 315 | LIB3602-002-P1-K6-B12 | 6094037 | BLASTX | 450 | 1.00E−44 | 73 | 60S RIBOSOMAL PROTEIN L23 |
| | | | | | | | >gi\|7440854\|pir\|\|T11639 ribosomal protein L17 - |
| | | | | | | | fission yeast (Schizosaccharomyces pombe) |
| | | | | | | | >gi\|7490001\|pir\|\|T40942 60s ribosomal protein - |
| | | | | | | | fission yeast (Schizosaccharomyces pombe) |
| | | | | | | | >gi\|2706454\|emb\|CAA15912.1\| (AL021046) 60s |
| | | | | | | | riboso |
| 316 | LIB3602-039-Q6-K1-C12 | 6094037 | BLASTX | 437 | 3.00E−43 | 85 | 60S RIBOSOMAL PROTEIN L23 |
| | | | | | | | >gi\|7440854\|pir\|\|T11639 ribosomal protein L17 - |
| | | | | | | | fission yeast (Schizosaccharomyces pombe) |
| | | | | | | | >gi\|7490001\|pir\|\|T40942 60s ribosomal protein - |
| | | | | | | | fission yeast (Schizosaccharomyces pombe) |
| | | | | | | | >gi\|2706454\|emb\|CAA15912.1\| (AL021046) 60s |
| | | | | | | | riboso |
| 317 | LIB3602-028-Q6-K1-D5 | 6094037 | BLASTX | 437 | 3.00E−43 | 85 | 60S RIBOSOMAL PROTEIN L23 |
| | | | | | | | >gi\|7440854\|pir\|\|T11639 ribosomal protein L17 - |
| | | | | | | | fission yeast (Schizosaccharomyces pombe) |
| | | | | | | | >gi\|7490001\|pir\|\|T40942 60s ribosomal protein - |
| | | | | | | | fission yeast (Schizosaccharomyces pombe) |
| | | | | | | | >gi\|2706454\|emb\|CAA15912.1\| (AL021046) 60s |
| | | | | | | | riboso |
| 318 | LIB3602-018-Q6-K1-B9 | 6094037 | BLASTX | 386 | 2.00E−37 | 86 | 60S RIBOSOMAL PROTEIN L23 |
| | | | | | | | >gi\|7440854\|pir\|\|T11639 ribosomal protein L17 - |
| | | | | | | | fission yeast (Schizosaccharomyces pombe) |
| | | | | | | | >gi\|7490001\|pir\|\|T40942 60s ribosomal protein - |
| | | | | | | | fission yeast (Schizosaccharomyces pombe) |
| | | | | | | | >gi\|2706454\|emb\|CAA15912.1\| (AL021046) 60s |
| | | | | | | | riboso |
| 319 | LIB3602-060-Q6-K1-C8 | 6094037 | BLASTX | 369 | 3.00E−35 | 79 | 60S RIBOSOMAL PROTEIN L23 |
| | | | | | | | >gi\|7440854\|pir\|\|T11639 ribosomal protein L17 - |
| | | | | | | | fission yeast (Schizosaccharomyces pombe) |
| | | | | | | | >gi\|7490001\|pir\|\|T40942 60s ribosomal protein - |
| | | | | | | | fission yeast (Schizosaccharomyces pombe) |
| | | | | | | | >gi\|2706454\|emb\|CAA15912.1\| (AL021046) 60s |
| | | | | | | | riboso |
| 320 | LIB3602-004-Q1-K1-D2 | 6094037 | BLASTX | 345 | 2.00E−32 | 80 | 60S RIBOSOMAL PROTEIN L23 |
| | | | | | | | >gi\|7440854\|pir\|\|T11639 ribosomal protein L17 - |
| | | | | | | | fission yeast (Schizosaccharomyces pombe) |
| | | | | | | | >gi\|7490001\|pir\|\|T40942 60s ribosomal protein - |
| | | | | | | | fission yeast (Schizosaccharomyces pombe) |
| | | | | | | | >gi\|2706454\|emb\|CAA15912.1\| (AL021046) 60s |
| | | | | | | | riboso |
| 321 | LIB3602-071-Q1-K1-A3 | 6094037 | BLASTX | 342 | 7.00E−32 | 84 | 60S RIBOSOMAL PROTEIN L23 |
| | | | | | | | >gi\|7440854\|pir\|\|T11639 ribosomal protein L17 - |
| | | | | | | | fission yeast (Schizosaccharomyces pombe) |
| | | | | | | | >gi\|7490001\|pir\|\|T40942 60s ribosomal protein - |
| | | | | | | | fission yeast (Schizosaccharomyces pombe) |
| | | | | | | | >gi\|2706454\|emb\|CAA15912.1\| (AL021046) 60s |
| | | | | | | | riboso |
| 322 | LIB3602-106-Q1-K1-G9 | 6094037 | BLASTX | 291 | 4.00E−26 | 72 | 60S RIBOSOMAL PROTEIN L23 |
| | | | | | | | >gi\|7440854\|pir\|\|T11639 ribosomal protein L17 - |
| | | | | | | | fission yeast (Schizosaccharomyces pombe) |
| | | | | | | | >gi\|7490001\|pir\|\|T40942 60s ribosomal protein - |
| | | | | | | | fission yeast (Schizosaccharomyces pombe) |
| | | | | | | | >gi\|2706454\|emb\|CAA15912.1\| (AL021046) 60s |
| | | | | | | | riboso |
| 323 | LIB3602-001-P1-K6-H2 | 6094037 | BLASTX | 261 | 7.00E−23 | 84 | 60S RIBOSOMAL PROTEIN L23 |
| | | | | | | | >gi\|7440854\|pir\|\|T11639 ribosomal protein L17 - |
| | | | | | | | fission yeast (Schizosaccharomyces pombe) |
| | | | | | | | >gi\|7490001\|pir\|\|T40942 60s ribosomal protein - |
| | | | | | | | fission yeast (Schizosaccharomyces pombe) |
| | | | | | | | >gi\|2706454\|emb\|CAA15912.1\| (AL021046) 60s |
| | | | | | | | riboso |
| 324 | LIB3602-081-Q6-K6-E6 | 730557 | BLASTX | 388 | 2.00E−37 | 62 | 60S RIBOSOMAL PROTEIN L34 |
| | | | | | | | >gi\|2119150\|pir\|\|S60476 ribosomal protein L34, |
| | | | | | | | cytosolic - garden pea >gi\|498908\|gb\|AAA86953.1\| |
| | | | | | | | (U10047) ribosomal protein L34 homolog [Pisum |
| | | | | | | | sativum] |
| 325 | LIB3602-019-Q6-K1-B8 | 730557 | BLASTX | 348 | 1.00E−32 | 64 | 60S RIBOSOMAL PROTEIN L34 |
| | | | | | | | >gi\|2119150\|pir\|\|S60476 ribosomal protein L34, |
| | | | | | | | cytosolic - garden pea >gi\|498908\|gb\|AAA86953.1\| |
| | | | | | | | (U10047) ribosomal protein L34 homolog [Pisum |
| | | | | | | | sativum] |
| 326 | LIB3602-043-Q6-K1-D3 | 730557 | BLASTX | 316 | 6.00E−29 | 61 | 60S RIBOSOMAL PROTEIN L34 |
| | | | | | | | >gi\|2119150\|pir\|\|S60476 ribosomal protein L34, |
| | | | | | | | cytosolic - garden pea >gi\|498908\|gb\|AAA86953.1\| |
| | | | | | | | (U10047) ribosomal protein L34 homolog [Pisum |
| | | | | | | | sativum] |
| 327 | LIB3602-046-Q6-K1-A4 | 730557 | BLASTX | 316 | 6.00E−29 | 61 | 60S RIBOSOMAL PROTEIN L34 |
| | | | | | | | >gi\|2119150\|pir\|\|S60476 ribosomal protein L34, |
| | | | | | | | cytosolic - garden pea >gi\|498908\|gb\|AAA86953.1\| |
| | | | | | | | (U10047) ribosomal protein L34 homolog [Pisum |
| | | | | | | | sativum] |
| 328 | LIB3602-061-Q6-K1-G10 | 730557 | BLASTX | 316 | 6.00E−29 | 61 | 60S RIBOSOMAL PROTEIN L34 |
| | | | | | | | >gi\|2119150\|pir\|\|S60476 ribosomal protein L34, |
| | | | | | | | cytosolic - garden pea >gi\|498908\|gb\|AAA86953.1\| |
| | | | | | | | (U10047) ribosomal protein L34 homolog [Pisum |
| | | | | | | | sativum] |
| 329 | LIB3602-074-Q1-K1-G5 | 730557 | BLASTX | 316 | 6.00E−29 | 61 | 60S RIBOSOMAL PROTEIN L34 |
| | | | | | | | >gi\|2119150\|pir\|\|S60476 ribosomal protein L34, |
| | | | | | | | cytosolic - garden pea >gi\|498908\|gb\|AAA86953.1\| |
| | | | | | | | (U10047) ribosomal protein L34 homolog [Pisum |
| | | | | | | | sativum] |
| 330 | LIB3602-062-Q6-K1-F4 | 730557 | BLASTX | 316 | 6.00E−29 | 61 | 60S RIBOSOMAL PROTEIN L34 |
| | | | | | | | >gi\|2119150\|pir\|\|S60476 ribosomal protein L34, |
| | | | | | | | cytosolic - garden pea >gi\|498908\|gb\|AAA86953.1\| |
| | | | | | | | (U10047) ribosomal protein L34 homolog [Pisum |
| | | | | | | | sativum] |
| 331 | LIB3602-008-Q6-K1-C9 | 730557 | BLASTX | 316 | 6.00E−29 | 61 | 60S RIBOSOMAL PROTEIN L34 |
| | | | | | | | >gi\|2119150\|pir\|\|S60476 ribosomal protein L34, |
| | | | | | | | cytosolic - garden pea >gi\|498908\|gb\|AAA86953.1\| |
| | | | | | | | (U10047) ribosomal protein L34 homolog [Pisum |
| | | | | | | | sativum] |
| 332 | LIB3602-022-Q6-K1-D8 | 730557 | BLASTX | 316 | 6.00E−29 | 61 | 60S RIBOSOMAL PROTEIN L34 |
| | | | | | | | >gi\|2119150\|pir\|\|S60476 ribosomal protein L34, |
| | | | | | | | cytosolic - garden pea >gi\|498908\|gb\|AAA86953.1\| |
| | | | | | | | (U10047) ribosomal protein L34 homolog [Pisum |
| | | | | | | | sativum] |
| 333 | LIB3602-076-Q6-K6-D11 | 730557 | BLASTX | 316 | 7.00E−29 | 61 | 60S RIBOSOMAL PROTEIN L34 |
| | | | | | | | >gi\|2119150\|pir\|\|S60476 ribosomal protein L34, |
| | | | | | | | cytosolic - garden pea >gi\|498908\|gb\|AAA86953.1\| |
| | | | | | | | (U10047) ribosomal protein L34 homolog [Pisum |
| | | | | | | | sativum] |
| 334 | LIB3602-011-Q6-K1-H4 | 730557 | BLASTX | 316 | 7.00E−29 | 61 | 60S RIBOSOMAL PROTEIN L34 |
| | | | | | | | >gi\|2119150\|pir\|\|S60476 ribosomal protein L34, |
| | | | | | | | cytosolic - garden pea >gi\|498908\|gb\|AAA86953.1\| |
| | | | | | | | (U10047) ribosomal protein L34 homolog [Pisum |
| | | | | | | | sativum] |
| 335 | LIB3602-041-Q6-K1-F12 | 730557 | BLASTX | 316 | 7.00E−29 | 61 | 60S RIBOSOMAL PROTEIN L34 |
| | | | | | | | >gi\|2119150\|pir\|\|S60476 ribosomal protein L34, |
| | | | | | | | cytosolic - garden pea >gi\|498908\|gb\|AAA86953.1\| |
| | | | | | | | (U10047) ribosomal protein L34 homolog [Pisum |
| | | | | | | | sativum] |
| 336 | LIB3602-028-Q6-K1-H4 | 730557 | BLASTX | 316 | 7.00E−29 | 61 | 60S RIBOSOMAL PROTEIN L34 |
| | | | | | | | >gi\|2119150\|pir\|\|S60476 ribosomal protein L34, |
| | | | | | | | cytosolic - garden pea >gi\|498908\|gb\|AAA86953.1\| |
| | | | | | | | (U10047) ribosomal protein L34 homolog [Pisum |
| | | | | | | | sativum] |
| 337 | LIB3602-063-Q1-K6-H3 | 730557 | BLASTX | 314 | 1.00E−28 | 57 | 60S RIBOSOMAL PROTEIN L34 |
| | | | | | | | >gi\|2119150\|pir\|\|S60476 ribosomal protein L34, |
| | | | | | | | cytosolic - garden pea >gi\|498908\|gb\|AAA86953.1\| |
| | | | | | | | (U10047) ribosomal protein L34 homolog [Pisum |
| | | | | | | | sativum] |
| 338 | LIB3602-074-Q1-K1-B3 | 730557 | BLASTX | 311 | 2.00E−28 | 60 | 60S RIBOSOMAL PROTEIN L34 |
| | | | | | | | >gi\|2119150\|pir\|\|S60476 ribosomal protein L34, |
| | | | | | | | cytosolic - garden pea >gi\|498908\|gb\|AAA86953.1\| |
| | | | | | | | (U10047) ribosomal protein L34 homolog [Pisum |
| | | | | | | | sativum] |
| 339 | LIB3602-087-Q6-K1-D4 | 730557 | BLASTX | 247 | 2.00E−22 | 55 | 60S RIBOSOMAL PROTEIN L34 |
| | | | | | | | >gi\|2119150\|pir\|\|S60476 ribosomal protein L34, |
| | | | | | | | cytosolic - garden pea >gi\|498908\|gb\|AAA86953.1\| |
| | | | | | | | (U10047) ribosomal protein L34 homolog [Pisum |
| | | | | | | | sativum] |
| 340 | LIB3602-119-Q1-K1-G1 | 730557 | BLASTX | 248 | 2.00E−21 | 54 | 60S RIBOSOMAL PROTEIN L34 |
| | | | | | | | >gi\|2119150\|pir\|\|S60476 ribosomal protein L34, |
| | | | | | | | cytosolic - garden pea >gi\|498908\|gb\|AAA86953.1\| |
| | | | | | | | (U10047) ribosomal protein L34 homolog [Pisum |
| | | | | | | | sativum] |
| 341 | LIB3602-041-Q6-K1-C10 | 730557 | BLASTX | 229 | 8.00E−19 | 52 | 60S RIBOSOMAL PROTEIN L34 |
| | | | | | | | >gi\|2119150\|pir\|\|S60476 ribosomal protein L34, |
| | | | | | | | cytosolic - garden pea >gi\|498908\|gb\|AAA86953.1\| |
| | | | | | | | (U10047) ribosomal protein L34 homolog [Pisum |
| | | | | | | | sativum] |
| 342 | LIB3602-069-Q1-K1-B3 | 730557 | BLASTX | 226 | 2.00E−18 | 57 | 60S RIBOSOMAL PROTEIN L34 |
| | | | | | | | >gi\|2119150\|pir\|\|S60476 ribosomal protein L34, |
| | | | | | | | cytosolic - garden pea >gi\|498908\|gb\|AAA86953.1\| |
| | | | | | | | (U10047) ribosomal protein L34 homolog [Pisum |
| | | | | | | | sativum] |
| 343 | LIB3602-085-Q6-K1-D11 | 730557 | BLASTX | 189 | 4.00E−14 | 51 | 60S RIBOSOMAL PROTEIN L34 |
| | | | | | | | >gi\|2119150\|pir\|\|S60476 ribosomal protein L34, |
| | | | | | | | cytosolic - garden pea >gi\|498908\|gb\|AAA86953.1\| |
| | | | | | | | (U10047) ribosomal protein L34 homolog [Pisum |
| | | | | | | | sativum] |
| 344 | LIB3602-102-Q1-K1-E11 | 730557 | BLASTX | 150 | 6.00E−10 | 78 | 60S RIBOSOMAL PROTEIN L34 |
| | | | | | | | >gi\|2119150\|pir\|\|S60476 ribosomal protein L34, |
| | | | | | | | cytosolic - garden pea >gi\|498908\|gb\|AAA86953.1\| |
| | | | | | | | (U10047) ribosomal protein L34 homolog [Pisum |
| | | | | | | | sativum] |
| 345 | LIB3602-067-Q1-K1-E6 | 2894306 | BLASTX | 338 | 2.00E−31 | 46 | (AJ223329) ubiquitin extension protein [Nicotiana |
| | | | | | | | tabacum] |
| 346 | LIB3602-023-Q6-K1-C11 | 2894306 | BLASTX | 337 | 2.00E−31 | 47 | (AJ223329) ubiquitin extension protein [Nicotiana |
| | | | | | | | tabacum] |
| 347 | LIB3602-007-Q1-K1-C11 | 2894306 | BLASTX | 338 | 3.00E−31 | 46 | (AJ223329) ubiquitin extension protein [Nicotiana |
| | | | | | | | tabacum] |
| 348 | LIB3602-094-Q6-K6-E10 | 2894306 | BLASTX | 337 | 3.00E−31 | 47 | (AJ223329) ubiquitin extension protein [Nicotiana |
| | | | | | | | tabacum] |
| 349 | LIB3602-041-Q6-K1-B5 | 2894306 | BLASTX | 337 | 3.00E−31 | 47 | (AJ223329) ubiquitin extension protein [Nicotiana |
| | | | | | | | tabacum] |
| 350 | LIB3602-062-Q6-K1-G10 | 2894306 | BLASTX | 317 | 6.00E−29 | 45 | (AJ223329) ubiquitin extension protein [Nicotiana |
| | | | | | | | tabacum] |
| 351 | LIB3602-113-Q1-K1-F8 | 2894306 | BLASTX | 271 | 1.00E−23 | 50 | (AJ223329) ubiquitin extension protein [Nicotiana |
| | | | | | | | tabacum] |
| 352 | LIB3602-020-Q6-K1-E6 | 2894306 | BLASTX | 253 | 2.00E−21 | 50 | (AJ223329) ubiquitin extension protein [Nicotiana |
| | | | | | | | tabacum] |
| 353 | LIB3602-046-Q6-K1-F2 | 2894306 | BLASTX | 249 | 4.00E−21 | 50 | (AJ223329) ubiquitin extension protein [Nicotiana |
| | | | | | | | tabacum] |
| 354 | LIB3602-101-Q1-K1-H7 | 2894306 | BLASTX | 213 | 1.00E−19 | 47 | (AJ223329) ubiquitin extension protein [Nicotiana |
| | | | | | | | tabacum] |
| 355 | LIB3602-039-Q6-K1-H3 | 2894306 | BLASTX | 218 | 2.00E−17 | 48 | (AJ223329) ubiquitin extension protein [Nicotiana |
| | | | | | | | tabacum] |
| 356 | LIB3602-115-Q1-K1-H6 | 2894306 | BLASTX | 217 | 3.00E−17 | 47 | (AJ223329) ubiquitin extension protein [Nicotiana |
| | | | | | | | tabacum] |
| 357 | LIB3602-002-P1-K6-C12 | 2894306 | BLASTX | 215 | 4.00E−17 | 49 | (AJ223329) ubiquitin extension protein [Nicotiana |
| | | | | | | | tabacum] |
| 358 | LIB3602-045-Q6-K1-A12 | 2894306 | BLASTX | 215 | 4.00E−17 | 49 | (AJ223329) ubiquitin extension protein [Nicotiana |
| | | | | | | | tabacum] |
| 359 | LIB3602-018-Q6-K1-G11 | 2894306 | BLASTX | 210 | 2.00E−16 | 50 | (AJ223329) ubiquitin extension protein [Nicotiana |
| | | | | | | | tabacum] |
| 360 | LIB3602-063-Q1-K6-D10 | 2894306 | BLASTX | 208 | 3.00E−16 | 50 | (AJ223329) ubiquitin extension protein [Nicotiana |
| | | | | | | | tabacum] |
| 361 | LIB3602-090-Q6-K6-D11 | 2894306 | BLASTX | 208 | 3.00E−16 | 50 | (AJ223329) ubiquitin extension protein [Nicotiana |
| | | | | | | | tabacum] |
| 362 | LIB3602-094-Q6-K6-G4 | 2894306 | BLASTX | 208 | 3.00E−16 | 50 | (AJ223329) ubiquitin extension protein [Nicotiana |
| | | | | | | | tabacum] |
| 363 | LIB3602-066-Q1-K6-C10 | 2894306 | BLASTX | 208 | 3.00E−16 | 50 | (AJ223329) ubiquitin extension protein [Nicotiana |
| | | | | | | | tabacum] |
| 364 | LIB3602-100-Q1-K1-F12 | 2894306 | BLASTX | 203 | 8.00E−16 | 79 | (AJ223329) ubiquitin extension protein [Nicotiana |
| | | | | | | | tabacum] |
| 365 | LIB3602-060-Q6-K1-F12 | 4204192 | BLASTX | 461 | 6.00E−46 | 82 | (AB008095) ribosomal protein L41 [Candida |
| | | | | | | | maltosa] |
| 366 | LIB3602-032-Q6-K1-D4 | 4204192 | BLASTX | 433 | 9.00E−43 | 82 | (AB008095) ribosomal protein L41 [Candida |
| | | | | | | | maltosa] |
| 367 | LIB3602-055-Q6-K1-B3 | 4204192 | BLASTX | 433 | 1.00E−42 | 82 | (AB008095) ribosomal protein L41 [Candida |
| | | | | | | | maltosa] |
| 368 | LIB3602-101-Q1-K1-F11 | 4204192 | BLASTX | 433 | 1.00E−42 | 82 | (AB008095) ribosomal protein L41 [Candida |
| | | | | | | | maltosa] |
| 369 | LIB3602-061-Q6-K1-F1 | 4204192 | BLASTX | 433 | 1.00E−42 | 82 | (AB008095) ribosomal protein L41 [Candida |
| | | | | | | | maltosa] |
| 370 | LIB3602-041-Q6-K1-C7 | 4204192 | BLASTX | 433 | 1.00E−42 | 82 | (AB008095) ribosomal protein L41 [Candida |
| | | | | | | | maltosa] |
| 371 | LIB3602-004-Q1-K1-G6 | 4204192 | BLASTX | 433 | 1.00E−42 | 82 | (AB008095) ribosomal protein L41 [Candida |
| | | | | | | | maltosa] |
| 372 | LIB3602-009-Q6-K1-H11 | 4204192 | BLASTX | 433 | 1.00E−42 | 82 | (AB008095) ribosomal protein L41 [Candida |
| | | | | | | | maltosa] |
| 373 | LIB3602-012-Q6-K1-A5 | 4204192 | BLASTX | 433 | 1.00E−42 | 82 | (AB008095) ribosomal protein L41 [Candida |
| | | | | | | | maltosa] |
| 374 | LIB3602-013-Q6-K1-F7 | 4204192 | BLASTX | 433 | 1.00E−42 | 82 | (AB008095) ribosomal protein L41 [Candida |
| | | | | | | | maltosa] |
| 375 | LIB3602-023-Q6-K1-H12 | 4204192 | BLASTX | 433 | 1.00E−42 | 82 | (AB008095) ribosomal protein L41 [Candida |
| | | | | | | | maltosa] |
| 376 | LIB3602-025-Q6-K1-C11 | 4204192 | BLASTX | 428 | 5.00E−42 | 82 | (AB008095) ribosomal protein L41 [Candida |
| | | | | | | | maltosa] |
| 377 | LIB3602-102-Q1-K1-E1 | 4204192 | BLASTX | 424 | 1.00E−41 | 82 | (AB008095) ribosomal protein L41 [Candida |
| | | | | | | | maltosa] |
| 378 | LIB3602-041-Q6-K1-E6 | 4204192 | BLASTX | 424 | 1.00E−41 | 80 | (AB008095) ribosomal protein L41 [Candida |
| | | | | | | | maltosa] |
| 379 | LIB3602-038-Q6-K1-F4 | 4204192 | BLASTX | 424 | 2.00E−41 | 82 | (AB008095) ribosomal protein L41 [Candida |
| | | | | | | | maltosa] |
| 380 | LIB3602-065-Q1-K6-A7 | 4204192 | BLASTX | 418 | 1.00E−40 | 80 | (AB008095) ribosomal protein L41 [Candida |
| | | | | | | | maltosa] |
| 381 | LIB3602-051-Q6-K1-H9 | 4204192 | BLASTX | 408 | 1.00E−39 | 79 | (AB008095) ribosomal protein L41 [Candida |
| | | | | | | | maltosa] |
| 382 | LIB3602-085-Q6-K1-H4 | 4204192 | BLASTX | 397 | 2.00E−38 | 79 | (AB008095) ribosomal protein L41 [Candida |
| | | | | | | | maltosa] |
| 383 | LIB3602-067-Q1-K1-E8 | 4204192 | BLASTX | 397 | 2.00E−38 | 79 | (AB008095) ribosomal protein L41 [Candida |
| | | | | | | | maltosa] |
| 384 | LIB3602-108-Q1-K1-E12 | 4204192 | BLASTX | 205 | 2.00E−27 | 75 | (AB008095) ribosomal protein L41 [Candida |
| | | | | | | | maltosa] |
| 385 | LIB3602-008-Q6-K1-F7 | 464707 | BLASTX | 582 | 4.00E−60 | 80 | 40S RIBOSOMAL PROTEIN S18 |
| | | | | | | | >gi\|480908\|pir\|\|S37496 ribosomal protein S18.A, |
| | | | | | | | cytosolic - Arabidopsis thaliana |
| | | | | | | | >gi\|405613\|emb\|CAA80684.1\| (Z23165) ribosomal |
| | | | | | | | protein S18A [Arabidopsis thaliana] |
| | | | | | | | >gi\|434343\|emb\|CAA82273.1\| (Z28701) S18 |
| | | | | | | | ribosomal protein [Arabido |
| 386 | LIB3602-039-Q6-K1-C9 | 464707 | BLASTX | 582 | 5.00E−60 | 80 | 40S RIBOSOMAL PROTEIN S18 |
| | | | | | | | >gi\|480908\|pir\|\|S37496 ribosomal protein S18.A, |
| | | | | | | | cytosolic - Arabidopsis thaliana |
| | | | | | | | >gi\|405613\|emb\|CAA80684.1\| (Z23165) ribosomal |
| | | | | | | | protein S18A [Arabidopsis thaliana] |
| | | | | | | | >gi\|434343\|emb\|CAA82273.1\| (Z28701) S18 |
| | | | | | | | ribosomal protein [Arabido |
| 387 | LIB3602-070-Q1-K1-C1 | 464707 | BLASTX | 582 | 5.00E−60 | 80 | 40S RIBOSOMAL PROTEIN S18 |
| | | | | | | | >gi\|480908\|pir\|\|S37496 ribosomal protein S18.A, |
| | | | | | | | cytosolic - Arabidopsis thaliana |
| | | | | | | | >gi\|405613\|emb\|CAA80684.1\| (Z23165) ribosomal |
| | | | | | | | protein S18A [Arabidopsis thaliana] |
| | | | | | | | >gi\|434343\|emb\|CAA82273.1\| (Z28701) S18 |
| | | | | | | | ribosomal protein [Arabido |
| 388 | LIB3602-038-Q6-K1-D2 | 464707 | BLASTX | 582 | 5.00E−60 | 80 | 40S RIBOSOMAL PROTEIN S18 |
| | | | | | | | >gi\|480908\|pir\|\|S37496 ribosomal protein S18.A, |
| | | | | | | | cytosolic - Arabidopsis thaliana |
| | | | | | | | >gi\|405613\|emb\|CAA80684.1\| (Z23165) ribosomal |
| | | | | | | | protein S18A [Arabidopsis thaliana] |
| | | | | | | | >gi\|434343\|emb\|CAA82273.1\| (Z28701) S18 |
| | | | | | | | ribosomal protein [Arabido |
| 389 | LIB3602-105-Q1-K1-D4 | 464707 | BLASTX | 582 | 5.00E−60 | 80 | 40S RIBOSOMAL PROTEIN S18 |
| | | | | | | | >gi\|480908\|pir\|\|S37496 ribosomal protein S18.A, |
| | | | | | | | cytosolic - Arabidopsis thaliana |
| | | | | | | | >gi\|405613\|emb\|CAA80684.1\| (Z23165) ribosomal |
| | | | | | | | protein S18A [Arabidopsis thaliana] |
| | | | | | | | >gi\|434343\|emb\|CAA82273.1\| (Z28701) S18 |
| | | | | | | | ribosomal protein [Arabido |
| 390 | LIB3602-076-Q6-K6-C7 | 464707 | BLASTX | 582 | 6.00E−60 | 80 | 40S RIBOSOMAL PROTEIN S18 |
| | | | | | | | >gi\|480908\|pir\|\|S37496 ribosomal protein S18.A, |
| | | | | | | | cytosolic - Arabidopsis thaliana |
| | | | | | | | >gi\|405613\|emb\|CAA80684.1\| (Z23165) ribosomal |
| | | | | | | | protein S18A [Arabidopsis thaliana] |
| | | | | | | | >gi\|434343\|emb\|CAA82273.1\| (Z28701) S18 |
| | | | | | | | ribosomal protein [Arabido |
| 391 | LIB3602-112-Q1-K1-G5 | 464707 | BLASTX | 582 | 6.00E−60 | 80 | 40S RIBOSOMAL PROTEIN S18 |
| | | | | | | | >gi\|480908\|pir\|\|S37496 ribosomal protein S18.A, |
| | | | | | | | cytosolic - Arabidopsis thaliana |
| | | | | | | | >gi\|405613\|emb\|CAA80684.1\| (Z23165) ribosomal |
| | | | | | | | protein S18A [Arabidopsis thaliana] |
| | | | | | | | >gi\|434343\|emb\|CAA82273.1\| (Z28701) S18 |
| | | | | | | | ribosomal protein [Arabido |
| 392 | LIB3602-093-Q6-K6-H10 | 464707 | BLASTX | 565 | 6.00E−58 | 80 | 40S RIBOSOMAL PROTEIN S18 |
| | | | | | | | >gi\|480908\|pir\|\|S37496 ribosomal protein S18.A, |
| | | | | | | | cytosolic - Arabidopsis thaliana |
| | | | | | | | >gi\|405613\|emb\|CAA80684.1\| (Z23165) ribosomal |
| | | | | | | | protein S18A [Arabidopsis thaliana] |
| | | | | | | | >gi\|434343\|emb\|CAA82273.1\| (Z28701) S18 |
| | | | | | | | ribosomal protein [Arabido |
| 393 | LIB3602-057-Q6-K1-G6 | 464707 | BLASTX | 457 | 2.00E−54 | 80 | 40S RIBOSOMAL PROTEIN S18 |
| | | | | | | | >gi\|480908\|pir\|\|S37496 ribosomal protein S18.A, |
| | | | | | | | cytosolic - Arabidopsis thaliana |
| | | | | | | | >gi\|405613\|emb\|CAA80684.1\| (Z23165) ribosomal |
| | | | | | | | protein S18A [Arabidopsis thaliana] |
| | | | | | | | >gi\|434343\|emb\|CAA82273.1\| (Z28701) S18 |
| | | | | | | | ribosomal protein [Arabido |
| 394 | LIB3602-107-Q1-K1-F3 | 464707 | BLASTX | 481 | 7.00E−48 | 80 | 40S RIBOSOMAL PROTEIN S18 |
| | | | | | | | >gi\|480908\|pir\|\|S37496 ribosomal protein S18.A, |
| | | | | | | | cytosolic - Arabidopsis thaliana |
| | | | | | | | >gi\|405613\|emb\|CAA80684.1\| (Z23165) ribosomal |
| | | | | | | | protein S18A [Arabidopsis thaliana] |
| | | | | | | | >gi\|434343\|emb\|CAA82273.1\| (Z28701) S18 |
| | | | | | | | ribosomal protein [Arabido |
| 395 | LIB3602-038-Q6-K1-D3 | 464707 | BLASTX | 470 | 7.00E−47 | 75 | 40S RIBOSOMAL PROTEIN S18 |
| | | | | | | | >gi\|480908\|pir\|\|S37496 ribosomal protein S18.A, |
| | | | | | | | cytosolic - Arabidopsis thaliana |
| | | | | | | | >gi\|405613\|emb\|CAA80684.1\| (Z23165) ribosomal |
| | | | | | | | protein S18A [Arabidopsis thaliana] |
| | | | | | | | >gi\|434343\|emb\|CAA82273.1\| (Z28701) S18 |
| | | | | | | | ribosomal protein [Arabido |
| 396 | LIB3602-109-Q1-K1-G3 | 464707 | BLASTX | 460 | 9.00E−46 | 80 | 40S RIBOSOMAL PROTEIN S18 |
| | | | | | | | >gi\|480908\|pir\|\|S37496 ribosomal protein S18.A, |
| | | | | | | | cytosolic - Arabidopsis thaliana |
| | | | | | | | >gi\|405613\|emb\|CAA80684.1\| (Z23165) ribosomal |
| | | | | | | | protein S18A [Arabidopsis thaliana] |
| | | | | | | | >gi\|434343\|emb\|CAA82273.1\| (Z28701) S18 |
| | | | | | | | ribosomal protein [Arabido |
| 397 | LIB3602-071-Q1-K1-C10 | 464707 | BLASTX | 421 | 4.00E−41 | 80 | 40S RIBOSOMAL PROTEIN S18 |
| | | | | | | | >gi\|480908\|pir\|\|S37496 ribosomal protein S18.A, |
| | | | | | | | cytosolic - Arabidopsis thaliana |
| | | | | | | | >gi\|405613\|emb\|CAA80684.1\| (Z23165) ribosomal |
| | | | | | | | protein S18A [Arabidopsis thaliana] |
| | | | | | | | >gi\|434343\|emb\|CAA82273.1\| (Z28701) S18 |
| | | | | | | | ribosomal protein [Arabido |
| 398 | LIB3602-060-Q6-K1-C12 | 464707 | BLASTX | 414 | 1.00E−40 | 82 | 40S RIBOSOMAL PROTEIN S18 |
| | | | | | | | >gi\|480908\|pir\|\|S37496 ribosomal protein S18.A, |
| | | | | | | | cytosolic - Arabidopsis thaliana |
| | | | | | | | >gi\|405613\|emb\|CAA80684.1\| (Z23165) ribosomal |
| | | | | | | | protein S18A [Arabidopsis thaliana] |
| | | | | | | | >gi\|434343\|emb\|CAA82273.1\| (Z28701) S18 |
| | | | | | | | ribosomal protein [Arabido |
| 399 | LIB3602-087-Q6-K1-B11 | 464707 | BLASTX | 367 | 8.00E−35 | 75 | 40S RIBOSOMAL PROTEIN S18 |
| | | | | | | | >gi\|480908\|pir\|\|S37496 ribosomal protein S18.A, |
| | | | | | | | cytosolic - Arabidopsis thaliana |
| | | | | | | | >gi\|405613\|emb\|CAA80684.1\| (Z23165) ribosomal |
| | | | | | | | protein S18A [Arabidopsis thaliana] |
| | | | | | | | >gi\|434343\|emb\|CAA82273.1\| (Z28701) S18 |
| | | | | | | | ribosomal protein [Arabido |
| 400 | LIB3602-104-Q1-K1-H10 | 464707 | BLASTX | 342 | 7.00E−32 | 55 | 40S RIBOSOMAL PROTEIN S18 |
| | | | | | | | >gi\|480908\|pir\|\|S37496 ribosomal protein S18.A, |
| | | | | | | | cytosolic - Arabidopsis thaliana |
| | | | | | | | >gi\|405613\|emb\|CAA80684.1\| (Z23165) ribosomal |
| | | | | | | | protein S18A [Arabidopsis thaliana] |
| | | | | | | | >gi\|434343\|emb\|CAA82273.1\| (Z28701) S18 |
| | | | | | | | ribosomal protein [Arabido |
| 401 | LIB3602-014-Q6-K1-C1 | 464707 | BLASTX | 340 | 9.00E−32 | 83 | 40S RIBOSOMAL PROTEIN S18 |
| | | | | | | | >gi\|480908\|pir\|\|S37496 ribosomal protein S18.A, |
| | | | | | | | cytosolic - Arabidopsis thaliana |
| | | | | | | | >gi\|405613\|emb\|CAA80684.1\| (Z23165) ribosomal |
| | | | | | | | protein S18A [Arabidopsis thaliana] |
| | | | | | | | >gi\|434343\|emb\|CAA82273.1\| (Z28701) S18 |
| | | | | | | | ribosomal protein [Arabido |
| 402 | LIB3602-037-Q6-K1-D10 | 464707 | BLASTX | 310 | 3.00E−28 | 87 | 40S RIBOSOMAL PROTEIN S18 |
| | | | | | | | >gi\|480908\|pir\|\|S37496 ribosomal protein S18.A, |
| | | | | | | | cytosolic - Arabidopsis thaliana |
| | | | | | | | >gi\|405613\|emb\|CAA80684.1\| (Z23165) ribosomal |
| | | | | | | | protein S18A [Arabidopsis thaliana] |
| | | | | | | | >gi\|434343\|emb\|CAA82273.1\| (Z28701) S18 |
| | | | | | | | ribosomal protein [Arabido |
| 403 | LIB3602-054-Q6-K1-B12 | 464707 | BLASTX | 217 | 2.00E−17 | 88 | 40S RIBOSOMAL PROTEIN S18 |
| | | | | | | | >gi\|480908\|pir\|\|S37496 ribosomal protein S18.A, |
| | | | | | | | cytosolic - Arabidopsis thaliana |
| | | | | | | | >gi\|405613\|emb\|CAA80684.1\| (Z23165) ribosomal |
| | | | | | | | protein S18A [Arabidopsis thaliana] |
| | | | | | | | >gi\|434343\|emb\|CAA82273.1\| (Z28701) S18 |
| | | | | | | | ribosomal protein [Arabido |
| 404 | LIB3602-108-Q1-K1-E5 | 464707 | BLASTX | 150 | 9.00E−10 | 93 | 40S RIBOSOMAL PROTEIN S18 |
| | | | | | | | >gi\|480908\|pir\|\|S37496 ribosomal protein S18.A, |
| | | | | | | | cytosolic - Arabidopsis thaliana |
| | | | | | | | >gi\|405613\|emb\|CAA80684.1\| (Z23165) ribosomal |
| | | | | | | | protein S18A [Arabidopsis thaliana] |
| | | | | | | | >gi\|434343\|emb\|CAA82273.1\| (Z28701) S18 |
| | | | | | | | ribosomal protein [Arabido |
| 405 | LIB3602-094-Q6-K6-G9 | 7413650 | BLASTX | 309 | 4.00E−28 | 55 | (AL162971) ribosomal protein L35-like |
| | | | | | | | [Arabidopsis thaliana] |
| 406 | LIB3602-091-Q6-K6-G9 | 7413650 | BLASTX | 309 | 4.00E−28 | 55 | (AL162971) ribosomal protein L35-like |
| | | | | | | | [Arabidopsis thaliana] |
| 407 | LIB3602-055-Q6-K1-F5 | 7413650 | BLASTX | 309 | 4.00E−28 | 55 | (AL162971) ribosomal protein L35-like |
| | | | | | | | [Arabidopsis thaliana] |
| 408 | LIB3602-079-Q6-K6-G1 | 7413650 | BLASTX | 309 | 4.00E−28 | 55 | (AL162971) ribosomal protein L35-like |
| | | | | | | | [Arabidopsis thaliana] |
| 409 | LIB3602-012-Q6-K1-C9 | 7413650 | BLASTX | 309 | 4.00E−28 | 55 | (AL162971) ribosomal protein L35-like |
| | | | | | | | [Arabidopsis thaliana] |
| 410 | LIB3602-032-Q6-K1-C9 | 7413650 | BLASTX | 298 | 8.00E−27 | 55 | (AL162971) ribosomal protein L35-like |
| | | | | | | | [Arabidopsis thaliana] |
| 411 | LIB3602-104-Q1-K1-E5 | 7413650 | BLASTX | 290 | 6.00E−26 | 54 | (AL162971) ribosomal protein L35-like |
| | | | | | | | [Arabidopsis thaliana] |
| 412 | LIB3602-014-Q6-K1-E12 | 7413650 | BLASTX | 288 | 1.00E−25 | 66 | (AL162971) ribosomal protein L35-like |
| | | | | | | | [Arabidopsis thaliana] |
| 413 | LIB3602-090-Q6-K6-G2 | 7413650 | BLASTX | 286 | 2.00E−25 | 53 | (AL162971) ribosomal protein L35-like |
| | | | | | | | [Arabidopsis thaliana] |
| 414 | LIB3602-058-Q6-K1-H4 | 7413650 | BLASTX | 282 | 4.00E−25 | 65 | (AL162971) ribosomal protein L35-like |
| | | | | | | | [Arabidopsis thaliana] |
| 415 | LIB3602-094-Q6-K6-G12 | 7413650 | BLASTX | 271 | 1.00E−23 | 51 | (AL162971) ribosomal protein L35-like |
| | | | | | | | [Arabidopsis thaliana] |
| 416 | LIB3602-085-Q6-K1-G11 | 7413650 | BLASTX | 259 | 3.00E−22 | 62 | (AL162971) ribosomal protein L35-like |
| | | | | | | | [Arabidopsis thaliana] |
| 417 | LIB3602-043-Q6-K1-E8 | 7413650 | BLASTX | 245 | 6.00E−21 | 62 | (AL162971) ribosomal protein L35-like |
| | | | | | | | [Arabidopsis thaliana] |
| 418 | LIB3602-039-Q6-K1-B1 | 7413650 | BLASTX | 241 | 2.00E−20 | 62 | (AL162971) ribosomal protein L35-like |
| | | | | | | | [Arabidopsis thaliana] |
| 419 | LIB3602-114-Q1-K1-A4 | 7413650 | BLASTX | 231 | 4.00E−19 | 59 | (AL162971) ribosomal protein L35-like |
| | | | | | | | [Arabidopsis thaliana] |
| 420 | LIB3602-043-Q6-K1-H6 | 7413650 | BLASTX | 223 | 3.00E−18 | 60 | (AL162971) ribosomal protein L35-like |
| | | | | | | | [Arabidopsis thaliana] |
| 421 | LIB3602-022-Q6-K1-B4 | 7413650 | BLASTX | 219 | 6.00E−18 | 60 | (AL162971) ribosomal protein L35-like |
| | | | | | | | [Arabidopsis thaliana] |
| 422 | LIB3602-119-Q1-K1-A4 | 7413650 | BLASTX | 143 | 3.00E−09 | 68 | (AL162971) ribosomal protein L35-like |
| | | | | | | | [Arabidopsis thaliana] |
| 423 | LIB3602-105-Q1-K1-H2 | 1350976 | BLASTX | 813 | 4.00E−87 | 78 | 40S RIBOSOMAL PROTEIN S2 |
| | | | | | | | >gi\|939718\|gb\|AAA74095.1\| (U30454) ribosomal |
| | | | | | | | protein S2 [Urechis caupo] |
| 424 | LIB3602-089-Q6-K6-D7 | 1350976 | BLASTX | 721 | 3.00E−76 | 80 | 40S RIBOSOMAL PROTEIN S2 |
| | | | | | | | >gi\|939718\|gb\|AAA74095.1\| (U30454) ribosomal |
| | | | | | | | protein S2 [Urechis caupo] |
| 425 | LIB3602-118-Q1-K1-G8 | 1350976 | BLASTX | 515 | 2.00E−70 | 78 | 40S RIBOSOMAL PROTEIN S2 |
| | | | | | | | >gi\|939718\|gb\|AAA74095.1\| (U30454) ribosomal |
| | | | | | | | protein S2 [Urechis caupo] |
| 426 | LIB3602-012-Q6-K1-G12 | 1350976 | BLASTX | 633 | 5.00E−66 | 77 | 40S RIBOSOMAL PROTEIN S2 |
| | | | | | | | >gi\|939718\|gb\|AAA74095.1\| (U30454) ribosomal |
| | | | | | | | protein S2 [Urechis caupo] |
| 427 | LIB3602-112-Q1-K1-E9 | 1350976 | BLASTX | 539 | 6.00E−55 | 78 | 40S RIBOSOMAL PROTEIN S2 |
| | | | | | | | >gi\|939718\|gb\|AAA74095.1\| (U30454) ribosomal |
| | | | | | | | protein S2 [Urechis caupo] |
| 428 | LIB3602-003-Q1-K1-G12 | 1350976 | BLASTX | 507 | 3.00E−51 | 77 | 40S RIBOSOMAL PROTEIN S2 |
| | | | | | | | >gi\|939718\|gb\|AAA74095.1\| (U30454) ribosomal |
| | | | | | | | protein S2 [Urechis caupo] |
| 429 | LIB3602-120-Q1-K1-F12 | 1350976 | BLASTX | 325 | 2.00E−50 | 74 | 40S RIBOSOMAL PROTEIN S2 |
| | | | | | | | >gi\|939718\|gb\|AAA74095.1\| (U30454) ribosomal |
| | | | | | | | protein S2 [Urechis caupo] |
| 430 | LIB3602-029-Q6-K1-H11 | 1350976 | BLASTX | 491 | 2.00E−49 | 76 | 40S RIBOSOMAL PROTEIN S2 |
| | | | | | | | >gi\|939718\|gb\|AAA74095.1\| (U30454) ribosomal |
| | | | | | | | protein S2 [Urechis caupo] |
| 431 | LIB3602-028-Q6-K1-G9 | 1350976 | BLASTX | 418 | 8.00E−41 | 75 | 40S RIBOSOMAL PROTEIN S2 |
| | | | | | | | >gi\|939718\|gb\|AAA74095.1\| (U30454) ribosomal |
| | | | | | | | protein S2 [Urechis caupo] |
| 432 | LIB3602-101-Q1-K1-C8 | 1350976 | BLASTX | 413 | 2.00E−40 | 75 | 40S RIBOSOMAL PROTEIN S2 |
| | | | | | | | >gi\|939718\|gb\|AAA74095.1\| (U30454) ribosomal |
| | | | | | | | protein S2 [Urechis caupo] |
| 433 | LIB3602-017-Q6-K1-B7 | 1350976 | BLASTX | 409 | 9.00E−40 | 75 | 40S RIBOSOMAL PROTEIN S2 |
| | | | | | | | >gi\|939718\|gb\|AAA74095.1\| (U30454) ribosomal |
| | | | | | | | protein S2 [Urechis caupo] |
| 434 | LIB3602-004-Q1-K1-H8 | 1350976 | BLASTX | 293 | 3.00E−26 | 72 | 40S RIBOSOMAL PROTEIN S2 |
| | | | | | | | >gi\|939718\|gb\|AAA74095.1\| (U30454) ribosomal |
| | | | | | | | protein S2 [Urechis caupo] |
| 435 | LIB3602-046-Q6-K1-E5 | 1350976 | BLASTX | 278 | 2.00E−24 | 71 | 40S RIBOSOMAL PROTEIN S2 |
| | | | | | | | >gi\|939718\|gb\|AAA74091.1\| (U30454) ribosomal |
| | | | | | | | protein S2 [Urechis caupo] |
| 436 | LIB3602-020-Q6-K1-D12 | 1350976 | BLASTX | 257 | 4.00E−22 | 72 | 40S RIBOSOMAL PROTEIN S2 |
| | | | | | | | >gi\|939718\|gb\|AAA74095.1\| (U30454) ribosomal |
| | | | | | | | protein S2 [Urechis caupo] |
| 437 | LIB3602-003-Q1-K1-C12 | 1350976 | BLASTX | 245 | 1.00E−20 | 74 | 40S RIBOSOMAL PROTEIN S2 |
| | | | | | | | >gi\|939718\|gb\|AAA74095.1\| (U30454) ribosomal |
| | | | | | | | protein S2 [Urechis caupo] |
| 438 | LIB3602-111-Q1-K1-B7 | 1350976 | BLASTX | 243 | 2.00E−20 | 74 | 40S RIBOSOMAL PROTEIN S2 |
| | | | | | | | >gi\|939718\|gb\|AAA74095.1\| (U30454) ribosomal |
| | | | | | | | protein S2 [Urechis caupo] |
| 439 | LIB3602-021-Q6-K1-C7 | 1350976 | BLASTX | 172 | 2.00E−12 | 75 | 40S RIBOSOMAL PROTEIN S2 |
| | | | | | | | >gi\|939718\|gb\|AAA74095.1\| (U30454) ribosomal |
| | | | | | | | protein S2 [Urechis caupo] |
| 440 | LIB3602-032-Q6-K1-E7 | 1350976 | BLASTX | 155 | 3.00E−10 | 75 | 40S RIBOSOMAL PROTEIN S2 |
| | | | | | | | >gi\|939718\|gb\|AAA74095.1\| (U30454) ribosomal |
| | | | | | | | protein S2 [Urechis caupo] |
| 441 | LIB3602-059-Q6-K1-C5 | 400991 | BLASTX | 450 | 1.00E−44 | 66 | 60S RIBOSOMAL PROTEIN L27 |
| | | | | | | | >gi\|282737\|pir\|\|S26612 ribosomal protein L27.e, |
| | | | | | | | cytosolic - green alga (Pyrobotrys stellata) |
| | | | | | | | >gi\|18267\|emb\|CAA48289.1\| (X68202) ribosomal |
| | | | | | | | protein L27 [Pyrobotrys stellata] |
| 442 | LIB3602-044-Q6-K1-A10 | 400991 | BLASTX | 450 | 1.00E−44 | 66 | 60S RIBOSOMAL PROTEIN L27 |
| | | | | | | | >gi\|282737\|pir\|\|S26612 ribosomal protein L27.e, |
| | | | | | | | cytosolic - green alga (Pyrobotrys stellata) |
| | | | | | | | >gi\|18267\|emb\|CAA48289.1\| (X68202) ribosomal |
| | | | | | | | protein L27 [Pyrobotrys stellata] |
| 443 | LIB3602-041-Q6-K1-F10 | 400991 | BLASTX | 450 | 1.00E−44 | 66 | 60S RIBOSOMAL PROTEIN L27 |
| | | | | | | | >gi\|282737\|pir\|\|S26612 ribosomal protein L27.e, |
| | | | | | | | cytosolic - green alga (Pyrobotrys stellata) |
| | | | | | | | >gi\|18267\|emb\|CAA48289.1\| (X68202) ribosomal |
| | | | | | | | protein L27 [Pyrobotrys stellata] |
| 444 | LIB3602-077-Q6-K6-H3 | 400991 | BLASTX | 450 | 1.00E−44 | 66 | 60S RIBOSOMAL PROTEIN L27 |
| | | | | | | | >gi\|282737\|pir\|\|S26612 ribosomal protein L27.e, |
| | | | | | | | cytosolic - green alga (Pyrobotrys stellata) |
| | | | | | | | >gi\|18267\|emb\|CAA48289.1\| (X68202) ribosomal |
| | | | | | | | protein L27 [Pyrobotrys stellata] |
| 445 | LIB3602-078-Q6-K6-D10 | 400991 | BLASTX | 450 | 1.00E−44 | 66 | 60S RIBOSOMAL PROTEIN L27 |
| | | | | | | | >gi\|282737\|pir\|\|S26612 ribosomal protein L27.e, |
| | | | | | | | cytosolic - green alga (Pyrobotrys stellata) |
| | | | | | | | >gi\|18267\|emb\|CAA48289.1\| (X68202) ribosomal |
| | | | | | | | protein L27 [Pyrobotrys stellata] |
| 446 | LIB3602-010-Q6-K1-C8 | 400991 | BLASTX | 450 | 1.00E−44 | 66 | 60S RIBOSOMAL PROTEIN L27 |
| | | | | | | | >gi\|282737\|pir\|\|S26612 ribosomal protein L27.e, |
| | | | | | | | cytosolic - green alga (Pyrobotrys stellata) |
| | | | | | | | >gi\|18267\|emb\|CAA48289.1\| (X68202) ribosomal |
| | | | | | | | protein L27 [Pyrobotrys stellata] |
| 447 | LIB3602-029-Q6-K1-D9 | 400991 | BLASTX | 450 | 1.00E−44 | 66 | 60S RIBOSOMAL PROTEIN L27 |
| | | | | | | | >gi\|282737\|pir\|\|S26612 ribosomal protein L27.e, |
| | | | | | | | cytosolic - green alga (Pyrobotrys stellata) |
| | | | | | | | >gi\|18267\|emb\|CAA48289.1\| (X68202) ribosomal |
| | | | | | | | protein L27 [Pyrobotrys stellata] |
| 448 | LIB3602-068-Q1-K1-C5 | 400991 | BLASTX | 450 | 2.00E−44 | 66 | 60S RIBOSOMAL PROTEIN L27 |
| | | | | | | | >gi\|282737\|pir\|\|S26612 ribosomal protein L27.e, |
| | | | | | | | cytosolic - green alga (Pyrobotrys stellata) |
| | | | | | | | >gi\|18267\|emb\|CAA48289.1\| (X68202) ribosomal |
| | | | | | | | protein L27 [Pyrobotrys stellata] |
| 449 | LIB3602-053-Q6-K1-B9 | 400991 | BLASTX | 444 | 7.00E−44 | 66 | 60S RIBOSOMAL PROTEIN L27 |
| | | | | | | | >gi\|282737\|pir\|\|S26612 ribosomal protein L27.e, |
| | | | | | | | cytosolic - green alga (Pyrobotrys stellata) |
| | | | | | | | >gi\|18267\|emb\|CAA48289.1\| (X68202) ribosomal |
| | | | | | | | protein L27 [Pyrobotrys stellata] |
| 450 | LIB3602-067-Q1-K1-A7 | 400991 | BLASTX | 428 | 5.00E−42 | 64 | 60S RIBOSOMAL PROTEIN L27 |
| | | | | | | | >gi\|282737\|pir\|\|S26612 ribosomal protein L27.e, |
| | | | | | | | cytosolic - green alga (Pyrobotrys stellata) |
| | | | | | | | >gi\|18267\|emb\|CAA48289.1\| (X68202) ribosomal |
| | | | | | | | protein L27 [Pyrobotrys stellata] |
| 451 | LIB3602-022-Q6-K1-G9 | 400991 | BLASTX | 426 | 7.00E−42 | 64 | 60S RIBOSOMAL PROTEIN L27 |
| | | | | | | | >gi\|282737\|pir\|\|S26612 ribosomal protein L27.e, |
| | | | | | | | cytosolic - green alga (Pyrobotrys stellata) |
| | | | | | | | >gi\|18267\|emb\|CAA48289.1\| (X68202) ribosomal |
| | | | | | | | protein L27 [Pyrobotrys stellata] |
| 452 | LIB3602-100-Q1-K1-C9 | 400991 | BLASTX | 412 | 4.00E−40 | 63 | 60S RIBOSOMAL PROTEIN L27 |
| | | | | | | | >gi\|282737\|pir\|\|S26612 ribosomal protein L27.e, |
| | | | | | | | cytosolic - green alga (Pyrobotrys stellata) |
| | | | | | | | >gi\|18267\|emb\|CAA48289.1\| (X68202) ribosomal |
| | | | | | | | protein L27 [Pyrobotrys stellata] |
| 453 | LIB3602-038-Q6-K1-H9 | 400991 | BLASTX | 408 | 7.00E−40 | 70 | 60S RIBOSOMAL PROTEIN L27 |
| | | | | | | | >gi\|282737\|pir\|\|S26612 ribosomal protein L27.e, |
| | | | | | | | cytosolic - green alga (Pyrobotrys stellata) |
| | | | | | | | >gi\|18267\|emb\|CAA48289.1\| (X68202) ribosomal |
| | | | | | | | protein L27 [Pyrobotrys stellata] |
| 454 | LIB3602-101-Q1-K1-B2 | 400991 | BLASTX | 287 | 5.00E−39 | 71 | 60S RIBOSOMAL PROTEIN L27 |
| | | | | | | | >gi\|282737\|pir\|\|S26612 ribosomal protein L27.e, |
| | | | | | | | cytosolic - green alga (Pyrobotrys stellata) |
| | | | | | | | >gi\|18267\|emb\|CAA48289.1\| (X68202) ribosomal |
| | | | | | | | protein L27 [Pyrobotrys stellata] |
| 455 | LIB3602-071-Q1-K1-C7 | 400991 | BLASTX | 209 | 2.00E−30 | 58 | 60S RIBOSOMAL PROTEIN L27 |
| | | | | | | | >gi\|282737\|pir\|\|S26612 ribosomal protein L27.e, |
| | | | | | | | cytosolic - green alga (Pyrobotrys stellata) |
| | | | | | | | >gi\|18267\|emb\|CAA48289.1\| (X68202) ribosomal |
| | | | | | | | protein L27 [Pyrobotrys stellata] |
| 456 | LIB3602-101-Q1-K1-H3 | 400991 | BLASTX | 235 | 1.00E−19 | 64 | 60S RIBOSOMAL PROTEIN L27 |
| | | | | | | | >gi\|282737\|pir\|\|S26612 ribosomal protein L27.e, |
| | | | | | | | cytosolic - green alga (Pyrobotrys stellata) |
| | | | | | | | >gi\|18267\|emb\|CAA48289.1\| (X68202) ribosomal |
| | | | | | | | protein L27 [Pyrobotrys stellata] |
| 457 | LIB3602-086-Q6-K1-E7 | 400991 | BLASTX | 231 | 8.00E−19 | 45 | 60S RIBOSOMAL PROTEIN L27 |
| | | | | | | | >gi\|282737\|pir\|\|S26612 ribosomal protein L27.e, |
| | | | | | | | cytosolic - green alga (Pyrobotrys stellata) |
| | | | | | | | >gi\|18267\|emb\|CAA48289.1\| (X68202) ribosomal |
| | | | | | | | protein L27 [Pyrobotrys stellata] |
| 458 | LIB3602-006-Q1-K1-E9 | 400991 | BLASTX | 224 | 2.00E−18 | 55 | 60S RIBOSOMAL PROTEIN L27 |
| | | | | | | | >gi\|282737\|pir\|\|S26612 ribosomal protein L27.e, |
| | | | | | | | cytosolic - green alga (Pyrobotrys stellata) |
| | | | | | | | >gi\|18267\|emb\|CAA48289.1\| (X68202) ribosomal |
| | | | | | | | protein L27 [Pyrobotrys stellata] |
| 459 | LIB3602-083-Q6-K6-A8 | 6939227 | BLASTX | 384 | 7.00E−37 | 66 | (AC020579) putative ribosomal protein |
| | | | | | | | [Arabidopsis thaliana] |
| 460 | LIB3602-070-Q1-K1-H2 | 6939227 | BLASTX | 384 | 7.00E−37 | 66 | (AC020579) putative ribosomal protein |
| | | | | | | | [Arabidopsis thaliana] |
| 461 | LIB3602-029-Q6-K1-E5 | 6939227 | BLASTX | 384 | 7.00E−37 | 66 | (AC020579) putative ribosomal protein |
| | | | | | | | [Arabidopsis thaliana] |
| 462 | LIB3602-058-Q6-K1-C8 | 6939227 | BLASTX | 384 | 7.00E−37 | 66 | (AC020579) putative ribosomal protein |
| | | | | | | | [Arabidopsis thaliana] |
| 463 | LIB3602-016-Q6-K1-A11 | 6939227 | BLASTX | 384 | 7.00E−37 | 66 | (AC020579) putative ribosomal protein |
| | | | | | | | [Arabidopsis thaliana] |
| 464 | LIB3602-012-Q6-K1-G11 | 6939227 | BLASTX | 384 | 7.00E−37 | 66 | (AC020579) putative ribosomal protein |
| | | | | | | | [Arabidopsis thaliana] |
| 465 | LIB3602-019-Q6-K1-H1 | 6939227 | BLASTX | 382 | 7.00E−37 | 64 | (AC020579) putative ribosomal protein |
| | | | | | | | [Arabidopsis thaliana] |
| 466 | LIB3602-065-Q1-K6-D10 | 6939227 | BLASTX | 384 | 1.00E−36 | 66 | (AC020579) putative ribosomal protein |
| | | | | | | | [Arabidopsis thaliana] |
| 467 | LIB3602-018-Q6-K1-H7 | 6939227 | BLASTX | 375 | 7.00E−36 | 65 | (AC020579) putative ribosomal protein |
| | | | | | | | [Arabidopsis thaliana] |
| 468 | LIB3602-109-Q1-K1-A8 | 6939227 | BLASTX | 363 | 2.00E−34 | 61 | (AC020579) putative ribosomal protein |
| | | | | | | | [Arabidopsis thaliana] |
| 469 | LIB3602-039-Q6-K1-B11 | 6939227 | BLASTX | 348 | 1.00E−32 | 63 | (AC020579) putative ribosomal protein |
| | | | | | | | [Arabidopsis thaliana] |
| 470 | LIB3602-100-Q1-K1-H2 | 6939227 | BLASTX | 284 | 3.00E−25 | 53 | (AC020579) putative ribosomal protein |
| | | | | | | | [Arabidopsis thaliana] |
| 471 | LIB3602-058-Q6-K1-B9 | 6939227 | BLASTX | 207 | 2.00E−16 | 64 | (AC020579) putative ribosomal protein |
| | | | | | | | [Arabidopsis thaliana] |
| 472 | LIB3602-091-Q6-K6-G11 | 6939227 | BLASTX | 169 | 3.00E−15 | 54 | (AC020579) putative ribosomal protein |
| | | | | | | | [Arabidopsis thaliana] |
| 473 | LIB3602-115-Q1-K1-B6 | 6939227 | BLASTX | 169 | 3.00E−15 | 54 | (AC020579) putative ribosomal protein |
| | | | | | | | [Arabidopsis thaliana] |
| 474 | LIB3602-088-Q6-K6-B6 | 6939227 | BLASTX | 169 | 3.00E−15 | 54 | (AC020579) putative ribosomal protein |
| | | | | | | | [Arabidopsis thaliana] |
| 475 | LIB3602-052-Q6-K1-D2 | 6939227 | BLASTX | 185 | 6.00E−14 | 64 | (AC020579) putative ribosomal protein |
| | | | | | | | [Arabidopsis thaliana] |
| 476 | LIB3602-057-Q6-K1-F11 | 6939227 | BLASTX | 184 | 1.00E−13 | 64 | (AC020579) putative ribosomal protein |
| | | | | | | | [Arabidopsis thaliana] |
| 477 | LIB3602-013-Q6-K1-C10 | 1710521 | BLASTX | 405 | 2.00E−39 | 63 | 60S RIBOSOMAL PROTEIN L24 |
| | | | | | | | >gi\|7440778\|pir\|\|T06178 ribosomal protein L24 - |
| | | | | | | | barley >gi\|1154859\|emb\|CAA63960.1\| (X94296) |
| | | | | | | | L24 ribosomal protein [Hordeum vulgare] |
| 478 | LIB3602-027-Q6-K1-F6 | 1710521 | BLASTX | 393 | 4.00E−38 | 62 | 60S RIBOSOMAL PROTEIN L24 |
| | | | | | | | >gi\|7440778\|pir\|\|T06178 ribosomal protein L24 - |
| | | | | | | | barley >gi\|1154859\|emb\|CAA63960.1\| (X94296) |
| | | | | | | | L24 ribosomal protein [Hordeum vulgare] |
| 479 | LIB3602-013-Q6-K1-D2 | 1710521 | BLASTX | 367 | 7.00E−35 | 60 | 60S RIBOSOMAL PROTEIN L24 |
| | | | | | | | >gi\|7440778\|pir\|\|T06178 ribosomal protein L24 - |
| | | | | | | | barley >gi\|1154859\|emb\|CAA63960.1\| (X94296) |
| | | | | | | | L24 ribosomal protein [Hordeum vulgare] |
| 480 | LIB3602-025-Q6-K1-G7 | 1710521 | BLASTX | 367 | 7.00E−35 | 60 | 60S RIBOSOMAL PROTEIN L24 |
| | | | | | | | >gi\|7440778\|pir\|\|T06178 ribosomal protein L24 - |
| | | | | | | | barley >gi\|1154859\|emb\|CAA63960.1\| (X94296) |
| | | | | | | | L24 ribosomal protein [Hordeum vulgare] |
| 481 | LIB3602-001-P1-K6-B9 | 1710521 | BLASTX | 367 | 8.00E−35 | 60 | 60S RIBOSOMAL PROTEIN L24 |
| | | | | | | | >gi\|7440778\|pir\|\|T06178 ribosomal protein L24 - |
| | | | | | | | barley >gi\|1154859\|emb\|CAA63960.1\| (X94296) |
| | | | | | | | L24 ribosomal protein [Hordeum vulgare] |
| 482 | LIB3602-001-P1-K6-D12 | 1710521 | BLASTX | 367 | 8.00E−35 | 60 | 60S RIBOSOMAL PROTEIN L24 |
| | | | | | | | >gi\|7440778\|pir\|\|T06178 ribosomal protein L24 - |
| | | | | | | | barley >gi\|1154859\|emb\|CAA63960.1\| (X94296) |
| | | | | | | | L24 ribosomal protein [Hordeum vulgare] |
| 483 | LIB3602-056-Q6-K1-F11 | 1710521 | BLASTX | 361 | 3.00E−34 | 59 | 60S RIBOSOMAL PROTEIN L24 |
| | | | | | | | >gi\|7440778\|pir\|\|T06178 ribosomal protein L24 - |
| | | | | | | | barley >gi\|1154859\|emb\|CAA63960.1\| (X94296) |
| | | | | | | | L24 ribosomal protein [Hordeum vulgare] |
| 484 | LIB3602-081-Q6-K6-A4 | 1710521 | BLASTX | 353 | 4.00E−33 | 59 | 60S RIBOSOMAL PROTEIN L24 |
| | | | | | | | >gi\|7440778\|pir\|\|T06178 ribosomal protein L24 - |
| | | | | | | | barley >gi\|1154859\|emb\|CAA63960.1\| (X94296) |
| | | | | | | | L24 ribosomal protein [Hordeum vulgare] |
| 485 | LIB3602-019-Q6-K1-G2 | 1710521 | BLASTX | 351 | 5.00E−33 | 58 | 60S RIBOSOMAL PROTEIN L24 |
| | | | | | | | >gi\|7440778\|pir\|\|T06178 ribosomal protein L24 - |
| | | | | | | | barley >gi\|1154859\|emb\|CAA63960.1\| (X94296) |
| | | | | | | | L24 ribosomal protein [Hordeum vulgare] |
| 486 | LIB3602-112-Q1-K1-B8 | 1710521 | BLASTX | 328 | 3.00E−30 | 57 | 60S RIBOSOMAL PROTEIN L24 |
| | | | | | | | >gi\|7440778\|pir\|\|T06178 ribosomal protein L24 - |
| | | | | | | | barley >gi\|1154859\|emb\|CAA63960.1\| (X94296) |
| | | | | | | | L24 ribosomal protein [Hordeum vulgare] |
| 487 | LIB3602-100-Q1-K1-E9 | 1710521 | BLASTX | 220 | 2.00E−29 | 58 | 60S RIBOSOMAL PROTEIN L24 |
| | | | | | | | >gi\|7440778\|pir\|\|T06178 ribosomal protein L24 - |
| | | | | | | | barley >gi\|1154859\|emb\|CAA63960.1\| (X94296) |
| | | | | | | | L24 ribosomal protein [Hordeum vulgare] |
| 488 | LIB3602-045-Q6-K1-B7 | 1710521 | BLASTX | 258 | 3.00E−22 | 56 | 60S RIBOSOMAL PROTEIN L24 |
| | | | | | | | >gi\|7440778\|pir\|\|T06178 ribosomal protein L24 - |
| | | | | | | | barley >gi\|1154859\|emb\|CAA63960.1\| (X94296) |
| | | | | | | | L24 ribosomal protein [Hordeum vulgare] |
| 489 | LIB3602-030-Q6-K1-F12 | 1710521 | BLASTX | 258 | 4.00E−22 | 56 | 60S RIBOSOMAL PROTEIN L24 |
| | | | | | | | >gi\|7440778\|pir\|\|T06178 ribosomal protein L24 - |
| | | | | | | | barley >gi\|1154859\|emb\|CAA63960.1\| (X94296) |
| | | | | | | | L24 ribosomal protein [Hordeum vulgare] |
| 490 | LIB3602-004-Q1-K1-G8 | 1710521 | BLASTX | 235 | 2.00E−19 | 56 | 60S RIBOSOMAL PROTEIN L24 |
| | | | | | | | >gi\|7440778\|pir\|\|T06178 ribosomal protein L24 - |
| | | | | | | | barley >gi\|1154859\|emb\|CAA63960.1\| (X94296) |
| | | | | | | | L24 ribosomal protein [Hordeum vulgare] |
| 491 | LIB3602-108-Q1-K1-C2 | 1710521 | BLASTX | 173 | 3.00E−12 | 57 | 60S RIBOSOMAL PROTEIN L24 |
| | | | | | | | >gi\|7440778\|pir\|\|T06178 ribosomal protein L24 - |
| | | | | | | | barley >gi\|1154859\|emb\|CAA63960.1\| (X94296) |
| | | | | | | | L24 ribosomal protein [Hordeum vulgare] |
| 492 | LIB3602-019-Q6-K1-G3 | 1710521 | BLASTX | 161 | 3.00E−11 | 44 | 60S RIBOSOMAL PROTEIN L24 |
| | | | | | | | >gi\|7440778\|pir\|\|T06178 ribosomal protein L24 - |
| | | | | | | | barley >gi\|1154859\|emb\|CAA63960.1\| (X94296) |
| | | | | | | | L24 ribosomal protein [Hordeum vulgare] |
| 493 | LIB3602-028-Q6-K1-C6 | 1710521 | BLASTX | 161 | 5.00E−11 | 56 | 60S RIBOSOMAL PROTEIN L24 |
| | | | | | | | >gi\|7440778\|pir\|\|T06178 ribosomal protein L24 - |
| | | | | | | | barley >gi\|1154859\|emb\|CAA63960.1\| (X94296) |
| | | | | | | | L24 ribosomal protein [Hordeum vulgare] |
| 494 | LIB3602-043-Q6-K1-G10 | 5902584 | BLASTX | 494 | 8.00E−50 | 71 | (AF110780) oxygen-evolving enhancer protein 1 |
| | | | | | | | precursor [Volvox carteri f. nagariensis] |
| 495 | LIB3602-060-Q6-K1-H10 | 5902584 | BLASTX | 467 | 1.00E−46 | 72 | (AF110780) oxygen-evolving enhancer protein 1 |
| | | | | | | | precursor [Volvox carteri f. nagariensis] |
| 496 | LIB3602-054-Q6-K1-B1 | 5902584 | BLASTX | 427 | 5.00E−42 | 78 | (AF110780) oxygen-evolving enhancer protein 1 |
| | | | | | | | precursor [Volvox carteri f. nagariensis] |
| 497 | LIB3602-014-Q6-K1-D12 | 5902584 | BLASTX | 419 | 4.00E−41 | 79 | (AF110780) oxygen-evolving enhancer protein 1 |
| | | | | | | | precursor [Volvox carteri f. nagariensis] |
| 498 | LIB3602-080-Q6-K6-F4 | 5902584 | BLASTX | 354 | 6.00E−37 | 77 | (AF110780) oxygen-evolving enhancer protein 1 |
| | | | | | | | precursor [Volvox carteri f. nagariensis] |
| 499 | LIB3602-058-Q6-K1-H6 | 5902584 | BLASTX | 375 | 6.00E−36 | 78 | (AF110780) oxygen-evolving enhancer protein 1 |
| | | | | | | | precursor [Volvox carteri f. nagariensis] |
| 500 | LIB3602-065-Q1-K6-F2 | 5902584 | BLASTX | 368 | 4.00E−35 | 76 | (AF110780) oxygen-evolving enhancer protein 1 |
| | | | | | | | precursor [Volvox carteri f. nagariensis] |
| 501 | LIB3602-092-Q6-K6-F12 | 5902584 | BLASTX | 354 | 4.00E−34 | 77 | (AF110780) oxygen-evolving enhancer protein 1 |
| | | | | | | | precursor [Volvox carteri f. nagariensis] |
| 502 | LIB3602-079-Q6-K6-F9 | 5902584 | BLASTX | 354 | 1.00E−33 | 77 | (AF110780) oxygen-evolving enhancer protein 1 |
| | | | | | | | precursor [Volvox carteri f. nagariensis] |
| 503 | LIB3602-088-Q6-K6-F3 | 5902584 | BLASTX | 350 | 7.00E−33 | 75 | (AF110780) oxygen-evolving enhancer protein 1 |
| | | | | | | | precursor [Volvox carteri f. nagariensis] |
| 504 | LIB3602-104-Q1-K1-E8 | 5902584 | BLASTX | 347 | 1.00E−32 | 76 | (AF110780) oxygen-evolving enhancer protein 1 |
| | | | | | | | precursor [Volvox carteri f. nagariensis] |
| 505 | LIB3602-064-Q1-K6-H7 | 5902584 | BLASTX | 346 | 1.00E−32 | 77 | (AF110780) oxygen-evolving enhancer protein 1 |
| | | | | | | | precursor [Volvox carteri f. nagariensis] |
| 506 | LIB3602-103-Q1-K1-E2 | 5902584 | BLASTX | 225 | 2.00E−32 | 82 | (AF110780) oxygen-evolving enhancer protein 1 |
| | | | | | | | precursor [Volvox carteri f. nagariensis] |
| 507 | LIB3602-093-Q6-K6-D7 | 5902584 | BLASTX | 271 | 7.00E−29 | 71 | (AF110780) oxygen-evolving enhancer protein 1 |
| | | | | | | | precursor [Volvox carteri f. nagariensis] |
| 508 | LIB3602-050-Q6-K1-A10 | 5902584 | BLASTX | 286 | 2.00E−25 | 76 | (AF110780) oxygen-evolving enhancer protein 1 |
| | | | | | | | precursor [Volvox carteri f. nagariensis] |
| 509 | LIB3602-077-Q6-K6-H7 | 5902584 | BLASTX | 253 | 7.00E−22 | 78 | (AF110780) oxygen-evolving enhancer protein 1 |
| | | | | | | | precursor [Volvox carteri f. nagariensis] |
| 510 | LIB3602-036-Q6-K1-F9 | 5902584 | BLASTX | 159 | 6.00E−11 | 87 | (AF110780) oxygen-evolving enhancer protein 1 |
| | | | | | | | precursor [Volvox carteri f. nagariensis] |
| 511 | LIB3602-030-Q6-K1-G9 | 6831602 | BLASTX | 408 | 8.00E−40 | 83 | 60S RIBOSOMAL PROTEIN L37A |
| | | | | | | | >gi\|4741896\|gb\|AAD28753.1\|AF127042_1 |
| | | | | | | | (AF127042) 60S ribosomal protein L37a |
| | | | | | | | [Gossypium hirsutum] |
| 512 | LIB3602-014-Q6-K1-H8 | 6831602 | BLASTX | 408 | 8.00E−40 | 83 | 60S RIBOSOMAL PROTEIN L37A |
| | | | | | | | >gi\|4741896\|gb\|AAD28753.1\|AF127042_1 |
| | | | | | | | (AF127042) 60S ribosomal protein L37a |
| | | | | | | | [Gossypium hirsutum] |
| 513 | LIB3602-034-Q6-K1-E1 | 6831602 | BLASTX | 408 | 8.00E−40 | 83 | 60S RIBOSOMAL PROTEIN L37A |
| | | | | | | | >gi\|4741896\|gb\|AAD28753.1\|AF127042_1 |
| | | | | | | | (AF127042) 60S ribosomal protein L37a |
| | | | | | | | [Gossypium hirsutum] |
| 514 | LIB3602-017-Q6-K1-F11 | 6831602 | BLASTX | 387 | 2.00E−37 | 83 | 60S RIBOSOMAL PROTEIN L37A |
| | | | | | | | >gi\|4741896\|gb\|AAD28753.1\|AF127042_1 |
| | | | | | | | (AF127042) 60S ribosomal protein L37a |
| | | | | | | | [Gossypium hirsutum] |
| 515 | LIB3602-027-Q6-K1-H10 | 6831602 | BLASTX | 382 | 7.00E−37 | 83 | 60S RIBOSOMAL PROTEIN L37A |
| | | | | | | | >gi\|4741896\|gb\|AAD28753.1\|AF127042_1 |
| | | | | | | | (AF127042) 60S ribosomal protein L37a |
| | | | | | | | [Gossypium hirsutum] |
| 516 | LIB3602-035-Q1-K1-E1 | 6831602 | BLASTX | 378 | 3.00E−36 | 82 | 60S RIBOSOMAL PROTEIN L37A |
| | | | | | | | >gi\|4741896\|gb\|AAD28753.1\|AF127042_1 |
| | | | | | | | (AF127042) 60S ribosomal protein L37a |
| | | | | | | | [Gossypium hirsutum] |
| 517 | LIB3602-069-Q1-K1-C12 | 6831602 | BLASTX | 378 | 3.00E−36 | 82 | 60S RIBOSOMAL PROTEIN L37A |
| | | | | | | | >gi\|4741896\|gb\|AAD28753.1\|AF127042_1 |
| | | | | | | | (AF127042) 60S ribosomal protein L37a |
| | | | | | | | [Gossypium hirsutum] |
| 518 | LIB3602-087-Q6-K1-E1 | 6831602 | BLASTX | 378 | 3.00E−36 | 82 | 60S RIBOSOMAL PROTEIN L37A |
| | | | | | | | >gi\|4741896\|gb\|AAD28753.1\|AF127042_1 |
| | | | | | | | (AF127042) 60S ribosomal protein L37a |
| | | | | | | | [Gossypium hirsutum] |
| 519 | LIB3602-021-Q6-K1-D6 | 6831602 | BLASTX | 371 | 1.00E−35 | 84 | 60S RIBOSOMAL PROTEIN L37A |
| | | | | | | | >gi\|4741896\|gb\|AAD28753.1\|AF127042_1 |
| | | | | | | | (AF127042) 60S ribosomal protein L37a |
| | | | | | | | [Gossypium hirsutum] |
| 520 | LIB3602-021-Q6-K1-B12 | 6831602 | BLASTX | 369 | 2.00E−35 | 81 | 60S RIBOSOMAL PROTEIN L37A |
| | | | | | | | >gi\|4741896\|gb\|AAD28753.1\|AF127042_1 |
| | | | | | | | (AF127042) 60S ribosomal protein L37a |
| | | | | | | | [Gossypium hirsutum] |
| 521 | LIB3602-019-Q6-K1-A12 | 6831602 | BLASTX | 365 | 7.00E−35 | 80 | 60S RIBOSOMAL PROTEIN L37A |
| | | | | | | | >gi\|4741896\|gb\|AAD28753.1\|AF127042_1 |
| | | | | | | | (AF127042) 60S ribosomal protein L37a |
| | | | | | | | [Gossypium hirsutum] |
| 522 | LIB3602-021-Q6-K1-F9 | 6831602 | BLASTX | 327 | 1.00E−30 | 81 | 60S RIBOSOMAL PROTEIN L37A |
| | | | | | | | >gi\|4741896\|gb\|AAD28753.1\|AF127042_1 |
| | | | | | | | (AF127042) 60S ribosomal protein L37a |
| | | | | | | | [Gossypium hirsutum] |
| 523 | LIB3602-067-Q1-K1-D5 | 6831602 | BLASTX | 182 | 1.00E−25 | 92 | 60S RIBOSOMAL PROTEIN L37A |
| | | | | | | | >gi\|4741896\|gb\|AAD28753.1\|AF127042_1 |
| | | | | | | | (AF127042) 60S ribosomal protein L37a |
| | | | | | | | [Gossypium hirsutum] |
| 524 | LIB3602-054-Q6-K1-F9 | 6831602 | BLASTX | 275 | 2.00E−24 | 79 | 60S RIBOSOMAL PROTEIN L37A |
| | | | | | | | >gi\|4741896\|gb\|AAD28753.1\|AF127042_1 |
| | | | | | | | (AF127042) 60S ribosomal protein L37a |
| | | | | | | | [Gossypium hirsutum] |
| 525 | LIB3602-060-Q6-K1-D12 | 6831602 | BLASTX | 239 | 3.00E−20 | 78 | 60S RIBOSOMAL PROTEIN L37A |
| | | | | | | | >gi\|4741896\|gb\|AAD28753.1\|AF127042_1 |
| | | | | | | | (AF127042) 60S ribosomal protein L37a |
| | | | | | | | [Gossypium hirsutum] |
| 526 | LIB3602-043-Q6-K1-B11 | 6831602 | BLASTX | 207 | 8.00E−17 | 64 | 60S RIBOSOMAL PROTEIN L37A |
| | | | | | | | >gi\|4741896\|gb\|AAD28753.1\|AF127042_1 |
| | | | | | | | (AF127042) 60S ribosomal protein L37a |
| | | | | | | | [Gossypium hirsutum] |
| 527 | LIB3602-011-Q6-K1-A6 | 6831602 | BLASTX | 204 | 8.00E−16 | 53 | 60S RIBOSOMAL PROTEIN L37A |
| | | | | | | | >gi\|4741896\|gb\|AAD28753.1\|AF127042_1 |
| | | | | | | | (AF127042) 60S ribosomal protein L37a |
| | | | | | | | [Gossypium hirsutum] |
| 528 | LIB3602-102-Q1-K1-H6 | 6174959 | BLASTX | 441 | 3.00E−50 | 71 | 60S RIBOSOMAL PROTEIN L9 |
| | | | | | | | >gi\|7440702\|pir\|\|T03761 probable ribosomal protein |
| | | | | | | | L9 - rice >gi\|2058273\|dbj\|BAA19798.1\| (D83527) |
| | | | | | | | YK426 [Oryza sativa] |
| 529 | LIB3602-056-Q6-K1-B4 | 6174959 | BLASTX | 488 | 4.00E−49 | 69 | 60S RIBOSOMAL PROTEIN L9 |
| | | | | | | | >gi\|7440702\|pir\|\|T03761 probable ribosomal protein |
| | | | | | | | L9 - rice >gi\|2058273\|dbj\|BAA19798.1\| (D83527) |
| | | | | | | | YK426 [Oryza sativa] |
| 530 | LIB3602-113-Q1-K1-B5 | 6174959 | BLASTX | 488 | 6.00E−49 | 70 | 60S RIBOSOMAL PROTEIN L9 |
| | | | | | | | >gi\|7440702\|pir\|\|T03761 probable ribosomal protein |
| | | | | | | | L9 - rice >gi\|2058273\|dbj\|BAA19798.1\| (D83527) |
| | | | | | | | YK426 [Oryza sativa] |
| 531 | LIB3602-070-Q1-K1-F5 | 6174959 | BLASTX | 484 | 2.00E−48 | 70 | 60S RIBOSOMAL PROTEIN L9 |
| | | | | | | | >gi\|7440702\|pir\|\|T03761 probable ribosomal protein |
| | | | | | | | L9 - rice >gi\|2058273\|dbj\|BAA19798.1\| (D83527) |
| | | | | | | | YK426 [Oryza sativa] |
| 532 | LIB3602-093-Q6-K6-E5 | 6174959 | BLASTX | 484 | 2.00E−48 | 70 | 60S RIBOSOMAL PROTEIN L9 |
| | | | | | | | >gi\|7440702\|pir\|\|T03761 probable ribosomal protein |
| | | | | | | | L9 - rice >gi\|2058273\|dbj\|BAA19798.1\| (D83527) |
| | | | | | | | YK426 [Oryza sativa] |
| 533 | LIB3602-012-Q6-K1-C7 | 6174959 | BLASTX | 484 | 2.00E−48 | 70 | 60S RIBOSOMAL PROTEIN L9 |
| | | | | | | | >gi\|7440702\|pir\|\|T03761 probable ribosomal protein |
| | | | | | | | L9 - rice >gi\|2058273\|dbj\|BAA19798.1\| (D83527) |
| | | | | | | | YK426 [Oryza sativa] |
| 534 | LIB3602-112-Q1-K1-B5 | 6174959 | BLASTX | 484 | 2.00E−48 | 70 | 60S RIBOSOMAL PROTEIN L9 |
| | | | | | | | >gi\|7440702\|pir\|\|T03761 probable ribosomal protein |
| | | | | | | | L9 - rice >gi\|2058273\|dbj\|BAA19798.1\| (D83527) |
| | | | | | | | YK426 [Oryza sativa] |
| 535 | LIB3602-116-Q1-K1-B6 | 6174959 | BLASTX | 470 | 4.00E−47 | 71 | 60S RIBOSOMAL PROTEIN L9 |
| | | | | | | | >gi\|7440702\|pir\|\|T03761 probable ribosomal protein |
| | | | | | | | L9 - rice >gi\|2058273\|dbj\|BAA19798.1\| (D83527) |
| | | | | | | | YK426 [Oryza sativa] |
| 536 | LIB3602-002-P1-K6-G8 | 6174959 | BLASTX | 452 | 8.00E−45 | 72 | 60S RIBOSOMAL PROTEIN L9 |
| | | | | | | | >gi\|7440702\|pir\|\|T03761 probable ribosomal protein |
| | | | | | | | L9 - rice >gi\|2058273\|dbj\|BAA19798.1\| (D83527) |
| | | | | | | | YK426 [Oryza sativa] |
| 537 | LIB3602-059-Q6-K1-D12 | 6174959 | BLASTX | 331 | 3.00E−41 | 65 | 60S RIBOSOMAL PROTEIN L9 |
| | | | | | | | >gi\|7440702\|pir\|\|T03761 probable ribosomal protein |
| | | | | | | | L9 - rice >gi\|2058273\|dbj\|BAA19798.1\| (D83527) |
| | | | | | | | YK426 [Oryza sativa] |
| 538 | LIB3602-038-Q6-K1-G10 | 6174959 | BLASTX | 416 | 1.00E−40 | 73 | 60S RIBOSOMAL PROTEIN L9 |
| | | | | | | | >gi\|7440702\|pir\|\|T03761 probable ribosomal protein |
| | | | | | | | L9 - rice >gi\|2058273\|dbj\|BAA19798.1\| (D83527) |
| | | | | | | | YK426 [Oryza sativa] |
| 539 | LIB3602-042-Q6-K1-G2 | 6174959 | BLASTX | 408 | 1.00E−39 | 68 | 60S RIBOSOMAL PROTEIN L9 |
| | | | | | | | >gi\|7440702\|pir\|\|T03761 probable ribosomal protein |
| | | | | | | | L9 - rice >gi\|2058273\|dbj\|BAA19798.1\| (D83527) |
| | | | | | | | YK426 [Oryza sativa] |
| 540 | LIB3602-120-Q1-K1-B5 | 6174959 | BLASTX | 292 | 1.00E−35 | 68 | 60S RIBOSOMAL PROTEIN L9 |
| | | | | | | | >gi\|7440702\|pir\|\|T03761 probable ribosomal protein |
| | | | | | | | L9 - rice >gi\|2058273\|dbj\|BAA19798.1\| (D83527) |
| | | | | | | | YK426 [Oryza sativa] |
| 541 | LIB3602-114-Q1-K1-A1 | 6174959 | BLASTX | 350 | 4.00E−33 | 66 | 60S RIBOSOMAL PROTEIN L9 |
| | | | | | | | >gi\|7440702\|pir\|\|T03761 probable ribosomal protein |
| | | | | | | | L9 - rice >gi\|2058273\|dbj\|BAA19798.1\| (D83527) |
| | | | | | | | YK426 [Oryza sativa] |
| 542 | LIB3602-072-Q1-K1-E9 | 6174959 | BLASTX | 274 | 3.00E−32 | 74 | 60S RIBOSOMAL PROTEIN L9 |
| | | | | | | | >gi\|7440702\|pir\|\|T03761 probable ribosomal protein |
| | | | | | | | L9 - rice >gi\|2058273\|dbj\|BAA19798.1\| (D83527) |
| | | | | | | | YK426 [Oryza sativa] |
| 543 | LIB3602-006-Q1-K1-F11 | 6174959 | BLASTX | 199 | 4.00E−15 | 41 | 60S RIBOSOMAL PROTEIN L9 |
| | | | | | | | >gi\|7440702\|pir\|\|T03761 probable ribosomal protein |
| | | | | | | | L9 - rice >gi\|2058273\|dbj\|BAA19798.1\| (D83527) |
| | | | | | | | YK426 [Oryza sativa] |
| 544 | LIB3602-027-Q6-K1-H11 | 7440314 | BLASTX | 425 | 1.00E−41 | 60 | ribosomal protein S10, cytosolic - Arabidopsis |
| | | | | | | | thaliana >gi\|4539292\|emb\|CAB39595.1\| |
| | | | | | | | (AL049480) putative ribosomal protein S10 |
| | | | | | | | [Arabidopsis thaliana] |
| | | | | | | | >gi\|7269424\|emb\|CAB81384.1\| (AL161563) |
| | | | | | | | putative ribosomal protein S10 [Arabidopsis |
| | | | | | | | thaliana] |
| 545 | LIB3602-089-Q6-K6-E9 | 7440314 | BLASTX | 425 | 1.00E−41 | 60 | ribosomal protein S10, cytosolic - Arabidopsis |
| | | | | | | | thaliana >gi\|4539292\|emb\|CAB39595.1\| |
| | | | | | | | (AL049480) putative ribosomal protein S10 |
| | | | | | | | [Arabidopsis thaliana] |
| | | | | | | | >gi\|7269424\|emb\|CAB81384.1\| (AL161563) |
| | | | | | | | putative ribosomal protein S10 [Arabidopsis |
| | | | | | | | thaliana] |
| 546 | LIB3602-079-Q6-K6-A6 | 7440314 | BLASTX | 422 | 3.00E−41 | 60 | ribosomal protein S10, cytosolic - Arabidopsis |
| | | | | | | | thaliana >gi\|4539292\|emb\|CAB39595.1\| |
| | | | | | | | (AL049480) putative ribosomal protein S10 |
| | | | | | | | [Arabidopsis thaliana] |
| | | | | | | | >gi\|7269424\|emb\|CAB81384.1\| (AL161563) |
| | | | | | | | putative ribosomal protein S10 [Arabidopsis |
| | | | | | | | thaliana] |
| 547 | LIB3602-109-Q1-K1-B1 | 7440314 | BLASTX | 419 | 6.00E−41 | 61 | ribosomal protein S10, cytosolic - Arabidopsis |
| | | | | | | | thaliana >gi\|4539292\|emb\|CAB39595.1\| |
| | | | | | | | (AL049480) putative ribosomal protein S10 |
| | | | | | | | [Arabidopsis thaliana] |
| | | | | | | | >gi\|7269424\|emb\|CAB81384.1\| (AL161563) |
| | | | | | | | putative ribosomal protein S10 [Arabidopsis |
| | | | | | | | thaliana] |
| 548 | LIB3602-009-Q6-K1-F5 | 7440314 | BLASTX | 409 | 8.00E−40 | 75 | ribosomal protein S10, cytosolic - Arabidopsis |
| | | | | | | | thaliana >gi\|4539292\|emb\|CAB39595.1\| |
| | | | | | | | (AL049480) putative ribosomal protein S10 |
| | | | | | | | [Arabidopsis thaliana] |
| | | | | | | | >gi\|7269424\|emb\|CAB81384.1\| (AL161563) |
| | | | | | | | putative ribosomal protein S10 [Arabidopsis |
| | | | | | | | thaliana] |
| 549 | LIB3602-043-Q6-K1-B10 | 7440314 | BLASTX | 409 | 8.00E−40 | 75 | ribosomal protein S10, cytosolic - Arabidopsis |
| | | | | | | | thaliana >gi\|4539292\|emb\|CAB39595.1\| |
| | | | | | | | (AL049480) putative ribosomal protein S10 |
| | | | | | | | [Arabidopsis thaliana] |
| | | | | | | | >gi\|7269424\|emb\|CAB81384.1\| (AL161563) |
| | | | | | | | putative ribosomal protein S10 [Arabidopsis |
| | | | | | | | thaliana] |
| 550 | LIB3602-037-Q6-K1-D12 | 7440314 | BLASTX | 407 | 1.00E−39 | 74 | ribosomal protein S10, cytosolic - Arabidopsis |
| | | | | | | | thaliana >gi\|4539292\|emb\|CAB39595.1\| |
| | | | | | | | (AL049480) putative ribosomal protein S10 |
| | | | | | | | [Arabidopsis thaliana] |
| | | | | | | | >gi\|7269424\|emb\|CAB81384.1\| (AL161563) |
| | | | | | | | putative ribosomal protein S10 [Arabidopsis |
| | | | | | | | thaliana] |
| 551 | LIB3602-100-Q1-K1-D6 | 7440314 | BLASTX | 404 | 3.00E−39 | 74 | ribosomal protein S10, cytosolic - Arabidopsis |
| | | | | | | | thaliana >gi\|4539292\|emb\|CAB39595.1\| |
| | | | | | | | (AL049480) putative ribosomal protein S10 |
| | | | | | | | [Arabidopsis thaliana] |
| | | | | | | | >gi\|7269424\|emb\|CAB81384.1\| (AL161563) |
| | | | | | | | putative ribosomal protein S10 [Arabidopsis |
| | | | | | | | thaliana] |
| 552 | LIB3602-064-Q1-K6-C9 | 7440314 | BLASTX | 361 | 4.00E−36 | 58 | ribosomal protein S10, cytosolic - Arabidopsis |
| | | | | | | | thaliana >gi\|4539292\|emb\|CAB39595.1\| |
| | | | | | | | (AL049480) putative ribosomal protein S10 |
| | | | | | | | [Arabidopsis thaliana] |
| | | | | | | | >gi\|7269424\|emb\|CAB81384.1\| (AL161563) |
| | | | | | | | putative ribosomal protein S10 [Arabidopsis |
| | | | | | | | thaliana] |
| 553 | LIB3602-072-Q1-K1-G11 | 7440314 | BLASTX | 356 | 5.00E−36 | 57 | ribosomal protein S10, cytosolic - Arabidopsis |
| | | | | | | | thaliana >gi\|4539292\|emb\|CAB39595.1\| |
| | | | | | | | (AL049480) putative ribosomal protein S10 |
| | | | | | | | [Arabidopsis thaliana] |
| | | | | | | | >gi\|7269424\|emb\|CAB81384.1\| (AL161563) |
| | | | | | | | putative ribosomal protein S10 [Arabidopsis |
| | | | | | | | thaliana] |
| 554 | LIB3602-101-Q1-K1-C1 | 7440314 | BLASTX | 323 | 1.00E−35 | 71 | ribosomal protein S10, cytosolic - Arabidopsis |
| | | | | | | | thaliana >gi\|4539292\|emb\|CAB39595.1\| |
| | | | | | | | (AL049480) putative ribosomal protein S10 |
| | | | | | | | [Arabidopsis thaliana] |
| | | | | | | | >gi\|7269424\|emb\|CAB81384.1\| (AL161563) |
| | | | | | | | putative ribosomal protein S10 [Arabidopsis |
| | | | | | | | thaliana] |
| 555 | LIB3602-083-Q6-K6-A5 | 7440314 | BLASTX | 336 | 3.00E−31 | 56 | ribosomal protein S10, cytosolic - Arabidopsis |
| | | | | | | | thaliana >gi\|4539292\|emb\|CAB39595.1\| |
| | | | | | | | (AL049480) putative ribosomal protein S10 |
| | | | | | | | [Arabidopsis thaliana] |
| | | | | | | | >gi\|7269424\|emb\|CAB81384.1\| (AL161563) |
| | | | | | | | putative ribosomal protein S10 [Arabidopsis |
| | | | | | | | thaliana] |
| 556 | LIB3602-084-Q6-K1-B6 | 7440314 | BLASTX | 330 | 2.00E−30 | 54 | ribosomal protein S10, cytosolic - Arabidopsis |
| | | | | | | | thaliana >gi\|4539292\|emb\|CAB39595.1\| |
| | | | | | | | (AL049480) putative ribosomal protein S10 |
| | | | | | | | [Arabidopsis thaliana] |
| | | | | | | | >gi\|7269424\|emb\|CAB81384.1\| (AL161563) |
| | | | | | | | putative ribosomal protein S10 [Arabidopsis |
| | | | | | | | thaliana] |
| 557 | LIB3602-109-Q1-K1-A5 | 7440314 | BLASTX | 195 | 7.00E−24 | 76 | ribosomal protein S10, cytosolic - Arabidopsis |
| | | | | | | | thaliana >gi\|4539292\|emb\|CAB39595.1\| |
| | | | | | | | (AL049480) putative ribosomal protein S10 |
| | | | | | | | [Arabidopsis thaliana] |
| | | | | | | | >gi\|7269424\|emb\|CAB81384.1\| (AL161563) |
| | | | | | | | putative ribosomal protein S10 [Arabidopsis |
| | | | | | | | thaliana] |
| 558 | LIB3602-064-Q1-K6-F3 | 7440314 | BLASTX | 197 | 4.00E−18 | 44 | ribosomal protein S10, cytosolic - Arabidopsis |
| | | | | | | | thaliana >gi\|4539292\|emb\|CAB39595.1\| |
| | | | | | | | (AL049480) putative ribosomal protein S10 |
| | | | | | | | [Arabidopsis thaliana] |
| | | | | | | | >gi\|7269424\|emb\|CAB81384.1\| (AL161563) |
| | | | | | | | putative ribosomal protein S10 [Arabidopsis |
| | | | | | | | thaliana] |
| 559 | LIB3602-008-Q6-K1-C11 | 6683481 | BLASTX | 566 | 3.00E−58 | 81 | (AB018560) wrp15a [Citrullus lanatus] |
| 560 | LIB3602-025-Q6-K1-C10 | 6683481 | BLASTX | 566 | 3.00E−58 | 81 | (AB018560) wrp15a [Citrullus lanatus] |
| 561 | LIB3602-069-Q1-K1-B4 | 6683481 | BLASTX | 438 | 7.00E−52 | 79 | (AB018560) wrp15a [Citrullus lanatus] |
| 562 | LIB3602-068-Q1-K1-B4 | 6683481 | BLASTX | 438 | 8.00E−52 | 79 | (AB018560) wrp15a [Citrullus lanatus] |
| 563 | LIB3602-103-Q1-K1-C2 | 6683481 | BLASTX | 510 | 1.00E−51 | 81 | (AB018560) wrp15a [Citrullus lanatus] |
| 564 | LIB3602-105-Q1-K1-B5 | 6683481 | BLASTX | 438 | 8.00E−51 | 79 | (AB018560) wrp15a [Citrullus lanatus] |
| 565 | LIB3602-084-Q6-K1-B2 | 6683481 | BLASTX | 438 | 9.00E−50 | 79 | (AB018560) wrp15a [Citrullus lanatus] |
| 566 | LIB3602-047-Q6-K1-D6 | 6683481 | BLASTX | 443 | 8.00E−44 | 82 | (AB018560) wrp15a [Citrullus lanatus] |
| 567 | LIB3602-077-Q6-K6-H5 | 6683481 | BLASTX | 438 | 3.00E−43 | 79 | (AB018560) wrp15a [Citrullus lanatus] |
| 568 | LIB3602-055-Q6-K1-E12 | 6683481 | BLASTX | 428 | 4.00E−42 | 82 | (AB018560) wrp15a [Citrullus lanatus] |
| 569 | LIB3602-071-Q1-K1-F3 | 6683481 | BLASTX | 419 | 5.00E−41 | 79 | (AB018560) wrp15a [Citrullus lanatus] |
| 570 | LIB3602-074-Q1-K1-E7 | 6683481 | BLASTX | 341 | 4.00E−35 | 75 | (AB018560) wrp15a [Citrullus lanatus] |
| 571 | LIB3602-086-Q6-K1-H6 | 6683481 | BLASTX | 258 | 2.00E−32 | 66 | (AB018560) wrp15a [Citrullus lanatus] |
| 572 | LIB3602-077-Q6-K6-D5 | 6683481 | BLASTX | 319 | 2.00E−29 | 70 | (AB018560) wrp15a [Citrullus lanatus] |
| 573 | LIB3602-023-Q6-K1-G5 | 115778 | BLASTX | 653 | 2.00E−68 | 72 | CHLOROPHYLL A-B BINDING PROTEIN 1 |
| | | | | | | | PRECURSOR (LHCII TYPE I CAB-1) (LHCP) |
| | | | | | | | >gi\|282896\|pir\|\|S22511 chlorophyll a/b-binding |
| | | | | | | | protein precursor - white mustard |
| | | | | | | | >gi\|21138\|emb\|CAA34459.1\| (X16436) chlorophyll |
| | | | | | | | a/b-binding protein (AA 1-266) [Sinapis alba] |
| | | | | | | | >gi\|21140 |
| 574 | LIB3602-094-Q6-K6-F3 | 115778 | BLASTX | 653 | 3.00E−68 | 71 | CHLOROPHYLL A-B BINDING PROTEIN 1 |
| | | | | | | | PRECURSOR (LHCII TYPE I CAB-1) (LHCP) |
| | | | | | | | >gi\|282896\|pir\|\|S22511 chlorophyll a/b-binding |
| | | | | | | | protein precursor - white mustard |
| | | | | | | | >gi\|21138\|emb\|CAA34459.1\| (X16436) chlorophyll |
| | | | | | | | a/b-binding protein (AA 1-266) [Sinapis alba] |
| | | | | | | | >gi\|21140 |
| 575 | LIB3602-015-Q6-K1-G9 | 115778 | BLASTX | 536 | 1.00E−54 | 70 | CHLOROPHYLL A-B BINDING PROTEIN 1 |
| | | | | | | | PRECURSOR (LHCII TYPE I CAB-1) (LHCP) |
| | | | | | | | >gi\|282896\|pir\|\|S22511 chlorophyll a/b-binding |
| | | | | | | | protein precursor - white mustard |
| | | | | | | | >gi\|21138\|emb\|CAA34459.1\| (X16436) chlorophyll |
| | | | | | | | a/b-binding protein (AA 1-266) [Sinapis alba] |
| | | | | | | | >gi\|21140 |
| 576 | LIB3602-008-Q6-K1-A6 | 115778 | BLASTX | 495 | 7.00E−50 | 70 | CHLOROPHYLL A-B BINDING PROTEIN 1 |
| | | | | | | | PRECURSOR (LHCII TYPE I CAB-1) (LHCP) |
| | | | | | | | >gi\|282896\|pir\|\|S22511 chlorophyll a/b-binding |
| | | | | | | | protein precursor - white mustard |
| | | | | | | | >gi\|21138\|emb\|CAA34459.1\| (X16436) chlorophyll |
| | | | | | | | a/b-binding protein (AA 1-266) [Sinapis alba] |
| | | | | | | | >gi\|21140 |
| 577 | LIB3602-013-Q6-K1-H5 | 115778 | BLASTX | 478 | 8.00E−48 | 70 | CHLOROPHYLL A-B BINDING PROTEIN 1 |
| | | | | | | | PRECURSOR (LHCII TYPE I CAB-1) (LHCP) |
| | | | | | | | >gi\|282896\|pir\|\|S22511 chlorophyll a/b-binding |
| | | | | | | | protein precursor - white mustard |
| | | | | | | | >gi\|21138\|emb\|CAA34459.1\| (X16436) chlorophyll |
| | | | | | | | a/b-binding protein (AA 1-266) [Sinapis alba] |
| | | | | | | | >gi\|21140 |
| 578 | LIB3602-090-Q6-K6-B4 | 115778 | BLASTX | 471 | 6.00E−47 | 71 | CHLOROPHYLL A-B BINDING PROTEIN 1 |
| | | | | | | | PRECURSOR (LHCII TYPE I CAB-1) (LHCP) |
| | | | | | | | >gi\|282896\|pir\|\|S22511 chlorophyll a/b-binding |
| | | | | | | | protein precursor - white mustard |
| | | | | | | | >gi\|21138\|emb\|CAA34459.1\| (X16436) chlorophyll |
| | | | | | | | a/b-binding protein (AA 1-266) [Sinapis alba] |
| | | | | | | | >gi\|21140 |
| 579 | LIB3602-105-Q1-K1-F2 | 115778 | BLASTX | 464 | 4.00E−46 | 71 | CHLOROPHYLL A-B BINDING PROTEIN 1 |
| | | | | | | | PRECURSOR (LHCII TYPE I CAB-1) (LHCP) |
| | | | | | | | >gi\|282896\|pir\|\|S22511 chlorophyll a/b-binding |
| | | | | | | | protein precursor - white mustard |
| | | | | | | | >gi\|21138\|emb\|CAA34459.1\| (X16436) chlorophyll |
| | | | | | | | a/b-binding protein (AA 1-266) [Sinapis alba] |
| | | | | | | | >gi\|21140 |
| 580 | LIB3602-025-Q6-K1-H12 | 115778 | BLASTX | 459 | 1.00E−45 | 71 | CHLOROPHYLL A-B BINDING PROTEIN 1 |
| | | | | | | | PRECURSOR (LHCII TYPE I CAB-1) (LHCP) |
| | | | | | | | >gi\|282896\|pir\|\|S22511 chlorophyll a/b-binding |
| | | | | | | | protein precursor - white mustard |
| | | | | | | | >gi\|21138\|emb\|CAA34459.1\| (X16436) chlorophyll |
| | | | | | | | a/b-binding protein (AA 1-266) [Sinapis alba] |
| | | | | | | | >gi\|21140 |
| 581 | LIB3602-105-Q1-K1-B7 | 115778 | BLASTX | 431 | 2.00E−42 | 70 | CHLOROPHYLL A-B BINDING PROTEIN 1 |
| | | | | | | | PRECURSOR (LHCII TYPE I CAB-1) (LHCP) |
| | | | | | | | >gi\|282896\|pir\|\|S22511 chlorophyll a/b-binding |
| | | | | | | | protein precursor - white mustard |
| | | | | | | | >gi\|21138\|emb\|CAA34459.1\| (X16436) chlorophyll |
| | | | | | | | a/b-binding protein (AA 1-266) [Sinapis alba] |
| | | | | | | | >gi\|21140 |
| 582 | LIB3602-029-Q6-K1-B7 | 115778 | BLASTX | 409 | 9.00E−40 | 70 | CHLOROPHYLL A-B BINDING PROTEIN 1 |
| | | | | | | | PRECURSOR (LHCII TYPE I CAB-1) (LHCP) |
| | | | | | | | >gi\|282896\|pir\|\|S22511 chlorophyll a/b-binding |
| | | | | | | | protein precursor - white mustard |
| | | | | | | | >gi\|21138\|emb\|CAA34459.1\| (X16436) chlorophyll |
| | | | | | | | a/b-binding protein (AA 1-266) [Sinapis alba] |
| | | | | | | | >gi\|21140 |
| 583 | LIB3602-050-Q6-K1-B9 | 115778 | BLASTX | 392 | 7.00E−38 | 71 | CHLOROPHYLL A-B BINDING PROTEIN 1 |
| | | | | | | | PRECURSOR (LHCII TYPE I CAB-1) (LHCP) |
| | | | | | | | >gi\|282896\|pir\|\|S22511 chlorophyll a/b-binding |
| | | | | | | | protein precursor - white mustard |
| | | | | | | | >gi\|21138\|emb\|CAA34459.1\| (X16436) chlorophyll |
| | | | | | | | a/b-binding protein (AA 1-266) [Sinapis alba] |
| | | | | | | | >gi\|21140 |
| 584 | LIB3602-027-Q6-K1-A7 | 115778 | BLASTX | 364 | 2.00E−34 | 61 | CHLOROPHYLL A-B BINDING PROTEIN 1 |
| | | | | | | | PRECURSOR (LHCII TYPE I CAB-1) (LHCP) |
| | | | | | | | >gi\|282896\|pir\|\|S22511 chlorophyll a/b-binding |
| | | | | | | | protein precursor - white mustard |
| | | | | | | | >gi\|21138\|emb\|CAA34459.1\| (X16436) chlorophyll |
| | | | | | | | a/b-binding protein (AA 1-266) [Sinapis alba] |
| | | | | | | | >gi\|21140 |
| 585 | LIB3602-018-Q6-K1-A1 | 115778 | BLASTX | 319 | 2.00E−33 | 59 | CHLOROPHYLL A-B BINDING PROTEIN 1 |
| | | | | | | | PRECURSOR (LHCII TYPE I CAB-1) (LHCP) |
| | | | | | | | >gi\|282896\|pir\|\|S22511 chlorophyll a/b-binding |
| | | | | | | | protein precursor - white mustard |
| | | | | | | | >gi\|21138\|emb\|CAA34459.1\| (X16436) chlorophyll |
| | | | | | | | a/b-binding protein (AA 1-266) [Sinapis alba] |
| | | | | | | | >gi\|21140 |
| 586 | LIB3602-115-Q1-K1-D2 | 115778 | BLASTX | 151 | 1.00E−13 | 63 | CHLOROPHYLL A-B BINDING PROTEIN 1 |
| | | | | | | | PRECURSOR (LHCII TYPE I CAB-1) (LHCP) |
| | | | | | | | >gi\|282896\|pir\|\|S22511 chlorophyll a/b-binding |
| | | | | | | | protein precursor - white mustard |
| | | | | | | | >gi\|21138\|emb\|CAA34459.1\| (X16436) chlorophyll |
| | | | | | | | a/b-binding protein (AA 1-266) [Sinapis alba] |
| | | | | | | | >gi\|21140 |
| 587 | LIB3602-103-Q1-K1-C4 | 548852 | BLASTX | 303 | 2.00E−27 | 65 | 40S RIBOSOMAL PROTEIN S21 |
| | | | | | | | >gi\|481227\|pir\|\|S38357 ribosomal protein S21, |
| | | | | | | | cytosolic - rice >gi\|303839\|dbj\|BAA02158.1\| |
| | | | | | | | (D12633) 40S subunit ribosomal protein [Oryza |
| | | | | | | | sativa] |
| 588 | LIB3602-037-Q6-K1-C5 | 548852 | BLASTX | 303 | 2.00E−27 | 65 | 40S RIBOSOMAL PROTEIN S21 |
| | | | | | | | >gi\|481227\|pir\|\|S38357 ribosomal protein S21, |
| | | | | | | | cytosolic - rice >gi\|303839\|dbj\|BAA02158.1\| |
| | | | | | | | (D12633) 40S subunit ribosomal protein [Oryza |
| | | | | | | | sativa] |
| 589 | LIB3602-053-Q6-K1-C7 | 548852 | BLASTX | 303 | 2.00E−27 | 65 | 40S RIBOSOMAL PROTEIN S21 |
| | | | | | | | >gi\|481227\|pir\|\|S38357 ribosomal protein S21, |
| | | | | | | | cytosolic - rice >gi\|303839\|dbj\|BAA02158.1\| |
| | | | | | | | (D12633) 40S subunit ribosomal protein [Oryza |
| | | | | | | | sativa] |
| 590 | LIB3602-066-Q1-K6-C8 | 548852 | BLASTX | 303 | 2.00E−27 | 65 | 40S RIBOSOMAL PROTEIN S21 |
| | | | | | | | >gi\|481227\|pir\|\|S38357 ribosomal protein S21, |
| | | | | | | | cytosolic - rice >gi\|303839\|dbj\|BAA02158.1\| |
| | | | | | | | (D12633) 40S subunit ribosomal protein [Oryza |
| | | | | | | | sativa] |
| 591 | LIB3602-030-Q6-K1-G1 | 548852 | BLASTX | 303 | 2.00E−27 | 65 | 40S RIBOSOMAL PROTEIN S21 |
| | | | | | | | >gi\|481227\|pir\|\|S38357 ribosomal protein S21, |
| | | | | | | | cytosolic - rice >gi\|303839\|dbj\|BAA02158.1\| |
| | | | | | | | (D12633) 40S subunit ribosomal protein [Oryza |
| | | | | | | | sativa] |
| 592 | LIB3602-063-Q1-K6-D8 | 548852 | BLASTX | 298 | 7.00E−27 | 65 | 40S RIBOSOMAL PROTEIN S21 |
| | | | | | | | >gi\|481227\|pir\|\|S38357 ribosomal protein S21, |
| | | | | | | | cytosolic - rice >gi\|303839\|dbj\|BAA02158.1\| |
| | | | | | | | (D12633) 40S subunit ribosomal protein [Oryza |
| | | | | | | | sativa] |
| 593 | LIB3602-093-Q6-K6-A11 | 548852 | BLASTX | 298 | 1.00E−26 | 65 | 40S RIBOSOMAL PROTEIN S21 |
| | | | | | | | >gi\|481227\|pir\|\|S38357 ribosomal protein S21, |
| | | | | | | | cytosolic - rice >gi\|303839\|dbj\|BAA02158.1\| |
| | | | | | | | (D12633) 40S subunit ribosomal protein [Oryza |
| | | | | | | | sativa] |
| 594 | LIB3602-034-Q6-K1-D2 | 548852 | BLASTX | 291 | 4.00E−26 | 65 | 40S RIBOSOMAL PROTEIN S21 |
| | | | | | | | >gi\|481227\|pir\|\|S38357 ribosomal protein S21, |
| | | | | | | | cytosolic - rice >gi\|303839\|dbj\|BAA02158.1\| |
| | | | | | | | (D12633) 40S subunit ribosomal protein [Oryza |
| | | | | | | | sativa] |
| 595 | LIB3602-104-Q1-K1-A11 | 548852 | BLASTX | 286 | 3.00E−25 | 61 | 40S RIBOSOMAL PROTEIN S21 |
| | | | | | | | >gi\|481227\|pir\|\|S38357 ribosomal protein S21, |
| | | | | | | | cytosolic - rice >gi\|303839\|dbj\|BAA02158.1\| |
| | | | | | | | (D12633) 40S subunit ribosomal protein [Oryza |
| | | | | | | | sativa] |
| 596 | LIB3602-048-Q6-K1QA-H5 | 548852 | BLASTX | 257 | 4.00E−22 | 66 | 40S RIBOSOMAL PROTEIN S21 |
| | | | | | | | >gi\|481227\|pir\|\|S38357 ribosomal protein S21, |
| | | | | | | | cytosolic - rice >gi\|303839\|dbj\|BAA02158.1\| |
| | | | | | | | (D12633) 40S subunit ribosomal protein [Oryza |
| | | | | | | | sativa] |
| 597 | LIB3602-016-Q6-K1-H5 | 548852 | BLASTX | 254 | 9.00E−22 | 65 | 40S RIBOSOMAL PROTEIN S21 |
| | | | | | | | >gi\|481227\|pir\|\|S38357 ribosomal protein S21, |
| | | | | | | | cytosolic - rice >gi\|303839\|dbj\|BAA02158.1\| |
| | | | | | | | (D12633) 40S subunit ribosomal protein [Oryza |
| | | | | | | | sativa] |
| 598 | LIB3602-115-Q1-K1-H12 | 548852 | BLASTX | 229 | 1.00E−21 | 60 | 40S RIBOSOMAL PROTEIN S21 |
| | | | | | | | >gi\|481227\|pir\|\|S38357 ribosomal protein S21, |
| | | | | | | | cytosolic - rice >gi\|303839\|dbj\|BAA02158.1\| |
| | | | | | | | (D12633) 40S subunit ribosomal protein [Oryza |
| | | | | | | | sativa] |
| 599 | LIB3602-073-Q1-K1-G7 | 548852 | BLASTX | 240 | 4.00E−20 | 63 | 40S RIBOSOMAL PROTEIN S21 |
| | | | | | | | >gi\|481227\|pir\|\|S38357 ribosomal protein S21, |
| | | | | | | | cytosolic - rice >gi\|303839\|dbj\|BAA02158.1\| |
| | | | | | | | (D12633) 40S subunit ribosomal protein [Oryza |
| | | | | | | | sativa] |
| 600 | LIB3602-101-Q1-K1-C4 | 548852 | BLASTX | 145 | 6.00E−20 | 69 | 40S RIBOSOMAL PROTEIN S21 |
| | | | | | | | >gi\|481227\|pir\|\|S38357 ribosomal protein S21, |
| | | | | | | | cytosolic - rice >gi\|303839\|dbj\|BAA02158.1\| |
| | | | | | | | (D12633) 40S subunit ribosomal protein [Oryza |
| | | | | | | | sativa] |
| 601 | LIB3602-115-Q1-K1-D5 | 115832 | BLASTX | 264 | 5.00E−23 | 87 | CHLOROPHYLL A-B BINDING PROTEIN |
| | | | | | | | PRECURSOR (LHCII TYPE I CAB) (LHCP) |
| | | | | | | | >gi\|81414\|pir\|\|JS0171 chlorophyll a/b-binding |
| | | | | | | | protein precursor - moss (Physcomitrella patens) |
| | | | | | | | >gi\|169020\|gb\|AAA33636.1\| (M23532) major |
| | | | | | | | chlorophyll binding protein [Physcomitrella patens] |
| 602 | LIB3602-095-Q6-K6-F1 | 115832 | BLASTX | 266 | 6.00E−23 | 73 | CHLOROPHYLL A-B BINDING PROTEIN |
| | | | | | | | PRECURSOR (LHCII TYPE I CAB) (LHCP) |
| | | | | | | | >gi\|81414\|pir\|\|JS0171 chlorophyll a/b-binding |
| | | | | | | | protein precursor - moss (Physcomitrella patens) |
| | | | | | | | >gi\|169020\|gb\|AAA33636.1\| (M23532) major |
| | | | | | | | chlorophyll binding protein [Physcomitrella patens] |
| 603 | LIB3602-009-Q6-K1-F11 | 115832 | BLASTX | 261 | 2.00E−22 | 75 | CHLOROPHYLL A-B BINDING PROTEIN |
| | | | | | | | PRECURSOR (LHCII TYPE I CAB) (LHCP) |
| | | | | | | | >gi\|81414\|pir\|\|JS0171 chlorophyll a/b-binding |
| | | | | | | | protein precursor - moss (Physcomitrella patens) |
| | | | | | | | >gi\|169020\|gb\|AAA33636.1\| (M23532) major |
| | | | | | | | chlorophyll binding protein [Physcomitrella patens] |
| 604 | LIB3602-009-Q6-K1-E8 | 115832 | BLASTX | 261 | 2.00E−22 | 75 | CHLOROPHYLL A-B BINDING PROTEIN |
| | | | | | | | PRECURSOR (LHCII TYPE I CAB) (LHCP) |
| | | | | | | | >gi\|81414\|pir\|\|JS0171 chlorophyll a/b-binding |
| | | | | | | | protein precursor - moss (Physcomitrella patens) |
| | | | | | | | >gi\|169020\|gb\|AAA33636.1\| (M23532) major |
| | | | | | | | chlorophyll binding protein [Physcomitrella patens] |
| 605 | LIB3602-034-Q6-K1-A4 | 115832 | BLASTX | 258 | 3.00E−22 | 87 | CHLOROPHYLL A-B BINDING PROTEIN |
| | | | | | | | PRECURSOR (LHCII TYPE I CAB) (LHCP) |
| | | | | | | | >gi\|81414\|pir\|\|JS0171 chlorophyll a/b-binding |
| | | | | | | | protein precursor - moss (Physcomitrella patens) |
| | | | | | | | >gi\|169020\|gb\|AAA33636.1\| (M23532) major |
| | | | | | | | chlorophyll binding protein [Physcomitrella patens] |
| 606 | LIB3602-063-Q1-K6-E1 | 115832 | BLASTX | 258 | 5.00E−22 | 69 | CHLOROPHYLL A-B BINDING PROTEIN |
| | | | | | | | PRECURSOR (LHCII TYPE I CAB) (LHCP) |
| | | | | | | | >gi\|81414\|pir\|\|JS0171 chlorophyll a/b-binding |
| | | | | | | | protein precursor - moss (Physcomitrella patens) |
| | | | | | | | >gi\|169020\|gb\|AAA33636.1\| (M23532) major |
| | | | | | | | chlorophyll binding protein [Physcomitrella patens] |
| 607 | LIB3602-035-Q1-K1-A4 | 115832 | BLASTX | 244 | 2.00E−20 | 86 | CHLOROPHYLL A-B BINDING PROTEIN |
| | | | | | | | PRECURSOR (LHCII TYPE I CAB) (LHCP) |
| | | | | | | | >gi\|81414\|pir\|\|JS0171 chlorophyll a/b-binding |
| | | | | | | | protein precursor - moss (Physcomitrella patens) |
| | | | | | | | >gi\|169020\|gb\|AAA33636.1\| (M23532) major |
| | | | | | | | chlorophyll binding protein [Physcomitrella patens] |
| 608 | LIB3602-061-Q6-K1-A5 | 115832 | BLASTX | 205 | 6.00E−16 | 71 | CHLOROPHYLL A-B BINDING PROTEIN |
| | | | | | | | PRECURSOR (LHCII TYPE I CAB) (LHCP) |
| | | | | | | | >gi\|81414\|pir\|\|JS0171 chlorophyll a/b-binding |
| | | | | | | | protein precursor - moss (Physcomitrella patens) |
| | | | | | | | >gi\|169020\|gb\|AAA33636.1\| (M23532) major |
| | | | | | | | chlorophyll binding protein [Physcomitrella patens] |
| 609 | LIB3602-025-Q6-K1-B2 | 115832 | BLASTX | 205 | 7.00E−16 | 71 | CHLOROPHYLL A-B BINDING PROTEIN |
| | | | | | | | PRECURSOR (LHCII TYPE I CAB) (LHCP) |
| | | | | | | | >gi\|81414\|pir\|\|JS0171 chlorophyll a/b-binding |
| | | | | | | | protein precursor - moss (Physcomitrella patens) |
| | | | | | | | >gi\|169020\|gb\|AAA33636.1\| (M23532) major |
| | | | | | | | chlorophyll binding protein [Physcomitrella patens] |
| 610 | LIB3602-053-Q6-K1-A4 | 115832 | BLASTX | 178 | 6.00E−13 | 86 | CHLOROPHYLL A-B BINDING PROTEIN |
| | | | | | | | PRECURSOR (LHCII TYPE I CAB) (LHCP) |
| | | | | | | | >gi\|81414\|pir\|\|JS0171 chlorophyll a/b-binding |
| | | | | | | | protein precursor - moss (Physcomitrella patens) |
| | | | | | | | >gi\|169020\|gb\|AAA33636.1\| (M23532) major |
| | | | | | | | chlorophyll binding protein [Physcomitrella patens] |
| 611 | LIB3602-018-Q6-K1-G6 | 115832 | BLASTX | 174 | 1.00E−12 | 86 | CHLOROPHYLL A-B BINDING PROTEIN |
| | | | | | | | PRECURSOR (LHCII TYPE I CAB) (LHCP) |
| | | | | | | | >gi\|81414\|pir\|\|JS0171 chlorophyll a/b-binding |
| | | | | | | | protein precursor - moss (Physcomitrella patens) |
| | | | | | | | >gi\|169020\|gb\|AAA33636.1\| (M23532) major |
| | | | | | | | chlorophyll binding protein [Physcomitrella patens] |
| 612 | LIB3602-006-Q1-K1-B9 | 115832 | BLASTX | 145 | 2.00E−10 | 62 | CHLOROPHYLL A-B BINDING PROTEIN |
| | | | | | | | PRECURSOR (LHCII TYPE I CAB) (LHCP) |
| | | | | | | | >gi\|81414\|pir\|\|JS0171 chlorophyll a/b-binding |
| | | | | | | | protein precursor - moss (Physcomitrella patens) |
| | | | | | | | >gi\|169020\|gb\|AAA33636.1\| (M23532) major |
| | | | | | | | chlorophyll binding protein [Physcomitrella patens] |
| 613 | LIB3602-082-Q6-K6-E4 | 115832 | BLASTX | 143 | 7.00E−09 | 65 | CHLOROPHYLL A-B BINDING PROTEIN |
| | | | | | | | PRECURSOR (LHCII TYPE I CAB) (LHCP) |
| | | | | | | | >gi\|81414\|pir\|\|JS0171 chlorophyll a/b-binding |
| | | | | | | | protein precursor - moss (Physcomitrella patens) |
| | | | | | | | >gi\|169020\|gb\|AAA33636.1\| (M23532) major |
| | | | | | | | chlorophyll binding protein [Physcomitrella patens] |
| 614 | LIB3602-073-Q1-K1-G12 | 4262180 | BLASTX | 823 | 3.00E−88 | 86 | (AC005508) 29621 [Arabidopsis thaliana] |
| 615 | LIB3602-113-Q1-K1-H1 | 4262180 | BLASTX | 822 | 4.00E−88 | 84 | (AC005508) 29621 [Arabidopsis thaliana] |
| 616 | LIB3602-106-Q1-K1-A5 | 4262180 | BLASTX | 807 | 2.00E−86 | 84 | (AC005508) 29621 [Arabidopsis thaliana] |
| 617 | LIB3602-007-Q1-K1-F8 | 4262180 | BLASTX | 791 | 2.00E−84 | 86 | (AC005508) 29621 [Arabidopsis thaliana] |
| 618 | LIB3602-070-Q1-K1-B1 | 4262180 | BLASTX | 732 | 1.00E−77 | 80 | (AC005508) 29621 [Arabidopsis thaliana] |
| 619 | LIB3602-007-Q1-K1-B10 | 4262180 | BLASTX | 701 | 5.00E−74 | 88 | (AC005508) 29621 [Arabidopsis thaliana] |
| 620 | LIB3602-032-Q6-K1-E1 | 4262180 | BLASTX | 701 | 5.00E−74 | 88 | (AC005508) 29621 [Arabidopsis thaliana] |
| 621 | LIB3602-047-Q6-K1-D2 | 4262180 | BLASTX | 701 | 5.00E−74 | 88 | (AC005508) 29621 [Arabidopsis thaliana] |
| 622 | LIB3602-111-Q1-K1-G4 | 4262180 | BLASTX | 543 | 1.00E−68 | 86 | (AC005508) 29621 [Arabidopsis thaliana] |
| 623 | LIB3602-054-Q6-K1-B7 | 4262180 | BLASTX | 648 | 7.00E−68 | 81 | (AC005508) 29621 [Arabidopsis thaliana] |
| 624 | LIB3602-102-Q1-K1-D8 | 4262180 | BLASTX | 507 | 8.00E−65 | 87 | (AC005508) 29621 [Arabidopsis thaliana] |
| 625 | LIB3602-120-Q1-K1-H1 | 4262180 | BLASTX | 514 | 3.00E−52 | 87 | (AC005508) 29621 [Arabidopsis thaliana] |
| 626 | LIB3602-119-Q1-K1-B12 | 4262180 | BLASTX | 288 | 1.00E−43 | 81 | (AC005508) 29621 [Arabidopsis thaliana] |
| 627 | LIB3602-102-Q1-K1-F9 | 6984222 | BLASTX | 572 | 6.00E−59 | 75 | (AF227979) 40S ribosomal protein S16 [Euphorbia |
| | | | | | | | esula] |
| 628 | LIB3602-054-Q6-K1-H4 | 6984222 | BLASTX | 572 | 6.00E−59 | 75 | (AF227979) 40S ribosomal protein S16 [Euphorbia |
| | | | | | | | esula] |
| 629 | LIB3602-018-Q6-K1-E4 | 6984222 | BLASTX | 572 | 7.00E−59 | 75 | (AF227979) 40S ribosomal protein S16 [Euphorbia |
| | | | | | | | esula] |
| 630 | LIB3602-074-Q1-K1-B4 | 6984222 | BLASTX | 572 | 7.00E−59 | 75 | (AF227979) 40S ribosomal protein S16 [Euphorbia |
| | | | | | | | esula] |
| 631 | LIB3602-023-Q6-K1-D4 | 6984222 | BLASTX | 572 | 7.00E−59 | 75 | (AF227979) 40S ribosomal protein S16 [Euphorbia |
| | | | | | | | esula] |
| 632 | LIB3602-051-Q6-K1-E1 | 6984222 | BLASTX | 568 | 2.00E−58 | 74 | (AF227979) 40S ribosomal protein S16 [Euphorbia |
| | | | | | | | esula] |
| 633 | LIB3602-007-Q1-K1-F2 | 6984222 | BLASTX | 544 | 2.00E−55 | 72 | (AF227979) 40S ribosomal protein S16 [Euphorbia |
| | | | | | | | esula] |
| 634 | LIB3602-069-Q1-K1-C5 | 6984222 | BLASTX | 523 | 6.00E−54 | 73 | (AF227979) 40S ribosomal protein S16 [Euphorbia |
| | | | | | | | esula] |
| 635 | LIB3602-070-Q1-K1-D10 | 6984222 | BLASTX | 523 | 6.00E−54 | 73 | (AF227979) 40S ribosomal protein S16 [Euphorbia |
| | | | | | | | esula] |
| 636 | LIB3602-116-Q1-K1-E12 | 6984222 | BLASTX | 431 | 1.00E−53 | 79 | (AF227979) 40S ribosomal protein S16 [Euphorbia |
| | | | | | | | esula] |
| 637 | LIB3602-034-Q6-K1-B1 | 6984222 | BLASTX | 510 | 1.00E−51 | 69 | (AF227979) 40S ribosomal protein S16 [Euphorbia |
| | | | | | | | esula] |
| 638 | LIB3602-034-Q6-K1-A1 | 6984222 | BLASTX | 225 | 1.00E−18 | 59 | (AF227979) 40S ribosomal protein S16 [Euphorbia |
| | | | | | | | esula] |
| 639 | LIB3602-068-Q1-K1-C7 | 6984222 | BLASTX | 198 | 2.00E−15 | 86 | (AF227979) 40S ribosomal protein S16 [Euphorbia |
| | | | | | | | esula] |
| 640 | LIB3602-104-Q1-K1-E1 | 2440160 | BLASTX | 279 | 2.00E−24 | 50 | (Y14836) beta-galactosidase [Phagemid cloning |
| | | | | | | | vector pTZ19U] |
| 641 | LIB3602-112-Q1-K1-D6 | 2440160 | BLASTX | 274 | 8.00E−24 | 53 | (Y14836) beta-galactosidase [Phagemid cloning |
| | | | | | | | vector pTZ19U] |
| 642 | LIB3602-061-Q6-K1-H10 | 2440160 | BLASTX | 242 | 3.00E−20 | 56 | (Y14836) beta-galactosidase [Phagemid cloning |
| | | | | | | | vector pTZ19U] |
| 643 | LIB3602-094-Q6-K6-C4 | 2440160 | BLASTX | 219 | 2.00E−17 | 41 | (Y14836) beta-galactosidase [Phagemid cloning |
| | | | | | | | vector pTZ19U] |
| 644 | LIB3602-004-Q1-K1-F8 | 2440160 | BLASTX | 216 | 4.00E−17 | 43 | (Y14836) beta-galactosidase [Phagemid cloning |
| | | | | | | | vector pTZ19U] |
| 645 | LIB3602-076-Q6-K6-F12 | 2440160 | BLASTX | 200 | 4.00E−15 | 40 | (Y14836) beta-galactosidase [Phagemid cloning |
| | | | | | | | vector pTZ19U] |
| 646 | LIB3602-041-Q6-K1-B7 | 2440160 | BLASTX | 161 | 5.00E−15 | 55 | (Y14836) beta-galactosidase [Phagemid cloning |
| | | | | | | | vector pTZ19U] |
| 647 | LIB3602-006-Q1-K1-A5 | 2440160 | BLASTX | 191 | 3.00E−14 | 41 | (Y14836) beta-galactosidase [Phagemid cloning |
| | | | | | | | vector pTZ19U] |
| 648 | LIB3602-001-P1-K6-D9 | 2440160 | BLASTX | 177 | 1.00E−12 | 36 | (Y14836) beta-galactosidase [Phagemid cloning |
| | | | | | | | vector pTZ19U] |
| 649 | LIB3602-115-Q1-K1-F9 | 2440160 | BLASTX | 172 | 4.00E−12 | 36 | (Y14836) beta-galactosidase [Phagemid cloning |
| | | | | | | | vector pTZ19U] |
| 650 | LIB3602-036-Q6-K1-E11 | 2440160 | BLASTX | 152 | 1.00E−09 | 36 | (Y14836) beta-galactosidase [Phagemid cloning |
| | | | | | | | vector pTZ19U] |
| 651 | LIB3602-062-Q6-K1-A5 | 2440160 | BLASTX | 150 | 2.00E−09 | 36 | (Y14836) beta-galactosidase [Phagemid cloning |
| | | | | | | | vector pTZ19U] |
| 652 | LIB3602-052-Q6-K1-B3 | 2440160 | BLASTX | 144 | 9.00E−09 | 38 | (Y14836) beta-galactosidase [Phagemid cloning |
| | | | | | | | vector pTZ19U] |
| 653 | LIB3602-018-Q6-K1-E8 | 7440313 | BLASTX | 611 | 2.00E−63 | 73 | ribosomal protein S6.1, cytosolic - maize |
| | | | | | | | >gi\|1917019\|gb\|AAB51304.1\| (U92045) ribosomal |
| | | | | | | | protein S6 RPS6-1 [Zea mays] |
| 654 | LIB3602-104-Q1-K1-H4 | 7440313 | BLASTX | 611 | 2.00E−63 | 68 | ribosomal protein S6.1, cytosolic - maize |
| | | | | | | | >gi\|1917019\|gb\|AAB51304.1\| (U92045) ribosomal |
| | | | | | | | protein S6 RPS6-1 [Zea mays] |
| 655 | LIB3602-073-Q1-K1-H12 | 7440313 | BLASTX | 435 | 4.00E−53 | 65 | ribosomal protein S6.1, cytosolic - maize |
| | | | | | | | >gi\|1917019\|gb\|AAB51304.1\| (U92045) ribosomal |
| | | | | | | | protein S6 RPS6-1 [Zea mays] |
| 656 | LIB3602-107-Q1-K1-H5 | 7440313 | BLASTX | 475 | 2.00E−47 | 64 | ribosomal protein S6.1, cytosolic - maize |
| | | | | | | | >gi\|1917019\|gb\|AAB51304.1\| (U92045) ribosomal |
| | | | | | | | protein S6 RPS6-1 [Zea mays] |
| 657 | LIB3602-115-Q1-K1-B8 | 7440313 | BLASTX | 463 | 5.00E−46 | 56 | ribosomal protein S6.1, cytosolic - maize |
| | | | | | | | >gi\|1917019\|gb\|AAB51304.1\| (U92045) ribosomal |
| | | | | | | | protein S6 RPS6-1 [Zea mays] |
| 658 | LIB3602-004-Q1-K1-G1 | 7440313 | BLASTX | 451 | 7.00E−45 | 51 | ribosomal protein S6.1, cytosolic - maize |
| | | | | | | | >gi\|1917019\|gb\|AAB51304.1\| (U92045) ribosomal |
| | | | | | | | protein S6 RPS6-1 [Zea mays] |
| 659 | LIB3602-053-Q6-K1-C5 | 7440313 | BLASTX | 417 | 9.00E−41 | 62 | ribosomal protein S6.1, cytosolic - maize |
| | | | | | | | >gi\|1917019\|gb\|AAB51304.1\| (U92045) ribosomal |
| | | | | | | | protein S6 RPS6-1 [Zea mays] |
| 660 | LIB3602-001-P1-K6-E9 | 7440313 | BLASTX | 409 | 9.00E−40 | 62 | ribosomal protein S6.1, cytosolic - maize |
| | | | | | | | >gi\|1917019\|gb\|AAB51304.1\| (U92045) ribosomal |
| | | | | | | | protein S6 RPS6-1 [Zea mays] |
| 661 | LIB3602-020-Q6-K1-E3 | 7440313 | BLASTX | 386 | 4.00E−37 | 60 | ribosomal protein S6.1, cytosolic - maize |
| | | | | | | | >gi\|1917019\|gb\|AAB51304.1\| (U92045) ribosomal |
| | | | | | | | protein S6 RPS6-1 [Zea mays] |
| 662 | LIB3602-012-Q6-K1-E10 | 7440313 | BLASTX | 234 | 2.00E−19 | 53 | ribosomal protein S6.1, cytosolic - maize |
| | | | | | | | >gi\|1917019\|gb\|AAB51304.1\| (U92045) ribosomal |
| | | | | | | | protein S6 RPS6-1 [Zea mays] |
| 663 | LIB3602-079-Q6-K6-H5 | 7440313 | BLASTX | 159 | 8.00E−17 | 65 | ribosomal protein S6.1, cytosolic - maize |
| | | | | | | | >gi\|1917019\|gb\|AAB51304.1\| (U92045) ribosomal |
| | | | | | | | protein S6 RPS6-1 [Zea mays] |
| 664 | LIB3602-060-Q6-K1-F7 | 7440313 | BLASTX | 154 | 4.00E−10 | 64 | ribosomal protein S6.1, cytosolic - maize |
| | | | | | | | >gi\|1917019\|gb\|AAB51304.1\| (U92045) ribosomal |
| | | | | | | | protein S6 RPS6-1 [Zea mays] |
| 665 | LIB3602-119-Q1-K1-G3 | 7440313 | BLASTX | 149 | 2.00E−09 | 77 | ribosomal protein S6.1, cytosolic - maize |
| | | | | | | | >gi\|1917019\|gb\|AAB51304.1\| (U92045) ribosomal |
| | | | | | | | protein S6 RPS6-1 [Zea mays] |
| 666 | LIB3602-026-Q6-K1-F6 | 7293042 | BLASTX | 371 | 1.00E−35 | 80 | (AE003498) CG9091 gene product [Drosophila |
| | | | | | | | melanogaster] |
| 667 | LIB3602-068-Q1-K1-D10 | 7293042 | BLASTX | 371 | 2.00E−35 | 80 | (AE003498) CG9091 gene product [Drosophila |
| | | | | | | | melanogaster] |
| 668 | LIB3602-077-Q6-K6-A6 | 7293042 | BLASTX | 371 | 2.00E−35 | 80 | (AE003498) CG9091 gene product [Drosophila |
| | | | | | | | melanogaster] |
| 669 | LIB3602-079-Q6-K6-B2 | 7293042 | BLASTX | 371 | 2.00E−35 | 80 | (AE003498) CG9091 gene product [Drosophila |
| | | | | | | | melanogaster] |
| 670 | LIB3602-105-Q1-K1-D5 | 7293042 | BLASTX | 371 | 2.00E−35 | 80 | (AE003498) CG9091 gene product [Drosophila |
| | | | | | | | melanogaster] |
| 671 | LIB3602-068-Q1-K1-B9 | 7293042 | BLASTX | 371 | 2.00E−35 | 80 | (AE003498) CG9091 gene product [Drosophila |
| | | | | | | | melanogaster] |
| 672 | LIB3602-037-Q6-K1-F8 | 7293042 | BLASTX | 371 | 2.00E−35 | 80 | (AE003498) CG9091 gene product [Drosophila |
| | | | | | | | melanogaster] |
| 673 | LIB3602-027-Q6-K1-D1 | 7293042 | BLASTX | 371 | 2.00E−35 | 80 | (AE003498) CG9091 gene product [Drosophila |
| | | | | | | | melanogaster] |
| 674 | LIB3602-057-Q6-K1-E9 | 7293042 | BLASTX | 364 | 1.00E−34 | 79 | (AE003498) CG9091 gene product [Drosophila |
| | | | | | | | melanogaster] |
| 675 | LIB3602-053-Q6-K1-F11 | 7293042 | BLASTX | 351 | 4.00E−33 | 80 | (AE003498) CG9091 gene product [Drosophila |
| | | | | | | | melanogaster] |
| 676 | LIB3602-053-Q6-K1-F5 | 7293042 | BLASTX | 348 | 6.00E−33 | 79 | (AE003498) CG9091 gene product [Drosophila |
| | | | | | | | melanogaster] |
| 677 | LIB3602-106-Q1-K1-F5 | 7293042 | BLASTX | 245 | 2.00E−24 | 82 | (AE003498) CG9091 gene product [Drosophila |
| | | | | | | | melanogaster] |
| 678 | LIB3602-120-Q1-K1-E11 | 7293042 | BLASTX | 232 | 2.00E−19 | 80 | (AE003498) CG9091 gene product [Drosophila |
| | | | | | | | melanogaster] |
| 679 | LIB3602-055-Q6-K1-A6 | 445613 | BLASTX | 542 | 2.00E−55 | 75 | ribosomal protein L7 [Solanum tuberosum] |
| 680 | LIB3602-089-Q6-K6-E7 | 445613 | BLASTX | 542 | 3.00E−55 | 75 | ribosomal protein L7 [Solanum tuberosum] |
| 681 | LIB3602-057-Q6-K1-C4 | 445613 | BLASTX | 533 | 3.00E−54 | 73 | ribosomal protein L7 [Solanum tuberosum] |
| 682 | LIB3602-034-Q6-K1-D4 | 445613 | BLASTX | 532 | 3.00E−54 | 74 | ribosomal protein L7 [Solanum tuberosum] |
| 683 | LIB3602-059-Q6-K1-G10 | 445613 | BLASTX | 521 | 7.00E−53 | 73 | ribosomal protein L7 [Solanum tuberosum] |
| 684 | LIB3602-035-Q1-K1-D4 | 445613 | BLASTX | 497 | 4.00E−50 | 72 | ribosomal protein L7 [Solanum tuberosum] |
| 685 | LIB3602-070-Q1-K1-D9 | 445613 | BLASTX | 473 | 3.00E−47 | 62 | ribosomal protein L7 [Solanum tuberosum] |
| 686 | LIB3602-061-Q6-K1-F6 | 445613 | BLASTX | 442 | 7.00E−44 | 71 | ribosomal protein L7 [Solanum tuberosum] |
| 687 | LIB3602-040-Q6-K1-G8 | 445613 | BLASTX | 412 | 2.00E−40 | 71 | ribosomal protein L7 [Solanum tuberosum] |
| 688 | LIB3602-111-Q1-K1-A5 | 445613 | BLASTX | 236 | 8.00E−36 | 68 | ribosomal protein L7 [Solanum tuberosum] |
| 689 | LIB3602-040-Q6-K1-A3 | 445613 | BLASTX | 349 | 7.00E−33 | 70 | ribosomal protein L7 [Solanum tuberosum] |
| 690 | LIB3602-025-Q6-K1-B5 | 445613 | BLASTX | 339 | 1.00E−31 | 70 | ribosomal protein L7 [Solanum tuberosum] |
| 691 | LIB3602-018-Q6-K1-D9 | 445613 | BLASTX | 292 | 3.00E−26 | 69 | ribosomal protein L7 [Solanum tuberosum] |
| 692 | LIB3602-047-Q6-K1-B8 | 6441068 | BLASTX | 675 | 5.00E−71 | 77 | (AU066549) 60S ribosomal protein L4 |
| | | | | | | | [Chlamydomonas sp.] |
| 693 | LIB3602-072-Q1-K1-B7 | 6441068 | BLASTX | 572 | 8.00E−59 | 59 | (AU066549) 60S ribosomal protein L4 |
| | | | | | | | [Chlamydomonas sp.] |
| 694 | LIB3602-061-Q6-K1-A1 | 6441068 | BLASTX | 564 | 5.00E−58 | 71 | (AU066549) 60S ribosomal protein L4 |
| | | | | | | | [Chlamydomonas sp.] |
| 695 | LIB3602-113-Q1-K1-G4 | 6441068 | BLASTX | 531 | 5.00E−54 | 59 | (AU066549) 60S ribosomal protein L4 |
| | | | | | | | [Chlamydomonas sp.] |
| 696 | LIB3602-059-Q6-K1-A5 | 6441068 | BLASTX | 507 | 3.00E−51 | 70 | (AU066549) 60S ribosomal protein L4 |
| | | | | | | | [Chlamydomonas sp.] |
| 697 | LIB3602-063-Q1-K6-D4 | 6441068 | BLASTX | 505 | 4.00E−51 | 70 | (AU066549) 60S ribosomal protein L4 |
| | | | | | | | [Chlamydomonas sp.] |
| 698 | LIB3602-046-Q6-K1-B7 | 6441068 | BLASTX | 473 | 2.00E−47 | 71 | (AU066549) 60S ribosomal protein L4 |
| | | | | | | | [Chlamydomonas sp.] |
| 699 | LIB3602-046-Q6-K1-E3 | 6441068 | BLASTX | 335 | 3.00E−31 | 54 | (AU066549) 60S ribosomal protein L4 |
| | | | | | | | [Chlamydomonas sp.] |
| 700 | LIB3602-059-Q6-K1-A6 | 6441068 | BLASTX | 202 | 3.00E−30 | 60 | (AU066549) 60S ribosomal protein L4 |
| | | | | | | | [Chlamydomonas sp.] |
| 701 | LIB3602-107-Q1-K1-H11 | 6441068 | BLASTX | 297 | 1.00E−26 | 48 | (AU066549) 60S ribosomal protein L4 |
| | | | | | | | [Chlamydomonas sp.] |
| 702 | LIB3602-093-Q6-K6-D10 | 6441068 | BLASTX | 292 | 1.00E−26 | 73 | (AU066549) 60S ribosomal protein L4 |
| | | | | | | | [Chlamydomonas sp.] |
| 703 | LIB3602-020-Q6-K1-B6 | 6441068 | BLASTX | 177 | 1.00E−24 | 69 | (AU066549) 60S ribosomal protein L4 |
| | | | | | | | [Chlamydomonas sp.] |
| 704 | LIB3602-057-Q6-K1-F4 | 6441068 | BLASTX | 166 | 2.00E−22 | 40 | (AU066549) 60S ribosomal protein L4 |
| | | | | | | | [Chlamydomonas sp.] |
| 705 | LIB3602-071-Q1-K1-D6 | 6320978 | BLASTX | 276 | 4.00E−24 | 59 | Ribosomal protein S26B; Rps26bp |
| | | | | | | | >gi\|730459\|sp\|P39939\|R26B_YEAST 40S |
| | | | | | | | RIBOSOMAL PROTEIN S26-B |
| | | | | | | | >gi\|1071981\|pir\|\|S50634 ribosomal protein S26.e.B, |
| | | | | | | | cytosolic - yeast (Saccharomyces cerevisiae) |
| | | | | | | | >gi\|603370\|gb\|AAC03229.1\| (U18916) Rps26bp |
| | | | | | | | [Saccharomyces cerevisia |
| 706 | LIB3602-106-Q1-K1-D11 | 6320978 | BLASTX | 276 | 4.00E−24 | 59 | Ribosomal protein S26B; Rps26bp |
| | | | | | | | >gi\|730459\|sp\|P39939\|R26B_YEAST 40S |
| | | | | | | | RIBOSOMAL PROTEIN S26-B |
| | | | | | | | >gi\|1071981\|pir\|\|S50634 ribosomal protein S26.e.B, |
| | | | | | | | cytosolic - yeast (Saccharomyces cerevisiae) |
| | | | | | | | >gi\|603370\|gb\|AAC03229.1\| (U18916) Rps26bp |
| | | | | | | | [Saccharomyces cerevisia |
| 707 | LIB3602-067-Q1-K1-D10 | 6320978 | BLASTX | 276 | 4.00E−24 | 59 | Ribosomal protein S26B; Rps26bp |
| | | | | | | | >gi\|730459\|sp\|P39939\|R26B_YEAST 40S |
| | | | | | | | RIBOSOMAL PROTEIN S26-B |
| | | | | | | | >gi\|1071981\|pir\|\|S50634 ribosomal protein S26.e.B, |
| | | | | | | | cytosolic - yeast (Saccharomyces cerevisiae) |
| | | | | | | | >gi\|603370\|gb\|AAC03229.1\| (U18916) Rps26bp |
| | | | | | | | [Saccharomyces cerevisia |
| 708 | LIB3602-084-Q6-K1-A12 | 6320978 | BLASTX | 271 | 1.00E−23 | 59 | Ribosomal protein S26B; Rps26bp |
| | | | | | | | >gi\|730459\|sp\|P39939\|R26B_YEAST 40S |
| | | | | | | | RIBOSOMAL PROTEIN S26-B |
| | | | | | | | >gi\|1071981\|pir\|\|S50634 ribosomal protein S26.e.B, |
| | | | | | | | cytosolic - yeast (Saccharomyces cerevisiae) |
| | | | | | | | >gi\|603370\|gb\|AAC03229.1\| (U18916) Rps26bp |
| | | | | | | | [Saccharomyces cerevisia |
| 709 | LIB3602-053-Q6-K1-A2 | 6320978 | BLASTX | 269 | 1.00E−23 | 59 | Ribosomal protein S26B; Rps26bp |
| | | | | | | | >gi\|730459\|sp\|P39939\|R26B_YEAST 40S |
| | | | | | | | RIBOSOMAL PROTEIN S26-B |
| | | | | | | | >gi\|1071981\|pir\|\|S50634 ribosomal protein S26.e.B, |
| | | | | | | | cytosolic - yeast (Saccharomyces cerevisiae) |
| | | | | | | | >gi\|603370\|gb\|AAC03229.1\| (U18916) Rps26bp |
| | | | | | | | [Saccharomyces cerevisia |
| 710 | LIB3602-027-Q6-K1-H8 | 6320978 | BLASTX | 269 | 2.00E−23 | 59 | Ribosomal protein S26B; Rps26bp |
| | | | | | | | >gi\|730459\|sp\|P39939\|R26B_YEAST 40S |
| | | | | | | | RIBOSOMAL PROTEIN S26-B |
| | | | | | | | >gi\|1071981\|pir\|\|S50634 ribosomal protein S26.e.B, |
| | | | | | | | cytosolic - yeast (Saccharomyces cerevisiae) |
| | | | | | | | >gi\|603370\|gb\|AAC03229.1\| (U18916) Rps26bp |
| | | | | | | | [Saccharomyces cerevisia |
| 711 | LIB3602-043-Q6-K1-E5 | 6320978 | BLASTX | 269 | 2.00E−23 | 59 | Ribosomal protein S26B; Rps26bp |
| | | | | | | | >gi\|730459\|sp\|P39939\|R26B_YEAST 40S |
| | | | | | | | RIBOSOMAL PROTEIN S26-B |
| | | | | | | | >gi\|1071981\|pir\|\|S50634 ribosomal protein S26.e.B, |
| | | | | | | | cytosolic - yeast (Saccharomyces cerevisiae) |
| | | | | | | | >gi\|603370\|gb\|AAC03229.1\| (U18916) Rps26bp |
| | | | | | | | [Saccharomyces cerevisia |
| 712 | LIB3602-041-Q6-K1-C3 | 6320978 | BLASTX | 269 | 3.00E−23 | 59 | Ribosomal protein S26B; Rps26bp |
| | | | | | | | >gi\|730459\|sp\|P39939\|R26B_YEAST 40S |
| | | | | | | | RIBOSOMAL PROTEIN S26-B |
| | | | | | | | >gi\|1071981\|pir\|\|S50634 ribosomal protein S26.e.B, |
| | | | | | | | cytosolic - yeast (Saccharomyces cerevisiae) |
| | | | | | | | >gi\|603370\|gb\|AAC03229.1\| (U18916) Rps26bp |
| | | | | | | | [Saccharomyces cerevisia |
| 713 | LIB3602-017-Q6-K1-D12 | 6320978 | BLASTX | 262 | 2.00E−22 | 58 | Ribosomal protein S26B; Rps26bp |
| | | | | | | | >gi\|730459\|sp\|P39939\|R26B_YEAST 40S |
| | | | | | | | RIBOSOMAL PROTEIN S26-B |
| | | | | | | | >gi\|1071981\|pir\|\|S50634 ribosomal protein S26.e.B, |
| | | | | | | | cytosolic - yeast (Saccharomyces cerevisiae) |
| | | | | | | | >gi\|603370\|gb\|AAC03229.1\| (U18916) Rps26bp |
| | | | | | | | [Saccharomyces cerevisia |
| 714 | LIB3602-029-Q6-K1-A2 | 6320978 | BLASTX | 260 | 3.00E−22 | 57 | Ribosomal protein S26B; Rps26bp |
| | | | | | | | >gi\|730459\|sp\|P39939\|R26B_YEAST 40S |
| | | | | | | | RIBOSOMAL PROTEIN S26-B |
| | | | | | | | >gi\|1071981\|pir\|\|S50634 ribosomal protein S26.e.B, |
| | | | | | | | cytosolic - yeast (Saccharomyces cerevisiae) |
| | | | | | | | >gi\|603370\|gb\|AAC03229.1\| (U18916) Rps26bp |
| | | | | | | | [Saccharomyces cerevisia |
| 715 | LIB3602-111-Q1-K1-A3 | 6320978 | BLASTX | 212 | 4.00E−19 | 58 | Ribosomal protein S26B; Rps26bp |
| | | | | | | | >gi\|730459\|sp\|P39939\|R26B_YEAST 40S |
| | | | | | | | RIBOSOMAL PROTEIN S26-B |
| | | | | | | | >gi\|1071981\|pir\|\|S50634 ribosomal protein S26.e.B, |
| | | | | | | | cytosolic - yeast (Saccharomyces cerevisiae) |
| | | | | | | | >gi\|603370\|gb\|AAC03229.1\| (U18916) Rps26bp |
| | | | | | | | [Saccharomyces cerevisia |
| 716 | LIB3602-107-Q1-K1-H9 | 6320978 | BLASTX | 195 | 7.00E−15 | 59 | Ribosomal protein S26B; Rps26bp |
| | | | | | | | >gi\|730459\|sp\|P39939\|R26B_YEAST 40S |
| | | | | | | | RIBOSOMAL PROTEIN S26-B |
| | | | | | | | >gi\|1071981\|pir\|\|S50634 ribosomal protein S26.e.B, |
| | | | | | | | cytosolic - yeast (Saccharomyces cerevisiae) |
| | | | | | | | >gi\|603370\|gb\|AAC03229.1\| (U18916) Rps26bp |
| | | | | | | | [Saccharomyces cerevisia |
| 717 | LIB3602-090-Q6-K6-H12 | 3122703 | BLASTX | 485 | 1.00E−48 | 75 | 60S RIBOSOMAL PROTEIN L23A |
| | | | | | | | >gi\|2641201\|gb\|AAB86852.1\| (AF031542) |
| | | | | | | | ribosomal protein L23a [Fritillaria agrestis] |
| 718 | LIB3602-045-Q6-K1-D4 | 3122703 | BLASTX | 479 | 5.00E−48 | 73 | 60S RIBOSOMAL PROTEIN L23A |
| | | | | | | | >gi\|2641201\|gb\|AAB86852.1\| (AF031542) |
| | | | | | | | ribosomal protein L23a [Fritillaria agrestis] |
| 719 | LIB3602-091-Q6-K6-H12 | 3122703 | BLASTX | 479 | 6.00E−48 | 74 | 60S RIBOSOMAL PROTEIN L23A |
| | | | | | | | >gi\|2641201\|gb\|AAB86852.1\| (AF031542) |
| | | | | | | | ribosomal protein L23a [Fritillaria agrestis] |
| 720 | LIB3602-055-Q6-K1-D4 | 3122703 | BLASTX | 473 | 2.00E−47 | 75 | 60S RIBOSOMAL PROTEIN L23A |
| | | | | | | | >gi\|2641201\|gb\|AAB86852.1\| (AF031542) |
| | | | | | | | ribosomal protein L23a [Fritillaria agrestis] |
| 721 | LIB3602-094-Q6-K6-G1 | 3122703 | BLASTX | 473 | 3.00E−47 | 75 | 60S RIBOSOMAL PROTEIN L23A |
| | | | | | | | >gi\|2641201\|gb\|AAB86852.1\| (AF031542) |
| | | | | | | | ribosomal protein L23a [Fritillaria agrestis] |
| 722 | LIB3602-115-Q1-K1-E5 | 3122703 | BLASTX | 473 | 3.00E−47 | 75 | 60S RIBOSOMAL PROTEIN L23A |
| | | | | | | | >gi\|2641201\|gb\|AAB86852.1\| (AF031542) |
| | | | | | | | ribosomal protein L23a [Fritillaria agrestis] |
| 723 | LIB3602-114-Q1-K1-H1 | 3122703 | BLASTX | 473 | 3.00E−47 | 75 | 60S RIBOSOMAL PROTEIN L23A |
| | | | | | | | >gi\|2641201\|gb\|AAB86852.1\| (AF031542) |
| | | | | | | | ribosomal protein L23a [Fritillaria agrestis] |
| 724 | LIB3602-029-Q6-K1-D4 | 3122703 | BLASTX | 473 | 3.00E−47 | 75 | 60S RIBOSOMAL PROTEIN L23A |
| | | | | | | | >gi\|2641201\|gb\|AAB86852.1\| (AF031542) |
| | | | | | | | ribosomal protein L23a [Fritillaria agrestis] |
| 725 | LIB3602-091-Q6-K6-G1 | 3122703 | BLASTX | 473 | 3.00E−47 | 75 | 60S RIBOSOMAL PROTEIN L23A |
| | | | | | | | >gi\|2641201\|gb\|AAB86852.1\| (AF031542) |
| | | | | | | | ribosomal protein L23a [Fritillaria agrestis] |
| 726 | LIB3602-111-Q1-K1-H2 | 3122703 | BLASTX | 456 | 3.00E−45 | 76 | 60S RIBOSOMAL PROTEIN L23A |
| | | | | | | | >gi\|2641201\|gb\|AAB86852.1\| (AF031542) |
| | | | | | | | ribosomal protein L23a [Fritillaria agrestis] |
| 727 | LIB3602-108-Q1-K1-C10 | 3122703 | BLASTX | 439 | 1.00E−44 | 75 | 60S RIBOSOMAL PROTEIN L23A |
| | | | | | | | >gi\|2641201\|gb\|AAB86852.1\| (AF031542) |
| | | | | | | | ribosomal protein L23a [Fritillaria agrestis] |
| 728 | LIB3602-093-Q6-K6-F1 | 3122703 | BLASTX | 201 | 4.00E−21 | 47 | 60S RIBOSOMAL PROTEIN L23A |
| | | | | | | | >gi\|2641201\|gb\|AAB86852.1\| (AF031542) |
| | | | | | | | ribosomal protein L23a [Fritillaria agrestis] |
| 729 | LIB3602-060-Q6-K1-C10 | 1173222 | BLASTX | 565 | 4.00E−58 | 71 | 40S RIBOSOMAL PROTEIN S11 |
| | | | | | | | >gi\|7440474\|pir\|\|T10730 ribosomal protein S11 - |
| | | | | | | | green alga (Dunaliella tertiolecta) |
| | | | | | | | >gi\|534959\|emb\|CAA46835.1\| (X66036) ribosomal |
| | | | | | | | protein S11 [Dunaliella tertiolecta] |
| 730 | LIB3602-094-Q6-K6-H2 | 1173222 | BLASTX | 519 | 5.00E−54 | 78 | 40S RIBOSOMAL PROTEIN S11 |
| | | | | | | | >gi\|7440474\|pir\|\|T10730 ribosomal protein S11 - |
| | | | | | | | green alga (Dunaliella tertiolecta) |
| | | | | | | | >gi\|534959\|emb\|CAA46835.1\| (X66036) ribosomal |
| | | | | | | | protein S11 [Dunaliella tertiolecta] |
| 731 | LIB3602-104-Q1-K1-H7 | 1173222 | BLASTX | 519 | 1.00E−52 | 78 | 40S RIBOSOMAL PROTEIN S11 |
| | | | | | | | >gi\|7440474\|pir\|\|T10730 ribosomal protein S11 - |
| | | | | | | | green alga (Dunaliella tertiolecta) |
| | | | | | | | >gi\|534959\|emb\|CAA46835.1\| (X66036) ribosomal |
| | | | | | | | protein S11 [Dunaliella tertiolecta] |
| 732 | LIB3602-111-Q1-K1-H9 | 1173222 | BLASTX | 516 | 2.00E−52 | 76 | 40S RIBOSOMAL PROTEIN S11 |
| | | | | | | | >gi\|7440474\|pir\|\|T10730 ribosomal protein S11 - |
| | | | | | | | green alga (Dunaliella tertiolecta) |
| | | | | | | | >gi\|534959\|emb\|CAA46835.1\| (X66036) ribosomal |
| | | | | | | | protein S11 [Dunaliella tertiolecta] |
| 733 | LIB3602-088-Q6-K6-G4 | 1173222 | BLASTX | 445 | 1.00E−47 | 81 | 40S RIBOSOMAL PROTEIN S11 |
| | | | | | | | >gi\|7440474\|pir\|\|T10730 ribosomal protein S11 - |
| | | | | | | | green alga (Dunaliella tertiolecta) |
| | | | | | | | >gi\|534959\|emb\|CAA46835.1\| (X66036) ribosomal |
| | | | | | | | protein S11 [Dunaliella tertiolecta] |
| 734 | LIB3602-114-Q1-K1-E2 | 1173222 | BLASTX | 446 | 5.00E−44 | 80 | 40S RIBOSOMAL PROTEIN S11 |
| | | | | | | | >gi\|7440474\|pir\|\|T10730 ribosomal protein S11 - |
| | | | | | | | green alga (Dunaliella tertiolecta) |
| | | | | | | | >gi\|534959\|emb\|CAA46835.1\| (X66036) ribosomal |
| | | | | | | | protein S11 [Dunaliella tertiolecta] |
| 735 | LIB3602-088-Q6-K6-C11 | 1173222 | BLASTX | 445 | 6.00E−44 | 80 | 40S RIBOSOMAL PROTEIN S11 |
| | | | | | | | >gi\|7440474\|pir\|\|T10730 ribosomal protein S11 - |
| | | | | | | | green alga (Dunaliella tertiolecta) |
| | | | | | | | >gi\|534959\|emb\|CAA46835.1\| (X66036) ribosomal |
| | | | | | | | protein S11 [Dunaliella tertiolecta] |
| 736 | LIB3602-108-Q1-K1-E7 | 1173222 | BLASTX | 421 | 7.00E−43 | 75 | 40S RIBOSOMAL PROTEIN S11 |
| | | | | | | | >gi\|7440474\|pir\|\|T10730 ribosomal protein S11 - |
| | | | | | | | green alga (Dunaliella tertiolecta) |
| | | | | | | | >gi\|534959\|emb\|CAA46835.1\| (X66036) ribosomal |
| | | | | | | | protein S11 [Dunaliella tertiolecta] |
| 737 | LIB3602-060-Q6-K1-E9 | 1173222 | BLASTX | 418 | 5.00E−41 | 68 | 40S RIBOSOMAL PROTEIN S11 |
| | | | | | | | >gi\|7440474\|pir\|\|T10730 ribosomal protein S11 - |
| | | | | | | | green alga (Dunaliella tertiolecta) |
| | | | | | | | >gi\|534959\|emb\|CAA46835.1\| (X66036) ribosomal |
| | | | | | | | protein S11 [Dunaliella tertiolecta] |
| 738 | LIB3602-090-Q6-K6-H4 | 1173222 | BLASTX | 278 | 2.00E−40 | 83 | 40S RIBOSOMAL PROTEIN S11 |
| | | | | | | | >gi\|7440474\|pir\|\|T10730 ribosomal protein S11 - |
| | | | | | | | green alga (Dunaliella tertiolecta) |
| | | | | | | | >gi\|534959\|emb\|CAA46835.1\| (X66036) ribosomal |
| | | | | | | | protein S11 [Dunaliella tertiolecta] |
| 739 | LIB3602-077-Q6-K6-G4 | 1173222 | BLASTX | 311 | 3.00E−28 | 80 | 40S RIBOSOMAL PROTEIN S11 |
| | | | | | | | >gi\|7440474\|pir\|\|T10730 ribosomal protein S11 - |
| | | | | | | | green alga (Dunaliella tertiolecta) |
| | | | | | | | >gi\|534959\|emb\|CAA46835.1\| (X66036) ribosomal |
| | | | | | | | protein S11 [Dunaliella tertiolecta] |
| 740 | LIB3602-108-Q1-K1-F11 | 1173222 | BLASTX | 297 | 1.00E−27 | 62 | 40S RIBOSOMAL PROTEIN S11 |
| | | | | | | | >gi\|7440474\|pir\|\|T10730 ribosomal protein S11 - |
| | | | | | | | green alga (Dunaliella tertiolecta) |
| | | | | | | | >gi\|534959\|emb\|CAA46835.1\| (X66036) ribosomal |
| | | | | | | | protein S11 [Dunaliella tertiolecta] |
| 741 | LIB3602-043-Q6-K1-G12 | 4038471 | BLASTX | 313 | 1.00E−28 | 74 | (AF111029) 40S ribosomal protein S27 homolog |
| | | | | | | | [Zea mays] |
| 742 | LIB3602-011-Q6-K1-D1 | 4038471 | BLASTX | 313 | 2.00E−28 | 74 | (AF111029) 40S ribosomal protein S27 homolog |
| | | | | | | | [Zea mays] |
| 743 | LIB3602-062-Q6-K1-F6 | 4038471 | BLASTX | 313 | 2.00E−28 | 74 | (AF111029) 40S ribosomal protein S27 homolog |
| | | | | | | | [Zea mays] |
| 744 | LIB3602-020-Q6-K1-D6 | 4038471 | BLASTX | 303 | 2.00E−27 | 88 | (AF111029) 40S ribosomal protein S27 homolog |
| | | | | | | | [Zea mays] |
| 745 | LIB3602-055-Q6-K1-B10 | 4038471 | BLASTX | 298 | 8.00E−27 | 74 | (AF111029) 40S ribosomal protein S27 homolog |
| | | | | | | | [Zea mays] |
| 746 | LIB3602-032-Q6-K1-E12 | 4038471 | BLASTX | 287 | 1.00E−25 | 89 | (AF111029) 40S ribosomal protein S27 homolog |
| | | | | | | | [Zea mays] |
| 747 | LIB3602-039-Q6-K1-H9 | 4038471 | BLASTX | 259 | 4.00E−22 | 90 | (AF111029) 40S ribosomal protein S27 homolog |
| | | | | | | | [Zea mays] |
| 748 | LIB3602-056-Q6-K1-C2 | 4038471 | BLASTX | 249 | 4.00E−21 | 89 | (AF111029) 40S ribosomal protein S27 homolog |
| | | | | | | | [Zea mays] |
| 749 | LIB3602-090-Q6-K6-E4 | 4038471 | BLASTX | 229 | 1.00E−18 | 91 | (AF111029) 40S ribosomal protein S27 homolog |
| | | | | | | | [Zea mays] |
| 750 | LIB3602-113-Q1-K1-G9 | 4038471 | BLASTX | 206 | 6.00E−16 | 90 | (AF111029) 40S ribosomal protein S27 homolog |
| | | | | | | | [Zea mays] |
| 751 | LIB3602-055-Q6-K1-B11 | 4038471 | BLASTX | 165 | 3.00E−11 | 64 | (AF111029) 40S ribosomal protein S27 homolog |
| | | | | | | | [Zea mays] |
| 752 | LIB3602-001-P1-K6-F4 | 4038471 | BLASTX | 156 | 4.00E−10 | 90 | (AF111029) 40S ribosomal protein S27 homolog |
| | | | | | | | [Zea mays] |
| 753 | LIB3602-060-Q6-K1-G5 | 115829 | BLASTX | 684 | 5.00E−72 | 78 | CHLOROPHYLL A-B BINDING PROTEIN OF |
| | | | | | | | LHCII TYPE I PRECURSOR (CAB) (LHCP) |
| | | | | | | | >gi\|99364\|pir\|\|JW0040 chlorophyll a/b-binding |
| | | | | | | | protein 28.5K precursor - green alga (Dunaliella |
| | | | | | | | tertiolecta) >gi\|167985\|gb\|AAA62772.1\| (M60049) |
| | | | | | | | 28.5 kDa LHCII apoprotein [Dunaliella ter |
| 754 | LIB3602-085-Q6-K1-C6 | 115829 | BLASTX | 635 | 3.00E−66 | 75 | CHLOROPHYLL A-B BINDING PROTEIN OF |
| | | | | | | | LHCII TYPE I PRECURSOR (CAB) (LHCP) |
| | | | | | | | >gi\|99364\|pir\|\|JW0040 chlorophyll a/b-binding |
| | | | | | | | protein 28.5K precursor - green alga (Dunaliella |
| | | | | | | | tertiolecta) >gi\|167985\|gb\|AAA62772.1\| (M60049) |
| | | | | | | | 28.5 kDa LHCII apoprotein [Dunaliella ter |
| 755 | LIB3602-054-Q6-K1-A8 | 115829 | BLASTX | 603 | 1.00E−62 | 77 | CHLOROPHYLL A-B BINDING PROTEIN OF |
| | | | | | | | LHCII TYPE I PRECURSOR (CAB) (LHCP) |
| | | | | | | | >gi\|99364\|pir\|\|JW0040 chlorophyll a/b-binding |
| | | | | | | | protein 28.5K precursor - green alga (Dunaliella |
| | | | | | | | tertiolecta) >gi\|167985\|gb\|AAA62772.1\| (M60049) |
| | | | | | | | 28.5 kDa LHCII apoprotein [Dunaliella ter |
| 756 | LIB3602-094-Q6-K6-A5 | 115829 | BLASTX | 547 | 5.00E−61 | 75 | CHLOROPHYLL A-B BINDING PROTEIN OF |
| | | | | | | | LHCII TYPE I PRECURSOR (CAB) (LHCP) |
| | | | | | | | >gi\|99364\|pir\|\|JW0040 chlorophyll a/b-binding |
| | | | | | | | protein 28.5K precursor - green alga (Dunaliella |
| | | | | | | | tertiolecta) >gi\|167985\|gb\|AAA62772.1\| (M60049) |
| | | | | | | | 28.5 kDa LHCII apoprotein [Dunaliella ter |
| 757 | LIB3602-018-Q6-K1-F7 | 115829 | BLASTX | 564 | 6.00E−58 | 64 | CHLOROPHYLL A-B BINDING PROTEIN OF |
| | | | | | | | LHCII TYPE I PRECURSOR (CAB) (LHCP) |
| | | | | | | | >gi\|99364\|pir\|\|JW0040 chlorophyll a/b-binding |
| | | | | | | | protein 28.5K precursor - green alga (Dunaliella |
| | | | | | | | tertiolecta) >gi\|167985\|gb\|AAA62772.1\| (M60049) |
| | | | | | | | 28.5 kDa LHCII apoprotein [Dunaliella ter |
| 758 | LIB3602-071-Q1-K1-D3 | 115829 | BLASTX | 558 | 4.00E−57 | 75 | CHLOROPHYLL A-B BINDING PROTEIN OF |
| | | | | | | | LHCII TYPE I PRECURSOR (CAB) (LHCP) |
| | | | | | | | >gi\|99364\|pir\|\|JW0040 chlorophyll a/b-binding |
| | | | | | | | protein 28.5K precursor - green alga (Dunaliella |
| | | | | | | | tertiolecta) >gi\|167985\|gb\|AAA62772.1\| (M60049) |
| | | | | | | | 28.5 kDa LHCII apoprotein [Dunaliella ter |
| 759 | LIB3602-002-P1-K6-D8 | 115829 | BLASTX | 451 | 1.00E−44 | 75 | CHLOROPHYLL A-B BINDING PROTEIN OF |
| | | | | | | | LHCII TYPE I PRECURSOR (CAB) (LHCP) |
| | | | | | | | >gi\|99364\|pir\|\|JW0040 chlorophyll a/b-binding |
| | | | | | | | protein 28.5K precursor - green alga (Dunaliella |
| | | | | | | | tertiolecta) >gi\|167985\|gb\|AAA62772.1\| (M60049) |
| | | | | | | | 28.5 kDa LHCII apoprotein [Dunaliella ter |
| 760 | LIB3602-051-Q6-K1-C2 | 115829 | BLASTX | 358 | 5.00E−42 | 74 | CHLOROPHYLL A-B BINDING PROTEIN OF |
| | | | | | | | LHCII TYPE I PRECURSOR (CAB) (LHCP) |
| | | | | | | | >gi\|99364\|pir\|\|JW0040 chlorophyll a/b-binding |
| | | | | | | | protein 28.5K precursor - green alga (Dunaliella |
| | | | | | | | tertiolecta) >gi\|167985\|gb\|AAA62772.1\| (M60049) |
| | | | | | | | 28.5 kDa LHCII apoprotein [Dunaliella ter |
| 761 | LIB3602-111-Q1-K1-E11 | 115829 | BLASTX | 297 | 7.00E−42 | 75 | CHLOROPHYLL A-B BINDING PROTEIN OF |
| | | | | | | | LHCII TYPE I PRECURSOR (CAB) (LHCP) |
| | | | | | | | >gi\|99364\|pir\|\|JW0040 chlorophyll a/b-binding |
| | | | | | | | protein 28.5K precursor - green alga (Dunaliella |
| | | | | | | | tertiolecta) >gi\|167985\|gb\|AAA62772.1\| (M60049) |
| | | | | | | | 28.5 kDa LHCII apoprotein [Dunaliella ter |
| 762 | LIB3602-090-Q6-K6-A12 | 115829 | BLASTX | 256 | 5.00E−33 | 67 | CHLOROPHYLL A-B BINDING PROTEIN OF |
| | | | | | | | LHCII TYPE I PRECURSOR (CAB) (LHCP) |
| | | | | | | | >gi\|99364\|pir\|\|JW0040 chlorophyll a/b-binding |
| | | | | | | | protein 28.5K precursor - green alga (Dunaliella |
| | | | | | | | tertiolecta) >gi\|167985\|gb\|AAA62772.1\| (M60049) |
| | | | | | | | 28.5 kDa LHCII apoprotein [Dunaliella ter |
| 763 | LIB3602-023-Q6-K1-H1 | 115829 | BLASTX | 275 | 3.00E−30 | 44 | CHLOROPHYLL A-B BINDING PROTEIN OF |
| | | | | | | | LHCII TYPE I PRECURSOR (CAB) (LHCP) |
| | | | | | | | >gi\|99364\|pir\|\|JW0040 chlorophyll a/b-binding |
| | | | | | | | protein 28.5K precursor - green alga (Dunaliella |
| | | | | | | | tertiolecta) >gi\|167985\|gb\|AAA62772.1\| (M60049) |
| | | | | | | | 28.5 kDa LHCII apoprotein [Dunaliella ter |
| 764 | LIB3602-001-P1-K6-D6 | 115829 | BLASTX | 315 | 5.00E−29 | 77 | CHLOROPHYLL A-B BINDING PROTEIN OF |
| | | | | | | | LHCII TYPE I PRECURSOR (CAB) (LHCP) |
| | | | | | | | >gi\|99364\|pir\|\|JW0040 chlorophyll a/b-binding |
| | | | | | | | protein 28.5K precursor - green alga (Dunaliella |
| | | | | | | | tertiolecta) >gi\|167985\|gb\|AAA62772.1\| (M60049) |
| | | | | | | | 28.5 kDa LHCII apoprotein [Dunaliella ter |
| 765 | LIB3602-042-Q6-K1-G9 | 1172977 | BLASTX | 716 | 1.00E−75 | 74 | 60S RIBOSOMAL PROTEIN L18 |
| | | | | | | | >gi\|606970\|gb\|AAA69928.1\| (U15741) cytoplasmic |
| | | | | | | | ribosomal protein L18 [Arabidopsis thaliana] |
| 766 | LIB3602-042-Q6-K1-G10 | 1172977 | BLASTX | 709 | 8.00E−75 | 74 | 60S RIBOSOMAL PROTEIN L18 |
| | | | | | | | >gi\|606970\|gb\|AAA69928.1\| (U15741) cytoplasmic |
| | | | | | | | ribosomal protein L18 [Arabidopsis thaliana] |
| 767 | LIB3602-067-Q1-K1-D6 | 1172977 | BLASTX | 694 | 4.00E−73 | 74 | 60S RIBOSOMAL PROTEIN L18 |
| | | | | | | | >gi\|606970\|gb\|AAA69928.1\| (U15741) cytoplasmic |
| | | | | | | | ribosomal protein L18 [Arabidopsis thaliana] |
| 768 | LIB3602-089-Q6-K6-B5 | 1172977 | BLASTX | 688 | 2.00E−72 | 73 | 60S RIBOSOMAL PROTEIN L18 |
| | | | | | | | >gi\|606970\|gb\|AAA69928.1\| (U15741) cytoplasmic |
| | | | | | | | ribosomal protein L18 [Arabidopsis thaliana] |
| 769 | LIB3602-084-Q6-K1-A10 | 1172977 | BLASTX | 673 | 1.00E−70 | 73 | 60S RIBOSOMAL PROTEIN L18 |
| | | | | | | | >gi\|606970\|gb\|AAA69928.1\| (U15741) cytoplasmic |
| | | | | | | | ribosomal protein L18 [Arabidopsis thaliana] |
| 770 | LIB3602-069-Q1-K1-D5 | 1172977 | BLASTX | 669 | 3.00E−70 | 76 | 60S RIBOSOMAL PROTEIN L18 |
| | | | | | | | >gi\|606970\|gb\|AAA69928.1\| (U15741) cytoplasmic |
| | | | | | | | ribosomal protein L18 [Arabidopsis thaliana] |
| 771 | LIB3602-068-Q1-K1-G4 | 1172977 | BLASTX | 638 | 2.00E−66 | 76 | 60S RIBOSOMAL PROTEIN L18 |
| | | | | | | | >gi\|606970\|gb\|AAA69928.1\| (U15741) cytoplasmic |
| | | | | | | | ribosomal protein L18 [Arabidopsis thaliana] |
| 772 | LIB3602-092-Q6-K6-E6 | 1172977 | BLASTX | 630 | 1.00E−65 | 73 | 60S RIBOSOMAL PROTEIN L18 |
| | | | | | | | >gi\|606970\|gb\|AAA69928.1\| (U15741) cytoplasmic |
| | | | | | | | ribosomal protein L18 [Arabidopsis thaliana] |
| 773 | LIB3602-003-Q1-K1-D12 | 1172977 | BLASTX | 573 | 5.00E−59 | 75 | 60S RIBOSOMAL PROTEIN L18 |
| | | | | | | | >gi\|606970\|gb\|AAA69928.1\| (U15741) cytoplasmic |
| | | | | | | | ribosomal protein L18 [Arabidopsis thaliana] |
| 774 | LIB3602-003-Q1-K1-G6 | 1172977 | BLASTX | 546 | 6.00E−56 | 75 | 60S RIBOSOMAL PROTEIN L18 |
| | | | | | | | >gi\|606970\|gb\|AAA69928.1\| (U15741) cytoplasmic |
| | | | | | | | ribosomal protein L18 [Arabidopsis thaliana] |
| 775 | LIB3602-057-Q6-K1-F7 | 1172977 | BLASTX | 439 | 6.00E−54 | 75 | 60S RIBOSOMAL PROTEIN L18 |
| | | | | | | | >gi\|606970\|gb\|AAA69928.1\| (U15741) cytoplasmic |
| | | | | | | | ribosomal protein L18 [Arabidopsis thaliana] |
| 776 | LIB3602-056-Q6-K1-C4 | 1172977 | BLASTX | 498 | 3.00E−50 | 70 | 60S RIBOSOMAL PROTEIN L18 |
| | | | | | | | >gi\|606970\|gb\|AAA69928.1\| (U15741) cytoplasmic |
| | | | | | | | ribosomal protein L18 [Arabidopsis thaliana] |
| 777 | LIB3602-052-Q6-K1-F1 | 1350717 | BLASTX | 376 | 5.00E−36 | 67 | 60S RIBOSOMAL PROTEIN L30 |
| | | | | | | | >gi\|422700\|pir\|\|S34608 ribosomal protein L30, |
| | | | | | | | cytosolic - chicken >gi\|402507\|dbj\|BAA03394.1\| |
| | | | | | | | (D14521) ribosomal protein L30 [Gallus gallus] |
| 778 | LIB3602-011-Q6-K1-H2 | 1350717 | BLASTX | 339 | 1.00E−31 | 61 | 60S RIBOSOMAL PROTEIN L30 |
| | | | | | | | >gi\|422700\|pir\|\|S34608 ribosomal protein L30, |
| | | | | | | | cytosolic - chicken >gi\|402507\|dbj\|BAA03394.1\| |
| | | | | | | | (D14521) ribosomal protein L30 [Gallus gallus] |
| 779 | LIB3602-066-Q1-K6-H12 | 1350717 | BLASTX | 339 | 1.00E−31 | 61 | 60S RIBOSOMAL PROTEIN L30 |
| | | | | | | | >gi\|422700\|pir\|\|S34608 ribosomal protein L30, |
| | | | | | | | cytosolic - chicken >gi\|402507\|dbj\|BAA03394.1\| |
| | | | | | | | (D14521) ribosomal protein L30 [Gallus gallus] |
| 780 | LIB3602-066-Q1-K6-C7 | 1350717 | BLASTX | 339 | 1.00E−31 | 61 | 60S RIBOSOMAL PROTEIN L30 |
| | | | | | | | >gi\|422700\|pir\|\|S34608 ribosomal protein L30, |
| | | | | | | | cytosolic - chicken >gi\|402507\|dbj\|BAA03394.1\| |
| | | | | | | | (D14521) ribosomal protein L30 [Gallus gallus] |
| 781 | LIB3602-108-Q1-K1-A9 | 1350717 | BLASTX | 336 | 2.00E−31 | 60 | 60S RIBOSOMAL PROTEIN L30 |
| | | | | | | | >gi\|422700\|pir\|\|S34608 ribosomal protein L30, |
| | | | | | | | cytosolic - chicken >gi\|402507\|dbj\|BAA03394.1\| |
| | | | | | | | (D14521) ribosomal protein L30 [Gallus gallus] |
| 782 | LIB3602-106-Q1-K1-D4 | 1350717 | BLASTX | 336 | 3.00E−31 | 65 | 60S RIBOSOMAL PROTEIN L30 |
| | | | | | | | >gi\|422700\|pir\|\|S34608 ribosomal protein L30, |
| | | | | | | | cytosolic - chicken >gi\|402507\|dbj\|BAA03394.1\| |
| | | | | | | | (D14521) ribosomal protein L30 [Gallus gallus] |
| 783 | LIB3602-071-Q1-K1-H12 | 1350717 | BLASTX | 336 | 3.00E−31 | 65 | 60S RIBOSOMAL PROTEIN L30 |
| | | | | | | | >gi\|422700\|pir\|\|S34608 ribosomal protein L30, |
| | | | | | | | cytosolic - chicken >gi\|402507\|dbj\|BAA03394.1\| |
| | | | | | | | (D14521) ribosomal protein L30 [Gallus gallus] |
| 784 | LIB3602-056-Q6-K1-F12 | 1350717 | BLASTX | 331 | 8.00E−31 | 59 | 60S RIBOSOMAL PROTEIN L30 |
| | | | | | | | >gi\|422700\|pir\|\|S34608 ribosomal protein L30, |
| | | | | | | | cytosolic - chicken >gi\|402507\|dbj\|BAA03394.1\| |
| | | | | | | | (D14521) ribosomal protein L30 [Gallus gallus] |
| 785 | LIB3602-004-Q1-K1-C10 | 1350717 | BLASTX | 327 | 2.00E−30 | 65 | 60S RIBOSOMAL PROTEIN L30 |
| | | | | | | | >gi\|422700\|pir\|\|S34608 ribosomal protein L30, |
| | | | | | | | cytosolic - chicken >gi\|402507\|dbj\|BAA03394.1\| |
| | | | | | | | (D14521) ribosomal protein L30 [Gallus gallus] |
| 786 | LIB3602-049-Q6-K1-E8 | 1350717 | BLASTX | 276 | 1.00E−24 | 73 | 60S RIBOSOMAL PROTEIN L30 |
| | | | | | | | >gi\|422700\|pir\|\|S34608 ribosomal protein L30, |
| | | | | | | | cytosolic - chicken >gi\|402507\|dbj\|BAA03394.1\| |
| | | | | | | | (D14521) ribosomal protein L30 [Gallus gallus] |
| 787 | LIB3602-006-Q1-K1-G5 | 1350717 | BLASTX | 177 | 8.00E−13 | 68 | 60S RIBOSOMAL PROTEIN L30 |
| | | | | | | | >gi\|422700\|pir\|\|S34608 ribosomal protein L30, |
| | | | | | | | cytosolic - chicken >gi\|402507\|dbj\|BAA03394.1\| |
| | | | | | | | (D14521) ribosomal protein L30 [Gallus gallus] |
| 788 | LIB3602-039-Q6-K1-G7 | 3717978 | BLASTX | 790 | 2.00E−84 | 80 | (Y12431) 5S ribosomal protein [Mus musculus] |
| 789 | LIB3602-041-Q6-K1-F5 | 3717978 | BLASTX | 767 | 1.00E−81 | 80 | (Y12431) 5S ribosomal protein [Mus musculus] |
| 790 | LIB3602-017-Q6-K1-C3 | 3717978 | BLASTX | 744 | 5.00E−79 | 81 | (Y12431) 5S ribosomal protein [Mus musculus] |
| 791 | LIB3602-003-Q1-K1-G8 | 3717978 | BLASTX | 733 | 1.00E−77 | 79 | (Y12431) 5S ribosomal protein [Mus musculus] |
| 792 | LIB3602-107-Q1-K1-A1 | 3717978 | BLASTX | 723 | 1.00E−76 | 78 | (Y12431) 5S ribosomal protein [Mus musculus] |
| 793 | LIB3602-028-Q6-K1-E1 | 3717978 | BLASTX | 695 | 2.00E−73 | 79 | (Y12431) 5S ribosomal protein [Mus musculus] |
| 794 | LIB3602-062-Q6-K1-C3 | 3717978 | BLASTX | 690 | 1.00E−72 | 78 | (Y12431) 5S ribosomal protein [Mus musculus] |
| 795 | LIB3602-048-Q6-K1QA-C2 | 3717978 | BLASTX | 667 | 5.00E−70 | 77 | (Y12431) 5S ribosomal protein [Mus musculus] |
| 796 | LIB3602-045-Q6-K1-H5 | 3717978 | BLASTX | 585 | 2.00E−60 | 76 | (Y12431) 5S ribosomal protein [Mus musculus] |
| 797 | LIB3602-108-Q1-K1-E8 | 3717978 | BLASTX | 418 | 4.00E−51 | 77 | (Y12431) 5S ribosomal protein [Mus musculus] |
| 798 | LIB3602-051-Q6-K1-C12 | 3717978 | BLASTX | 366 | 8.00E−35 | 55 | (Y12431) 5S ribosomal protein [Mus musculus] |
| 799 | LIB3602-093-Q6-K6-F4 | 1710551 | BLASTX | 187 | 3.00E−14 | 79 | 60S RIBOSOMAL PROTEIN L39 |
| | | | | | | | >gi\|7440765\|pir\|\|T03943 ribosomal protein L39 - |
| | | | | | | | maize >gi\|1177369\|emb\|CAA64728.1\| (X95458) |
| | | | | | | | ribosomal protein L39 [Zea mays] |
| 800 | LIB3602-084-Q6-K1-F4 | 1710551 | BLASTX | 187 | 4.00E−14 | 79 | 60S RIBOSOMAL PROTEIN L39 |
| | | | | | | | >gi\|7440765\|pir\|\|T03943 ribosomal protein L39 - |
| | | | | | | | maize >gi\|1177369\|emb\|CAA64728.1\| (X95458) |
| | | | | | | | ribosomal protein L39 [Zea mays] |
| 801 | LIB3602-062-Q6-K1-D1 | 1710551 | BLASTX | 167 | 8.00E−12 | 64 | 60S RIBOSOMAL PROTEIN L39 |
| | | | | | | | >gi\|7440765\|pir\|\|T03943 ribosomal protein L39 - |
| | | | | | | | maize >gi\|1177369\|emb\|CAA64728.1\| (X95458) |
| | | | | | | | ribosomal protein L39 [Zea mays] |
| 802 | LIB3602-012-Q6-K1-H11 | 1710551 | BLASTX | 167 | 8.00E−12 | 64 | 60S RIBOSOMAL PROTEIN L39 |
| | | | | | | | >gi\|7440765\|pir\|\|T03943 ribosomal protein L39 - |
| | | | | | | | maize >gi\|1177369\|emb\|CAA64728.1\| (X95458) |
| | | | | | | | ribosomal protein L39 [Zea mays] |
| 803 | LIB3602-040-Q6-K1-B8 | 1710551 | BLASTX | 167 | 8.00E−12 | 64 | 60S RIBOSOMAL PROTEIN L39 |
| | | | | | | | >gi\|7440765\|pir\|\|T03943 ribosomal protein L39 - |
| | | | | | | | maize >gi\|1177369\|emb\|CAA64728.1\| (X95458) |
| | | | | | | | ribosomal protein L39 [Zea mays] |
| 804 | LIB3602-014-Q6-K1-E2 | 1710551 | BLASTX | 167 | 8.00E−12 | 64 | 60S RIBOSOMAL PROTEIN L39 |
| | | | | | | | >gi\|7440765\|pir\|\|T03943 ribosomal protein L39 - |
| | | | | | | | maize >gi\|1177369\|emb\|CAA64728.1\| (X95458) |
| | | | | | | | ribosomal protein L39 [Zea mays] |
| 805 | LIB3602-022-Q6-K1-E5 | 1710551 | BLASTX | 167 | 8.00E−12 | 64 | 60S RIBOSOMAL PROTEIN L39 |
| | | | | | | | >gi\|7440765\|pir\|\|T03943 ribosomal protein L39 - |
| | | | | | | | maize >gi\|1177369\|emb\|CAA64728.1\| (X95458) |
| | | | | | | | ribosomal protein L39 [Zea mays] |
| 806 | LIB3602-032-Q6-K1-G2 | 1710551 | BLASTX | 167 | 8.00E−12 | 64 | 60S RIBOSOMAL PROTEIN L39 |
| | | | | | | | >gi\|7440765\|pir\|\|T03943 ribosomal protein L39 - |
| | | | | | | | maize >gi\|1177369\|emb\|CAA64728.1\| (X95458) |
| | | | | | | | ribosomal protein L39 [Zea mays] |
| 807 | LIB3602-102-Q1-K1-D12 | 1710551 | BLASTX | 167 | 9.00E−12 | 64 | 60S RIBOSOMAL PROTEIN L39 |
| | | | | | | | >gi\|7440765\|pir\|\|T03943 ribosomal protein L39 - |
| | | | | | | | maize >gi\|1177369\|emb\|CAA64728.1\| (X95458) |
| | | | | | | | ribosomal protein L39 [Zea mays] |
| 808 | LIB3602-045-Q6-K1-D8 | 1710551 | BLASTX | 167 | 9.00E−12 | 64 | 60S RIBOSOMAL PROTEIN L39 |
| | | | | | | | >gi\|7440765\|pir\|\|T03943 ribosomal protein L39 - |
| | | | | | | | maize >gi\|1177369\|emb\|CAA64728.1\| (X95458) |
| | | | | | | | ribosomal protein L39 [Zea mays] |
| 809 | LIB3602-055-Q6-K1-E3 | 1710551 | BLASTX | 167 | 9.00E−12 | 64 | 60S RIBOSOMAL PROTEIN L39 |
| | | | | | | | >gi\|7440765\|pir\|\|T03943 ribosomal protein L39 - |
| | | | | | | | maize >gi\|1177369\|emb\|CAA64728.1\| (X95458) |
| | | | | | | | ribosomal protein L39 [Zea mays] |
| 810 | LIB3602-043-Q6-K1-F7 | 7433374 | BLASTX | 1032 | 1.00E−112 | 85 | ferredoxin--NADP+ reductase (EC 1.18.1.2) |
| | | | | | | | precursor - Volvox carteri |
| | | | | | | | >gi\|732532\|gb\|AAB40978.1\| (U22328) ferredoxin- |
| | | | | | | | NADP+ reductase [Volvox carteri] |
| 811 | LIB3602-043-Q6-K1-E3 | 7433374 | BLASTX | 928 | 1.00E−100 | 85 | ferredoxin--NADP+ reductase (EC 1.18.1.2) |
| | | | | | | | precursor - Volvox carteri |
| | | | | | | | >gi\|732532\|gb\|AAB40978.1\| (U22328) ferredoxin- |
| | | | | | | | NADP+ reductase [Volvox carteri] |
| 812 | LIB3602-014-Q6-K1-F3 | 7433374 | BLASTX | 928 | 1.00E−100 | 85 | ferredoxin--NADP+ reductase (EC 1.18.1.2) |
| | | | | | | | precursor - Volvox carteri |
| | | | | | | | >gi\|732532\|gb\|AAB40978.1\| (U22328) ferredoxin- |
| | | | | | | | NADP+ reductase [Volvox carteri] |
| 813 | LIB3602-026-Q6-K1-H1 | 7433374 | BLASTX | 526 | 3.00E−82 | 89 | ferredoxin--NADP+ reductase (EC 1.18.1.2) |
| | | | | | | | precursor - Volvox carteri |
| | | | | | | | >gi\|732532\|gb\|AAB40978.1\| (U22328) ferredoxin- |
| | | | | | | | NADP+ reductase [Volvox carteri] |
| 814 | LIB3602-048-Q6-K1QA-D4 | 7433374 | BLASTX | 759 | 8.00E−81 | 86 | ferredoxin- NADP+ reductase (EC 1.18.1.2) |
| | | | | | | | precursor - Volvox carteri |
| | | | | | | | >gi\|732532\|gb\|AAB40978.1\| (U22328) ferredoxin- |
| | | | | | | | NADP+ reductase [Volvox carteri] |
| 815 | LIB3602-057-Q6-K1-A11 | 7433374 | BLASTX | 709 | 9.00E−75 | 84 | ferredoxin--NADP+ reductase (EC 1.18.1.2) |
| | | | | | | | precursor - Volvox carteri |
| | | | | | | | >gi\|732532\|gb\|AAB40978.1\| (U22328) ferredoxin- |
| | | | | | | | NADP+ reductase [Volvox carteri] |
| 816 | LIB3602-108-Q1-K1-F6 | 7433374 | BLASTX | 571 | 9.00E−59 | 85 | ferredoxin--NADP+ reductase (EC 1.18.1.2) |
| | | | | | | | precursor - Volvox carteri |
| | | | | | | | >gi\|732532\|gb\|AAB40978.1\| (U22328) ferredoxin- |
| | | | | | | | NADP+ reductase [Volvox carteri] |
| 817 | LIB3602-073-Q1-K1-C12 | 7433374 | BLASTX | 565 | 5.00E−58 | 78 | ferredoxin--NADP+ reductase (EC 1.18.1.2) |
| | | | | | | | precursor - Volvox carteri |
| | | | | | | | >gi\|732532\|gb\|AAB40978.1\| (U22328) ferredoxin- |
| | | | | | | | NADP+ reductase [Volvox carteri] |
| 818 | LIB3602-018-Q6-K1-A4 | 7433374 | BLASTX | 420 | 5.00E−41 | 67 | ferredoxin--NADP+ reductase (EC 1.18.1.2) |
| | | | | | | | precursor - Volvox carteri |
| | | | | | | | >gi\|732532\|gb\|AAB40978.1\| (U22328) ferredoxin- |
| | | | | | | | NADP+ reductase [Volvox carteri] |
| 819 | LIB3602-019-Q6-K1-D5 | 7433374 | BLASTX | 294 | 2.00E−26 | 84 | ferredoxin--NADP+ reductase (EC 1.18.1.2) |
| | | | | | | | precursor - Volvox carteri |
| | | | | | | | >gi\|732532\|gb\|AAB40978.1\| (U22328) ferredoxin- |
| | | | | | | | NADP+ reductase [Volvox carteri] |
| 820 | LIB3602-109-Q1-K1-A3 | 7433374 | BLASTX | 166 | 1.00E−11 | 60 | ferredoxin--NADP+ reductase (EC 1.18.1.2) |
| | | | | | | | precursor - Volvox carteri |
| | | | | | | | >gi\|732532\|gb\|AAB40978.1\| (U22328) ferredoxin- |
| | | | | | | | NADP+ reductase [Volvox carteri] |
| 821 | LIB3602-062-Q6-K1-E10 | 6831665 | BLASTX | 705 | 2.00E−74 | 83 | 40S RIBOSOMAL PROTEIN S5 |
| | | | | | | | >gi\|3043428\|emb\|CAA06491.1\| (AJ005346) 40S |
| | | | | | | | ribosomal protein S5 [Cicer arietinum] |
| 822 | LIB3602-002-P1-K6-E10 | 6831665 | BLASTX | 651 | 4.00E−68 | 88 | 40S RIBOSOMAL PROTEIN S5 |
| | | | | | | | >gi\|3043428\|emb\|CAA06491.1\| (AJ005346) 40S |
| | | | | | | | ribosomal protein S5 [Cicer arietinum] |
| 823 | LIB3602-061-Q6-K1-C9 | 6831665 | BLASTX | 642 | 4.00E−67 | 87 | 40S RIBOSOMAL PROTEIN S5 |
| | | | | | | | >gi\|3043428\|emb\|CAA06491.1\| (AJ005346) 40S |
| | | | | | | | ribosomal protein S5 [Cicer arietinum] |
| 824 | LIB3602-120-Q1-K1-B8 | 6831665 | BLASTX | 512 | 4.00E−65 | 84 | 40S RIBOSOMAL PROTEIN S5 |
| | | | | | | | >gi\|3043428\|emb\|CAA06491.1\| (AJ005346) 40S |
| | | | | | | | ribosomal protein S5 [Cicer arietinum] |
| 825 | LIB3602-089-Q6-K6-G12 | 6831665 | BLASTX | 603 | 2.00E−62 | 87 | 40S RIBOSOMAL PROTEIN S5 |
| | | | | | | | >gi\|3043428\|emb\|CAA06491.1\| (AJ005346) 40S |
| | | | | | | | ribosomal protein S5 [Cicer arietinum] |
| 826 | LIB3602-120-Q1-K1-C11 | 6831665 | BLASTX | 422 | 9.00E−60 | 91 | 40S RIBOSOMAL PROTEIN S5 |
| | | | | | | | >gi\|3043428\|emb\|CAA06491.1\| (AJ005346) 40S |
| | | | | | | | ribosomal protein S5 [Cicer arietinum] |
| 827 | LIB3602-073-Q1-K1-F1 | 6831665 | BLASTX | 500 | 2.00E−50 | 86 | 40S RIBOSOMAL PROTEIN S5 |
| | | | | | | | >gi\|3043428\|emb\|CAA06491.1\| (AJ005346) 40S |
| | | | | | | | ribosomal protein S5 [Cicer arietinum] |
| 828 | LIB3602-093-Q6-K6-E4 | 6831665 | BLASTX | 453 | 1.00E−46 | 80 | 40S RIBOSOMAL PROTEIN S5 |
| | | | | | | | >gi\|3043428\|emb\|CAA06491.1\| (AJ005346) 40S |
| | | | | | | | ribosomal protein S5 [Cicer arietinum] |
| 829 | LIB3602-102-Q1-K1-E3 | 6831665 | BLASTX | 310 | 7.00E−46 | 92 | 40S RIBOSOMAL PROTEIN S5 |
| | | | | | | | >gi\|3043428\|emb\|CAA06491.1\| (AJ005346) 40S |
| | | | | | | | ribosomal protein S5 [Cicer arietinum] |
| 830 | LIB3602-042-Q6-K1-D12 | 6831665 | BLASTX | 458 | 1.00E−45 | 89 | 40S RIBOSOMAL PROTEIN S5 |
| | | | | | | | >gi\|3043428\|emb\|CAA06491.1\| (AJ005346) 40S |
| | | | | | | | ribosomal protein S5 [Cicer arietinum] |
| 831 | LIB3602-003-Q1-K1-D1 | 6831665 | BLASTX | 387 | 2.00E−37 | 61 | 40S RIBOSOMAL PROTEIN S5 |
| | | | | | | | >gi\|3043428\|emb\|CAA06491.1\| (AJ005346) 40S |
| | | | | | | | ribosomal protein S5 [Cicer arietinum] |
| 832 | LIB3602-001-P1-K6-E10 | 4582468 | BLASTX | 827 | 9.00E−89 | 88 | (AC007071) 40S ribosomal protein; contains C- |
| | | | | | | | terminal domain [Arabidopsis thaliana] |
| 833 | LIB3602-018-Q6-K1-E3 | 4582468 | BLASTX | 733 | 9.00E−78 | 84 | (AC007071) 40S ribosomal protein; contains C- |
| | | | | | | | terminal domain [Arabidopsis thaliana] |
| 834 | LIB3602-044-Q6-K1-D7 | 4582468 | BLASTX | 725 | 7.00E−77 | 89 | (AC007071) 40S ribosomal protein; contains C- |
| | | | | | | | terminal domain [Arabidopsis thaliana] |
| 835 | LIB3602-088-Q6-K6-G12 | 4582468 | BLASTX | 693 | 5.00E−73 | 84 | (AC007071) 40S ribosomal protein; contains C- |
| | | | | | | | terminal domain [Arabidopsis thaliana] |
| 836 | LIB3602-118-Q1-K1-G12 | 4582468 | BLASTX | 551 | 2.00E−71 | 85 | (AC007071) 40S ribosomal protein; contains C- |
| | | | | | | | terminal domain [Arabidopsis thaliana] |
| 837 | LIB3602-007-Q1-K1-F1 | 4582468 | BLASTX | 584 | 3.00E−62 | 81 | (AC007071) 40S ribosomal protein; contains C- |
| | | | | | | | terminal domain [Arabidopsis thaliana] |
| 838 | LIB3602-038-Q6-K1-D4 | 4582468 | BLASTX | 484 | 1.00E−48 | 85 | (AC007071) 40S ribosomal protein; contains C- |
| | | | | | | | terminal domain [Arabidopsis thaliana] |
| 839 | LIB3602-030-Q6-K1-G10 | 4582468 | BLASTX | 349 | 6.00E−33 | 80 | (AC007071) 40S ribosomal protein; contains C- |
| | | | | | | | terminal domain [Arabidopsis thaliana] |
| 840 | LIB3602-019-Q6-K1-H6 | 4582468 | BLASTX | 341 | 5.00E−32 | 79 | (AC007071) 40S ribosomal protein; contains C- |
| | | | | | | | terminal domain [Arabidopsis thaliana] |
| 841 | LIB3602-048-Q6-K1QA-F6 | 4582468 | BLASTX | 295 | 4.00E−27 | 82 | (AC007071) 40S ribosomal protein; contains C- |
| | | | | | | | terminal domain [Arabidopsis thaliana] |
| 842 | LIB3602-015-Q6-K1-B4 | 4582468 | BLASTX | 210 | 1.00E−16 | 76 | (AC007071) 40S ribosomal protein; contains C- |
| | | | | | | | terminal domain [Arabidopsis thaliana] |
| 843 | LIB3602-015-Q6-K1-A2 | 5902596 | BLASTX | 443 | 1.00E−43 | 58 | (AF110786) light harvesting complex a protein |
| | | | | | | | [Volvox carteri f. nagariensis] |
| 844 | LIB3602-046-Q6-K1-A9 | 5902596 | BLASTX | 423 | 2.00E−41 | 57 | (AF110786) light harvesting complex a protein |
| | | | | | | | [Volvox carteri f. nagariensis] |
| 845 | LIB3602-027-Q6-K1-D2 | 5902596 | BLASTX | 344 | 4.00E−32 | 46 | (AF110786) light harvesting complex a protein |
| | | | | | | | [Volvox carteri f. nagariensis] |
| 846 | LIB3602-059-Q6-K1-A12 | 5902596 | BLASTX | 338 | 2.00E−31 | 56 | (AF110786) light harvesting complex a protein |
| | | | | | | | [Volvox carteri f. nagariensis] |
| 847 | LIB3602-007-Q1-K1-E5 | 5902596 | BLASTX | 336 | 2.00E−31 | 56 | (AF110786) light harvesting complex a protein |
| | | | | | | | [Volvox carteri f. nagariensis] |
| 848 | LIB3602-005-Q1-K1-D6 | 5902596 | BLASTX | 260 | 2.00E−22 | 42 | (AF110786) light harvesting complex a protein |
| | | | | | | | [Volvox carteri f. nagariensis] |
| 849 | LIB3602-057-Q6-K1-H11 | 5902596 | BLASTX | 211 | 1.00E−17 | 58 | (AF110786) light harvesting complex a protein |
| | | | | | | | [Volvox carteri f. nagariensis] |
| 850 | LIB3602-076-Q6-K6-E11 | 5902596 | BLASTX | 207 | 1.00E−16 | 67 | (AF110786) light harvesting complex a protein |
| | | | | | | | [Volvox carteri f. nagariensis] |
| 851 | LIB3602-095-Q6-K6-B3 | 5902596 | BLASTX | 206 | 4.00E−16 | 57 | (AF110786) light harvesting complex a protein |
| | | | | | | | [Volvox carteri f. nagariensis] |
| 852 | LIB3602-016-Q6-K1-E3 | 5902596 | BLASTX | 205 | 5.00E−16 | 67 | (AF110786) light harvesting complex a protein |
| | | | | | | | [Volvox carteri f. nagariensis] |
| 853 | LIB3602-018-Q6-K1-F11 | 5902596 | BLASTX | 194 | 1.00E−14 | 67 | (AF110786) light harvesting complex a protein |
| | | | | | | | [Volvox carteri f. nagariensis] |
| 854 | LIB3602-072-Q1-K1-F5 | 6094476 | BLASTX | 559 | 3.00E−69 | 69 | THIAZOLE BIOSYNTHETIC ENZYME |
| | | | | | | | PRECURSOR >gi\|7446894\|pir\|\|T10474 thiamin |
| | | | | | | | biosynthesis protein thi1 - sweet orange |
| | | | | | | | >gi\|2582665\|emb\|CAB05370.1\| (Z82983) thi |
| | | | | | | | [Citrus sinensis] |
| 855 | LIB3602-062-Q6-K1-H3 | 6094476 | BLASTX | 650 | 5.00E−68 | 68 | THIAZOLE BIOSYNTHETIC ENZYME |
| | | | | | | | PRECURSOR >gi\|7446894\|pir\|\|T10474 thiamin |
| | | | | | | | biosynthesis protein thi1 - sweet orange |
| | | | | | | | >gi\|2582665\|emb\|CAB05370.1\| (Z82983) thi |
| | | | | | | | [Citrus sinensis] |
| 856 | LIB3602-059-Q6-K1-C7 | 6094476 | BLASTX | 622 | 9.00E−65 | 67 | THIAZOLE BIOSYNTHETIC ENZYME |
| | | | | | | | PRECURSOR >gi\|7446894\|pir\|\|T10474 thiamin |
| | | | | | | | biosynthesis protein thi1 - sweet orange |
| | | | | | | | >gi\|2582665\|emb\|CAB05370.1\| (Z82983) thi |
| | | | | | | | [Citrus sinensis] |
| 857 | LIB3602-065-Q1-K6-B5 | 6094476 | BLASTX | 598 | 6.00E−62 | 66 | THIAZOLE BIOSYNTHETIC ENZYME |
| | | | | | | | PRECURSOR >gi\|7446894\|pir\|\|T10474 thiamin |
| | | | | | | | biosynthesis protein thi1 - sweet orange |
| | | | | | | | >gi\|2582665\|emb\|CAB05370.1 (Z82983) thi |
| | | | | | | | [Citrus sinensis] |
| 858 | LIB3602-103-Q1-K1-G3 | 6094476 | BLASTX | 585 | 2.00E−60 | 66 | THIAZOLE BIOSYNTHETIC ENZYME |
| | | | | | | | PRECURSOR >gi\|7446894\|pir\|\|T10474 thiamin |
| | | | | | | | biosynthesis protein thi1 - sweet orange |
| | | | | | | | >gi\|2582665\|emb\|CAB05370.1\| (Z82983) thi |
| | | | | | | | [Citrus sinensis] |
| 859 | LIB3602-111-Q1-K1-D5 | 6094476 | BLASTX | 482 | 3.00E−59 | 72 | THIAZOLE BIOSYNTHETIC ENZYME |
| | | | | | | | PRECURSOR >gi\|7446894\|pir\|\|T10474 thiamin |
| | | | | | | | biosynthesis protein thi1 - sweet orange |
| | | | | | | | >gi\|2582665\|emb\|CAB05370.1\| (Z82983) thi |
| | | | | | | | [Citrus sinensis] |
| 860 | LIB3602-044-Q6-K1-G8 | 6094476 | BLASTX | 553 | 1.00E−56 | 70 | THIAZOLE BIOSYNTHETIC ENZYME |
| | | | | | | | PRECURSOR >gi\|7446894\|pir\|\|T10474 thiamin |
| | | | | | | | biosynthesis protein thi1 - sweet orange |
| | | | | | | | >gi\|2582665\|emb\|CAB05370.1\| (Z82983) thi |
| | | | | | | | [Citrus sinensis] |
| 861 | LIB3602-030-Q6-K1-G5 | 6094476 | BLASTX | 533 | 2.00E−54 | 65 | THIAZOLE BIOSYNTHETIC ENZYME |
| | | | | | | | PRECURSOR >gi\|7446894\|pir\|\|T10474 thiamin |
| | | | | | | | biosynthesis protein thi1 - sweet orange |
| | | | | | | | >gi\|2582665\|emb\|CAB05370.1\| (Z82983) thi |
| | | | | | | | [Citrus sinensis] |
| 862 | LIB3602-054-Q6-K1-B11 | 6094476 | BLASTX | 448 | 2.00E−44 | 73 | THIAZOLE BIOSYNTHETIC ENZYME |
| | | | | | | | PRECURSOR >gi\|7446894\|pir\|\|T10474 thiamin |
| | | | | | | | biosynthesis protein thi1 - sweet orange |
| | | | | | | | >gi\|2582665\|emb\|CAB05370.1\| (Z82983) thi |
| | | | | | | | [Citrus sinensis] |
| 863 | LIB3602-107-Q1-K1-G8 | 6094476 | BLASTX | 160 | 2.00E−10 | 73 | THIAZOLE BIOSYNTHETIC ENZYME |
| | | | | | | | PRECURSOR >gi\|7446894\|pir\|\|T10474 thiamin |
| | | | | | | | biosynthesis protein thi1 - sweet orange |
| | | | | | | | >gi\|2582665\|emb\|CAB05370.1\| (Z82983) thi |
| | | | | | | | [Citrus sinensis] |
| 864 | LIB3602-008-Q6-K1-H7 | 1173024 | BLASTX | 364 | 1.00E−34 | 66 | 60S RIBOSOMAL PROTEIN L31 |
| | | | | | | | >gi\|99421\|pir\|\|S24989 ribosomal protein L31.e, |
| | | | | | | | cytosolic - Chlamydomonas reinhardtii |
| | | | | | | | >gi\|18209\|emb\|CAA47044.1\| (X66413) ribosomal |
| | | | | | | | protein L31 [Chlamydomonas reinhardtii] |
| 865 | LIB3602-071-Q1-K1-F2 | 1173024 | BLASTX | 360 | 4.00E−34 | 65 | 60S RIBOSOMAL PROTEIN L31 |
| | | | | | | | >gi\|99421\|pir\|\|S24989 ribosomal protein L31.e, |
| | | | | | | | cytosolic - Chlamydomonas reinhardtii |
| | | | | | | | >gi\|18209\|emb\|CAA47044.1\| (X66413) ribosomal |
| | | | | | | | protein L31 [Chlamydomonas reinhardtii] |
| 866 | LIB3602-095-Q6-K6-B11 | 1173024 | BLASTX | 360 | 5.00E−34 | 65 | 60S RIBOSOMAL PROTEIN L31 |
| | | | | | | | >gi\|99421\|pir\|\|S24989 ribosomal protein L31.e, |
| | | | | | | | cytosolic - Chlamydomonas reinhardtii |
| | | | | | | | >gi\|18209\|emb\|CAA47044.1\| (X66413) ribosomal |
| | | | | | | | protein L31 [Chlamydomonas reinhardtii] |
| 867 | LIB3602-087-Q6-K1-C1 | 1173024 | BLASTX | 358 | 8.00E−34 | 67 | 60S RIBOSOMAL PROTEIN L31 |
| | | | | | | | >gi\|99421\|pir\|\|S24989 ribosomal protein L31.e, |
| | | | | | | | cytosolic - Chlamydomonas reinhardtii |
| | | | | | | | >gi\|18209\|emb\|CAA47044.1\| (X66413) ribosomal |
| | | | | | | | protein L31 [Chlamydomonas reinhardtii] |
| 868 | LIB3602-067-Q1-K1-C11 | 1173024 | BLASTX | 358 | 8.00E−34 | 67 | 60S RIBOSOMAL PROTEIN L31 |
| | | | | | | | >gi\|99421\|pir\|\|S24989 ribosomal protein L31.e, |
| | | | | | | | cytosolic - Chlamydomonas reinhardtii |
| | | | | | | | >gi\|18209\|emb\|CAA47044.1\| (X66413) ribosomal |
| | | | | | | | protein L31 [Chlamydomonas reinhardtii] |
| 869 | LIB3602-105-Q1-K1-D2 | 1173024 | BLASTX | 342 | 7.00E−32 | 66 | 60S RIBOSOMAL PROTEIN L31 |
| | | | | | | | >gi\|99421\|pir\|\|S24989 ribosomal protein L31.e, |
| | | | | | | | cytosolic - Chlamydomonas reinhardtii |
| | | | | | | | >gi\|18209\|emb\|CAA47044.1\| (X66413) ribosomal |
| | | | | | | | protein L31 [Chlamydomonas reinhardtii] |
| 870 | LIB3602-105-Q1-K1-C12 | 1173024 | BLASTX | 340 | 1.00E−31 | 62 | 60S RIBOSOMAL PROTEIN L31 |
| | | | | | | | >gi\|99421\|pir\|\|S24989 ribosomal protein L31.e, |
| | | | | | | | cytosolic - Chlamydomonas reinhardtii |
| | | | | | | | >gi\|18209\|emb\|CAA47044.1\| (X66413) ribosomal |
| | | | | | | | protein L31 [Chlamydomonas reinhardtii] |
| 871 | LIB3602-020-Q6-K1-D9 | 1173024 | BLASTX | 269 | 1.00E−23 | 67 | 60S RIBOSOMAL PROTEIN L31 |
| | | | | | | | >gi\|99421\|pir\|\|S24989 ribosomal protein L31.e, |
| | | | | | | | cytosolic - Chlamydomonas reinhardtii |
| | | | | | | | >gi\|18209\|emb\|CAA47044.1\| (X66413) ribosomal |
| | | | | | | | protein L31 [Chlamydomonas reinhardtii] |
| 872 | LIB3602-057-Q6-K1-E11 | 1173024 | BLASTX | 221 | 7.00E−18 | 51 | 60S RIBOSOMAL PROTEIN L31 |
| | | | | | | | >gi\|99421\|pir\|\|S24989 ribosomal protein L31.e, |
| | | | | | | | cytosolic - Chlamydomonas reinhardtii |
| | | | | | | | >gi\|18209\|emb\|CAA47044.1\| (X66413) ribosomal |
| | | | | | | | protein L31 [Chlamydomonas reinhardtii] |
| 873 | LIB3602-022-Q6-K1-E6 | 1173024 | BLASTX | 177 | 9.00E−13 | 48 | 60S RIBOSOMAL PROTEIN L31 |
| | | | | | | | >gi\|99421\|pir\|\|S24989 ribosomal protein L31.e, |
| | | | | | | | cytosolic - Chlamydomonas reinhardtii |
| | | | | | | | >gi\|18209\|emb\|CAA47044.1\| (X66413) ribosomal |
| | | | | | | | protein L31 [Chlamydomonas reinhardtii] |
| 874 | LIB3602-047-Q6-K1-A9 | 7269837 | BLASTX | 261 | 2.00E−22 | 84 | (AL161574) RIBOSOMAL PROTEIN S30 |
| | | | | | | | homolog [Arabidopsis thaliana] |
| 875 | LIB3602-043-Q6-K1-B4 | 7269837 | BLASTX | 261 | 2.00E−22 | 84 | (AL161574) RIBOSOMAL PROTEIN S30 |
| | | | | | | | homolog [Arabidopsis thaliana] |
| 876 | LIB3602-042-Q6-K1-F1 | 7269837 | BLASTX | 261 | 2.00E−22 | 84 | (AL161574) RIBOSOMAL PROTEIN S30 |
| | | | | | | | homolog [Arabidopsis thaliana] |
| 877 | LIB3602-032-Q6-K1-H4 | 7269837 | BLASTX | 261 | 2.00E−22 | 84 | (AL161574) RIBOSOMAL PROTEIN S30 |
| | | | | | | | homolog [Arabidopsis thaliana] |
| 878 | LIB3602-058-Q6-K1-B12 | 7269837 | BLASTX | 261 | 2.00E−22 | 84 | (AL161574) RIBOSOMAL PROTEIN S30 |
| | | | | | | | homolog [Arabidopsis thaliana] |
| 879 | LIB3602-019-Q6-K1-C8 | 7269837 | BLASTX | 258 | 3.00E−22 | 84 | (AL161574) RIBOSOMAL PROTEIN S30 |
| | | | | | | | homolog [Arabidopsis thaliana] |
| 880 | LIB3602-111-Q1-K1-G2 | 7269837 | BLASTX | 258 | 3.00E−22 | 83 | (AL161574) RIBOSOMAL PROTEIN S30 |
| | | | | | | | homolog [Arabidopsis thaliana] |
| 881 | LIB3602-109-Q1-K1-B11 | 7269837 | BLASTX | 252 | 2.00E−21 | 83 | (AL161574) RIBOSOMAL PROTEIN S30 |
| | | | | | | | homolog [Arabidopsis thaliana] |
| 882 | LIB3602-032-Q6-K1-A4 | 7269837 | BLASTX | 170 | 6.00E−12 | 78 | (AL161574) RIBOSOMAL PROTEIN S30 |
| | | | | | | | homolog [Arabidopsis thaliana] |
| 883 | LIB3602-046-Q6-K1-F8 | 7269837 | BLASTX | 156 | 3.00E−10 | 65 | (AL161574) RIBOSOMAL PROTEIN S30 |
| | | | | | | | homolog [Arabidopsis thaliana] |
| 884 | LIB3602-104-Q1-K1-G6 | 133808 | BLASTX | 494 | 1.00E−49 | 77 | 40S RIBOSOMAL PROTEIN S16 |
| | | | | | | | >gi\|70921\|pir\|\|R3YL16 ribosomal protein S16, |
| | | | | | | | cytosolic - large-leaved lupine |
| | | | | | | | >gi\|19512\|emb\|CAA36068.1\| (X51766) rps16 gene |
| | | | | | | | product (AA 1-145) [Lupinus polyphyllus] |
| 885 | LIB3602-113-Q1-K1-C8 | 133808 | BLASTX | 445 | 5.00E−44 | 81 | 40S RIBOSOMAL PROTEIN S16 |
| | | | | | | | >gi\|70921\|pir\|\|R3YL16 ribosomal protein S16, |
| | | | | | | | cytosolic - large-leaved lupine |
| | | | | | | | >gi\|19512\|emb\|CAA36068.1\| (X51766) rps16 gene |
| | | | | | | | product (AA 1-145) [Lupinus polyphyllus] |
| 886 | LIB3602-065-Q1-K6-A4 | 133808 | BLASTX | 434 | 9.00E−43 | 83 | 40S RIBOSOMAL PROTEIN S16 |
| | | | | | | | >gi\|70921\|pir\|\|R3YL16 ribosomal protein S16, |
| | | | | | | | cytosolic - large-leaved lupine |
| | | | | | | | >gi\|19512\|emb\|CAA36068.1\| (X51766) rps16 gene |
| | | | | | | | product (AA 1-145) [Lupinus polyphyllus] |
| 887 | LIB3602-120-Q1-K1-C8 | 133808 | BLASTX | 270 | 6.00E−41 | 87 | 40S RIBOSOMAL PROTEIN S16 |
| | | | | | | | >gi\|70921\|pir\|\|R3YL16 ribosomal protein S16, |
| | | | | | | | cytosolic - large-leaved lupine |
| | | | | | | | >gi\|19512\|emb\|CAA36068.1\| (X51766) rps16 gene |
| | | | | | | | product (AA 1-145) [Lupinus polyphyllus] |
| 888 | LIB3602-052-Q6-K1-G8 | 133808 | BLASTX | 354 | 9.00E−39 | 87 | 40S RIBOSOMAL PROTEIN S16 |
| | | | | | | | >gi\|70921\|pir\|\|R3YL16 ribosomal protein S16, |
| | | | | | | | cytosolic - large-leaved lupine |
| | | | | | | | >gi\|19512\|emb\|CAA36068.1\| (X51766) rps16 gene |
| | | | | | | | product (AA 1-145) [Lupinus polyphyllus] |
| 889 | LIB3602-027-Q6-K1-F8 | 133808 | BLASTX | 365 | 9.00E−35 | 86 | 40S RIBOSOMAL PROTEIN S16 |
| | | | | | | | >gi\|70921\|pir\|\|R3YL16 ribosomal protein S16, |
| | | | | | | | cytosolic - large-leaved lupine |
| | | | | | | | >gi\|19512\|emb\|CAA36068.1\| (X51766) rps16 gene |
| | | | | | | | product (AA 1-145) [Lupinus polyphyllus] |
| 890 | LIB3602-042-Q6-K1-A8 | 133808 | BLASTX | 354 | 2.00E−33 | 87 | 40S RIBOSOMAL PROTEIN S16 |
| | | | | | | | >gi\|70921\|pir\|\|R3YL16 ribosomal protein S16, |
| | | | | | | | cytosolic - large-leaved lupine |
| | | | | | | | >gi\|19512\|emb\|CAA36068.1\| (X51766) rps16 gene |
| | | | | | | | product (AA 1-145) [Lupinus polyphyllus] |
| 891 | LIB3602-088-Q6-K6-E2 | 133808 | BLASTX | 240 | 2.00E−31 | 80 | 40S RIBOSOMAL PROTEIN S16 |
| | | | | | | | >gi\|70921\|pir\|\|R3YL16 ribosomal protein S16, |
| | | | | | | | cytosolic - large-leaved lupine |
| | | | | | | | >gi\|19512\|emb\|CAA36068.1\| (X51766) rps16 gene |
| | | | | | | | product (AA 1-145) [Lupinus polyphyllus] |
| 892 | LIB3602-076-Q6-K6-A9 | 133808 | BLASTX | 265 | 7.00E−23 | 87 | 40S RIBOSOMAL PROTEIN S16 |
| | | | | | | | >gi\|70921\|pir\|\|R3YL16 ribosomal protein S16, |
| | | | | | | | cytosolic - large-leaved lupine |
| | | | | | | | >gi\|19512\|emb\|CAA36068.1\| (X51766) rps16 gene |
| | | | | | | | product (AA 1-145) [Lupinus polyphyllus] |
| 893 | LIB3602-095-Q6-K6-A2 | 133808 | BLASTX | 256 | 3.00E−22 | 90 | 40S RIBOSOMAL PROTEIN S16 |
| | | | | | | | >gi\|70921\|pir\|\|R3YL16 ribosomal protein S16, |
| | | | | | | | cytosolic - large-leaved lupine |
| | | | | | | | >gi\|19512\|emb\|CAA36068.1\| (X51766) rps16 gene |
| | | | | | | | product (AA 1-145) [Lupinus polyphyllus] |
| 894 | LIB3602-061-Q6-K1-A11 | 130263 | BLASTX | 407 | 1.00E−39 | 76 | PLASTOCYANIN >gi\|65845\|pir\|CUKLCF |
| | | | | | | | plastocyanin - Chlorella fusca |
| 895 | LIB3602-113-Q1-K1-E2 | 130263 | BLASTX | 407 | 2.00E−39 | 76 | PLASTOCYANIN >gi\|65845\|pir\|\|CUKLCF |
| | | | | | | | plastocyanin - Chlorella fusca |
| 896 | LIB3602-035-Q1-K1-A9 | 130263 | BLASTX | 407 | 2.00E−39 | 76 | PLASTOCYANIN >gi\|65845\|pir\|\|CUKLCF |
| | | | | | | | plastocyanin - Chlorella fusca |
| 897 | LIB3602-054-Q6-K1-D4 | 130263 | BLASTX | 401 | 6.00E−39 | 75 | PLASTOCYANIN >gi\|65845\|pir\|\|CUKLCF |
| | | | | | | | plastocyanin - Chlorella fusca |
| 898 | LIB3602-092-Q6-K6-G3 | 130263 | BLASTX | 399 | 2.00E−38 | 75 | PLASTOCYANIN >gi\|65845\|pir\|\|CUKLCF |
| | | | | | | | plastocyanin - Chlorella fusca |
| 899 | LIB3602-089-Q6-K6-A3 | 130263 | BLASTX | 397 | 2.00E−38 | 75 | PLASTOCYANIN >gi\|65845\|pir\|\|CUKLCF |
| | | | | | | | plastocyanin - Chlorella fusca |
| 900 | LIB3602-073-Q1-K1-A5 | 130263 | BLASTX | 323 | 4.00E−34 | 78 | PLASTOCYANIN >gi\|65845\|pir\|\|CUKLCF |
| | | | | | | | plastocyanin - Chlorella fusca |
| 901 | LIB3602-087-Q6-K1-G9 | 130263 | BLASTX | 232 | 5.00E−32 | 68 | PLASTOCYANIN >gi\|65845\|pir\|\|CUKLCF |
| | | | | | | | plastocyanin - Chlorella fusca |
| 902 | LIB3602-034-Q6-K1-A9 | 130263 | BLASTX | 302 | 2.00E−27 | 76 | PLASTOCYANIN >gi\|65845\|pir\|\|CUKLCF |
| | | | | | | | plastocyanin - Chlorella fusca |
| 903 | LIB3602-062-Q6-K1-C6 | 130263 | BLASTX | 232 | 3.00E−19 | 71 | PLASTOCYANIN >gi\|65845\|pir\|\|CUKLCF |
| | | | | | | | plastocyanin - Chlorella fusca |
| 904 | LIB3602-078-Q6-K6-E10 | 7441093 | BLASTX | 500 | 2.00E−50 | 72 | ribosomal protein L32, cytosolic - Arabidopsis |
| | | | | | | | thaliana >gi\|5816996\|emb\|CAB53651.1\| |
| | | | | | | | (AL110123) ribosomal protein L32-like protein |
| | | | | | | | [Arabidopsis thaliana] |
| | | | | | | | >gi\|7268562\|emb\|CAB78812.1\| (AL161547) |
| | | | | | | | ribosomal protein L32-like protein [Arabidopsis |
| | | | | | | | thaliana] |
| 905 | LIB3602-053-Q6-K1-F1 | 7441093 | BLASTX | 500 | 2.00E−50 | 72 | ribosomal protein L32, cytosolic - Arabidopsis |
| | | | | | | | thaliana >gi\|5816996\|emb\|CAB53651.1\| |
| | | | | | | | (AL110123) ribosomal protein L32-like protein |
| | | | | | | | [Arabidopsis thaliana] |
| | | | | | | | >gi\|7268562\|emb\|CAB78812.1\| (AL161547) |
| | | | | | | | ribosomal protein L32-like protein [Arabidopsis |
| | | | | | | | thaliana] |
| 906 | LIB3602-066-Q1-K6-G5 | 7441093 | BLASTX | 492 | 2.00E−49 | 72 | ribosomal protein L32, cytosolic - Arabidopsis |
| | | | | | | | thaliana >gi\|5816996\|emb\|CAB53651.1\| |
| | | | | | | | (AL110123) ribosomal protein L32-like protein |
| | | | | | | | [Arabidopsis thaliana] |
| | | | | | | | >gi\|7268562\|emb\|CAB78812.1\| (AL161547) |
| | | | | | | | ribosomal protein L32-like protein [Arabidopsis |
| | | | | | | | thaliana] |
| 907 | LIB3602-077-Q6-K6-G8 | 7441093 | BLASTX | 373 | 5.00E−45 | 73 | ribosomal protein L32, cytosolic - Arabidopsis |
| | | | | | | | thaliana >gi\|5816996\|emb\|CAB53651.1\| |
| | | | | | | | (AL110123) ribosomal protein L32-like protein |
| | | | | | | | [Arabidopsis thaliana] |
| | | | | | | | >gi\|7268562\|emb\|CAB78812.1\| (AL161547) |
| | | | | | | | ribosomal protein L32-like protein [Arabidopsis |
| | | | | | | | thaliana] |
| 908 | LIB3602-040-Q6-K1-A12 | 7441093 | BLASTX | 452 | 6.00E−45 | 77 | ribosomal protein L32, cytosolic - Arabidopsis |
| | | | | | | | thaliana >gi\|5816996\|emb\|CAB53651.1\| |
| | | | | | | | (AL110123) ribosomal protein L32-like protein |
| | | | | | | | [Arabidopsis thaliana] |
| | | | | | | | >gi\|7268562\|emb\|CAB78812.1\| (AL161547) |
| | | | | | | | ribosomal protein L32-like protein [Arabidopsis |
| | | | | | | | thaliana] |
| 909 | LIB3602-003-Q1-K1-C10 | 7441093 | BLASTX | 356 | 9.00E−34 | 73 | ribosomal protein L32, cytosolic - Arabidopsis |
| | | | | | | | thaliana >gi\|5816996\|emb\|CAB53651.1\| |
| | | | | | | | (AL110123) ribosomal protein L32-like protein |
| | | | | | | | [Arabidopsis thaliana] |
| | | | | | | | >gi\|7268562\|emb\|CAB78812.1\| (AL161547) |
| | | | | | | | ribosomal protein L32-like protein [Arabidopsis |
| | | | | | | | thaliana] |
| 910 | LIB3602-065-Q1-K6-D6 | 7441093 | BLASTX | 278 | 3.00E−33 | 70 | ribosomal protein L32, cytosolic - Arabidopsis |
| | | | | | | | thaliana >gi\|5816996\|emb\|CAB53651.1\| |
| | | | | | | | (AL110123) ribosomal protein L32-like protein |
| | | | | | | | [Arabidopsis thaliana] |
| | | | | | | | >gi\|7268562\|emb\|CAB78812.1\| (AL161547) |
| | | | | | | | ribosomal protein L32-like protein [Arabidopsis |
| | | | | | | | thaliana] |
| 911 | LIB3602-003-Q1-K1-C11 | 7441093 | BLASTX | 283 | 3.00E−25 | 67 | ribosomal protein L32, cytosolic - Arabidopsis |
| | | | | | | | thaliana >gi\|5816996\|emb\|CAB53651.1\| |
| | | | | | | | (AL110123) ribosomal protein L32-like protein |
| | | | | | | | [Arabidopsis thaliana] |
| | | | | | | | >gi\|7268562\|emb\|CAB78812.1\| (AL161547) |
| | | | | | | | ribosomal protein L32-like protein [Arabidopsis |
| | | | | | | | thaliana] |
| 912 | LIB3602-032-Q6-K1-E2 | 7441093 | BLASTX | 201 | 1.00E−15 | 75 | ribosomal protein L32, cytosolic - Arabidopsis |
| | | | | | | | thaliana >gi\|5816996\|emb\|CAB53651.1\| |
| | | | | | | | (AL110123) ribosomal protein L32-like protein |
| | | | | | | | [Arabidopsis thaliana] |
| | | | | | | | >gi\|7268562\|emb\|CAB78812.1\| (AL161547) |
| | | | | | | | ribosomal protein L32-like protein [Arabidopsis |
| | | | | | | | thaliana] |
| 913 | LIB3602-043-Q6-K1-A12 | 7441093 | BLASTX | 199 | 1.00E−15 | 76 | ribosomal protein L32, cytosolic - Arabidopsis |
| | | | | | | | thaliana >gi\|5816996\|emb\|CAB53651.1\| |
| | | | | | | | (AL110123) ribosomal protein L32-like protein |
| | | | | | | | [Arabidopsis thaliana] |
| | | | | | | | >gi\|7268562\|emb\|CAB78812.1\| (AL161547) |
| | | | | | | | ribosomal protein L32-like protein [Arabidopsis |
| | | | | | | | thaliana] |
| 914 | LIB3602-077-Q6-K6-E8 | 3914685 | BLASTX | 563 | 9.00E−58 | 69 | 60S RIBOSOMAL PROTEIN L17 |
| | | | | | | | >gi\|7440981\|pir\|\|T01410 ribosomal protein L17 - |
| | | | | | | | maize >gi\|2668748\|gb\|AAB88619.1\| (AF034948) |
| | | | | | | | ribosomal protein L17 [Zea mays] |
| 915 | LIB3602-058-Q6-K1-A8 | 3914685 | BLASTX | 556 | 5.00E−57 | 71 | 60S RIBOSOMAL PROTEIN L17 |
| | | | | | | | >gi\|7440981\|pir\|\|T01410 ribosomal protein L17 - |
| | | | | | | | maize >gi\|2668748\|gb\|AAB88619.1\| (AF034948) |
| | | | | | | | ribosomal protein L17 [Zea mays] |
| 916 | LIB3602-073-Q1-K1-G2 | 3914685 | BLASTX | 556 | 6.00E−57 | 71 | 60S RIBOSOMAL PROTEIN L17 |
| | | | | | | | >gi\|7440981\|pir\|\|T01410 ribosomal protein L17 - |
| | | | | | | | maize >gi\|2668748\|gb\|AAB88619.1\| (AF034948) |
| | | | | | | | ribosomal protein L17 [Zea mays] |
| 917 | LIB3602-028-Q6-K1-E6 | 3914685 | BLASTX | 545 | 1.00E−55 | 72 | 60S RIBOSOMAL PROTEIN L17 |
| | | | | | | | >gi\|7440981\|pir\|\|T01410 ribosomal protein L17 - |
| | | | | | | | maize >gi\|2668748\|gb\|AAB88619.1\| (AF034948) |
| | | | | | | | ribosomal protein L17 [Zea mays] |
| 918 | LIB3602-102-Q1-K1-G3 | 3914685 | BLASTX | 542 | 2.00E−55 | 72 | 60S RIBOSOMAL PROTEIN L17 |
| | | | | | | | >gi\|7440981\|pir\|\|T01410 ribosomal protein L17 - |
| | | | | | | | maize >gi\|2668748\|gb\|AAB88619.1\| (AF034948) |
| | | | | | | | ribosomal protein L17 [Zea mays] |
| 919 | LIB3602-041-Q6-K1-E2 | 3914685 | BLASTX | 542 | 2.00E−55 | 72 | 60S RIBOSOMAL PROTEIN L17 |
| | | | | | | | >gi\|7440981\|pir\|\|T01410 ribosomal protein L17 - |
| | | | | | | | maize >gi\|2668748\|gb\|AAB88619.1\| (AF034948) |
| | | | | | | | ribosomal protein L17 [Zea mays] |
| 920 | LIB3602-079-Q6-K6-F1 | 3914685 | BLASTX | 542 | 3.00E−55 | 72 | 60S RIBOSOMAL PROTEIN L17 |
| | | | | | | | >gi\|7440981\|pir\|\|T01410 ribosomal protein L17 - |
| | | | | | | | maize >gi\|2668748\|gb\|AAB88619.1\| (AF034948) |
| | | | | | | | ribosomal protein L17 [Zea mays] |
| 921 | LIB3602-088-Q6-K6-C3 | 3914685 | BLASTX | 495 | 3.00E−51 | 70 | 60S RIBOSOMAL PROTEIN L17 |
| | | | | | | | >gi\|7440981\|pir\|\|T01410 ribosomal protein L17 - |
| | | | | | | | maize >gi\|2668748\|gb\|AAB88619.1\| (AF034948) |
| | | | | | | | ribosomal protein L17 [Zea mays] |
| 922 | LIB3602-100-Q1-K1-H8 | 3914685 | BLASTX | 382 | 5.00E−50 | 74 | 60S RIBOSOMAL PROTEIN L17 |
| | | | | | | | >gi\|7440981\|pir\|\|T01410 ribosomal protein L17 - |
| | | | | | | | maize >gi\|2668748\|gb\|AAB88619.1\| (AF034948) |
| | | | | | | | ribosomal protein L17 [Zea mays] |
| 923 | LIB3602-014-Q6-K1-C5 | 3914685 | BLASTX | 450 | 1.00E−44 | 71 | 60S RIBOSOMAL PROTEIN L17 |
| | | | | | | | >gi\|7440981\|pir\|\|T01410 ribosomal protein L17 - |
| | | | | | | | maize >gi\|2668748\|gb\|AAB88619.1\| (AF034948) |
| | | | | | | | ribosomal protein L17 [Zea mays] |
| 924 | LIB3602-017-Q6-K1-B1 | 6984142 | BLASTX | 315 | 8.00E−29 | 82 | (AF227626) 40S ribosomal protein S11 [Euphorbia |
| | | | | | | | esula] |
| 925 | LIB3602-102-Q1-K1-C10 | 6984142 | BLASTX | 311 | 2.00E−28 | 83 | (AF227626) 40S ribosomal protein S11 [Euphorbia |
| | | | | | | | esula] |
| 926 | LIB3602-078-Q6-K6-H10 | 6984142 | BLASTX | 309 | 4.00E−28 | 75 | (AF227626) 40S ribosomal protein S11 [Euphorbia |
| | | | | | | | esula] |
| 927 | LIB3602-070-Q1-K1-A8 | 6984142 | BLASTX | 306 | 9.00E−28 | 83 | (AF227626) 40S ribosomal protein S11 [Euphorbia |
| | | | | | | | esula] |
| 928 | LIB3602-066-Q1-K6-D11 | 6984142 | BLASTX | 306 | 9.00E−28 | 83 | (AF227626) 40S ribosomal protein S11 [Euphorbia |
| | | | | | | | esula] |
| 929 | LIB3602-100-Q1-K1-H4 | 6984142 | BLASTX | 202 | 4.00E−23 | 81 | (AF227626) 40S ribosomal protein S11 [Euphorbia |
| | | | | | | | esula] |
| 930 | LIB3602-067-Q1-K1-B2 | 6984142 | BLASTX | 203 | 5.00E−23 | 82 | (AF227626) 40S ribosomal protein S11 [Euphorbia |
| | | | | | | | esula] |
| 931 | LIB3602-064-Q1-K6-G6 | 6984142 | BLASTX | 251 | 2.00E−21 | 77 | (AF227626) 40S ribosomal protein S11 [Euphorbia |
| | | | | | | | esula] |
| 932 | LIB3602-079-Q6-K6-D11 | 6984142 | BLASTX | 211 | 3.00E−17 | 77 | (AF227626) 40S ribosomal protein S11 [Euphorbia |
| | | | | | | | esula] |
| 933 | LIB3602-053-Q6-K1-D9 | 121026 | BLASTX | 942 | 1.00E−102 | 88 | GUANINE NUCLEOTIDE-BINDING PROTEIN |
| | | | | | | | BETA SUBUNIT-LIKE PROTEIN |
| | | | | | | | >gi\|99395\|pir\|\|S11904 GTP-binding regulatory |
| | | | | | | | protein beta chain homolog - Chlamydomonas |
| | | | | | | | reinhardtii >gi\|18145\|emb\|CAA37638.1\| (X53574) |
| | | | | | | | putative protein has homology to G protein beta |
| | | | | | | | subunit [Ch |
| 934 | LIB3602-105-Q1-K1-B4 | 121026 | BLASTX | 845 | 9.00E−95 | 91 | GUANINE NUCLEOTIDE-BINDING PROTEIN |
| | | | | | | | BETA SUBUNIT-LIKE PROTEIN |
| | | | | | | | >gi\|99395\|pir\|\|S11904 GTP-binding regulatory |
| | | | | | | | protein beta chain homolog - Chlamydomonas |
| | | | | | | | reinhardtii >gi\|18145\|emb\|CAA37638.1\| (X53574) |
| | | | | | | | putative protein has homology to G protein beta |
| | | | | | | | subunit [Ch |
| 935 | LIB3602-072-Q1-K1-E1 | 121026 | BLASTX | 792 | 1.00E−84 | 87 | GUANINE NUCLEOTIDE-BINDING PROTEIN |
| | | | | | | | BETA SUBUNIT-LIKE PROTEIN |
| | | | | | | | >gi\|99395\|pir\|\|S11904 GTP-binding regulatory |
| | | | | | | | protein beta chain homolog - Chlamydomonas |
| | | | | | | | reinhardtii >gi\|18145\|emb\|CAA37638.1\| (X53574) |
| | | | | | | | putative protein has homology to G protein beta |
| | | | | | | | subunit [Ch |
| 936 | LIB3602-053-Q6-K1-F7 | 121026 | BLASTX | 700 | 6.00E−74 | 86 | GUANINE NUCLEOTIDE-BINDING PROTEIN |
| | | | | | | | BETA SUBUNIT-LIKE PROTEIN |
| | | | | | | | >gi\|99395\|pir\|\|S11904 GTP-binding regulatory |
| | | | | | | | protein beta chain homolog - Chlamydomonas |
| | | | | | | | reinhardtii >gi\|18145\|emb\|CAA37638.1\| (X53574) |
| | | | | | | | putative protein has homology to G protein beta |
| | | | | | | | subunit [Ch |
| 937 | LIB3602-043-Q6-K1-D1 | 121026 | BLASTX | 570 | 1.00E−58 | 88 | GUANINE NUCLEOTIDE-BINDING PROTEIN |
| | | | | | | | BETA SUBUNIT-LIKE PROTEIN |
| | | | | | | | >gi\|99395\|pir\|\|S11904 GTP-binding regulatory |
| | | | | | | | protein beta chain homolog - Chlamydomonas |
| | | | | | | | reinhardtii >gi\|18145\|emb\|CAA37638.1\| (X53574) |
| | | | | | | | putative protein has homology to G protein beta |
| | | | | | | | subunit [Ch |
| 938 | LIB3602-059-Q6-K1-G12 | 121026 | BLASTX | 566 | 4.00E−58 | 88 | GUANINE NUCLEOTIDE-BINDING PROTEIN |
| | | | | | | | BETA SUBUNIT-LIKE PROTEIN |
| | | | | | | | >gi\|99395\|pir\|\|S11904 GTP-binding regulatory |
| | | | | | | | protein beta chain homolog - Chlamydomonas |
| | | | | | | | reinhardtii >gi\|18145\|emb\|CAA37638.1\| (X53574) |
| | | | | | | | putative protein has homology to G protein beta |
| | | | | | | | subunit [Ch |
| 939 | LIB3602-101-Q1-K1-E1 | 121026 | BLASTX | 244 | 2.00E−20 | 83 | GUANINE NUCLEOTIDE-BINDING PROTEIN |
| | | | | | | | BETA SUBUNIT-LIKE PROTEIN |
| | | | | | | | >gi\|99395\|pir\|\|S11904 GTP-binding regulatory |
| | | | | | | | protein beta chain homolog - Chlamydomonas |
| | | | | | | | reinhardtii >gi\|18145\|emb\|CAA37638.1\| (X53574) |
| | | | | | | | putative protein has homology to G protein beta |
| | | | | | | | subunit [Ch |
| 940 | LIB3602-071-Q1-K1-A1 | 121026 | BLASTX | 214 | 6.00E−17 | 82 | GUANINE NUCLEOTIDE-BINDING PROTEIN |
| | | | | | | | BETA SUBUNIT-LIKE PROTEIN |
| | | | | | | | >gi\|99395\|pir\|\|S11904 GTP-binding regulatory |
| | | | | | | | protein beta chain homolog - Chlamydomonas |
| | | | | | | | reinhardtii >gi\|18145\|emb\|CAA37638.1\| (X53574) |
| | | | | | | | putative protein has homology to G protein beta |
| | | | | | | | subunit [Ch |
| 941 | LIB3602-106-Q1-K1-C5 | 121026 | BLASTX | 160 | 1.00E−12 | 85 | GUANINE NUCLEOTIDE-BINDING PROTEIN |
| | | | | | | | BETA SUBUNIT-LIKE PROTEIN |
| | | | | | | | >gi\|99395\|pir\|\|S11904 GTP-binding regulatory |
| | | | | | | | protein beta chain homolog - Chlamydomonas |
| | | | | | | | reinhardtii >gi\|18145\|emb\|CAA37638.1\| (X53574) |
| | | | | | | | putative protein has homology to G protein beta |
| | | | | | | | subunit [Ch |
| 942 | LIB3602-044-Q6-K1-F8 | 4506697 | BLASTX | 475 | 1.00E−47 | 78 | ribosomal protein S20 |
| | | | | | | | >gi\|133875\|sp\|P17075\|RS20_HUMAN 40S |
| | | | | | | | RIBOSOMAL PROTEIN S20 |
| | | | | | | | >gi\|70925\|pir\|\|R3RT20 ribosomal protein S20, |
| | | | | | | | cytosolic - rat >gi\|423075\|pir\|\|S33710 ribosomal |
| | | | | | | | protein S20, cytosolic - human |
| | | | | | | | >gi\|57720\|emb\|CAA35917.1\| (X51537) ribosomal |
| | | | | | | | prote |
| 943 | LIB3602-085-Q6-K1-B1 | 4506697 | BLASTX | 475 | 1.00E−47 | 78 | ribosomal protein S20 |
| | | | | | | | >gi\|133875\|sp\|P17075\|RS20_HUMAN 40S |
| | | | | | | | RIBOSOMAL PROTEIN S20 |
| | | | | | | | >gi\|70925\|pir\|\|R3RT20 ribosomal protein S20, |
| | | | | | | | cytosolic - rat >gi\|423075\|pir\|\|S33710 ribosomal |
| | | | | | | | protein S20, cytosolic - human |
| | | | | | | | >gi\|57720\|emb\|CAA35917.1\| (X51537) ribosomal |
| | | | | | | | prote |
| 944 | LIB3602-042-Q6-K1-D2 | 4506697 | BLASTX | 475 | 2.00E−47 | 78 | ribosomal protein S20 |
| | | | | | | | >gi\|133875\|sp\|P17075\|RS20_HUMAN 40S |
| | | | | | | | RIBOSOMAL PROTEIN S20 |
| | | | | | | | >gi\|70925\|pir\|\|R3RT20 ribosomal protein S20, |
| | | | | | | | cytosolic - rat >gi\|423075\|pir\|\|S33710 ribosomal |
| | | | | | | | protein S20, cytosolic - human |
| | | | | | | | >gi\|57720\|emb\|CAA35917.1\| (X51537) ribosomal |
| | | | | | | | prote |
| 945 | LIB3602-027-Q6-K1-G1 | 4506697 | BLASTX | 475 | 2.00E−47 | 78 | ribosomal protein S20 |
| | | | | | | | >gi\|133875\|sp\|P17075\|RS20_HUMAN 40S |
| | | | | | | | RIBOSOMAL PROTEIN S20 |
| | | | | | | | >gi\|70925\|pir\|\|R3RT20 ribosomal protein S20, |
| | | | | | | | cytosolic - rat >gi\|423075\|pir\|\|S33710 ribosomal |
| | | | | | | | protein S20, cytosolic - human |
| | | | | | | | >gi\|57720\|emb\|CAA35917.1\| (X51537) ribosomal |
| | | | | | | | prote |
| 946 | LIB3602-007-Q1-K1-A7 | 4506697 | BLASTX | 472 | 3.00E−47 | 84 | ribosomal protein S20 |
| | | | | | | | >gi\|133875\|sp\|P17075\|RS20_HUMAN 40S |
| | | | | | | | RIBOSOMAL PROTEIN S20 |
| | | | | | | | >gi\|70925\|pir\|\|R3RT20 ribosomal protein S20, |
| | | | | | | | cytosolic - rat >gi\|423075\|pir\|\|S33710 ribosomal |
| | | | | | | | protein S20, cytosolic - human |
| | | | | | | | >gi\|57720\|emb\|CAA35917.1\| (X51537) ribosomal |
| | | | | | | | prote |
| 947 | LIB3602-022-Q6-K1-C2 | 4506697 | BLASTX | 451 | 7.00E−45 | 76 | ribosomal protein S20 |
| | | | | | | | >gi\|133875\|sp\|P17075\|RS20_HUMAN 40S |
| | | | | | | | RIBOSOMAL PROTEIN S20 |
| | | | | | | | >gi\|70925\|pir\|\|R3RT20 ribosomal protein S20, |
| | | | | | | | cytosolic - rat >gi\|423075\|pir\|\|S33710 ribosomal |
| | | | | | | | protein S20, cytosolic - human |
| | | | | | | | >gi\|57720\|emb\|CAA35917.1\| (X51537) ribosomal |
| | | | | | | | prote |
| 948 | LIB3602-003-Q1-K1-F12 | 4506697 | BLASTX | 450 | 1.00E−44 | 74 | ribosomal protein S20 |
| | | | | | | | >gi\|133875\|sp\|P17075\|RS20_HUMAN 40S |
| | | | | | | | RIBOSOMAL PROTEIN S20 |
| | | | | | | | >gi\|70925\|pir\|\|R3RT20 ribosomal protein S20, |
| | | | | | | | cytosolic - rat >gi\|423075\|pir\|\|S33710 ribosomal |
| | | | | | | | protein S20, cytosolic - human |
| | | | | | | | >gi\|57720\|emb\|CAA35917.1\| (X51537) ribosomal |
| | | | | | | | prote |
| 949 | LIB3602-108-Q1-K1-G4 | 4506697 | BLASTX | 311 | 3.00E−42 | 82 | ribosomal protein S20 |
| | | | | | | | >gi\|133875\|sp\|P17075\|RS20_HUMAN 40S |
| | | | | | | | RIBOSOMAL PROTEIN S20 |
| | | | | | | | >gi\|70925\|pir\|\|R3RT20 ribosomal protein S20, |
| | | | | | | | cytosolic - rat >gi\|423075\|pir\|\|S33710 ribosomal |
| | | | | | | | protein S20, cytosolic - human |
| | | | | | | | >gi\|57720\|emb\|CAA35917.1\| (X51537) ribosomal |
| | | | | | | | prote |
| 950 | LIB3602-007-Q1-K1-C3 | 4506697 | BLASTX | 428 | 5.00E−42 | 73 | ribosomal protein S20 |
| | | | | | | | >gi\|133875\|sp\|P17075\|RS20_HUMAN 40S |
| | | | | | | | RIBOSOMAL PROTEIN S20 |
| | | | | | | | >gi\|70925\|pir\|\|R3RT20 ribosomal protein S20, |
| | | | | | | | cytosolic - rat >gi\|423075\|pir\|\|S33710 ribosomal |
| | | | | | | | protein S20, cytosolic - human |
| | | | | | | | >gi\|57720\|emb\|CAA35917.1\| (X51537) ribosomal |
| | | | | | | | prote |
| 951 | LIB3602-078-Q6-K6-F6 | 6521012 | BLASTX | 634 | 4.00E−66 | 82 | (AB031739) cytoplasmic ribosomal protein S13 |
| | | | | | | | [Arabidopsis thaliana] |
| 952 | LIB3602-089-Q6-K6-C6 | 6521012 | BLASTX | 631 | 9.00E−66 | 82 | (AB031739) cytoplasmic ribosomal protein S13 |
| | | | | | | | [Arabidopsis thaliana] |
| 953 | LIB3602-083-Q6-K6-H6 | 6521012 | BLASTX | 538 | 8.00E−61 | 78 | (AB031739) cytoplasmic ribosomal protein S13 |
| | | | | | | | [Arabidopsis thaliana] |
| 954 | LIB3602-010-Q6-K1-A4 | 6521012 | BLASTX | 540 | 4.00E−55 | 82 | (AB031739) cytoplasmic ribosomal protein S13 |
| | | | | | | | [Arabidopsis thaliana] |
| 955 | LIB3602-028-Q6-K1-F9 | 6521012 | BLASTX | 538 | 7.00E−55 | 82 | (AB031739) cytoplasmic ribosomal protein S13 |
| | | | | | | | [Arabidopsis thaliana] |
| 956 | LIB3602-010-Q6-K1-A5 | 6521012 | BLASTX | 511 | 1.00E−51 | 84 | (AB031739) cytoplasmic ribosomal protein S13 |
| | | | | | | | [Arabidopsis thaliana] |
| 957 | LIB3602-105-Q1-K1-G3 | 6521012 | BLASTX | 483 | 2.00E−48 | 86 | (AB031739) cytoplasmic ribosomal protein S13 |
| | | | | | | | [Arabidopsis thaliana] |
| 958 | LIB3602-118-Q1-K1-A1 | 6521012 | BLASTX | 311 | 8.00E−43 | 83 | (AB031739) cytoplasmic ribosomal protein S13 |
| | | | | | | | [Arabidopsis thaliana] |
| 959 | LIB3602-023-Q6-K1-B5 | 6521012 | BLASTX | 218 | 2.00E−17 | 71 | (AB031739) cytoplasmic ribosomal protein S13 |
| | | | | | | | [Arabidopsis thaliana] |
| 960 | LIB3602-078-Q6-K6-H9 | 1351014 | BLASTX | 655 | 1.00E−68 | 68 | 40S RIBOSOMAL PROTEIN S8 |
| | | | | | | | >gi\|7440236\|pir\|\|T04082 probable ribosomal protein |
| | | | | | | | S8 - rice >gi\|968902\|dbj\|BAA07207.1\| (D38010) |
| | | | | | | | ribosomal protein S8 [Oryza sativa] |
| 961 | LIB3602-039-Q6-K1-A12 | 1351014 | BLASTX | 572 | 7.00E−59 | 65 | 40S RIBOSOMAL PROTEIN S8 |
| | | | | | | | >gi\|7440236\|pir\|\|T04082 probable ribosomal protein |
| | | | | | | | S8 - rice >gi\|968902\|dbj\|BAA07207.1\| (D38010) |
| | | | | | | | ribosomal protein S8 [Oryza sativa] |
| 962 | LIB3602-010-Q6-K1-D8 | 1351014 | BLASTX | 518 | 1.00E−52 | 66 | 40S RIBOSOMAL PROTEIN S8 |
| | | | | | | | >gi\|7440236\|pir\|\|T04082 probable ribosomal protein |
| | | | | | | | S8 - rice >gi\|968902\|dbj\|BAA07207.1\| (D38010) |
| | | | | | | | ribosomal protein S8 [Oryza sativa] |
| 963 | LIB3602-003-Q1-K1-E12 | 1351014 | BLASTX | 515 | 3.00E−52 | 64 | 40S RIBOSOMAL PROTEIN S8 |
| | | | | | | | >gi\|7440236\|pir\|\|T04082 probable ribosomal protein |
| | | | | | | | S8 - rice >gi\|968902\|dbj\|BAA07207.1\| (D38010) |
| | | | | | | | ribosomal protein S8 [Oryza sativa] |
| 964 | LIB3602-083-Q6-K6-H5 | 1351014 | BLASTX | 509 | 2.00E−51 | 63 | 40S RIBOSOMAL PROTEIN S8 |
| | | | | | | | >gi\|7440236\|pir\|\|T04082 probable ribosomal protein |
| | | | | | | | S8 - rice >gi\|968902\|dbj\|BAA07207.1\| (D38010) |
| | | | | | | | ribosomal protein S8 [Oryza sativa] |
| 965 | LIB3602-109-Q1-K1-H5 | 1351014 | BLASTX | 334 | 1.00E−44 | 61 | 40S RIBOSOMAL PROTEIN S8 |
| | | | | | | | >gi\|7440236\|pir\|\|T04082 probable ribosomal protein |
| | | | | | | | S8 - rice >gi\|968902\|d$$ BAA07207.1\| (D38010) |
| | | | | | | | ribosomal protein S8 [Oryza sativa] |
| 966 | LIB3602-014-Q6-K1-C9 | 1351014 | BLASTX | 257 | 5.00E−22 | 55 | 40S RIBOSOMAL PROTEIN S8 |
| | | | | | | | >gi\|7440236\|pir\|\|T04082 probable ribosomal protein |
| | | | | | | | S8 - rice >gi\|968902\|dbj\|BAA07207.1\| (D38010) |
| | | | | | | | ribosomal protein S8 [Oryza sativa] |
| 967 | LIB3602-037-Q6-K1-B1 | 1351014 | BLASTX | 242 | 8.00E−21 | 68 | 40S RIBOSOMAL PROTEIN S8 |
| | | | | | | | >gi\|7440236\|pir\|\|T04082 probable ribosomal protein |
| | | | | | | | S8 - rice >gi\|968902\|dbj\|BAA07207.1\| (D38010) |
| | | | | | | | ribosomal protein S8 [Oryza sativa] |
| 968 | LIB3602-011-Q6-K1-D7 | 1351014 | BLASTX | 225 | 3.00E−18 | 69 | 40S RIBOSOMAL PROTEIN S8 |
| | | | | | | | >gi\|7440236\|pir\|\|T04082 probable ribosomal protein |
| | | | | | | | S8 - rice >gi\|968902\|dbj\|BAA07207.1\| (D38010) |
| | | | | | | | ribosomal protein S8 [Oryza sativa] |
| 969 | LIB3602-095-Q6-K6-F2 | 6174958 | BLASTX | 778 | 6.00E−83 | 72 | 60S RIBOSOMAL PROTEIN L7 |
| | | | | | | | >gi\|7440720\|pir\|\|T00692 ribosomal protein L7, |
| | | | | | | | cytosolic - Arabidopsis thaliana |
| | | | | | | | >gi\|3212879\|gb\|AAC23430.1\| (AC004005) 60S |
| | | | | | | | ribosomal protein L7 [Arabidopsis thaliana] |
| 970 | LIB3602-089-Q6-K6-F2 | 6174958 | BLASTX | 753 | 5.00E−80 | 71 | 60S RIBOSOMAL PROTEIN L7 |
| | | | | | | | >gi\|7440720\|pir\|\|T00692 ribosomal protein L7, |
| | | | | | | | cytosolic - Arabidopsis thaliana |
| | | | | | | | >gi\|3212879\|gb\|AAC23430.1\| (AC004005) 60S |
| | | | | | | | ribosomal protein L7 [Arabidopsis thaliana] |
| 971 | LIB3602-076-Q6-K6-F4 | 6174958 | BLASTX | 677 | 4.00E−71 | 67 | 60S RIBOSOMAL PROTEIN L7 |
| | | | | | | | >gi\|7440720\|pir\|\|T00692 ribosomal protein L7, |
| | | | | | | | cytosolic - Arabidopsis thaliana |
| | | | | | | | >gi\|3212879\|gb\|AAC23430.1\| (AC004005) 60S |
| | | | | | | | ribosomal protein L7 [Arabidopsis thaliana] |
| 972 | LIB3602-044-Q6-K1-G11 | 6174958 | BLASTX | 633 | 4.00E−66 | 75 | 60S RIBOSOMAL PROTEIN L7 |
| | | | | | | | >gi\|7440720\|pir\|\|T00692 ribosomal protein L7, |
| | | | | | | | cytosolic - Arabidopsis thaliana |
| | | | | | | | >gi\|3212879\|gb\|AAC23430.1\| (AC004005) 60S |
| | | | | | | | ribosomal protein L7 [Arabidopsis thaliana] |
| 973 | LIB3602-006-Q1-K1-C1 | 6174958 | BLASTX | 632 | 7.00E−66 | 67 | 60S RIBOSOMAL PROTEIN L7 |
| | | | | | | | >gi\|7440720\|pir\|\|T00692 ribosomal protein L7, |
| | | | | | | | cytosolic - Arabidopsis thaliana |
| | | | | | | | >gi\|3212879\|gb\|AAC23430.1\| (AC004005) 60S |
| | | | | | | | ribosomal protein L7 [Arabidopsis thaliana] |
| 974 | LIB3602-043-Q6-K1-D11 | 6174958 | BLASTX | 622 | 1.00E−64 | 74 | 60S RIBOSOMAL PROTEIN L7 |
| | | | | | | | >gi\|7440720\|pir\|\|T00692 ribosomal protein L7, |
| | | | | | | | cytosolic - Arabidopsis thaliana |
| | | | | | | | >gi\|3212879\|gb\|AAC23430.1\| (AC004005) 60S |
| | | | | | | | ribosomal protein L7 [Arabidopsis thaliana] |
| 975 | LIB3602-027-Q6-K1-E10 | 6174958 | BLASTX | 609 | 3.00E−63 | 75 | 60S RIBOSOMAL PROTEIN L7 |
| | | | | | | | >gi\|7440720\|pir\|\|T00692 ribosomal protein L7, |
| | | | | | | | cytosolic - Arabidopsis thaliana |
| | | | | | | | >gi\|3212879\|gb\|AAC23430.1\| (AC004005) 60S |
| | | | | | | | ribosomal protein L7 [Arabidopsis thaliana] |
| 976 | LIB3602-060-Q6-K1-H2 | 6174958 | BLASTX | 598 | 6.00E−62 | 75 | 60S RIBOSOMAL PROTEIN L7 |
| | | | | | | | >gi\|7440720\|pir\|\|T00692 ribosomal protein L7, |
| | | | | | | | cytosolic - Arabidopsis thaliana |
| | | | | | | | >gi\|3212879\|gb\|AAC23430.1\| (AC004005) 60S |
| | | | | | | | ribosomal protein L7 [Arabidopsis thaliana] |
| 977 | LIB3602-054-Q6-K1-F11 | 6174958 | BLASTX | 206 | 5.00E−16 | 33 | 60S RIBOSOMAL PROTEIN L7 |
| | | | | | | | >gi\|7440720\|pir\|\|T00692 ribosomal protein L7, |
| | | | | | | | cytosolic - Arabidopsis thaliana |
| | | | | | | | >gi\|3212879\|gb\|AAC23430.1\| (AC004005) 60S |
| | | | | | | | ribosomal protein L7 [Arabidopsis thaliana] |
| 978 | LIB3602-046-Q6-K1-A11 | 1173187 | BLASTX | 677 | 3.00E−71 | 90 | 40S RIBOSOMAL PROTEIN S23 (S12) |
| | | | | | | | >gi\|1362041\|pir\|\|S56673 ribosomal protein S23.e, |
| | | | | | | | cytosolic (clone RJ3) - garden strawberry |
| | | | | | | | >gi\|643074\|gb\|AAA79921.1\| (U19940) putative 40S |
| | | | | | | | ribosomal protein s12 [Fragaria x ananassa] |
| 979 | LIB3602-030-Q6-K1-C8 | 1173187 | BLASTX | 677 | 3.00E−71 | 90 | 40S RIBOSOMAL PROTEIN S23 (S12) |
| | | | | | | | >gi\|1362041\|pir\|\|S56673 ribosomal protein S23.e, |
| | | | | | | | cytosolic (clone RJ3) - garden strawberry |
| | | | | | | | >gi\|643074\|gb\|AAA79921.1\| (U19940) putative 40S |
| | | | | | | | ribosomal protein s12 [Fragaria x ananassa] |
| 980 | LIB3602-039-Q6-K1-E1 | 1173187 | BLASTX | 677 | 4.00E−71 | 90 | 40S RIBOSOMAL PROTEIN S23 (S12) |
| | | | | | | | >gi\|1362041\|pir\|\|S56673 ribosomal protein S23.e, |
| | | | | | | | cytosolic (clone RJ3) - garden strawberry |
| | | | | | | | >gi\|643074\|gb\|AAA79921.1\| (U19940) putative 40S |
| | | | | | | | ribosomal protein s12 [Fragaria x ananassa] |
| 981 | LIB3602-067-Q1-K1-F6 | 1173187 | BLASTX | 674 | 9.00E−71 | 89 | 40S RIBOSOMAL PROTEIN S23 (S12) |
| | | | | | | | >gi\|1362041\|pir\|\|S56673 ribosomal protein S23.e, |
| | | | | | | | cytosolic (clone RJ3) - garden strawberry |
| | | | | | | | >gi\|643074\|gb\|AAA79921.1\| (U19940) putative 40S |
| | | | | | | | ribosomal protein s12 [Fragaria x ananassa] |
| 982 | LIB3602-100-Q1-K1-F9 | 1173187 | BLASTX | 488 | 7.00E−66 | 94 | 40S RIBOSOMAL PROTEIN S23 (S12) |
| | | | | | | | >gi\|1362041\|pir\|\|S56673 ribosomal protein S23.e, |
| | | | | | | | cytosolic (clone RJ3) - garden strawberry |
| | | | | | | | >gi\|643074\|gb\|AAA79921.1\| (U19940) putative 40S |
| | | | | | | | ribosomal protein s12 [Fragaria x ananassa] |
| 983 | LIB3602-037-Q6-K1-B2 | 1173187 | BLASTX | 582 | 3.00E−60 | 90 | 40S RIBOSOMAL PROTEIN S23 (S12) |
| | | | | | | | >gi\|1362041\|pir\|\|S56673 ribosomal protein S23.e, |
| | | | | | | | cytosolic (clone RJ3) - garden strawberry |
| | | | | | | | >gi\|643074\|gb\|AAA79921.1\| (U19940) putative 40S |
| | | | | | | | ribosomal protein s12 [Fragaria x ananassa] |
| 984 | LIB3602-022-Q6-K1-C8 | 1173187 | BLASTX | 582 | 4.00E−60 | 90 | 40S RIBOSOMAL PROTEIN S23 (S12) |
| | | | | | | | >gi\|1362041\|pir\|\|S56673 ribosomal protein S23.e, |
| | | | | | | | cytosolic (clone RJ3) - garden strawberry |
| | | | | | | | >gi\|643074\|gb\|AAA79921.1\| (U19940) putative 40S |
| | | | | | | | ribosomal protein s12 [Fragaria x ananassa] |
| 985 | LIB3602-046-Q6-K1-A12 | 1173187 | BLASTX | 536 | 7.00E−55 | 87 | 40S RIBOSOMAL PROTEIN S23 (S12) |
| | | | | | | | >gi\|1362041\|pir\|\|S56673 ribosomal protein S23.e, |
| | | | | | | | cytosolic (clone RJ3) - garden strawberry |
| | | | | | | | >gi\|643074\|gb\|AAA79921.1\| (U19940) putative 40S |
| | | | | | | | ribosomal protein s12 [Fragaria x ananassa] |
| 986 | LIB3602-021-Q6-K1-D3 | 1173187 | BLASTX | 344 | 1.00E−32 | 87 | 40S RIBOSOMAL PROTEIN S23 (S12) |
| | | | | | | | >gi\|1362041\|pir\|\|S56673 ribosomal protein S23.e, |
| | | | | | | | cytosolic (clone RJ3) - garden strawberry |
| | | | | | | | >gi\|643074\|gb\|AAA79921.1\| (U19940) putative 40S |
| | | | | | | | ribosomal protein s12 [Fragaria x ananassa] |
| 987 | LIB3602-068-Q1-K1-D1 | 6671950 | BLASTX | 439 | 2.00E−43 | 90 | (AC016795) putative 40S ribosomal protein S5 |
| | | | | | | | [Arabidopsis thaliana] |
| 988 | LIB3602-081-Q6-K6-G1 | 6671950 | BLASTX | 405 | 2.00E−39 | 96 | (AC016795) putative 40S ribosomal protein S5 |
| | | | | | | | [Arabidopsis thaliana] |
| 989 | LIB3602-086-Q6-K1-E5 | 6671950 | BLASTX | 405 | 2.00E−39 | 96 | (AC016795) putative 40S ribosomal protein S5 |
| | | | | | | | [Arabidopsis thaliana] |
| 990 | LIB3602-023-Q6-K1-G12 | 6671950 | BLASTX | 376 | 5.00E−36 | 96 | (AC016795) putative 40S ribosomal protein S5 |
| | | | | | | | [Arabidopsis thaliana] |
| 991 | LIB3602-117-Q1-K1-B8 | 6671950 | BLASTX | 190 | 1.00E−30 | 97 | (AC016795) putative 40S ribosomal protein S5 |
| | | | | | | | [Arabidopsis thaliana] |
| 992 | LIB3602-055-Q6-K1-C8 | 6671950 | BLASTX | 318 | 3.00E−29 | 91 | (AC016795) putative 40S ribosomal protein S5 |
| | | | | | | | [Arabidopsis thaliana] |
| 993 | LIB3602-057-Q6-K1-E12 | 6671950 | BLASTX | 186 | 2.00E−28 | 90 | (AC016795) putative 40S ribosomal protein S5 |
| | | | | | | | [Arabidopsis thaliana] |
| 994 | LIB3602-026-Q6-K1-F5 | 6671950 | BLASTX | 240 | 1.00E−21 | 84 | (AC016795) putative 40S ribosomal protein S5 |
| | | | | | | | [Arabidopsis thaliana] |
| 995 | LIB3602-007-Q1-K1-B2 | 6671950 | BLASTX | 209 | 5.00E−17 | 89 | (AC016795) putative 40S ribosomal protein S5 |
| | | | | | | | [Arabidopsis thaliana] |
| 996 | LIB3602-036-Q6-K1-A8 | 99487 | BLASTX | 449 | 2.00E−44 | 60 | chlorophyll a/b-binding protein (clone pINEab 43) - |
| | | | | | | | Scotch pine >gi\|20794\|emb\|CAA41407.1\| (X58517) |
| | | | | | | | Type III chlorophyll a/b-binding protein [Pinus |
| | | | | | | | sylvestris] |
| 997 | LIB3602-068-Q1-K1-B5 | 99487 | BLASTX | 398 | 2.00E−38 | 60 | chlorophyll a/b-binding protein (clone pINEab 43) - |
| | | | | | | | Scotch pine >gi\|20794\|emb\|CAA41407.1\| (X58517) |
| | | | | | | | Type III chlorophyll a/b-binding protein [Pinus |
| | | | | | | | sylvestris] |
| 998 | LIB3602-052-Q6-K1-G12 | 99487 | BLASTX | 381 | 1.00E−36 | 58 | chlorophyll a/b-binding protein (clone pINEab 43) - |
| | | | | | | | Scotch pine >gi\|20794\|emb\|CAA41407.1\| (X58517) |
| | | | | | | | Type III chlorophyll a/b-binding protein [Pinus |
| | | | | | | | sylvestris] |
| 999 | LIB3602-048-Q6-K1QA- | 99487 | BLASTX | 348 | 8.00E−33 | 61 | chlorophyll a/b-binding protein (clone pINEab 43) - |
| | H11 | | | | | | Scotch pine >gi\|20794\|emb\|CAA41407.1\| (X58517) |
| | | | | | | | Type III chlorophyll a/b-binding protein [Pinus |
| | | | | | | | sylvestris] |
| 1000 | LIB3602-020-Q6-K1-F5 | 99487 | BLASTX | 343 | 4.00E−32 | 61 | chlorophyll a/b-binding protein (clone pINEab 43) - |
| | | | | | | | Scotch pine >gi\|20794\|emb\|CAA41407.1\| (X58517) |
| | | | | | | | Type III chlorophyll a/b-binding protein [Pinus |
| | | | | | | | sylvestris] |
| 1001 | LIB3602-112-Q1-K1-F10 | 99487 | BLASTX | 329 | 3.00E−30 | 62 | chlorophyll a/b-binding protein (clone pINEab 43) - |
| | | | | | | | Scotch pine >gi\|20794\|emb\|CAA41407.1\| (X58517) |
| | | | | | | | Type III chlorophyll a/b-binding protein [Pinus |
| | | | | | | | sylvestris] |
| 1002 | LIB3602-089-Q6-K6-F10 | 99487 | BLASTX | 320 | 3.00E−29 | 60 | chlorophyll a/b-binding protein (clone pINEab 43) - |
| | | | | | | | Scotch pine >gi\|20794\|emb\|CAA41407.1\| (X58517) |
| | | | | | | | Type III chlorophyll a/b-binding protein [Pinus |
| | | | | | | | sylvestris] |
| 1003 | LIB3602-021-Q6-K1-H2 | 99487 | BLASTX | 157 | 1.00E−10 | 58 | chlorophyll a/b-binding protein (clone pINEab 43) - |
| | | | | | | | Scotch pine >gi\|20794\|emb\|CAA41407.1\| (X58517) |
| | | | | | | | Type III chlorophyll a/b-binding protein [Pinus |
| | | | | | | | sylvestris] |
| 1004 | LIB3602-118-Q1-K1-C11 | 99487 | BLASTX | 157 | 3.00E−10 | 58 | chlorophyll a/b-binding protein (clone pINEab 43) - |
| | | | | | | | Scotch pine >gi\|20794\|emb\|CAA41407.1\| (X58517) |
| | | | | | | | Type III chlorophyll a/b-binding protein [Pinus |
| | | | | | | | sylvestris] |
| 1005 | LIB3602-030-Q6-K1-B7 | 3953473 | BLASTX | 271 | 1.00E−23 | 54 | (AC002328) F22O2.18 [Arabidopsis thaliana] |
| | | | | | | | >gi\|5734520\|emb\|CAB52748.1\| (AJ245630) |
| | | | | | | | photosystem I subunit V precursor [Arabidopsis |
| | | | | | | | thaliana] |
| 1006 | LIB3602-083-Q6-K6-C9 | 3953473 | BLASTX | 271 | 1.00E−23 | 54 | (AC002328) F22O2.18 [Arabidopsis thaliana] |
| | | | | | | | >gi\|5734520\|emb\|CAB52748.1\| (AJ245630) |
| | | | | | | | photosystem I subunit V precursor [Arabidopsis |
| | | | | | | | thaliana] |
| 1007 | LIB3602-054-Q6-K1-G2 | 3953473 | BLASTX | 271 | 1.00E−23 | 54 | (AC002328) F22O2.18 [Arabidopsis thaliana] |
| | | | | | | | >gi\|5734520\|emb\|CAB52748.1\| (AJ245630) |
| | | | | | | | photosystem I subunit V precursor [Arabidopsis |
| | | | | | | | thaliana] |
| 1008 | LIB3602-109-Q1-K1-C9 | 3953473 | BLASTX | 265 | 7.00E−23 | 59 | (AC002328) F22O2.18 [Arabidopsis thaliana] |
| | | | | | | | >gi\|5734520\|emb\|CAB52748.1\| (AJ245630) |
| | | | | | | | photosystem I subunit V precursor [Arabidopsis |
| | | | | | | | thaliana] |
| 1009 | LIB3602-053-Q6-K1-D12 | 3953473 | BLASTX | 264 | 1.00E−22 | 53 | (AC002328) F22O2.18 [Arabidopsis thaliana] |
| | | | | | | | >gi\|5734520\|emb\|CAB52748.1\| (AJ245630) |
| | | | | | | | photosystem I subunit V precursor [Arabidopsis |
| | | | | | | | thaliana] |
| 1010 | LIB3602-079-Q6-K6-A1 | 3953473 | BLASTX | 240 | 4.00E−20 | 57 | (AC002328) F22O2.18 [Arabidopsis thaliana] |
| | | | | | | | >gi\|5734520\|emb\|CAB52748.1\| (AJ245630) |
| | | | | | | | photosystem I subunit V precursor [Arabidopsis |
| | | | | | | | thaliana] |
| 1011 | LIB3602-067-Q1-K1-B12 | 3953473 | BLASTX | 216 | 2.00E−17 | 60 | (AC002328) F22O2.18 [Arabidopsis thaliana] |
| | | | | | | | >gi\|5734520\|emb\|CAB52748.1\| (AJ245630) |
| | | | | | | | photosystem I subunit V precursor [Arabidopsis |
| | | | | | | | thaliana] |
| 1012 | LIB3602-087-Q6-K1-E2 | 3953473 | BLASTX | 216 | 2.00E−17 | 60 | (AC002328) F22O2.18 [Arabidopsis thaliana] |
| | | | | | | | >gi\|5734520\|emb\|CAB52748.1\| (AJ245630) |
| | | | | | | | photosystem I subunit V precursor [Arabidopsis |
| | | | | | | | thaliana] |
| 1013 | LIB3602-056-Q6-K1-F2 | 3953473 | BLASTX | 145 | 2.00E−13 | 57 | (AC002328) F22O2.18 [Arabidopsis thaliana] |
| | | | | | | | >gi\|5734520\|emb\|CAB52748.1\| (AJ245630) |
| | | | | | | | photosystem I subunit V precursor [Arabidopsis |
| | | | | | | | thaliana] |
| 1014 | LIB3602-054-Q6-K1-F10 | 131395 | BLASTX | 383 | 8.00E−37 | 59 | OXYGEN-EVOLVING ENHANCER PROTEIN 3 |
| | | | | | | | PRECURSOR (OEE3) >gi\|81254\|pir\|\|S05509 |
| | | | | | | | photosystem II oxygen-evolving complex protein 3 |
| | | | | | | | precursor - Chlamydomonas reinhardtii |
| | | | | | | | >gi\|18164\|emb\|CAA32061.1\| (X13832) OEE3 |
| | | | | | | | precursor protein [Chlamydomonas reinhardtii] |
| | | | | | | | >gi\|2286 |
| 1015 | LIB3602-071-Q1-K1-G3 | 131395 | BLASTX | 260 | 7.00E−30 | 55 | OXYGEN-EVOLVING ENHANCER PROTEIN 3 |
| | | | | | | | PRECURSOR (OEE3) >gi\|81254\|pir\|\|S05509 |
| | | | | | | | photosystem II oxygen-evolving complex protein 3 |
| | | | | | | | precursor - Chlamydomonas reinhardtii |
| | | | | | | | >gi\|18164\|emb\|CAA32061.1\| (X13832) OEE3 |
| | | | | | | | precursor protein [Chlamydomonas reinhardtii] |
| | | | | | | | >gi\|2286 |
| 1016 | LIB3602-102-Q1-K1-F3 | 131395 | BLASTX | 297 | 8.00E−27 | 57 | OXYGEN-EVOLVING ENHANCER PROTEIN 3 |
| | | | | | | | PRECURSOR (OEE3) >gi\|81254\|pir\|\|S05509 |
| | | | | | | | photosystem II oxygen-evolving complex protein 3 |
| | | | | | | | precursor - Chlamydomonas reinhardtii |
| | | | | | | | >gi\|18164\|emb\|CAA32061.1\| (X13832) OEE3 |
| | | | | | | | precursor protein [Chlamydomonas reinhardtii] |
| | | | | | | | >gi\|2286 |
| 1017 | LIB3602-016-Q6-K1-C7 | 131395 | BLASTX | 292 | 4.00E−26 | 57 | OXYGEN-EVOLVING ENHANCER PROTEIN 3 |
| | | | | | | | PRECURSOR (OEE3) >gi\|81254\|pir\|\|S05509 |
| | | | | | | | photosystem II oxygen-evolving complex protein 3 |
| | | | | | | | precursor - Chlamydomonas reinhardtii |
| | | | | | | | >gi\|18164\|emb\|CAA32061.1\| (X13832) OEE3 |
| | | | | | | | precursor protein [Chlamydomonas reinhardtii] |
| | | | | | | | >gi\|2286 |
| 1018 | LIB3602-073-Q1-K1-H1 | 131395 | BLASTX | 260 | 3.00E−22 | 55 | OXYGEN-EVOLVING ENHANCER PROTEIN 3 |
| | | | | | | | PRECURSOR (OEE3) >gi\|81254\|pir\|\|S05509 |
| | | | | | | | photosystem II oxygen-evolving complex protein 3 |
| | | | | | | | precursor - Chlamydomonas reinhardtii |
| | | | | | | | >gi\|18164\|emb\|CAA32061.1\| (X13832) OEE3 |
| | | | | | | | precursor protein [Chlamydomonas reinhardtii] |
| | | | | | | | >gi\|2286 |
| 1019 | LIB3602-109-Q1-K1-D7 | 131395 | BLASTX | 148 | 7.00E−16 | 60 | OXYGEN-EVOLVING ENHANCER PROTEIN 3 |
| | | | | | | | PRECURSOR (OEE3) >gi\|81254\|pir\|\|S05509 |
| | | | | | | | photosystem II oxygen-evolving complex protein 3 |
| | | | | | | | precursor - Chlamydomonas reinhardtii |
| | | | | | | | >gi\|18164\|emb\|CAA32061.1\| (X13832) OEE3 |
| | | | | | | | precursor protein [Chlamydomonas reinhardtii] |
| | | | | | | | >gi\|2286 |
| 1020 | LIB3602-119-Q1-K1-E1 | 131395 | BLASTX | 199 | 2.00E−15 | 54 | OXYGEN-EVOLVING ENHANCER PROTEIN 3 |
| | | | | | | | PRECURSOR (OEE3) >gi\|81254\|pir\|\|S05509 |
| | | | | | | | photosystem II oxygen-evolving complex protein 3 |
| | | | | | | | precursor - Chlamydomonas reinhardtii |
| | | | | | | | >gi\|18164\|emb\|CAA32061.1\| (X13832) OEE3 |
| | | | | | | | precursor protein [Chlamydomonas reinhardtii] |
| | | | | | | | >gi\|2286 |
| 1021 | LIB3602-092-Q6-K6-G4 | 131395 | BLASTX | 199 | 5.00E−15 | 54 | OXYGEN-EVOLVING ENHANCER PROTEIN 3 |
| | | | | | | | PRECURSOR (OEE3) >gi\|81254\|pir\|\|S05509 |
| | | | | | | | photosystem II oxygen-evolving complex protein 3 |
| | | | | | | | precursor - Chlamydomonas reinhardtii |
| | | | | | | | >gi\|18164\|emb\|CAA32061.1\| (X13832) OEE3 |
| | | | | | | | precursor protein [Chlamydomonas reinhardtii] |
| | | | | | | | >gi\|2286 |
| 1022 | LIB3602-054-Q6-K1-F5 | 131395 | BLASTX | 145 | 6.00E−09 | 48 | OXYGEN-EVOLVING ENHANCER PROTEIN 3 |
| | | | | | | | PRECURSOR (OEE3) >gi\|81254\|pir\|\|S05509 |
| | | | | | | | photosystem II oxygen-evolving complex protein 3 |
| | | | | | | | precursor - Chlamydomonas reinhardtii |
| | | | | | | | >gi\|18164\|emb\|CAA32061.1\| (X13832) OEE3 |
| | | | | | | | precursor protein [Chlamydomonas reinhardtii] |
| | | | | | | | >gi\|2286 |
| 1023 | LIB3602-047-Q6-K1-F1 | 7413571 | BLASTX | 505 | 4.00E−51 | 94 | (AL162973) putative protein [Arabidopsis thaliana] |
| 1024 | LIB3602-084-Q6-K1-B10 | 7413571 | BLASTX | 455 | 1.00E−46 | 92 | (AL162973) putative protein [Arabidopsis thaliana] |
| 1025 | LIB3602-008-Q6-K1-C6 | 7413571 | BLASTX | 422 | 2.00E−41 | 92 | (AL162973) putative protein [Arabidopsis thaliana] |
| 1026 | LIB3602-083-Q6-K6-A7 | 7413571 | BLASTX | 413 | 3.00E−40 | 94 | (AL162973) putative protein [Arabidopsis thaliana] |
| 1027 | LIB3602-008-Q6-K1-C3 | 7413571 | BLASTX | 411 | 5.00E−40 | 90 | (AL162973) putative protein [Arabidopsis thaliana] |
| 1028 | LIB3602-091-Q6-K6-A3 | 7413571 | BLASTX | 299 | 8.00E−27 | 81 | (AL162973) putative protein [Arabidopsis thaliana] |
| 1029 | LIB3602-095-Q6-K6-A3 | 7413571 | BLASTX | 298 | 1.00E−26 | 91 | (AL162973) putative protein [Arabidopsis thaliana] |
| 1030 | LIB3602-094-Q6-K6-A3 | 7413571 | BLASTX | 213 | 5.00E−21 | 88 | (AL162973) putative protein [Arabidopsis thaliana] |
| 1031 | LIB3602-039-Q6-K1-E2 | 7413571 | BLASTX | 222 | 4.00E−18 | 48 | (AL162973) putative protein [Arabidopsis thaliana] |
| 1032 | LIB3602-113-Q1-K1-G7 | 5821436 | BLASTX | 721 | 3.00E−76 | 69 | (AB031546) chloroplast w6 desaturase |
| | | | | | | | [Chlamydomonas sp. W80] |
| 1033 | LIB3602-015-Q6-K1-H9 | 5821436 | BLASTX | 689 | 1.00E−72 | 65 | (AB031546) chloroplast w6 desaturase |
| | | | | | | | [Chlamydomonas sp. W80] |
| 1034 | LIB3602-108-Q1-K1-C5 | 5821436 | BLASTX | 616 | 4.00E−64 | 70 | (AB031546) chloroplast w6 desaturase |
| | | | | | | | [Chlamydomonas sp. W80] |
| 1035 | LIB3602-120-Q1-K1-G7 | 5821436 | BLASTX | 601 | 2.00E−62 | 72 | (AB031546) chloroplast w6 desaturase |
| | | | | | | | [Chlamydomonas sp. W80] |
| 1036 | LIB3602-113-Q1-K1-C2 | 5821436 | BLASTX | 560 | 2.00E−57 | 66 | (AB031546) chloroplast w6 desaturase |
| | | | | | | | [Chlamydomonas sp. W80] |
| 1037 | LIB3602-120-Q1-K1-C2 | 5821436 | BLASTX | 466 | 1.00E−46 | 66 | (AB031546) chloroplast w6 desaturase |
| | | | | | | | [Chlamydomonas sp. W80] |
| 1038 | LIB3602-092-Q6-K6-D2 | 5821436 | BLASTX | 424 | 2.00E−41 | 74 | (AB031546) chloroplast w6 desaturase |
| | | | | | | | [Chlamydomonas sp. W80] |
| 1039 | LIB3602-021-Q6-K1-E5 | 5821436 | BLASTX | 314 | 4.00E−29 | 69 | (AB031546) chloroplast w6 desaturase |
| | | | | | | | [Chlamydomonas sp. W80] |
| 1040 | LIB3602-104-Q1-K1-D3 | 1173209 | BLASTX | 554 | 1.00E−56 | 78 | 40S RIBOSOMAL PROTEIN S16 |
| | | | | | | | >gi\|541835\|pir\|\|S41193 ribosomal protein S16 |
| | | | | | | | protein - upland cotton |
| | | | | | | | >gi\|439654\|emb\|CAA53567.1\| (X75954) RS16 |
| | | | | | | | protein, 40S subunit [Gossypium hirsutum] |
| 1041 | LIB3602-051-Q6-K1-E2 | 1173209 | BLASTX | 538 | 6.00E−55 | 74 | 40S RIBOSOMAL PROTEIN S16 |
| | | | | | | | >gi\|541835\|pir\|\|S41193 ribosomal protein S16 |
| | | | | | | | protein - upland cotton |
| | | | | | | | >gi\|439654\|emb\|CAA53567.1\| (X75954) RS16 |
| | | | | | | | protein, 40S subunit [Gossypium hirsutum] |
| 1042 | LIB3602-035-Q1-K1-B1 | 1173209 | BLASTX | 530 | 8.00E−54 | 75 | 40S RIBOSOMAL PROTEIN S16 |
| | | | | | | | >gi\|541835\|pir\|\|S41193 ribosomal protein S16 |
| | | | | | | | protein - upland cotton |
| | | | | | | | >gi\|439654\|emb\|CAA53567.1\| (X75954) RS16 |
| | | | | | | | protein, 40S subunit [Gossypium hirsutum] |
| 1043 | LIB3602-063-Q1-K6-C12 | 1173209 | BLASTX | 530 | 8.00E−54 | 75 | 40S RIBOSOMAL PROTEIN S16 |
| | | | | | | | >gi\|541835\|pir\|\|S41193 ribosomal protein S16 |
| | | | | | | | protein - upland cotton |
| | | | | | | | >gi\|439654\|emb\|CAA53567.1\| (X75954) RS16 |
| | | | | | | | protein, 40S subunit [Gossypium hirsutum] |
| 1044 | LIB3602-101-Q1-K1-H1 | 1173209 | BLASTX | 429 | 5.00E−53 | 82 | 40S RIBOSOMAL PROTEIN S16 |
| | | | | | | | >gi\|541835\|pir\|\|S41193 ribosomal protein S16 |
| | | | | | | | protein - upland cotton |
| | | | | | | | >gi\|439654\|emb\|CAA53567.1\| (X75954) RS16 |
| | | | | | | | protein, 40S subunit [Gossypium hirsutum] |
| 1045 | LIB3602-022-Q6-K1-H6 | 1173209 | BLASTX | 515 | 2.00E−52 | 77 | 40S RIBOSOMAL PROTEIN S16 |
| | | | | | | | >gi\|541835\|pir\|\|S41193 ribosomal protein S16 |
| | | | | | | | protein - upland cotton |
| | | | | | | | >gi\|439654\|emb\|CAA53567.1\| (X75954) RS16 |
| | | | | | | | protein, 40S subunit [Gossypium hirsutum] |
| 1046 | LIB3602-107-Q1-K1-D4 | 1173209 | BLASTX | 275 | 9.00E−50 | 66 | 40S RIBOSOMAL PROTEIN S16 |
| | | | | | | | >gi\|541835\|pir\|\|S41193 ribosomal protein S16 |
| | | | | | | | protein - upland cotton |
| | | | | | | | >gi\|439654\|emb\|CAA53567.1\| (X75954) RS16 |
| | | | | | | | protein, 40S subunit [Gossypium hirsutum] |
| 1047 | LIB3602-066-Q1-K6-D10 | 1173209 | BLASTX | 281 | 7.00E−25 | 65 | 40S RIBOSOMAL PROTEIN S16 |
| | | | | | | | >gi\|541835\|pir\|\|S41193 ribosomal protein S16 |
| | | | | | | | protein - upland cotton |
| | | | | | | | >gi\|439654\|emb\|CAA53567.1\| (X75954) RS16 |
| | | | | | | | protein, 40S subunit [Gossypium hirsutum] |
| 1048 | LIB3602-093-Q6-K6-C12 | 5932542 | BLASTX | 473 | 2.00E−47 | 77 | (AC009465) putative ribosomal protein s19 or s24 |
| | | | | | | | [Arabidopsis thaliana] |
| 1049 | LIB3602-012-Q6-K1-G9 | 5932542 | BLASTX | 469 | 7.00E−47 | 78 | (AC009465) putative ribosomal protein s19 or s24 |
| | | | | | | | [Arabidopsis thaliana] |
| 1050 | LIB3602-045-Q6-K1-H11 | 5932542 | BLASTX | 469 | 7.00E−47 | 78 | (AC009465) putative ribosomal protein s19 or s24 |
| | | | | | | | [Arabidopsis thaliana] |
| 1051 | LIB3602-060-Q6-K1-A8 | 5932542 | BLASTX | 466 | 2.00E−46 | 77 | (AC009465) putative ribosomal protein s19 or s24 |
| | | | | | | | [Arabidopsis thaliana] |
| 1052 | LIB3602-087-Q6-K1-F5 | 5932542 | BLASTX | 441 | 1.00E−43 | 76 | (AC009465) putative ribosomal protein s19 or s24 |
| | | | | | | | [Arabidopsis thaliana] |
| 1053 | LIB3602-025-Q6-K1-D8 | 5932542 | BLASTX | 341 | 4.00E−32 | 75 | (AC009465) putative ribosomal protein s19 or s24 |
| | | | | | | | [Arabidopsis thaliana] |
| 1054 | LIB3602-062-Q6-K1-H12 | 5932542 | BLASTX | 333 | 4.00E−31 | 74 | (AC009465) putative ribosomal protein s19 or s24 |
| | | | | | | | [Arabidopsis thaliana] |
| 1055 | LIB3602-119-Q1-K1-C12 | 5932542 | BLASTX | 290 | 2.00E−26 | 80 | (AC009465) putative ribosomal protein s19 or s24 |
| | | | | | | | [Arabidopsis thaliana] |
| 1056 | LIB3602-107-Q1-K1-F9 | 7428635 | BLASTX | 261 | 2.00E−22 | 42 | cyanoglobin - Synechocystis sp. (strain PCC 6803) |
| | | | | | | | >gi\|1653074\|dbj\|BAA17991.1\| (D90910) |
| | | | | | | | cyanoglobin [Synechocystis sp.] |
| 1057 | LIB3602-001-P1-K6-A10 | 7428635 | BLASTX | 261 | 2.00E−22 | 42 | cyanoglobin - Synechocystis sp. (strain PCC 6803) |
| | | | | | | | >gi\|1653074\|dbj\|BAA17991.1\| (D90910) |
| | | | | | | | cyanoglobin [Synechocystis sp.] |
| 1058 | LIB3602-089-Q6-K6-E2 | 7428635 | BLASTX | 259 | 4.00E−22 | 45 | cyanoglobin - Synechocystis sp. (strain PCC 6803) |
| | | | | | | | >gi\|1653074\|dbj\|BAA17991.1\| (D90910) |
| | | | | | | | cyanoglobin [Synechocystis sp.] |
| 1059 | LIB3602-056-Q6-K1-A1 | 7428635 | BLASTX | 194 | 1.00E−14 | 42 | cyanoglobin - Synechocystis sp. (strain PCC 6803) |
| | | | | | | | >gi\|1653074\|dbj\|BAA17991.1\| (D90910) |
| | | | | | | | cyanoglobin [Synechocystis sp.] |
| 1060 | LIB3602-023-Q6-K1-B2 | 7428635 | BLASTX | 183 | 3.00E−13 | 41 | cyanoglobin - Synechocystis sp. (strain PCC 6803) |
| | | | | | | | >gi\|1653074\|dbj\|BAA17991.1\| (D90910) |
| | | | | | | | cyanoglobin [Synechocystis sp.] |
| 1061 | LIB3602-050-Q6-K1-F8 | 7428635 | BLASTX | 171 | 6.00E−12 | 45 | cyanoglobin - Synechocystis sp. (strain PCC 6803) |
| | | | | | | | >gi\|1653074\|dbj\|BAA17991.1\| (D90910) |
| | | | | | | | cyanoglobin [Synechocystis sp.] |
| 1062 | LIB3602-100-Q1-K1-G12 | 7428635 | BLASTX | 166 | 2.00E−11 | 42 | cyanoglobin - Synechocystis sp. (strain PCC 6803) |
| | | | | | | | >gi\|1653074\|dbj\|BAA17991.1\| (D90910) |
| | | | | | | | cyanoglobin [Synechocystis sp.] |
| 1063 | LIB3602-053-Q6-K1-H5 | 7428635 | BLASTX | 151 | 1.00E−09 | 43 | cyanoglobin - Synechocystis sp. (strain PCC 6803) |
| | | | | | | | >gi\|1653074\|dbj\|BAA17991.1\| (D90910) |
| | | | | | | | cyanoglobin [Synechocystis sp.] |
| 1064 | LIB3602-078-Q6-K6-G8 | 2407314 | BLASTX | 691 | 9.00E−73 | 74 | (AF017998) chlorophyll a/b binding protein |
| | | | | | | | [Tetraselmis sp. RG-15] |
| 1065 | LIB3602-088-Q6-K6-H5 | 2407314 | BLASTX | 524 | 2.00E−67 | 70 | (AF017998) chlorophyll a/b binding protein |
| | | | | | | | [Tetraselmis sp. RG-15] |
| 1066 | LIB3602-023-Q6-K1-D5 | 2407314 | BLASTX | 591 | 4.00E−61 | 72 | (AF017998) chlorophyll a/b binding protein |
| | | | | | | | [Tetraselmis sp. RG-15] |
| 1067 | LIB3602-049-Q6-K1-F1 | 2407314 | BLASTX | 544 | 1.00E−55 | 76 | (AF017998) chlorophyll a/b binding protein |
| | | | | | | | [Tetraselmis sp. RG-15] |
| 1068 | LIB3602-032-Q6-K1-H5 | 2407314 | BLASTX | 539 | 4.00E−55 | 76 | (AF017998) chlorophyll a/b binding protein |
| | | | | | | | [Tetraselmis sp. RG-15] |
| 1069 | LIB3602-056-Q6-K1-G1 | 2407314 | BLASTX | 524 | 2.00E−53 | 76 | (AF017998) chlorophyll a/b binding protein |
| | | | | | | | [Tetraselmis sp. RG-15] |
| 1070 | LIB3602-052-Q6-K1-G5 | 2407314 | BLASTX | 479 | 4.00E−48 | 78 | (AF017998) chlorophyll a/b binding protein |
| | | | | | | | [Tetraselmis sp. RG-15] |
| 1071 | LIB3602-043-Q6-K1-A1 | 2407314 | BLASTX | 349 | 5.00E−33 | 75 | (AF017998) chlorophyll a/b binding protein |
| | | | | | | | [Tetraselmis sp. RG-15] |
| 1072 | LIB3602-092-Q6-K6-F7 | 131389 | BLASTX | 724 | 1.00E−76 | 69 | OXYGEN-EVOLVING ENHANCER PROTEIN 2 |
| | | | | | | | PRECURSOR (OEE2) >gi\|81253\|pir\|\|S00413 |
| | | | | | | | photosystem II oxygen-evolving complex protein 2 |
| | | | | | | | precursor - Chlamydomonas reinhardtii |
| | | | | | | | >gi\|167428\|gb\|AAA33088.1\| (M15187) oxygen- |
| | | | | | | | evolving enhancer protein 2 [Chlamydomonas |
| | | | | | | | reinhardt |
| 1073 | LIB3602-015-Q6-K1-H5 | 131389 | BLASTX | 694 | 4.00E−73 | 69 | OXYGEN-EVOLVING ENHANCER PROTEIN 2 |
| | | | | | | | PRECURSOR (OEE2) >gi\|81253\|pir\|\|S00413 |
| | | | | | | | photosystem II oxygen-evolving complex protein 2 |
| | | | | | | | precursor - Chlamydomonas reinhardtii |
| | | | | | | | >gi\|167428\|gb\|AAA33088.1\| (M15187) oxygen- |
| | | | | | | | evolving enhancer protein 2 [Chlamydomonas |
| | | | | | | | reinhardt |
| 1074 | LIB3602-081-Q6-K6-D8 | 131389 | BLASTX | 568 | 2.00E−58 | 70 | OXYGEN-EVOLVING ENHANCER PROTEIN 2 |
| | | | | | | | PRECURSOR (OEE2) >gi\|81253\|pir\|\|S00413 |
| | | | | | | | photosystem II oxygen-evolving complex protein 2 |
| | | | | | | | precursor - Chlamydomonas reinhardtii |
| | | | | | | | >gi\|167428\|gb\|AAA33088.1\| (M15187) oxygen- |
| | | | | | | | evolving enhancer protein 2 [Chlamydomonas |
| | | | | | | | reinhardt |
| 1075 | LIB3602-009-Q6-K1-H12 | 131389 | BLASTX | 391 | 8.00E−38 | 57 | OXYGEN-EVOLVING ENHANCER PROTEIN 2 |
| | | | | | | | PRECURSOR (OEE2) >gi\|81253\|pir\|\|S00413 |
| | | | | | | | photosystem II oxygen-evolving complex protein 2 |
| | | | | | | | precursor - Chlamydomonas reinhardtii |
| | | | | | | | >gi\|167428\|gb\|AAA33088.1\| (M15187) oxygen- |
| | | | | | | | evolving enhancer protein 2 [Chlamydomonas |
| | | | | | | | reinhardt |
| 1076 | LIB3602-017-Q6-K1-C9 | 131389 | BLASTX | 374 | 1.00E−35 | 77 | OXYGEN-EVOLVING ENHANCER PROTEIN 2 |
| | | | | | | | PRECURSOR (OEE2) >gi\|81253\|pir\|\|S00413 |
| | | | | | | | photosystem II oxygen-evolving complex protein 2 |
| | | | | | | | precursor - Chlamydomonas reinhardtii |
| | | | | | | | >gi\|167428\|gb\|AAA33088.1\| (M15187) oxygen- |
| | | | | | | | evolving enhancer protein 2 [Chlamydomonas |
| | | | | | | | reinhardt |
| 1077 | LIB3602-047-Q6-K1-E7 | 131389 | BLASTX | 356 | 1.00E−33 | 58 | OXYGEN-EVOLVING ENHANCER PROTEIN 2 |
| | | | | | | | PRECURSOR (OEE2) >gi\|81253\|pir\|\|S00413 |
| | | | | | | | photosystem II oxygen-evolving complex protein 2 |
| | | | | | | | precursor - Chlamydomonas reinhardtii |
| | | | | | | | >gi\|167428\|gb\|AAA33088.1\| (M15187) oxygen- |
| | | | | | | | evolving enhancer protein 2 [Chlamydomonas |
| | | | | | | | reinhardt |
| 1078 | LIB3602-040-Q6-K1-D4 | 131389 | BLASTX | 323 | 9.00E−30 | 59 | OXYGEN-EVOLVING ENHANCER PROTEIN 2 |
| | | | | | | | PRECURSOR (OEE2) >gi\|81253\|pir\|\|S00413 |
| | | | | | | | photosystem II oxygen-evolving complex protein 2 |
| | | | | | | | precursor - Chlamydomonas reinhardtii |
| | | | | | | | >gi\|167428\|gb\|AAA33088.1\| (M15187) oxygen- |
| | | | | | | | evolving enhancer protein 2 [Chlamydomonas |
| | | | | | | | reinhardt |
| 1079 | LIB3602-037-Q6-K1-C4 | 131389 | BLASTX | 277 | 2.00E−24 | 80 | OXYGEN-EVOLVING ENHANCER PROTEIN 2 |
| | | | | | | | PRECURSOR (OEE2) >gi\|81253\|pir\|\|S00413 |
| | | | | | | | photosystem II oxygen-evolving complex protein 2 |
| | | | | | | | precursor - Chlamydomonas reinhardtii |
| | | | | | | | >gi\|167428\|gb\|AAA33088.1\| (M15187) oxygen- |
| | | | | | | | evolving enhancer protein 2 [Chlamydomonas |
| | | | | | | | reinhardt |
| 1080 | LIB3602-104-Q1-K1-B9 | 6723436 | BLASTX | 439 | 3.00E−43 | 64 | (AL132965) 60S RIBOSOMAL PROTEIN-like |
| | | | | | | | [Arabidopsis thaliana] |
| 1081 | LIB3602-088-Q6-K6-D6 | 6723436 | BLASTX | 439 | 3.00E−43 | 64 | (AL132965) 60S RIBOSOMAL PROTEIN-like |
| | | | | | | | [Arabidopsis thaliana] |
| 1082 | LIB3602-048-Q6-K1QA-C7 | 6723436 | BLASTX | 439 | 3.00E−43 | 64 | (AL132965) 60S RIBOSOMAL PROTEIN-like |
| | | | | | | | [Arabidopsis thaliana] |
| 1083 | LIB3602-011-Q6-K1-E12 | 6723436 | BLASTX | 431 | 2.00E−42 | 63 | (AL132965) 60S RIBOSOMAL PROTEIN-like |
| | | | | | | | [Arabidopsis thaliana] |
| 1084 | LIB3602-017-Q6-K1-A2 | 6723436 | BLASTX | 268 | 2.00E−23 | 59 | (AL132965) 60S RIBOSOMAL PROTEIN-like |
| | | | | | | | [Arabidopsis thaliana] |
| 1085 | LIB3602-068-Q1-K1-D7 | 6723436 | BLASTX | 222 | 9.00E−18 | 89 | (AL132965) 60S RIBOSOMAL PROTEIN-like |
| | | | | | | | [Arabidopsis thaliana] |
| 1086 | LIB3602-078-Q6-K6-B9 | 6723436 | BLASTX | 197 | 3.00E−15 | 54 | (AL132965) 60S RIBOSOMAL PROTEIN-like |
| | | | | | | | [Arabidopsis thaliana] |
| 1087 | LIB3602-066-Q1-K6-B9 | 6723436 | BLASTX | 173 | 6.00E−13 | 88 | (AL132965) 60S RIBOSOMAL PROTEIN-like |
| | | | | | | | [Arabidopsis thaliana] |
| 1088 | LIB3602-029-Q6-K1-E7 | 7488205 | BLASTX | 205 | 2.00E−20 | 43 | probable serine/threonine-specific protein kinase |
| | | | | | | | (EC 2.7.1.—) T22A6.310 - Arabidopsis thaliana |
| | | | | | | | >gi\|5051790\|emb\|CAB45083.1\| (AL078637) |
| | | | | | | | putative protein kinase [Arabidopsis thaliana] |
| | | | | | | | >gi\|7269298\|emb\|CAB79358.1\| (AL161561) |
| | | | | | | | putative protein kinase [Arabidops |
| 1089 | LIB3602-034-Q6-K1-B4 | 7488205 | BLASTX | 187 | 8.00E−14 | 40 | probable serine/threonine-specific protein kinase |
| | | | | | | | (EC 2.7.1.—) T22A6.310 - Arabidopsis thaliana |
| | | | | | | | >gi\|5051790\|emb\|CAB45083.1\| (AL078637) |
| | | | | | | | putative protein kinase [Arabidopsis thaliana] |
| | | | | | | | >gi\|7269298\|emb\|CAB79358.1\| (AL161561) |
| | | | | | | | putative protein kinase [Arabidops |
| 1090 | LIB3602-010-Q6-K1-H10 | 7488205 | BLASTX | 187 | 1.00E−13 | 38 | probable serine/threonine-specific protein kinase |
| | | | | | | | (EC 2.7.1.—) T22A6.310 - Arabidopsis thaliana |
| | | | | | | | >gi\|5051790\|emb\|CAB45083.1\| (AL078637) |
| | | | | | | | putative protein kinase [Arabidopsis thaliana] |
| | | | | | | | >gi\|7269298\|emb\|CAB79358.1\| (AL161561) |
| | | | | | | | putative protein kinase [Arabidops |
| 1091 | LIB3602-035-Q1-K1-B4 | 7488205 | BLASTX | 181 | 5.00E−13 | 40 | probable serine/threonine-specific protein kinase |
| | | | | | | | (EC 2.7.1.—) T22A6.310 - Arabidopsis thaliana |
| | | | | | | | >gi\|5051790\|emb\|CAB45083.1\| (AL078637) |
| | | | | | | | putative protein kinase [Arabidopsis thaliana] |
| | | | | | | | >gi\|7269298\|emb\|CAB79358.1\| (AL161561) |
| | | | | | | | putative protein kinase [Arabidops |
| 1092 | LIB3602-019-Q6-K1-C7 | 7488205 | BLASTX | 181 | 5.00E−13 | 28 | probable serine/threonine-specific protein kinase |
| | | | | | | | (EC 2.7.1.—) T22A6.310 - Arabidopsis thaliana |
| | | | | | | | >gi\|5051790\|emb\|CAB45083.1\| (AL078637) |
| | | | | | | | putative protein kinase [Arabidopsis thaliana] |
| | | | | | | | >gi\|7269298\|emb\|CAB79358.1\| (AL161561) |
| | | | | | | | putative protein kinase [Arabidops |
| 1093 | LIB3602-073-Q1-K1-B12 | 7488205 | BLASTX | 180 | 6.00E−13 | 39 | probable serine/threonine-specific protein kinase |
| | | | | | | | (EC 2.7.1.—) T22A6.310 - Arabidopsis thaliana |
| | | | | | | | >gi\|5051790\|emb\|CAB45083.1\| (AL078637) |
| | | | | | | | putative protein kinase [Arabidopsis thaliana] |
| | | | | | | | >gi\|7269298\|emb\|CAB79358.1\| (AL161561) |
| | | | | | | | putative protein kinase [Arabidops |
| 1094 | LIB3602-025-Q6-K1-G5 | 7488205 | BLASTX | 171 | 7.00E−12 | 31 | probable serine/threonine-specific protein kinase |
| | | | | | | | (EC 2.7.1.—) T22A6.310 - Arabidopsis thaliana |
| | | | | | | | >gi\|5051790\|emb\|CAB45083.1\| (AL078637) |
| | | | | | | | putative protein kinase [Arabidopsis thaliana] |
| | | | | | | | >gi\|7269298\|emb\|CAB79358.1\| (AL161561) |
| | | | | | | | putative protein kinase [Arabidops |
| 1095 | LIB3602-058-Q6-K1-A7 | 7488205 | BLASTX | 150 | 2.00E−09 | 35 | probable serine/threonine-specific protein kinase |
| | | | | | | | (EC 2.7.1.—) T22A6.310 - Arabidopsis thaliana |
| | | | | | | | >gi\|5051790\|emb\|CAB45083.1\| (AL078637) |
| | | | | | | | putative protein kinase [Arabidopsis thaliana] |
| | | | | | | | >gi\|7269298\|emb\|CAB79358.1\| (AL161561) |
| | | | | | | | putative protein kinase [Arabidops |
| 1096 | LIB3602-023-Q6-K1-B3 | 7630007 | BLASTX | 783 | 1.00E−83 | 89 | (AL132960) ribosomal protein S3a homolog |
| | | | | | | | [Arabidopsis thaliana] |
| 1097 | LIB3602-115-Q1-K1-B10 | 7630007 | BLASTX | 737 | 3.00E−78 | 89 | (AL132960) ribosomal protein S3a homolog |
| | | | | | | | [Arabidopsis thaliana] |
| 1098 | LIB3602-018-Q6-K1-G12 | 7630007 | BLASTX | 722 | 2.00E−76 | 88 | (AL132960) ribosomal protein S3a homolog |
| | | | | | | | [Arabidopsis thaliana] |
| 1099 | LIB3602-058-Q6-K1-F9 | 7630007 | BLASTX | 708 | 7.00E−75 | 89 | (AL132960) ribosomal protein S3a homolog |
| | | | | | | | [Arabidopsis thaliana] |
| 1100 | LIB3602-010-Q6-K1-C7 | 7630007 | BLASTX | 695 | 3.00E−73 | 89 | (AL132960) ribosomal protein S3a homolog |
| | | | | | | | [Arabidopsis thaliana] |
| 1101 | LIB3602-047-Q6-K1-D9 | 7630007 | BLASTX | 665 | 8.00E−70 | 89 | (AL132960) ribosomal protein S3a homolog |
| | | | | | | | [Arabidopsis thaliana] |
| 1102 | LIB3602-065-Q1-K6-A10 | 7630007 | BLASTX | 664 | 1.00E−69 | 91 | (AL132960) ribosomal protein S3a homolog |
| | | | | | | | [Arabidopsis thaliana] |
| 1103 | LIB3602-065-Q1-K6-H1 | 7630007 | BLASTX | 632 | 6.00E−66 | 86 | (AL132960) ribosomal protein S3a homolog |
| | | | | | | | [Arabidopsis thaliana] |
| 1104 | LIB3602-012-Q6-K1-C6 | 6729494 | BLASTX | 680 | 2.00E−71 | 78 | (AL132966) 60S RIBOSOMAL PROTEIN L12- |
| | | | | | | | like [Arabidopsis thaliana] |
| 1105 | LIB3602-057-Q6-K1-B6 | 6729494 | BLASTX | 680 | 2.00E−71 | 78 | (AL132966) 60S RIBOSOMAL PROTEIN L12- |
| | | | | | | | like [Arabidopsis thaliana] |
| 1106 | LIB3602-072-Q1-K1-H8 | 6729494 | BLASTX | 667 | 6.00E−70 | 78 | (AL132966) 60S RIBOSOMAL PROTEIN L12- |
| | | | | | | | like [Arabidopsis thaliana] |
| 1107 | LIB3602-015-Q6-K1-B5 | 6729494 | BLASTX | 448 | 2.00E−44 | 75 | (AL132966) 60S RIBOSOMAL PROTEIN L12- |
| | | | | | | | like [Arabidopsis thaliana] |
| 1108 | LIB3602-020-Q6-K1-A4 | 6729494 | BLASTX | 399 | 9.00E−39 | 74 | (AL132966) 60S RIBOSOMAL PROTEIN L12- |
| | | | | | | | like [Arabidopsis thaliana] |
| 1109 | LIB3602-059-Q6-K1-A1 | 6729494 | BLASTX | 285 | 1.00E−25 | 65 | (AL132966) 60S RIBOSOMAL PROTEIN L12- |
| | | | | | | | like [Arabidopsis thaliana] |
| 1110 | LIB3602-043-Q6-K1-C5 | 6729494 | BLASTX | 176 | 4.00E−13 | 64 | (AL132966) 60S RIBOSOMAL PROTEIN L12- |
| | | | | | | | like [Arabidopsis thaliana] |
| 1111 | LIB3602-078-Q6-K6-F12 | 5762260 | BLASTX | 693 | 5.00E−73 | 75 | (AB008848) Csf-3 [Cucumis sativus] |
| 1112 | LIB3602-112-Q1-K1-C2 | 5762260 | BLASTX | 655 | 1.00E−68 | 74 | (AB008848) Csf-3 [Cucumis sativus] |
| 1113 | LIB3602-093-Q6-K6-E1 | 5762260 | BLASTX | 266 | 5.00E−45 | 65 | (AB008848) Csf-3 [Cucumis sativus] |
| 1114 | LIB3602-086-Q6-K1-H5 | 5762260 | BLASTX | 312 | 9.00E−43 | 74 | (AB008848) Csf-3 [Cucumis sativus] |
| 1115 | LIB3602-026-Q6-K1-C10 | 5762260 | BLASTX | 406 | 2.00E−39 | 72 | (AB008848) Csf-3 [Cucumis sativus] |
| 1116 | LIB3602-088-Q6-K6-B11 | 5762260 | BLASTX | 312 | 1.00E−31 | 74 | (AB008848) Csf-3 [Cucumis sativus] |
| 1117 | LIB3602-118-Q1-K1-B11 | 5762260 | BLASTX | 206 | 7.00E−30 | 70 | (AB008848) Csf-3 [Cucumis sativus] |
| 1118 | LIB3602-116-Q1-K1-G11 | 1702984 | BLASTX | 762 | 1.00E−100 | 90 | 14-3-3-LIKE PROTEIN >gi\|1361946\|pir\|\|S57283 |
| | | | | | | | 14-3-3 brain protein homolog - Chlamydomonas |
| | | | | | | | reinhardtii >gi\|1015462\|emb\|CAA55964.1\| |
| | | | | | | | (X79445) 14-3-3 protein [Chlamydomonas |
| | | | | | | | reinhardtii] |
| 1119 | LIB3602-094-Q6-K6-G11 | 1702984 | BLASTX | 879 | 2.00E−94 | 92 | 14-3-3-LIKE PROTEIN >gi\|1361946\|pir\|\|S57283 |
| | | | | | | | 14-3-3 brain protein homolog - Chlamydomonas |
| | | | | | | | reinhardtii >gi\|1015462\|emb\|CAA55964.1\| |
| | | | | | | | (X79445) 14-3-3 protein [Chlamydomonas |
| | | | | | | | reinhardtii] |
| 1120 | LIB3602-014-Q6-K1-C8 | 1702984 | BLASTX | 725 | 8.00E−77 | 96 | 14-3-3-LIKE PROTEIN >gi\|1361946\|pir\|\|S57283 |
| | | | | | | | 14-3-3 brain protein homolog - Chlamydomonas |
| | | | | | | | reinhardtii >gi\|1015462\|emb\|CAA55964.1\| |
| | | | | | | | (X79445) 14-3-3 protein [Chlamydomonas |
| | | | | | | | reinhardtii] |
| 1121 | LIB3602-050-Q6-K1-C10 | 1702984 | BLASTX | 331 | 1.00E−30 | 96 | 14-3-3-LIKE PROTEIN >gi\|1361946\|pir\|\|S57283 |
| | | | | | | | 14-3-3 brain protein homolog - Chlamydomonas |
| | | | | | | | reinhardtii >gi\|1015462\|emb\|CAA55964.1\| |
| | | | | | | | (X79445) 14-3-3 protein [Chlamydomonas |
| | | | | | | | reinhardtii] |
| 1122 | LIB3602-016-Q6-K1-A9 | 1702984 | BLASTX | 291 | 5.00E−26 | 98 | 14-3-3-LIKE PROTEIN >gi\|1361946\|pir\|\|S57283 |
| | | | | | | | 14-3-3 brain protein homolog - Chlamydomonas |
| | | | | | | | reinhardtii >gi\|1015462\|emb\|CAA55964.1\| |
| | | | | | | | (X79445) 14-3-3 protein [Chlamydomonas |
| | | | | | | | reinhardtii] |
| 1123 | LIB3602-026-Q6-K1-F8 | 1702984 | BLASTX | 291 | 6.00E−26 | 98 | 14-3-3-LIKE PROTEIN >gi\|1361946\|pir\|\|S57283 |
| | | | | | | | 14-3-3 brain protein homolog - Chlamydomonas |
| | | | | | | | reinhardtii >gi\|1015462\|emb\|CAA55964.1\| |
| | | | | | | | (X79445) 14-3-3 protein [Chlamydomonas |
| | | | | | | | reinhardtii] |
| 1124 | LIB3602-048-Q6-K1QA- | 1702984 | BLASTX | 277 | 3.00E−24 | 98 | 14-3-3-LIKE PROTEIN >gi\|1361946\|pir\|\|S57283 |
| | G12 | | | | | | 14-3-3 brain protein homolog - Chlamydomonas |
| | | | | | | | reinhardtii >gi\|1015462\|emb\|CAA55964.1\| |
| | | | | | | | (X79445) 14-3-3 protein [Chlamydomonas |
| | | | | | | | reinhardtii] |
| 1125 | LIB3602-015-Q6-K1-H7 | 1710565 | BLASTX | 428 | 5.00E−42 | 81 | 60S RIBOSOMAL PROTEIN L44 (L41) |
| | | | | | | | >gi\|1255906\|dbj\|BAA11057.1\| (D67040) ribosomal |
| | | | | | | | protein L41 [Candida utilis] |
| 1126 | LIB3602-047-Q6-K1-G7 | 1710565 | BLASTX | 377 | 4.00E−36 | 83 | 60S RIBOSOMAL PROTEIN L44 (L41) |
| | | | | | | | >gi\|1255906\|dbj\|BAA11057.1\| (D67040) ribosomal |
| | | | | | | | protein L41 [Candida utilis] |
| 1127 | LIB3602-090-Q6-K6-A9 | 1710565 | BLASTX | 376 | 7.00E−36 | 79 | 60S RIBOSOMAL PROTEIN L44 (L41) |
| | | | | | | | >gi\|1255906\|dbj\|BAA11057.1\| (D67040) ribosomal |
| | | | | | | | protein L41 [Candida utilis] |
| 1128 | LIB3602-049-Q6-K1-H6 | 1710565 | BLASTX | 342 | 5.00E−32 | 82 | 60S RIBOSOMAL PROTEIN L44 (L41) |
| | | | | | | | >gi\|1255906\|dbj\|BAA11057.1\| (D67040) ribosomal |
| | | | | | | | protein L41 [Candida utilis] |
| 1129 | LIB3602-082-Q6-K6-A2 | 1710565 | BLASTX | 234 | 1.00E−28 | 74 | 60S RIBOSOMAL PROTEIN L44 (L41) |
| | | | | | | | >gi\|1255906\|dbj\|BAA11057.1\| (D67040) ribosomal |
| | | | | | | | protein L41 [Candida utilis] |
| 1130 | LIB3602-048-Q6-K1QA-E5 | 1710565 | BLASTX | 282 | 6.00E−25 | 62 | 60S RIBOSOMAL PROTEIN L44 (L41) |
| | | | | | | | >gi\|1255906\|dbj\|BAA11057.1\| (D67040) ribosomal |
| | | | | | | | protein L41 [Candida utilis] |
| 1131 | LIB3602-088-Q6-K6-F8 | 1710565 | BLASTX | 275 | 5.00E−24 | 80 | 60S RIBOSOMAL PROTEIN L44 (L41) |
| | | | | | | | >gi\|1255906\|dbj\|BAA11057.1\| (D67040) ribosomal |
| | | | | | | | protein L41 [Candida utilis] |
| 1132 | LIB3602-107-Q1-K1-C8 | 119167 | BLASTX | 415 | 1.00E−40 | 83 | ELONGATION FACTOR 2 (EF-2) |
| | | | | | | | >gi\|421771\|pir\|\|S32819 translation elongation factor |
| | | | | | | | eEF-2 - Chlorella kessleri |
| | | | | | | | >gi\|167245\|gb\|AAA33028.1\| (M68064) elongation |
| | | | | | | | factor 2 [Chlorella kessleri] |
| | | | | | | | >gi\|228693\|prf\|\|1808323A elongation factor 2 |
| | | | | | | | [Chlorella kessleri] |
| 1133 | LIB3602-021-Q6-K1-D11 | 119167 | BLASTX | 400 | 3.00E−39 | 91 | ELONGATION FACTOR 2 (EF-2) |
| | | | | | | | >gi\|421771\|pir\|\|S32819 translation elongation factor |
| | | | | | | | eEF-2 - Chlorella kessleri |
| | | | | | | | >gi\|167245\|gb\|AAA33028.1\| (M68064) elongation |
| | | | | | | | factor 2 [Chlorella kessleri] |
| | | | | | | | >gi\|228693\|prf\|\|1808323A elongation factor 2 |
| | | | | | | | [Chlorella kessleri] |
| 1134 | LIB3602-086-Q6-K1-C8 | 119167 | BLASTX | 372 | 2.00E−35 | 58 | ELONGATION FACTOR 2 (EF-2) |
| | | | | | | | >gi\|421771\|pir\|\|S32819 translation elongation factor |
| | | | | | | | eEF-2 - Chlorella kessleri |
| | | | | | | | >gi\|167245\|gb\|AAA33028.1\| (M68064) elongation |
| | | | | | | | factor 2 [Chlorella kessleri] |
| | | | | | | | >gi\|228693\|prf\|\|1808323A elongation factor 2 |
| | | | | | | | [Chlorella kessleri] |
| 1135 | LIB3602-071-Q1-K1-A12 | 119167 | BLASTX | 338 | 1.00E−31 | 79 | ELONGATION FACTOR 2 (EF-2) |
| | | | | | | | >gi\|421771\|pir\|\|S32819 translation elongation factor |
| | | | | | | | eEF-2 - Chlorella kessleri |
| | | | | | | | >gi\|167245\|gb\|AAA33028.1\| (M68064) elongation |
| | | | | | | | factor 2 [Chlorella kessleri] |
| | | | | | | | >gi\|228693\|prf\|\|1808323A elongation factor 2 |
| | | | | | | | [Chlorella kessleri] |
| 1136 | LIB3602-066-Q1-K6-A12 | 119167 | BLASTX | 318 | 3.00E−29 | 76 | ELONGATION FACTOR 2 (EF-2) |
| | | | | | | | >gi\|421771\|pir\|\|S32819 translation elongation factor |
| | | | | | | | eEF-2 - Chlorella kessleri |
| | | | | | | | >gi\|167245\|gb\|AAA33028.1\| (M68064) elongation |
| | | | | | | | factor 2 [Chlorella kessleri] |
| | | | | | | | >gi\|228693\|prf\|\|1808323A elongation factor 2 |
| | | | | | | | [Chlorella kessleri] |
| 1137 | LIB3602-014-Q6-K1-C3 | 119167 | BLASTX | 215 | 2.00E−17 | 78 | ELONGATION FACTOR 2 (EF-2) |
| | | | | | | | >gi\|421771\|pir\|\|S32819 translation elongation factor |
| | | | | | | | eEF-2 - Chlorella kessleri |
| | | | | | | | >gi\|167245\|gb\|AAA33028.1\| (M68064) elongation |
| | | | | | | | factor 2 [Chlorella kessleri] |
| | | | | | | | >gi\|228693\|prf\|\|1808323A elongation factor 2 |
| | | | | | | | [Chlorella kessleri] |
| 1138 | LIB3602-014-Q6-K1-E6 | 119167 | BLASTX | 170 | 1.00E−11 | 41 | ELONGATION FACTOR 2 (EF-2) |
| | | | | | | | >gi\|421771\|pir\|\|S32819 translation elongation factor |
| | | | | | | | eEF-2 - Chlorella kessleri |
| | | | | | | | >gi\|167245\|gb\|AAA33028.1\| (M68064) elongation |
| | | | | | | | factor 2 [Chlorella kessleri] |
| | | | | | | | >gi\|228693\|prf\|\|1808323A elongation factor 2 |
| | | | | | | | [Chlorella kessleri] |
| 1139 | LIB3602-076-Q6-K6-E12 | 6225750 | BLASTX | 524 | 3.00E−53 | 68 | NUCLEOSIDE DIPHOSPHATE KINASE I (NDK |
| | | | | | | | I) (NDP KINASE I) (NDPK I) |
| | | | | | | | >gi\|3309053\|gb\|AAC25999.1\| (AF072289) |
| | | | | | | | nucleoside diphosphate kinase I |
| | | | | | | | [Mesembryanthemum crystallinum] |
| 1140 | LIB3602-092-Q6-K6-D6 | 6225750 | BLASTX | 524 | 3.00E−53 | 68 | NUCLEOSIDE DIPHOSPHATE KINASE I (NDK |
| | | | | | | | I) (NDP KINASE I) (NDPK I) |
| | | | | | | | >gi\|3309053\|gb\|AAC25999.1\| (AF072289) |
| | | | | | | | nucleoside diphosphate kinase I |
| | | | | | | | [Mesembryanthemum crystallinum] |
| 1141 | LIB3602-115-Q1-K1-H3 | 6225750 | BLASTX | 427 | 8.00E−42 | 68 | NUCLEOSIDE DIPHOSPHATE KINASE I (NDK |
| | | | | | | | I) (NDP KINASE I) (NDPK I) |
| | | | | | | | >gi\|3309053\|gb\|AAC25999.1\| (AF072289) |
| | | | | | | | nucleoside diphosphate kinase I |
| | | | | | | | [Mesembryanthemum crystallinum] |
| 1142 | LIB3602-114-Q1-K1-B8 | 6225750 | BLASTX | 378 | 5.00E−36 | 73 | NUCLEOSIDE DIPHOSPHATE KINASE I (NDK |
| | | | | | | | I) (NDP KINASE I) (NDPK I) |
| | | | | | | | >gi\|3309053\|gb\|AAC25999.1\| (AF072289) |
| | | | | | | | nucleoside diphosphate kinase I |
| | | | | | | | [Mesembryanthemum crystallinum] |
| 1143 | LIB3602-105-Q1-K1-F6 | 6225750 | BLASTX | 281 | 1.00E−24 | 69 | NUCLEOSIDE DIPHOSPHATE KINASE I (NDK |
| | | | | | | | I) (NDP KINASE I) (NDPK I) |
| | | | | | | | >gi\|3309053\|gb\|AAC25999.1\| (AF072289) |
| | | | | | | | nucleoside diphosphate kinase I |
| | | | | | | | [Mesembryanthemum crystallinum] |
| 1144 | LIB3602-062-Q6-K1-F1 | 6225750 | BLASTX | 262 | 1.00E−22 | 68 | NUCLEOSIDE DIPHOSPHATE KINASE I (NDK |
| | | | | | | | I) (NDP KINASE I) (NDPK I) |
| | | | | | | | >gi\|3309053\|gb\|AAC25999.1\| (AF072289) |
| | | | | | | | nucleoside diphosphate kinase I |
| | | | | | | | [Mesembryanthemum crystallinum] |
| 1145 | LIB3602-093-Q6-K6-B8 | 6225750 | BLASTX | 152 | 1.00E−09 | 53 | NUCLEOSIDE DIPHOSPHATE KINASE I (NDK |
| | | | | | | | I) (NDP KINASE I) (NDPK I) |
| | | | | | | | >gi\|3309053\|gb\|AAC25999.1\| (AF072289) |
| | | | | | | | nucleoside diphosphate kinase I |
| | | | | | | | [Mesembryanthemum crystallinum] |
| 1146 | LIB3602-062-Q6-K1-E12 | 7461899 | BLASTX | 580 | 8.00E−60 | 62 | translation elongation factor EF-3 homolog A666L - |
| | | | | | | | Chlorella virus PBCV-1 |
| | | | | | | | >gi\|2447123\|gb\|AAC96981.1\| (U42580) Chlorella |
| | | | | | | | virus CVK2 translation elongation factor-3 |
| | | | | | | | homolog, refer to GenBank Accession Number |
| | | | | | | | D16505 [Paramecium bursaria Chlorella virus 1] |
| 1147 | LIB3602-066-Q1-K6-G12 | 7461899 | BLASTX | 511 | 1.00E−51 | 59 | translation elongation factor EF-3 homolog A666L - |
| | | | | | | | Chlorella virus PBCV-1 |
| | | | | | | | >gi\|2447123\|gb\|AAC96981.1\| (U42580) Chlorella |
| | | | | | | | virus CVK2 translation elongation factor-3 |
| | | | | | | | homolog, refer to GenBank Accession Number |
| | | | | | | | D16505 [Paramecium bursaria Chlorella virus 1] |
| 1148 | LIB3602-009-Q6-K1-C12 | 7461899 | BLASTX | 459 | 1.00E−45 | 51 | translation elongation factor EF-3 homolog A666L - |
| | | | | | | | Chlorella virus PBCV-1 |
| | | | | | | | >gi\|2447123\|gb\|AAC96981.1\| (U42580) Chlorella |
| | | | | | | | virus CVK2 translation elongation factor-3 |
| | | | | | | | homolog, refer to GenBank Accession Number |
| | | | | | | | D16505 [Paramecium bursaria Chlorella virus 1] |
| 1149 | LIB3602-045-Q6-K1-A7 | 7461899 | BLASTX | 435 | 7.00E−43 | 61 | translation elongation factor EF-3 homolog A666L - |
| | | | | | | | Chlorella virus PBCV-1 |
| | | | | | | | >gi\|2447123\|gb\|AAC96981.1\| (U42580) Chlorella |
| | | | | | | | virus CVK2 translation elongation factor-3 |
| | | | | | | | homolog, refer to GenBank Accession Number |
| | | | | | | | D16505 [Paramecium bursaria Chlorella virus 1] |
| 1150 | LIB3602-089-Q6-K6-A1 | 7461899 | BLASTX | 336 | 4.00E−38 | 45 | translation elongation factor EF-3 homolog A666L - |
| | | | | | | | Chlorella virus PBCV-1 |
| | | | | | | | >gi\|2447123\|gb\|AAC96981.1\| (U42580) Chlorella |
| | | | | | | | virus CVK2 translation elongation factor-3 |
| | | | | | | | homolog, refer to GenBank Accession Number |
| | | | | | | | D16505 [Paramecium bursaria Chlorella virus 1] |
| 1151 | LIB3602-029-Q6-K1-G9 | 7461899 | BLASTX | 269 | 2.00E−23 | 43 | translation elongation factor EF-3 homolog A666L - |
| | | | | | | | Chlorella virus PBCV-1 |
| | | | | | | | >gi\|2447123\|gb\|AAC96981.1\| (U42580) Chlorella |
| | | | | | | | virus CVK2 translation elongation factor-3 |
| | | | | | | | homolog, refer to GenBank Accession Number |
| | | | | | | | D16505 [Paramecium bursaria Chlorella virus 1] |
| 1152 | LIB3602-059-Q6-K1-G9 | 7461899 | BLASTX | 153 | 7.00E−10 | 33 | translation elongation factor EF-3 homolog A666L - |
| | | | | | | | Chlorella virus PBCV-1 |
| | | | | | | | >gi\|2447123\|gb\|AAC96981.1\| (U42580) Chlorella |
| | | | | | | | virus CVK2 translation elongation factor-3 |
| | | | | | | | homolog, refer to GenBank Accession Number |
| | | | | | | | D16505 [Paramecium bursaria Chlorella virus 1] |
| 1153 | LIB3602-029-Q6-K1-F12 | 7268983 | BLASTX | 638 | 1.00E−66 | 74 | (AL161494) putative ribosomal protein L19 |
| | | | | | | | [Arabidopsis thaliana] |
| 1154 | LIB3602-008-Q6-K1-A5 | 7268983 | BLASTX | 631 | 8.00E−66 | 74 | (AL161494) putative ribosomal protein L19 |
| | | | | | | | [Arabidopsis thaliana] |
| 1155 | LIB3602-070-Q1-K1-C3 | 7268983 | BLASTX | 582 | 5.00E−60 | 72 | (AL161494) putative ribosomal protein L19 |
| | | | | | | | [Arabidopsis thaliana] |
| 1156 | LIB3602-088-Q6-K6-E1 | 7268983 | BLASTX | 516 | 3.00E−52 | 64 | (AL161494) putative ribosomal protein L19 |
| | | | | | | | [Arabidopsis thaliana] |
| 1157 | LIB3602-008-Q6-K1-F11 | 7268983 | BLASTX | 432 | 2.00E−42 | 70 | (AL161494) putative ribosomal protein L19 |
| | | | | | | | [Arabidopsis thaliana] |
| 1158 | LIB3602-083-Q6-K6-E9 | 7268983 | BLASTX | 297 | 1.00E−26 | 66 | (AL161494) putative ribosomal protein L19 |
| | | | | | | | [Arabidopsis thaliana] |
| 1159 | LIB3602-051-Q6-K1-C3 | 7268983 | BLASTX | 175 | 7.00E−14 | 73 | (AL161494) putative ribosomal protein L19 |
| | | | | | | | [Arabidopsis thaliana] |
| 1160 | LIB3602-019-Q6-K1-G12 | 6525246 | BLASTX | 200 | 1.00E−15 | 57 | (U12390) beta-galactosidase alpha peptide [Cloning |
| | | | | | | | vector pSport1] |
| 1161 | LIB3602-040-Q6-K1-F7 | 6525246 | BLASTX | 171 | 4.00E−12 | 52 | (U12390) beta-galactosidase alpha peptide [Cloning |
| | | | | | | | vector pSport1] |
| 1162 | LIB3602-037-Q6-K1-B7 | 6525246 | BLASTX | 166 | 1.00E−11 | 54 | (U12390) beta-galactosidase alpha peptide [Cloning |
| | | | | | | | vector pSport1] |
| 1163 | LIB3602-013-Q6-K1-A12 | 6525246 | BLASTX | 163 | 3.00E−11 | 45 | (U12390) beta-galactosidase alpha peptide [Cloning |
| | | | | | | | vector pSport1] |
| 1164 | LIB3602-118-Q1-K1-B6 | 6525246 | BLASTX | 161 | 6.00E−11 | 46 | (U12390) beta-galactosidase alpha peptide [Cloning |
| | | | | | | | vector pSport1] |
| 1165 | LIB3602-047-Q6-K1-B6 | 6525246 | BLASTX | 158 | 2.00E−10 | 45 | (U12390) beta-galactosidase alpha peptide [Cloning |
| | | | | | | | vector pSport1] |
| 1166 | LIB3602-011-Q6-K1-F12 | 541546 | BLASTX | 850 | 1.00E−91 | 98 | polyubiquitin 5 - Volvox carteri |
| | | | | | | | >gi\|395295\|emb\|CAA52290.1\| (X74214) |
| | | | | | | | polyubiquitin [Volvox carteri] |
| 1167 | LIB3602-045-Q6-K1-E12 | 541546 | BLASTX | 763 | 2.00E−81 | 99 | polyubiquitin 5 - Volvox carteri |
| | | | | | | | >gi\|395295\|emb\|CAA52290.1\| (X74214) |
| | | | | | | | polyubiquitin [Volvox carteri] |
| 1168 | LIB3602-030-Q6-K1-F7 | 541546 | BLASTX | 762 | 3.00E−81 | 100 | polyubiquitin 5 - Volvox carteri |
| | | | | | | | >gi\|395295\|emb\|CAA52290.1\| (X74214) |
| | | | | | | | polyubiquitin [Volvox carteri] |
| 1169 | LIB3602-061-Q6-K1-D11 | 541546 | BLASTX | 670 | 2.00E−70 | 98 | polyubiquitin 5 - Volvox carteri |
| | | | | | | | >gi\|395295\|emb\|CAA52290.1\| (X74214) |
| | | | | | | | polyubiquitin [Volvox carteri] |
| 1170 | LIB3602-030-Q6-K1-D10 | 541546 | BLASTX | 662 | 2.00E−69 | 100 | polyubiquitin 5 - Volvox carteri |
| | | | | | | | >gi\|395295\|emb\|CAA52290.1\| (X74214) |
| | | | | | | | polyubiquitin [Volvox carteri] |
| 1171 | LIB3602-063-Q1-K6-B2 | 541546 | BLASTX | 515 | 3.00E−52 | 99 | polyubiquitin 5 - Volvox carteri |
| | | | | | | | >gi\|395295\|emb\|CAA52290.1\| (X74214) |
| | | | | | | | polyubiquitin [Volvox carteri] |
| 1172 | LIB3602-027-Q6-K1-G7 | 7413634 | BLASTX | 342 | 4.00E−32 | 72 | (AL162971) 60S ribosomal protein-like |
| | | | | | | | [Arabidopsis thaliana] |
| 1173 | LIB3602-022-Q6-K1-B11 | 7413634 | BLASTX | 342 | 5.00E−32 | 72 | (AL162971) 60S ribosomal protein-like |
| | | | | | | | [Arabidopsis thaliana] |
| 1174 | LIB3602-060-Q6-K1-G4 | 7413634 | BLASTX | 342 | 6.00E−32 | 72 | (AL162971) 60S ribosomal protein-like |
| | | | | | | | [Arabidopsis thaliana] |
| 1175 | LIB3602-043-Q6-K1-C11 | 7413634 | BLASTX | 342 | 6.00E−32 | 72 | (AL162971) 60S ribosomal protein-like |
| | | | | | | | [Arabidopsis thaliana] |
| 1176 | LIB3602-034-Q6-K1-D7 | 7413634 | BLASTX | 272 | 6.00E−24 | 76 | (AL162971) 60S ribosomal protein-like |
| | | | | | | | [Arabidopsis thaliana] |
| 1177 | LIB3602-094-Q6-K6-E8 | 7413634 | BLASTX | 219 | 1.00E−17 | 86 | (AL162971) 60S ribosomal protein-like |
| | | | | | | | [Arabidopsis thaliana] |
| 1178 | LIB3602-030-Q6-K1-H12 | 7486582 | BLASTX | 229 | 9.00E−19 | 43 | hypothetical protein F7H19.70 - Arabidopsis |
| | | | | | | | thaliana >gi\|3292814\|emb\|CAA19804.1\| |
| | | | | | | | (AL031018) putative protein [Arabidopsis thaliana] |
| | | | | | | | >gi\|7269136\|emb\|CAB79244.1\| (AL161558) |
| | | | | | | | putative protein [Arabidopsis thaliana] |
| 1179 | LIB3602-105-Q1-K1-H3 | 7486582 | BLASTX | 224 | 5.00E−18 | 50 | hypothetical protein F7H19.70 - Arabidopsis |
| | | | | | | | thaliana >gi\|3292814\|emb\|CAA19804.1\| |
| | | | | | | | (AL031018) putative protein [Arabidopsis thaliana] |
| | | | | | | | >gi\|7269136\|emb\|CAB79244.1\| (AL161558) |
| | | | | | | | putative protein [Arabidopsis thaliana] |
| 1180 | LIB3602-058-Q6-K1-E5 | 7486582 | BLASTX | 223 | 5.00E−18 | 41 | hypothetical protein F7H19.70 - Arabidopsis |
| | | | | | | | thaliana >gi\|3292814\|emb\|CAA19804.1\| |
| | | | | | | | (AL031018) putative protein [Arabidopsis thaliana] |
| | | | | | | | >gi\|7269136\|emb\|CAB79244.1\| (AL161558) |
| | | | | | | | putative protein [Arabidopsis thaliana] |
| 1181 | LIB3602-114-Q1-K1-H7 | 7486582 | BLASTX | 217 | 3.00E−17 | 35 | hypothetical protein F7H19.70 - Arabidopsis |
| | | | | | | | thaliana >gi\|3292814\|emb\|CAA19804.1\| |
| | | | | | | | (AL031018) putative protein [Arabidopsis thaliana] |
| | | | | | | | >gi\|7269136\|emb\|CAB79244.1\| (AL161558) |
| | | | | | | | putative protein [Arabidopsis thaliana] |
| 1182 | LIB3602-084-Q6-K1-G8 | 7486582 | BLASTX | 190 | 4.00E−14 | 58 | hypothetical protein F7H19.70 - Arabidopsis |
| | | | | | | | thaliana >gi\|3292814\|emb\|CAA19804.1\| |
| | | | | | | | (AL031018) putative protein [Arabidopsis thaliana] |
| | | | | | | | >gi\|7269136\|emb\|CAB79244.1\| (AL161558) |
| | | | | | | | putative protein [Arabidopsis thaliana] |
| 1183 | LIB3602-062-Q6-K1-A2 | 7486582 | BLASTX | 164 | 4.00E−11 | 56 | hypothetical protein F7H19.70 - Arabidopsis |
| | | | | | | | thaliana >gi\|3292814\|emb\|CAA19804.1\| |
| | | | | | | | (AL031018) putative protein [Arabidopsis thaliana] |
| | | | | | | | >gi\|7269136\|emb\|CAB79244.1\| (AL161558) |
| | | | | | | | putative protein [Arabidopsis thaliana] |
| 1184 | LIB3602-068-Q1-K1-F1 | 7486992 | BLASTX | 316 | 9.00E−29 | 42 | hypothetical protein T13L16.5 - Arabidopsis |
| | | | | | | | thaliana >gi\|6598526\|gb\|AAD20114.2\| (AC006201) |
| | | | | | | | hypothetical protein [Arabidopsis thaliana] |
| 1185 | LIB3602-009-Q6-K1-F7 | 7486992 | BLASTX | 244 | 2.00E−20 | 38 | hypothetical protein T13L16.5 - Arabidopsis |
| | | | | | | | thaliana >gi\|6598526\|gb\|AAD20114.2\| (AC006201) |
| | | | | | | | hypothetical protein [Arabidopsis thaliana] |
| 1186 | LIB3602-057-Q6-K1-F3 | 7486992 | BLASTX | 185 | 3.00E−18 | 35 | hypothetical protein T13L16.5 - Arabidopsis |
| | | | | | | | thaliana >gi\|6598526\|gb\|AAD20114.2\| (AC006201) |
| | | | | | | | hypothetical protein [Arabidopsis thaliana] |
| 1187 | LIB3602-085-Q6-K1-C5 | 7486992 | BLASTX | 218 | 2.00E−17 | 35 | hypothetical protein T13L16.5 - Arabidopsis |
| | | | | | | | thaliana >gi\|6598526\|gb\|AAD20114.2\| (AC006201) |
| | | | | | | | hypothetical protein [Arabidopsis thaliana] |
| 1188 | LIB3602-086-Q6-K1-C6 | 7486992 | BLASTX | 193 | 2.00E−14 | 34 | hypothetical protein T13L16.5 - Arabidopsis |
| | | | | | | | thaliana >gi\|6598526\|gb\|AAD20114.2\| (AC006201) |
| | | | | | | | hypothetical protein [Arabidopsis thaliana] |
| 1189 | LIB3602-089-Q6-K6-H12 | 7486992 | BLASTX | 177 | 1.00E−12 | 36 | hypothetical protein T13L16.5 - Arabidopsis |
| | | | | | | | thaliana >gi\|6598526\|gb\|AAD20114.2\| (AC006201) |
| | | | | | | | hypothetical protein [Arabidopsis thaliana] |
| 1190 | LIB3602-070-Q1-K1-B2 | 7441117 | BLASTX | 766 | 1.00E−81 | 77 | ribosomal protein S3a, cytosolic - Arabidopsis |
| | | | | | | | thaliana >gi\|2661422\|emb\|CAA04689.1\| |
| | | | | | | | (AJ001342) Putative S-phase-specific ribosomal |
| | | | | | | | protein [Arabidopsis thaliana] |
| | | | | | | | >gi\|3096936\|emb\|CAA18846.1\| (AL023094) |
| | | | | | | | Putative S-phase-specific ribosomal protein |
| | | | | | | | [Arabidops |
| 1191 | LIB3602-043-Q6-K1-A9 | 7441117 | BLASTX | 654 | 2.00E−68 | 78 | ribosomal protein S3a, cytosolic - Arabidopsis |
| | | | | | | | thaliana >gi\|2661422\|emb\|CAA04689.1\| |
| | | | | | | | (AJ001342) Putative S-phase-specific ribosomal |
| | | | | | | | protein [Arabidopsis thaliana] |
| | | | | | | | >gi\|3096936\|emb\|CAA18846.1\| (AL023094) |
| | | | | | | | Putative S-phase-specific ribosomal protein |
| | | | | | | | [Arabidops |
| 1192 | LIB3602-081-Q6-K6-H1 | 7441117 | BLASTX | 633 | 6.00E−66 | 71 | ribosomal protein S3a, cytosolic - Arabidopsis |
| | | | | | | | thaliana >gi\|2661422\|emb\|CAA04689.1\| |
| | | | | | | | (AJ001342) Putative S-phase-specific ribosomal |
| | | | | | | | protein [Arabidopsis thaliana] |
| | | | | | | | >gi\|3096936\|emb\|CAA18846.1\| (AL023094) |
| | | | | | | | Putative S-phase-specific ribosomal protein |
| | | | | | | | [Arabidops |
| 1193 | LIB3602-070-Q1-K1-G11 | 7441117 | BLASTX | 600 | 4.00E−62 | 71 | ribosomal protein S3a, cytosolic - Arabidopsis |
| | | | | | | | thaliana >gi\|2661422\|emb\|CAA04689.1\| |
| | | | | | | | (AJ001342) Putative S-phase-specific ribosomal |
| | | | | | | | protein [Arabidopsis thaliana] |
| | | | | | | | >gi\|3096936\|emb\|CAA18846.1\| (AL023094) |
| | | | | | | | Putative S-phase-specific ribosomal protein |
| | | | | | | | [Arabidops |
| 1194 | LIB3602-044-Q6-K1-H3 | 7441117 | BLASTX | 520 | 8.00E−53 | 81 | ribosomal protein S3a, cytosolic - Arabidopsis |
| | | | | | | | thaliana >gi\|2661422\|emb\|CAA04689.1\| |
| | | | | | | | (AJ001342) Putative S-phase-specific ribosomal |
| | | | | | | | protein [Arabidopsis thaliana] |
| | | | | | | | >gi\|3096936\|emb\|CAA18846.1\| (AL023094) |
| | | | | | | | Putative S-phase-specific ribosomal protein |
| | | | | | | | [Arabidops |
| 1195 | LIB3602-054-Q6-K1-F8 | 7441117 | BLASTX | 473 | 2.00E−47 | 81 | ribosomal protein S3a, cytosolic - Arabidopsis |
| | | | | | | | thaliana >gi\|2661422\|emb\|CAA04689.1\| |
| | | | | | | | (AJ001342) Putative S-phase-specific ribosomal |
| | | | | | | | protein [Arabidopsis thaliana] |
| | | | | | | | >gi\|3096936\|emb\|CAA18846.1\| (AL023094) |
| | | | | | | | Putative S-phase-specific ribosomal protein |
| | | | | | | | [Arabidops |
| 1196 | LIB3602-046-Q6-K1-C2 | 1710530 | BLASTX | 577 | 2.00E−59 | 71 | 60S RIBOSOMAL PROTEIN L27A |
| | | | | | | | >gi\|2129719\|pir\|\|S71256 ribosomal protein L27a, |
| | | | | | | | cytosolic - Arabidopsis thaliana |
| | | | | | | | >gi\|1107487\|emb\|CAA63025.1\| (X91959) 60S |
| | | | | | | | ribosomal protein L27a [Arabidopsis thaliana] |
| | | | | | | | >gi\|6175150\|gb\|AAF04877.1\|AC010796_{—13} |
| | | | | | | | (AC010796) 60S ribosom |
| 1197 | LIB3602-049-Q6-K1-E3 | 1710530 | BLASTX | 563 | 8.00E−58 | 71 | 60S RIBOSOMAL PROTEIN L27A |
| | | | | | | | >gi\|2129719\|pir\|\|S71256 ribosomal protein L27a, |
| | | | | | | | cytosolic - Arabidopsis thaliana |
| | | | | | | | >gi\|1107487\|emb\|CAA63025.1\| (X91959) 60S |
| | | | | | | | ribosomal protein L27a [Arabidopsis thaliana] |
| | | | | | | | >gi\|6175150\|gb\|AAF04877.1\|AC010796_13 |
| | | | | | | | (AC010796) 60S ribosom |
| 1198 | LIB3602-062-Q6-K1-B1 | 1710530 | BLASTX | 339 | 1.00E−31 | 62 | 60S RIBOSOMAL PROTEIN L27A |
| | | | | | | | >gi\|2129719\|pir\|\|S71256 ribosomal protein L27a, |
| | | | | | | | cytosolic - Arabidopsis thaliana |
| | | | | | | | >gi\|1107487\|emb\|CAA63025.1\| (X91959) 60S |
| | | | | | | | ribosomal protein L27a [Arabidopsis thaliana] |
| | | | | | | | >gi\|6175150\|gb\|AAF04877.1\|AC010796_13 |
| | | | | | | | (AC010796) 60S ribosom |
| 1199 | LIB3602-120-Q1-K1-F11 | 1710530 | BLASTX | 160 | 3.00E−22 | 68 | 60S RIBOSOMAL PROTEIN L27A |
| | | | | | | | >gi\|2129719\|pir\|\|S71256 ribosomal protein L27a, |
| | | | | | | | cytosolic - Arabidopsis thaliana |
| | | | | | | | >gi\|1107487\|emb\|CAA63025.1\| (X91959) 60S |
| | | | | | | | ribosomal protein L27a [Arabidopsis thaliana] |
| | | | | | | | >gi\|6175150\|gb\|AAF04877.1\|AC010796_13 |
| | | | | | | | (AC010796) 60S ribosom |
| 1200 | LIB3602-113-Q1-K1-F11 | 1710530 | BLASTX | 258 | 4.00E−22 | 56 | 60S RIBOSOMAL PROTEIN L27A |
| | | | | | | | >gi\|2129719\|pir\|\|S71256 ribosomal protein L27a, |
| | | | | | | | cytosolic - Arabidopsis thaliana |
| | | | | | | | >gi\|1107487\|emb\|CAA63025.1\| (X91959) 60S |
| | | | | | | | ribosomal protein L27a [Arabidopsis thaliana] |
| | | | | | | | >gi\|6175150\|gb\|AAF04877.1\|AC010796_13 |
| | | | | | | | (AC010796) 60S ribosom |
| 1201 | LIB3602-119-Q1-K1-B11 | 1710530 | BLASTX | 189 | 1.00E−14 | 71 | 60S RIBOSOMAL PROTEIN L27A |
| | | | | | | | >gi\|2129719\|pir\|\|S71256 ribosomal protein L27a, |
| | | | | | | | cytosolic - Arabidopsis thaliana |
| | | | | | | | >gi\|1107487\|emb\|CAA63025.1\| (X91959) 60S |
| | | | | | | | ribosomal protein L27a [Arabidopsis thaliana] |
| | | | | | | | >gi\|6175150\|gb\|AAF04877.1\|AC010796_13 |
| | | | | | | | (AC010796) 60S ribosom |
| 1202 | LIB3602-077-Q6-K6-E7 | 4139222 | BLASTX | 353 | 4.00E−33 | 59 | (AF104633) light harvesting complex I protein |
| | | | | | | | precursor [Chlamydomonas reinhardtii] |
| 1203 | LIB3602-076-Q6-K6-G3 | 4139222 | BLASTX | 344 | 4.00E−32 | 56 | (AF104633) light harvesting complex I protein |
| | | | | | | | precursor [Chlamydomonas reinhardtii] |
| 1204 | LIB3602-048-Q6-K1QA-H3 | 4139222 | BLASTX | 299 | 6.00E−27 | 57 | (AF104633) light harvesting complex I protein |
| | | | | | | | precursor [Chlamydomonas reinhardtii] |
| 1205 | LIB3602-113-Q1-K1-A4 | 4139222 | BLASTX | 208 | 1.00E−17 | 72 | (AF104633) light harvesting complex I protein |
| | | | | | | | precursor [Chlamydomonas reinhardtii] |
| 1206 | LIB3602-013-Q6-K1-H4 | 4139222 | BLASTX | 213 | 7.00E−17 | 63 | (AF104633) light harvesting complex I protein |
| | | | | | | | precursor [Chlamydomonas reinhardtii] |
| 1207 | LIB3602-105-Q1-K1-E12 | 4139222 | BLASTX | 181 | 2.00E−16 | 70 | (AF104633) light harvesting complex I protein |
| | | | | | | | precursor [Chlamydomonas reinhardtii] |
| 1208 | LIB3602-011-Q6-K1-B4 | 5758041 | BLASTX | 303 | 3.00E−27 | 49 | (AF133814) ferritin 1 [Solanum tuberosum] |
| 1209 | LIB3602-018-Q6-K1-A6 | 5758041 | BLASTX | 303 | 3.00E−27 | 49 | (AF133814) ferritin 1 [Solanum tuberosum] |
| 1210 | LIB3602-001-P1-K6-B3 | 5758041 | BLASTX | 303 | 3.00E−27 | 49 | (AF133814) ferritin 1 [Solanum tuberosum] |
| 1211 | LIB3602-014-Q6-K1-A11 | 5758041 | BLASTX | 295 | 2.00E−26 | 50 | (AF133814) ferritin 1 [Solanum tuberosum] |
| 1212 | LIB3602-107-Q1-K1-E12 | 5758041 | BLASTX | 275 | 5.00E−24 | 49 | (AF133814) ferritin 1 [Solanum tuberosum] |
| 1213 | LIB3602-051-Q6-K1-D11 | 5758041 | BLASTX | 148 | 3.00E−21 | 45 | (AF133814) ferritin 1 [Solanum tuberosum] |
| 1214 | LIB3602-020-Q6-K1-H3 | 3122724 | BLASTX | 289 | 6.00E−26 | 81 | 60S RIBOSOMAL PROTEIN L38 |
| | | | | | | | >gi\|2289009\|gb\|AAB64338.1\| (AC002335) 60S |
| | | | | | | | ribosomal protein L38 [Arabidopsis thaliana] |
| | | | | | | | >gi\|6996290\|emb\|CAB75451.1\| (AL138659) 60S |
| | | | | | | | RIBOSOMAL PROTEIN L38-like protein |
| | | | | | | | [Arabidopsis thaliana] |
| 1215 | LIB3602-072-Q1-K1-E10 | 3122724 | BLASTX | 283 | 3.00E−25 | 79 | 60S RIBOSOMAL PROTEIN L38 |
| | | | | | | | >gi\|2289009\|gb\|AAB64338.1\| (AC002335) 60S |
| | | | | | | | ribosomal protein L38 [Arabidopsis thaliana] |
| | | | | | | | >gi\|6996290\|emb\|CAB75451.1\| (AL138659) 60S |
| | | | | | | | RIBOSOMAL PROTEIN L38-like protein |
| | | | | | | | [Arabidopsis thaliana] |
| 1216 | LIB3602-100-Q1-K1-A5 | 3122724 | BLASTX | 158 | 1.00E−20 | 79 | 60S RIBOSOMAL PROTEIN L38 |
| | | | | | | | >gi\|2289009\|gb\|AAB64338.1\| (AC002335) 60S |
| | | | | | | | ribosomal protein L38 [Arabidopsis thaliana] |
| | | | | | | | >gi\|6996290\|emb\|CAB75451.1\| (AL138659) 60S |
| | | | | | | | RIBOSOMAL PROTEIN L38-like protein |
| | | | | | | | [Arabidopsis thaliana] |
| 1217 | LIB3602-067-Q1-K1-A12 | 3122724 | BLASTX | 244 | 2.00E−20 | 79 | 60S RIBOSOMAL PROTEIN L38 |
| | | | | | | | >gi\|2289009\|gb\|AAB64338.1\| (AC002335) 60S |
| | | | | | | | ribosomal protein L38 [Arabidopsis thaliana] |
| | | | | | | | >gi\|6996290\|emb\|CAB75451.1\| (AL138659) 60S |
| | | | | | | | RIBOSOMAL PROTEIN L38-like protein |
| | | | | | | | [Arabidopsis thaliana] |
| 1218 | LIB3602-108-Q1-K1-A5 | 3122724 | BLASTX | 148 | 2.00E−19 | 81 | 60S RIBOSOMAL PROTEIN L38 |
| | | | | | | | >gi\|2289009\|gb\|AAB64338.1\| (AC002335) 60S |
| | | | | | | | ribosomal protein L38 [Arabidopsis thaliana] |
| | | | | | | | >gi\|6996290\|emb\|CAB75451.1\| (AL138659) 60S |
| | | | | | | | RIBOSOMAL PROTEIN L38-like protein |
| | | | | | | | [Arabidopsis thaliana] |
| 1219 | LIB3602-020-Q6-K1-G5 | 3122724 | BLASTX | 155 | 1.00E−10 | 82 | 60S RIBOSOMAL PROTEIN L38 |
| | | | | | | | >gi\|2289009\|gb\|AAB64338.1\| (AC002335) 60S |
| | | | | | | | ribosomal protein L38 [Arabidopsis thaliana] |
| | | | | | | | >gi\|6996290\|emb\|CAB75451.1\| (AL138659) 60S |
| | | | | | | | RIBOSOMAL PROTEIN L38-like protein |
| | | | | | | | [Arabidopsis thaliana] |
| 1220 | LIB3602-066-Q1-K6-H8 | 132100 | BLASTX | 570 | 1.00E−58 | 66 | RIBULOSE BISPHOSPHATE CARBOXYLASE |
| | | | | | | | SMALL CHAIN 3 PRECURSOR (RUBISCO |
| | | | | | | | SMALL SUBUNIT 3) >gi\|68108\|pir\|\|RKJK3C |
| | | | | | | | ribulose-bisphosphate carboxylase (EC 4.1.1.39) |
| | | | | | | | small chain 3 precursor - Acetabularia cliftonii |
| | | | | | | | >gi\|732546\|emb\|CAA36105.1\| (X51808) ribulose |
| | | | | | | | bisphos |
| 1221 | LIB3602-049-Q6-K1-G9 | 132100 | BLASTX | 556 | 5.00E−57 | 66 | RIBULOSE BISPHOSPHATE CARBOXYLASE |
| | | | | | | | SMALL CHAIN 3 PRECURSOR (RUBISCO |
| | | | | | | | SMALL SUBUNIT 3) >gi\|68108\|pir\|\|RKJK3C |
| | | | | | | | ribulose-bisphosphate carboxylase (EC 4.1.1.39) |
| | | | | | | | small chain 3 precursor - Acetabularia cliftonii |
| | | | | | | | >gi\|732546\|emb\|CAA36105.1\| (X51808) ribulose |
| | | | | | | | bisphos |
| 1222 | LIB3602-012-Q6-K1-G3 | 132100 | BLASTX | 546 | 9.00E−56 | 68 | RIBULOSE BISPHOSPHATE CARBOXYLASE |
| | | | | | | | SMALL CHAIN 3 PRECURSOR (RUBISCO |
| | | | | | | | SMALL SUBUNIT 3) >gi\|68108\|pir\|\|RKJK3C |
| | | | | | | | ribulose-bisphosphate carboxylase (EC 4.1.1.39) |
| | | | | | | | small chain 3 precursor - Acetabularia cliftonii |
| | | | | | | | >gi\|732546\|emb\|CAA36105.1\| (X51808) ribulose |
| | | | | | | | bisphos |
| 1223 | LIB3602-005-Q1-K1-E10 | 132100 | BLASTX | 520 | 1.00E−52 | 68 | RIBULOSE BISPHOSPHATE CARBOXYLASE |
| | | | | | | | SMALL CHAIN 3 PRECURSOR (RUBISCO |
| | | | | | | | SMALL SUBUNIT 3) >gi\|68108\|pir\|\|RKJK3C |
| | | | | | | | ribulose-bisphosphate carboxylase (EC 4.1.1.39) |
| | | | | | | | small chain 3 precursor - Acetabularia cliftonii |
| | | | | | | | >gi\|732546\|emb\|CAA36105.1\| (X51808) ribulose |
| | | | | | | | bisphos |
| 1224 | LIB3602-100-Q1-K1-A12 | 132100 | BLASTX | 502 | 1.00E−50 | 69 | RIBULOSE BISPHOSPHATE CARBOXYLASE |
| | | | | | | | SMALL CHAIN 3 PRECURSOR (RUBISCO |
| | | | | | | | SMALL SUBUNIT 3) >gi\|68108\|pir\|\|RKJK3C |
| | | | | | | | ribulose-bisphosphate carboxylase (EC 4.1.1.39) |
| | | | | | | | small chain 3 precursor - Acetabularia cliftonii |
| | | | | | | | >gi\|732546\|emb\|CAA36105.1\| (X51808) ribulose |
| | | | | | | | bisphos |
| 1225 | LIB3602-018-Q6-K1-F5 | 132100 | BLASTX | 454 | 5.00E−45 | 68 | RIBULOSE BISPHOSPHATE CARBOXYLASE |
| | | | | | | | SMALL CHAIN 3 PRECURSOR (RUBISCO |
| | | | | | | | SMALL SUBUNIT 3) >gi\|68108\|pir\|\|RKJK3C |
| | | | | | | | ribulose-bisphosphate carboxylase (EC 4.1.1.39) |
| | | | | | | | small chain 3 precursor - Acetabularia cliftonii |
| | | | | | | | >gi\|732546\|emb\|CAA36105.1\| (X51808) ribulose |
| | | | | | | | bisphos |
| 1226 | LIB3602-017-Q6-K1-A9 | 1709786 | BLASTX | 377 | 5.00E−36 | 55 | PYRROLINE-5-CARBOXYLATE REDUCTASE |
| | | | | | | | (P5CR) (P5C REDUCTASE) |
| | | | | | | | >gi\|541894\|pir\|\|JQ2334 pyrroline-5-carboxylate |
| | | | | | | | reductase (EC 1.5.1.2) - Arabidopsis thaliana |
| | | | | | | | >gi\|166815\|gb\|AAA61346.1\| (M76538) pyrroline |
| | | | | | | | carboxylate reductase [Arabidopsis thaliana] |
| | | | | | | | >gi\|1632776\|emb |
| 1227 | LIB3602-006-Q1-K1-A2 | 1709786 | BLASTX | 369 | 5.00E−35 | 68 | PYRROLINE-5-CARBOXYLATE REDUCTASE |
| | | | | | | | (P5CR) (P5C REDUCTASE) |
| | | | | | | | >gi\|541894\|pir\|\|JQ2334 pyrroline-5-carboxylate |
| | | | | | | | reductase (EC 1.5.1.2) - Arabidopsis thaliana |
| | | | | | | | >gi\|166815\|gb\|AAA61346.1\| (M76538) pyrroline |
| | | | | | | | carboxylate reductase [Arabidopsis thaliana] |
| | | | | | | | >gi\|1632776\|emb |
| 1228 | LIB3602-106-Q1-K1-C9 | 1709786 | BLASTX | 288 | 2.00E−25 | 55 | PYRROLINE-5-CARBOXYLATE REDUCTASE |
| | | | | | | | (P5CR) (P5C REDUCTASE) |
| | | | | | | | >gi\|541894\|pir\|\|JQ2334 pyrroline-5-carboxylate |
| | | | | | | | reductase (EC 1.5.1.2) - Arabidopsis thaliana |
| | | | | | | | >gi\|166815\|gb\|AAA61346.1\| (M76538) pyrroline |
| | | | | | | | carboxylate reductase [Arabidopsis thaliana] |
| | | | | | | | >gi\|1632776\|emb |
| 1229 | LIB3602-060-Q6-K1-C1 | 1709786 | BLASTX | 230 | 4.00E−19 | 61 | PYRROLINE-5-CARBOXYLATE REDUCTASE |
| | | | | | | | (P5CR) (P5C REDUCTASE) |
| | | | | | | | >gi\|541894\|pir\|\|JQ2334 pyrroline-5-carboxylate |
| | | | | | | | reductase (EC 1.5.1.2) - Arabidopsis thaliana |
| | | | | | | | >gi\|166815\|gb\|AAA61346.1\| (M76538) pyrroline |
| | | | | | | | carboxylate reductase [Arabidopsis thaliana] |
| | | | | | | | >gi\|1632776\|emb |
| 1230 | LIB3602-046-Q6-K1-F7 | 1709786 | BLASTX | 206 | 5.00E−16 | 67 | PYRROLINE-5-CARBOXYLATE REDUCTASE |
| | | | | | | | (P5CR) (P5C REDUCTASE) |
| | | | | | | | >gi\|541894\|pir\|\|JQ2334 pyrroline-5-carboxylate |
| | | | | | | | reductase (EC 1.5.1.2) - Arabidopsis thaliana |
| | | | | | | | >gi\|166815\|gb\|AAA61346.1\| (M76538) pyrroline |
| | | | | | | | carboxylate reductase [Arabidopsis thaliana] |
| | | | | | | | >gi\|1632776\|emb |
| 1231 | LIB3602-007-Q1-K1-G11 | 1709786 | BLASTX | 158 | 3.00E−10 | 34 | PYRROLINE-5-CARBOXYLATE REDUCTASE |
| | | | | | | | (P5CR) (P5C REDUCTASE) |
| | | | | | | | >gi\|541894\|pir\|\|JQ2334 pyrroline-5-carboxylate |
| | | | | | | | reductase (EC 1.5.1.2) - Arabidopsis thaliana |
| | | | | | | | >gi\|166815\|gb\|AAA61346.1\| (M76538) pyrroline |
| | | | | | | | carboxylate reductase [Arabidopsis thaliana] |
| | | | | | | | >gi\|1632776\|emb |
| 1232 | LIB3602-017-Q6-K1-B10 | 4590398 | BLASTX | 387 | 3.00E−37 | 71 | (AF124243) ribosomal protein homolog |
| | | | | | | | [Cryptosporidium parvum] |
| 1233 | LIB3602-109-Q1-K1-G11 | 4590398 | BLASTX | 207 | 7.00E−31 | 68 | (AF124243) ribosomal protein homolog |
| | | | | | | | [Cryptosporidium parvum] |
| 1234 | LIB3602-109-Q1-K1-D2 | 4590398 | BLASTX | 218 | 5.00E−29 | 70 | (AF124243) ribosomal protein homolog |
| | | | | | | | [Cryptosporidium parvum] |
| 1235 | LIB3602-006-Q1-K1-F4 | 4590398 | BLASTX | 309 | 3.00E−28 | 65 | (AF124243) ribosomal protein homolog |
| | | | | | | | [Cryptosporidium parvum] |
| 1236 | LIB3602-009-Q6-K1-A8 | 4590398 | BLASTX | 302 | 2.00E−27 | 69 | (AF124243) ribosomal protein homolog |
| | | | | | | | [Cryptosporidium parvum] |
| 1237 | LIB3602-049-Q6-K1-C4 | 1168732 | BLASTX | 378 | 4.00E−36 | 60 | CINNAMYL-ALCOHOL DEHYDROGENASE |
| | | | | | | | (CAD) >gi\|421914\|pir\|\|S28045 cinnamyl-alcohol |
| | | | | | | | dehydrogenase (EC 1.1.1.195) ELI3 - parsley |
| | | | | | | | (fragment) >gi\|836638\|emb\|CAA48028.1\| (X67817) |
| | | | | | | | Eli3 [Petroselinum crispum] |
| 1238 | LIB3602-038-Q6-K1-C5 | 1168732 | BLASTX | 249 | 1.00E−34 | 57 | CINNAMYL-ALCOHOL DEHYDROGENASE |
| | | | | | | | (CAD) >gi\|421914\|pir\|\|S28045 cinnamyl-alcohol |
| | | | | | | | dehydrogenase (EC 1.1.1.195) ELI3 - parsley |
| | | | | | | | (fragment) >gi\|836638\|emb\|CAA48028.1\| (X67817) |
| | | | | | | | Eli3 [Petroselinum crispum] |
| 1239 | LIB3602-038-Q6-K1-C4 | 1168732 | BLASTX | 249 | 1.00E−34 | 57 | CINNAMYL-ALCOHOL DEHYDROGENASE |
| | | | | | | | (CAD) >gi\|421914\|pir\|\|S28045 cinnamyl-alcohol |
| | | | | | | | dehydrogenase (EC 1.1.1.195) ELI3 - parsley |
| | | | | | | | (fragment) >gi\|836638\|emb\|CAA48028.1\| (X67817) |
| | | | | | | | Eli3 [Petroselinum crispum] |
| 1240 | LIB3602-067-Q1-K1-A6 | 1168732 | BLASTX | 304 | 2.00E−27 | 56 | CINNAMYL-ALCOHOL DEHYDROGENASE |
| | | | | | | | (CAD) >gi\|421914\|pir\|\|S28045 cinnamyl-alcohol |
| | | | | | | | dehydrogenase (EC 1.1.1.195) ELI3 - parsley |
| | | | | | | | (fragment) >gi\|836638\|emb\|CAA48028.1\| (X67817) |
| | | | | | | | Eli3 [Petroselinum crispum] |
| 1241 | LIB3602-001-P1-K6-B6 | 1168732 | BLASTX | 301 | 4.00E−27 | 57 | CINNAMYL-ALCOHOL DEHYDROGENASE |
| | | | | | | | (CAD) >gi\|421914\|pir\|\|S28045 cinnamyl-alcohol |
| | | | | | | | dehydrogenase (EC 1.1.1.195) ELI3 - parsley |
| | | | | | | | (fragment) >gi\|836638\|emb\|CAA48028.1\| (X67817) |
| | | | | | | | Eli3 [Petroselinum crispum] |
| 1242 | LIB3602-006-Q1-K1-D4 | 7443234 | BLASTX | 364 | 2.00E−34 | 50 | light harvesting complex A protein precursor - |
| | | | | | | | Volvox carteri >gi\|732534\|gb\|AAB40979.1\| |
| | | | | | | | (U22329) light harvesting complex a [Volvox |
| | | | | | | | carteri] |
| 1243 | LIB3602-090-Q6-K6-E6 | 7443234 | BLASTX | 335 | 5.00E−31 | 52 | light harvesting complex A protein precursor - |
| | | | | | | | Volvox carteri >gi\|732534\|gb\|AAB40979.1\| |
| | | | | | | | (U22329) light harvesting complex a [Volvox |
| | | | | | | | carteri] |
| 1244 | LIB3602-070-Q1-K1-G4 | 7443234 | BLASTX | 237 | 4.00E−21 | 52 | light harvesting complex A protein precursor - |
| | | | | | | | Volvox carteri >gi\|732534\|gb\|AAB40979.1\| |
| | | | | | | | (U22329) light harvesting complex a [Volvox |
| | | | | | | | carteri] |
| 1245 | LIB3602-091-Q6-K6-E1 | 7443234 | BLASTX | 230 | 3.00E−19 | 52 | light harvesting complex A protein precursor - |
| | | | | | | | Volvox carteri >gi\|732534\|gb\|AAB40979.1\| |
| | | | | | | | (U22329) light harvesting complex a [Volvox |
| | | | | | | | carteri] |
| 1246 | LIB3602-105-Q1-K1-A9 | 7443234 | BLASTX | 225 | 4.00E−18 | 62 | light harvesting complex A protein precursor - |
| | | | | | | | Volvox carteri >gi\|732534\|gb\|AAB40979.1\| |
| | | | | | | | (U22329) light harvesting complex a [Volvox |
| | | | | | | | carteri] |
| 1247 | LIB3602-015-Q6-K1-A1 | 7430859 | BLASTX | 228 | 1.00E−18 | 47 | glutaredoxin - rice >gi\|2114207\|dbj\|BAA20071.1\| |
| | | | | | | | (D86744) glutaredoxin [Oryza sativa] |
| 1248 | LIB3602-068-Q1-K1-D5 | 7430859 | BLASTX | 228 | 1.00E−18 | 47 | glutaredoxin - rice >gi\|2114207\|dbj\|BAA20071.1\| |
| | | | | | | | (D86744) glutaredoxin [Oryza sativa] |
| 1249 | LIB3602-006-Q1-K1-G7 | 7430859 | BLASTX | 228 | 2.00E−18 | 47 | glutaredoxin - rice >gi\|2114207\|dbj\|BAA20071.1\| |
| | | | | | | | (D86744) glutaredoxin [Oryza sativa] |
| 1250 | LIB3602-079-Q6-K6-E5 | 7430859 | BLASTX | 228 | 2.00E−18 | 47 | glutaredoxin - rice >gi\|2114207\|dbj\|BAA20071.1\| |
| | | | | | | | (D86744) glutaredoxin [Oryza sativa] |
| 1251 | LIB3602-074-Q1-K1-H6 | 7430859 | BLASTX | 152 | 1.00E−11 | 41 | glutaredoxin - rice >gi\|2114207\|dbj\|BAA20071.1\| |
| | | | | | | | (D86744) glutaredoxin [Oryza sativa] |
| 1252 | LIB3602-005-Q1-K1-A8 | 927428 | BLASTX | 658 | 3.00E−71 | 68 | (X86733) fis1 [Linum usitatissimum] |
| 1253 | LIB3602-010-Q6-K1-B9 | 927428 | BLASTX | 671 | 2.00E−70 | 69 | (X86733) fis1 [Linum usitatissimum] |
| 1254 | LIB3602-025-Q6-K1-F4 | 927428 | BLASTX | 487 | 6.00E−49 | 73 | (X86733) fis1 [Linum usitatissimum] |
| 1255 | LIB3602-070-Q1-K1-B7 | 927428 | BLASTX | 487 | 7.00E−49 | 73 | (X86733) fis1 [Linum usitatissimum] |
| 1256 | LIB3602-047-Q6-K1-E12 | 927428 | BLASTX | 431 | 2.00E−42 | 76 | (X86733) fis1 [Linum usitatissimum] |
| 1257 | LIB3602-093-Q6-K6-A5 | 6730739 | BLASTX | 300 | 6.00E−27 | 55 | (AC018849) hypothetical protein [Arabidopsis |
| | | | | | | | thaliana] |
| 1258 | LIB3602-113-Q1-K1-F5 | 6730739 | BLASTX | 300 | 6.00E−27 | 55 | (AC018849) hypothetical protein [Arabidopsis |
| | | | | | | | thaliana] |
| 1259 | LIB3602-015-Q6-K1-H8 | 6730739 | BLASTX | 240 | 4.00E−20 | 47 | (AC018849) hypothetical protein [Arabidopsis |
| | | | | | | | thaliana] |
| 1260 | LIB3602-017-Q6-K1-C5 | 6730739 | BLASTX | 171 | 4.00E−12 | 60 | (AC018849) hypothetical protein [Arabidopsis |
| | | | | | | | thaliana] |
| 1261 | LIB3602-043-Q6-K1-C10 | 6730739 | BLASTX | 145 | 4.00E−09 | 55 | (AC018849) hypothetical protein [Arabidopsis |
| | | | | | | | thaliana] |
| 1262 | LIB3602-042-Q6-K1-F12 | 3075487 | BLASTN | 41 | 2.00E−13 | 91 | Oryza sativa chlorophyll a/b-binding protein |
| | | | | | | | (RCABP69) mRNA, complete cds |
| 1263 | LIB3602-093-Q6-K6-A3 | 3075487 | BLASTN | 41 | 2.00E−13 | 91 | Oryza sativa chlorophyll a/b-binding protein |
| | | | | | | | (RCABP69) mRNA, complete cds |
| 1264 | LIB3602-049-Q6-K1-H11 | 3075487 | BLASTN | 39 | 3.00E−12 | 91 | Oryza sativa chlorophyll a/b-binding protein |
| | | | | | | | (RCABP69) mRNA, complete cds |
| 1265 | LIB3602-056-Q6-K1-G10 | 3075487 | BLASTN | 37 | 5.00E−11 | 90 | Oryza sativa chlorophyll a/b-binding protein |
| | | | | | | | (RCABP69) mRNA, complete cds |
| 1266 | LIB3602-104-Q1-K1-A3 | 3075487 | BLASTN | 34 | 3.00E−09 | 90 | Oryza sativa chlorophyll a/b-binding protein |
| | | | | | | | (RCABP69) mRNA, complete cds |
| 1267 | LIB3602-039-Q6-K1-G4 | 100524 | BLASTX | 768 | 8.00E−82 | 98 | polyubiquitin 6 - common sunflower |
| | | | | | | | >gi\|18824\|emb\|CAA40324.1\| (X57004) |
| | | | | | | | hexaubiquitin protein [Helianthus annuus] |
| | | | | | | | >gi\|1204096\|emb\|CAA40325.1\| (X57005) |
| | | | | | | | hexaubiquitin protein [Helianthus annuus] |
| 1268 | LIB3602-112-Q1-K1-A9 | 100524 | BLASTX | 700 | 7.00E−74 | 96 | polyubiquitin 6 - common sunflower |
| | | | | | | | >gi\|18824\|emb\|CAA40324.1\| (X57004) |
| | | | | | | | hexaubiquitin protein [Helianthus annuus] |
| | | | | | | | >gi\|1204096\|emb\|CAA40325.1\| (X57005) |
| | | | | | | | hexaubiquitin protein [Helianthus annuus] |
| 1269 | LIB3602-023-Q6-K1-C1 | 100524 | BLASTX | 537 | 7.00E−55 | 99 | polyubiquitin 6 - common sunflower |
| | | | | | | | >gi\|18824\|emb\|CAA40324.1\| (X57004) |
| | | | | | | | hexaubiquitin protein [Helianthus annuus] |
| | | | | | | | >gi\|1204096\|emb\|CAA40325.1\| (X57005) |
| | | | | | | | hexaubiquitin protein [Helianthus annuus] |
| 1270 | LIB3602-116-Q1-K1-G10 | 100524 | BLASTX | 226 | 8.00E−36 | 95 | polyubiquitin 6 - common sunflower |
| | | | | | | | >gi\|18824\|emb\|CAA40324.1\| (X57004) |
| | | | | | | | hexaubiquitin protein [Helianthus annuus] |
| | | | | | | | >gi\|1204096\|emb\|CAA40325.1\| (X57005) |
| | | | | | | | hexaubiquitin protein [Helianthus annuus] |
| 1271 | LIB3602-089-Q6-K6-G10 | 100524 | BLASTX | 265 | 3.00E−35 | 98 | polyubiquitin 6 - common sunflower |
| | | | | | | | >gi\|18824\|emb\|CAA40324.1\| (X57004) |
| | | | | | | | hexaubiquitin protein [Helianthus annuus] |
| | | | | | | | >gi\|1204096\|emb\|CAA40325.1\| (X57005) |
| | | | | | | | hexaubiquitin protein [Helianthus annuus] |
| 1272 | LIB3602-071-Q1-K1-D5 | 131382 | BLASTX | 751 | 8.00E−80 | 72 | OXYGEN-EVOLVING ENHANCER PROTEIN 1 |
| | | | | | | | PRECURSOR (OEE1) >gi\|81252\|pir\|\|S05508 |
| | | | | | | | photosystem II oxygen-evolving complex protein 1 |
| | | | | | | | precursor - Chlamydomonas reinhardtii |
| | | | | | | | >gi\|18160\|emb\|CAA32053.1\| (X13826) OEE1 |
| | | | | | | | precursor protein [Chlamydomonas reinhardtii] |
| | | | | | | | >gi\|2286 |
| 1273 | LIB3602-010-Q6-K1-C9 | 131382 | BLASTX | 665 | 8.00E−70 | 72 | OXYGEN-EVOLVING ENHANCER PROTEIN 1 |
| | | | | | | | PRECURSOR (OEE1) >gi\|81252\|pir\|\|S05508 |
| | | | | | | | photosystem II oxygen-evolving complex protein 1 |
| | | | | | | | precursor - Chlamydomonas reinhardtii |
| | | | | | | | >gi\|18160\|emb\|CAA32053.1\| (X13826) OEE1 |
| | | | | | | | precursor protein [Chlamydomonas reinhardtii] |
| | | | | | | | >gi\|2286 |
| 1274 | LIB3602-058-Q6-K1-G8 | 131382 | BLASTX | 647 | 1.00E−67 | 73 | OXYGEN-EVOLVING ENHANCER PROTEIN 1 |
| | | | | | | | PRECURSOR (OEE1) >gi\|81252\|pir\|\|S05508 |
| | | | | | | | photosystem II oxygen-evolving complex protein 1 |
| | | | | | | | precursor - Chlamydomonas reinhardtii |
| | | | | | | | >gi\|18160\|emb\|CAA32053.1\| (X13826) OEE1 |
| | | | | | | | precursor protein [Chlamydomonas reinhardtii] |
| | | | | | | | >gi\|2286 |
| 1275 | LIB3602-043-Q6-K1-F10 | 131382 | BLASTX | 434 | 6.00E−43 | 67 | OXYGEN-EVOLVING ENHANCER PROTEIN 1 |
| | | | | | | | PRECURSOR (OEE1) >gi\|81252\|pir\|\|S05508 |
| | | | | | | | photosystem II oxygen-evolving complex protein 1 |
| | | | | | | | precursor - Chlamydomonas reinhardtii |
| | | | | | | | >gi\|18160\|emb\|CAA32053.1\| (X13826) OEE1 |
| | | | | | | | precursor protein [Chlamydomonas reinhardtii] |
| | | | | | | | >gi\|2286 |
| 1276 | LIB3602-070-Q1-K1-D1 | 131382 | BLASTX | 219 | 2.00E−30 | 64 | OXYGEN-EVOLVING ENHANCER PROTEIN 1 |
| | | | | | | | PRECURSOR (OEE1) >gi\|81252\|pir\|\|S05508 |
| | | | | | | | photosystem II oxygen-evolving complex protein 1 |
| | | | | | | | precursor - Chlamydomonas reinhardtii |
| | | | | | | | >gi\|18160\|emb\|CAA32053.1\| (X13826) OEE1 |
| | | | | | | | precursor protein [Chlamydomonas reinhardtii] |
| | | | | | | | >gi\|2286 |
| 1277 | LIB3602-019-Q6-K1-A7 | 1657621 | BLASTX | 523 | 3.00E−53 | 64 | (U72505) G6p [Arabidopsis thaliana] |
| | | | | | | | >gi\|3068711\|gb\|AAC14411.1\| (AF049236) putative |
| | | | | | | | acyl-coA dehydrogenase [Arabidopsis thaliana] |
| | | | | | | | >gi\|5478795\|dbj\|BAA82478.1\| (AB017643) Short- |
| | | | | | | | chain acyl CoA oxidase [Arabidopsis thaliana] |
| 1278 | LIB3602-019-Q6-K1-A1 | 1657621 | BLASTX | 509 | 1.00E−51 | 64 | (U72505) G6p [Arabidopsis thaliana] |
| | | | | | | | >gi\|3068711\|gb\|AAC14411.1\| (AF049236) putative |
| | | | | | | | acyl-coA dehydrogenase [Arabidopsis thaliana] |
| | | | | | | | >gi\|5478795\|dbj\|BAA82478.1\| (AB017643) Short- |
| | | | | | | | chain acyl CoA oxidase [Arabidopsis thaliana] |
| 1279 | LIB3602-074-Q1-K1-A1 | 1657621 | BLASTX | 318 | 4.00E−29 | 64 | (U72505) G6p [Arabidopsis thaliana] |
| | | | | | | | >gi\|3068711\|gb\|AAC14411.1\| (AF049236) putative |
| | | | | | | | acyl-coA dehydrogenase [Arabidopsis thaliana] |
| | | | | | | | >gi\|5478795\|dbj\|BAA82478.1\| (AB017643) Short- |
| | | | | | | | chain acyl CoA oxidase [Arabidopsis thaliana] |
| 1280 | LIB3602-087-Q6-K1-D2 | 1657621 | BLASTX | 293 | 4.00E−26 | 60 | (U72505) G6p [Arabidopsis thaliana] |
| | | | | | | | >gi\|3068711\|gb\|AAC14411.1\| (AF049236) putative |
| | | | | | | | acyl-coA dehydrogenase [Arabidopsis thaliana] |
| | | | | | | | >gi\|5478795\|dbj\|BAA82478.1\| (AB017643) Short- |
| | | | | | | | chain acyl CoA oxidase [Arabidopsis thaliana] |
| 1281 | LIB3602-040-Q6-K1-E4 | 1657621 | BLASTX | 203 | 1.00E−15 | 68 | (U72505) G6p [Arabidopsis thaliana] |
| | | | | | | | >gi\|3068711\|gb\|AAC14411.1\| (AF049236) putative |
| | | | | | | | acyl-coA dehydrogenase [Arabidopsis thaliana] |
| | | | | | | | >gi\|5478795\|dbj\|BAA82478.1\| (AB017643) Short- |
| | | | | | | | chain acyl CoA oxidase [Arabidopsis thaliana] |
| 1282 | LIB3602-071-Q1-K1-C3 | 1172635 | BLASTX | 799 | 4.00E−90 | 90 | 26S PROTEASE REGULATORY SUBUNIT 4 |
| | | | | | | | HOMOLOG (TAT-BINDING PROTEIN |
| | | | | | | | HOMOLOG 2) >gi\|7435744\|pir\|\|T03776 tat binding |
| | | | | | | | protein homolog - rice >gi\|556558\|dbj\|BAA04615.1\| |
| | | | | | | | (D17789) rice homologue of Tat binding protein |
| | | | | | | | [Oryza sativa] |
| 1283 | LIB3602-049-Q6-K1-A5 | 1172635 | BLASTX | 744 | 5.00E−79 | 86 | 26S PROTEASE REGULATORY SUBUNIT 4 |
| | | | | | | | HOMOLOG (TAT-BINDING PROTEIN |
| | | | | | | | HOMOLOG 2) >gi\|7435744\|pir\|\|T03776 tat binding |
| | | | | | | | protein homolog - rice >gi\|556558\|dbj\|BAA04615.1\| |
| | | | | | | | (D17789) rice homologue of Tat binding protein |
| | | | | | | | [Oryza sativa] |
| 1284 | LIB3602-049-Q6-K1-A6 | 1172635 | BLASTX | 719 | 4.00E−76 | 84 | 26S PROTEASE REGULATORY SUBUNIT 4 |
| | | | | | | | HOMOLOG (TAT-BINDING PROTEIN |
| | | | | | | | HOMOLOG 2) >gi\|7435744\|pir\|\|T03776 tat binding |
| | | | | | | | protein homolog - rice >gi\|556558\|dbj\|\|BAA04615.1\| |
| | | | | | | | (D17789) rice homologue of Tat binding protein |
| | | | | | | | [Oryza sativa] |
| 1285 | LIB3602-106-Q1-K1-H10 | 1172635 | BLASTX | 467 | 1.00E−46 | 72 | 26S PROTEASE REGULATORY SUBUNIT 4 |
| | | | | | | | HOMOLOG (TAT-BINDING PROTEIN |
| | | | | | | | HOMOLOG 2) >gi\|7435744\|pir\|\|T03776 tat binding |
| | | | | | | | protein homolog - rice >gi\|556558\|dbj\|BAA04615.1\| |
| | | | | | | | (D17789) rice homologue of Tat binding protein |
| | | | | | | | [Oryza sativa] |
| 1286 | LIB3602-013-Q6-K1-C6 | 1172635 | BLASTX | 246 | 5.00E−25 | 66 | 26S PROTEASE REGULATORY SUBUNIT 4 |
| | | | | | | | HOMOLOG (TAT-BINDING PROTEIN |
| | | | | | | | HOMOLOG 2) >gi\|7435744\|pir\|\|T03776 tat binding |
| | | | | | | | protein homolog - rice >gi\|556558\|dbj\|BAA04615.1\| |
| | | | | | | | (D17789) rice homologue of Tat binding protein |
| | | | | | | | [Oryza sativa] |
| 1287 | LIB3602-114-Q1-K1-F1 | 131772 | BLASTX | 595 | 1.00E−61 | 85 | 40S RIBOSOMAL PROTEIN S14 (CLONE |
| | | | | | | | MCH1) >gi\|82723\|pir\|\|A30097 ribosomal protein |
| | | | | | | | S14 (clone MCH1) - maize |
| 1288 | LIB3602-039-Q6-K1-F12 | 131772 | BLASTX | 595 | 1.00E−61 | 85 | 40S RIBOSOMAL PROTEIN S14 (CLONE |
| | | | | | | | MCH1) >gi\|82723\|pir\|\|A30097 ribosomal protein |
| | | | | | | | S14 (clone MCH1) - maize |
| 1289 | LIB3602-034-Q6-K1-F7 | 131772 | BLASTX | 488 | 3.00E−49 | 91 | 40S RIBOSOMAL PROTEIN S14 (CLONE |
| | | | | | | | MCH1) >gi\|82723\|pir\|\|A30097 ribosomal protein |
| | | | | | | | S14 (clone MCH1) - maize |
| 1290 | LIB3602-059-Q6-K1-H5 | 131772 | BLASTX | 485 | 1.00E−48 | 90 | 40S RIBOSOMAL PROTEIN S14 (CLONE |
| | | | | | | | MCH1) >gi\|82723\|pir\|\|A30097 ribosomal protein |
| | | | | | | | S14 (clone MCH1) - maize |
| 1291 | LIB3602-035-Q1-K1-F7 | 131772 | BLASTX | 460 | 1.00E−45 | 91 | 40S RIBOSOMAL PROTEIN S14 (CLONE |
| | | | | | | | MCH1) >gi\|82723\|pir\|\|A30097 ribosomal protein |
| | | | | | | | S14 (clone MCH1) - maize |
| 1292 | LIB3602-053-Q6-K1-C3 | 4757371 | BLASTX | 272 | 1.00E−23 | 76 | (AB026686) chlorophyll a/b-binding protein |
| | | | | | | | precursor [Physcomitrella patens] |
| 1293 | LIB3602-102-Q1-K1-G9 | 4757371 | BLASTX | 268 | 3.00E−23 | 85 | (AB026686) chlorophyll a/b-binding protein |
| | | | | | | | precursor [Physcomitrella patens] |
| 1294 | LIB3602-070-Q1-K1-B10 | 4757371 | BLASTX | 268 | 3.00E−23 | 85 | (AB026686) chlorophyll a/b-binding protein |
| | | | | | | | precursor [Physcomitrella patens] |
| 1295 | LIB3602-102-Q1-K1-G10 | 4757371 | BLASTX | 188 | 6.00E−14 | 84 | (AB026686) chlorophyll a/b-binding protein |
| | | | | | | | precursor [Physcomitrella patens] |
| 1296 | LIB3602-084-Q6-K1-C12 | 4757371 | BLASTX | 161 | 6.00E−11 | 69 | (AB026686) chlorophyll a/b-binding protein |
| | | | | | | | precursor [Physcomitrella patens] |
| 1297 | LIB3602-002-P1-K6-A7 | 6015604 | BLASTX | 466 | 1.00E−48 | 62 | (X97322) ribosomal protein L9 [Pisum sativum] |
| 1298 | LIB3602-052-Q6-K1-F7 | 6015604 | BLASTX | 409 | 7.00E−40 | 58 | (X97322) ribosomal protein L9 [Pisum sativum] |
| 1299 | LIB3602-056-Q6-K1-C10 | 6015604 | BLASTX | 399 | 1.00E−38 | 58 | (X97322) ribosomal protein L9 [Pisum sativum] |
| 1300 | LIB3602-020-Q6-K1-F9 | 6015604 | BLASTX | 319 | 2.00E−29 | 60 | (X97322) ribosomal protein L9 [Pisum sativum] |
| 1301 | LIB3602-038-Q6-K1-G9 | 6015604 | BLASTX | 312 | 1.00E−28 | 59 | (X97322) ribosomal protein L9 [Pisum sativum] |
| 1302 | LIB3602-069-Q1-K1-F5 | 7109466 | BLASTX | 481 | 4.00E−48 | 57 | (AC016662) putative 60S ribosomal protein L6 |
| | | | | | | | [Arabidopsis thaliana] |
| 1303 | LIB3602-092-Q6-K6-H4 | 7109466 | BLASTX | 453 | 8.00E−45 | 61 | (AC016662) putative 60S ribosomal protein L6 |
| | | | | | | | [Arabidopsis thaliana] |
| 1304 | LIB3602-027-Q6-K1-B9 | 7109466 | BLASTX | 443 | 9.00E−44 | 58 | (AC016662) putative 60S ribosomal protein L6 |
| | | | | | | | [Arabidopsis thaliana] |
| 1305 | LIB3602-047-Q6-K1-C9 | 7109466 | BLASTX | 432 | 2.00E−42 | 66 | (AC016662) putative 60S ribosomal protein L6 |
| | | | | | | | [Arabidopsis thaliana] |
| 1306 | LIB3602-046-Q6-K1-C9 | 7109466 | BLASTX | 409 | 7.00E−40 | 60 | (AC016662) putative 60S ribosomal protein L6 |
| | | | | | | | [Arabidopsis thaliana] |
| 1307 | LIB3602-030-Q6-K1-E2 | 6225817 | BLASTX | 507 | 2.00E−51 | 66 | DELTA 1-PYRROLINE-5-CARBOXYLATE |
| | | | | | | | SYNTHETASE (P5CS) [INCLUDES: |
| | | | | | | | GLUTAMATE 5-KINASE (GAMMA- |
| | | | | | | | GLUTAMYL KINASE) (GK); GAMMA- |
| | | | | | | | GLUTAMYL PHOSPHATE REDUCTASE (GPR) |
| | | | | | | | (GLUTAMATE-5-SEMIALDEHYDE |
| | | | | | | | DEHYDROGENASE) (GLUTAMYL-GAMMA- |
| | | | | | | | SEMIALDEHYDE DEHYDROGENASE)] |
| | | | | | | | >gi\|7488983\|pir\|\|T |
| 1308 | LIB3602-030-Q6-K1-B9 | 6225817 | BLASTX | 500 | 2.00E−50 | 65 | DELTA 1-PYRROLINE-5-CARBOXYLATE |
| | | | | | | | SYNTHETASE (P5CS) [INCLUDES: |
| | | | | | | | GLUTAMATE 5-KINASE (GAMMA- |
| | | | | | | | GLUTAMYL KINASE) (GK); GAMMA- |
| | | | | | | | GLUTAMYL PHOSPHATE REDUCTASE (GPR) |
| | | | | | | | (GLUTAMATE-5-SEMIALDEHYDE |
| | | | | | | | DEHYDROGENASE) (GLUTAMYL-GAMMA- |
| | | | | | | | SEMIALDEHYDE DEHYDROGENASE)] |
| | | | | | | | >gi\|7488983\|pir\|\|T |
| 1309 | LIB3602-101-Q1-K1-E10 | 6225817 | BLASTX | 351 | 4.00E−37 | 77 | DELTA 1-PYRROLINE-5-CARBOXYLATE |
| | | | | | | | SYNTHETASE (P5CS) [INCLUDES: |
| | | | | | | | GLUTAMATE 5-KINASE (GAMMA- |
| | | | | | | | GLUTAMYL KINASE) (GK); GAMMA- |
| | | | | | | | GLUTAMYL PHOSPHATE REDUCTASE (GPR) |
| | | | | | | | (GLUTAMATE-5-SEMIALDEHYDE |
| | | | | | | | DEHYDROGENASE) (GLUTAMYL-GAMMA- |
| | | | | | | | SEMIALDEHYDE DEHYDROGENASE)] |
| | | | | | | | >gi\|7488983\|pir\|\|T |
| 1310 | LIB3602-048-Q6-K1QA-B4 | 6225817 | BLASTX | 289 | 1.00E−36 | 67 | DELTA 1-PYRROLINE-5-CARBOXYLATE |
| | | | | | | | SYNTHETASE (P5CS) [INCLUDES: |
| | | | | | | | GLUTAMATE 5-KINASE (GAMMA- |
| | | | | | | | GLUTAMYL KINASE) (GK); GAMMA- |
| | | | | | | | GLUTAMYL PHOSPHATE REDUCTASE (GPR) |
| | | | | | | | (GLUTAMATE-5-SEMIALDEHYDE |
| | | | | | | | DEHYDROGENASE) (GLUTAMYL-GAMMA- |
| | | | | | | | SEMIALDEHYDE DEHYDROGENASE)] |
| | | | | | | | >gi\|7488983\|pir\|\|T |
| 1311 | LIB3602-087-Q6-K1-D12 | 6225817 | BLASTX | 348 | 1.00E−33 | 71 | DELTA 1-PYRROLINE-5-CARBOXYLATE |
| | | | | | | | SYNTHETASE (P5CS) [INCLUDES: |
| | | | | | | | GLUTAMATE 5-KINASE (GAMMA- |
| | | | | | | | GLUTAMYL KINASE) (GK); GAMMA- |
| | | | | | | | GLUTAMYL PHOSPHATE REDUCTASE (GPR) |
| | | | | | | | (GLUTAMATE-5-SEMIALDEHYDE |
| | | | | | | | DEHYDROGENASE) (GLUTAMYL-GAMMA- |
| | | | | | | | SEMIALDEHYDE DEHYDROGENASE)] |
| | | | | | | | >gi\|7488983\|pir\|\|T |
| 1312 | LIB3602-058-Q6-K1-C6 | 7019398 | BLASTN | 37 | 5.00E−11 | 100 | Homo Sapiens gonadotropin-regulated testicular |
| | | | | | | | RNA helicase (GRTH), mRNA |
| 1313 | LIB3602-077-Q6-K6-C7 | 7019398 | BLASTN | 36 | 7.00E−11 | 100 | Homo Sapiens gonadotropin-regulated testicular |
| | | | | | | | RNA helicase (GRTH), mRNA |
| 1314 | LIB3602-040-Q6-K1-A11 | 7019398 | BLASTN | 36 | 2.00E−10 | 100 | Homo Sapiens gonadotropin-regulated testicular |
| | | | | | | | RNA helicase (GRTH), mRNA |
| 1315 | LIB3602-079-Q6-K6-A4 | 7019398 | BLASTN | 36 | 2.00E−10 | 100 | Homo Sapiens gonadotropin-regulated testicular |
| | | | | | | | RNA helicase (GRTH), mRNA |
| 1316 | LIB3602-118-Q1-K1-B10 | 7019398 | BLASTN | 36 | 2.00E−10 | 100 | Homo Sapiens gonadotropin-regulated testicular |
| | | | | | | | RNA helicase (GRTH), mRNA |
| 1317 | LIB3602-069-Q1-K1-F2 | 4581162 | BLASTX | 499 | 3.00E−50 | 78 | (AC006220) putative microtubule-associated |
| | | | | | | | protein [Arabidopsis thaliana] |
| 1318 | LIB3602-068-Q1-K1-F2 | 4581162 | BLASTX | 499 | 3.00E−50 | 78 | (AC006220) putative microtubule-associated |
| | | | | | | | protein [Arabidopsis thaliana] |
| 1319 | LIB3602-039-Q6-K1-E5 | 4581162 | BLASTX | 499 | 3.00E−50 | 78 | (AC006220) putative microtubule-associated |
| | | | | | | | protein [Arabidopsis thaliana] |
| 1320 | LIB3602-047-Q6-K1-F7 | 4581162 | BLASTX | 476 | 1.00E−47 | 77 | (AC006220) putative microtubule-associated |
| | | | | | | | protein [Arabidopsis thaliana] |
| 1321 | LIB3602-086-Q6-K1-F1 | 4581162 | BLASTX | 353 | 3.00E−33 | 58 | (AC006220) putative microtubule-associated |
| | | | | | | | protein [Arabidopsis thaliana] |
| 1322 | LIB3602-045-Q6-K1-B9 | 968987 | BLASTX | 232 | 4.00E−19 | 52 | (U31648) ferritin [Glycine max] |
| 1323 | LIB3602-102-Q1-K1-A4 | 968987 | BLASTX | 229 | 1.00E−18 | 51 | (U31648) ferritin [Glycine max] |
| 1324 | LIB3602-105-Q1-K1-G6 | 968987 | BLASTX | 218 | 2.00E−17 | 54 | (U31648) ferritin [Glycine max] |
| 1325 | LIB3602-067-Q1-K1-A11 | 968987 | BLASTX | 218 | 2.00E−17 | 54 | (U31648) ferritin [Glycine max] |
| 1326 | LIB3602-070-Q1-K1-H9 | 968987 | BLASTX | 201 | 2.00E−15 | 52 | (U31648) ferritin [Glycine max] |
| 1327 | LIB3602-095-Q6-K6-H11 | 4966342 | BLASTX | 224 | 5.00E−18 | 46 | (AC006341) ESTs gb\|T04357 and gb\|AA595092 |
| | | | | | | | come from this gene. [Arabidopsis thaliana] |
| 1328 | LIB3602-079-Q6-K6-C9 | 4966342 | BLASTX | 224 | 5.00E−18 | 46 | (AC006341) ESTs gb\|T04357 and gb\|AA595092 |
| | | | | | | | come from this gene. [Arabidopsis thaliana] |
| 1329 | LIB3602-116-Q1-K1-H11 | 4966342 | BLASTX | 224 | 6.00E−18 | 46 | (AC006341) ESTs gb\|T04357 and gb\|AA595092 |
| | | | | | | | come from this gene. [Arabidopsis thaliana] |
| 1330 | LIB3602-112-Q1-K1-H11 | 4966342 | BLASTX | 207 | 5.00E−16 | 46 | (AC006341) ESTs gb\|T04357 and gb\|AA595092 |
| | | | | | | | come from this gene. [Arabidopsis thaliana] |
| 1331 | LIB3602-089-Q6-K6-H11 | 4966342 | BLASTX | 203 | 1.00E−15 | 46 | (AC006341) ESTs gb\|T04357 and gb\|AA595092 |
| | | | | | | | come from this gene. [Arabidopsis thaliana] |
| 1332 | LIB3602-066-Q1-K6-C9 | 6714454 | BLASTX | 336 | 4.00E−31 | 61 | (AC011620) putative 60S ribosomal protein L22 |
| | | | | | | | [Arabidopsis thaliana] |
| 1333 | LIB3602-051-Q6-K1-D10 | 6714454 | BLASTX | 276 | 3.00E−24 | 61 | (AC011620) putative 60S ribosomal protein L22 |
| | | | | | | | [Arabidopsis thaliana] |
| 1334 | LIB3602-008-Q6-K1-H9 | 6714454 | BLASTX | 255 | 8.00E−22 | 60 | (AC011620) putative 60S ribosomal protein L22 |
| | | | | | | | [Arabidopsis thaliana] |
| 1335 | LIB3602-103-Q1-K1-F5 | 6714454 | BLASTX | 158 | 8.00E−14 | 54 | (AC011620) putative 60S ribosomal protein L22 |
| | | | | | | | [Arabidopsis thaliana] |
| 1336 | LIB3602-018-Q6-K1-A9 | 6714454 | BLASTX | 163 | 5.00E−11 | 57 | (AC011620) putative 60S ribosomal protein L22 |
| | | | | | | | [Arabidopsis thaliana] |
| 1337 | LIB3602-066-Q1-K6-H11 | 1805719 | BLASTX | 497 | 4.00E−60 | 70 | (Y10657) Rubisco activase [Chlorococcum littorale] |
| 1338 | LIB3602-106-Q1-K1-E4 | 1805719 | BLASTX | 497 | 4.00E−60 | 70 | (Y10657) Rubisco activase [Chlorococcum littorale] |
| 1339 | LIB3602-029-Q6-K1-A5 | 1805719 | BLASTX | 558 | 3.00E−57 | 71 | (Y10657) Rubisco activase [Chlorococcum littorale] |
| 1340 | LIB3602-040-Q6-K1-A10 | 1805719 | BLASTX | 554 | 6.00E−57 | 81 | (Y10657) Rubisco activase [Chlorococcum littorale] |
| 1341 | LIB3602-041-Q6-K1-H5 | 1805719 | BLASTX | 361 | 3.00E−34 | 64 | (Y10657) Rubisco activase [Chlorococcum littorale] |
| 1342 | LIB3602-048-Q6-K1QA-F3 | 595768 | BLASTX | 157 | 2.00E−10 | 66 | (U13866) non-functional lacZ alpha peptide |
| | | | | | | | [unidentified cloning vector] |
| 1343 | LIB3602-016-Q6-K1-E12 | 595768 | BLASTX | 157 | 3.00E−10 | 65 | (U13866) non-functional lacZ alpha peptide |
| | | | | | | | [unidentified cloning vector] |
| 1344 | LIB3602-056-Q6-K1-B5 | 595768 | BLASTX | 151 | 1.00E−09 | 63 | (U13866) non-functional lacZ alpha peptide |
| | | | | | | | [unidentified cloning vector] |
| 1345 | LIB3602-088-Q6-K6-A11 | 595768 | BLASTX | 148 | 4.00E−09 | 56 | (U13866) non-functional lacZ alpha peptide |
| | | | | | | | [unidentified cloning vector] |
| 1346 | LIB3602-017-Q6-K1-F3 | 7019661 | BLASTX | 318 | 3.00E−29 | 86 | (AL132954) ribosomal L23a-like protein |
| | | | | | | | [Arabidopsis thaliana] |
| 1347 | LIB3602-115-Q1-K1-G4 | 7019661 | BLASTX | 203 | 9.00E−16 | 61 | (AL132954) ribosomal L23a-like protein |
| | | | | | | | [Arabidopsis thaliana] |
| 1348 | LIB3602-107-Q1-K1-E9 | 7019661 | BLASTX | 172 | 4.00E−12 | 75 | (AL132954) ribosomal L23a-like protein |
| | | | | | | | [Arabidopsis thaliana] |
| 1349 | LIB3602-067-Q1-K1-D9 | 7019661 | BLASTX | 149 | 2.00E−10 | 90 | (AL132954) ribosomal L23a-like protein |
| | | | | | | | [Arabidopsis thaliana] |
| 1350 | LIB3602-073-Q1-K1-A7 | 5706704 | BLASTX | 341 | 8.00E−32 | 64 | (AF112440) ribosomal protein S26 [Pisum sativum] |
| 1351 | LIB3602-111-Q1-K1-D1 | 5706704 | BLASTX | 236 | 2.00E−19 | 64 | (AF112440) ribosomal protein S26 [Pisum sativum] |
| 1352 | LIB3602-044-Q6-K1-B5 | 5706704 | BLASTX | 231 | 5.00E−19 | 63 | (AF112440) ribosomal protein S26 [Pisum sativum] |
| 1353 | LIB3602-053-Q6-K1-A7 | 5706704 | BLASTX | 152 | 2.00E−10 | 55 | (AF112440) ribosomal protein S26 [Pisum sativum] |
| 1354 | LIB3602-059-Q6-K1-C4 | 399014 | BLASTX | 685 | 4.00E−72 | 74 | ADP, ATP CARRIER PROTEIN (ADP/ATP |
| | | | | | | | TRANSLOCASE) (ADENINE NUCLEOTIDE |
| | | | | | | | TRANSLOCATOR) (ANT) >gi\|99444\|pir\|\|A41677 |
| | | | | | | | ADP, ATP carrier protein - Chlorella kessleri |
| | | | | | | | >gi\|516597\|gb\|AAA33027.1\| (M76669) ATP/ADP |
| | | | | | | | translocator [Chlorella kessleri] |
| 1355 | LIB3602-050-Q6-K1-F7 | 399014 | BLASTX | 656 | 8.00E−69 | 81 | ADP, ATP CARRIER PROTEIN (ADP/ATP |
| | | | | | | | TRANSLOCASE) (ADENINE NUCLEOTIDE |
| | | | | | | | TRANSLOCATOR) (ANT) >gi\|99444\|pir\|\|A41677 |
| | | | | | | | ADP, ATP carrier protein - Chlorella kessleri |
| | | | | | | | >gi\|516597\|gb\|AAA33027.1\| (M76669) ATP/ADP |
| | | | | | | | translocator [Chlorella kessleri] |
| 1356 | LIB3602-018-Q6-K1-E11 | 399014 | BLASTX | 379 | 3.00E−36 | 72 | ADP, ATP CARRIER PROTEIN (ADP/ATP |
| | | | | | | | TRANSLOCASE) (ADENINE NUCLEOTIDE |
| | | | | | | | TRANSLOCATOR) (ANT) >gi\|99444\|pir\|\|A41677 |
| | | | | | | | ADP, ATP carrier protein - Chlorella kessleri |
| | | | | | | | >gi\|516597\|gb\|AAA33027.1\| (M76669) ATP/ADP |
| | | | | | | | translocator [Chlorella kessleri] |
| 1357 | LIB3602-044-Q6-K1-E11 | 399014 | BLASTX | 176 | 1.00E−12 | 81 | ADP, ATP CARRIER PROTEIN (ADP/ATP |
| | | | | | | | TRANSLOCASE) (ADENINE NUCLEOTIDE |
| | | | | | | | TRANSLOCATOR) (ANT) >gi\|99444\|pir\|\|A41677 |
| | | | | | | | ADP, ATP carrier protein - Chlorella kessleri |
| | | | | | | | >gi\|516597\|gb\|AAA33027.1\| (M76669) ATP/ADP |
| | | | | | | | translocator [Chlorella kessleri] |
| 1358 | LIB3602-067-Q1-K1-E2 | 7294504 | BLASTX | 338 | 1.00E−31 | 63 | (AE003539) RpS4 gene product [alt 2] [Drosophila |
| | | | | | | | melanogaster] >gi\|7294505\|gb\|AAF49847.1\| |
| | | | | | | | (AE003539) RpS4 gene product [alt 1] [Drosophila |
| | | | | | | | melanogaster] |
| 1359 | LIB3602-051-Q6-K1-A7 | 7294504 | BLASTX | 272 | 5.00E−24 | 69 | (AE003539) RpS4 gene product [alt 2] [Drosophila |
| | | | | | | | melanogaster] >gi\|7294505\|gb\|AAF49847.1\| |
| | | | | | | | (AE003539) RpS4 gene product [alt 1] [Drosophila |
| | | | | | | | melanogaster] |
| 1360 | LIB3602-003-Q1-K1-E9 | 7294504 | BLASTX | 261 | 9.00E−23 | 67 | (AE003539) RpS4 gene product [alt 2] [Drosophila |
| | | | | | | | melanogaster] >gi\|7294505\|gb\|AAF49847.1\| |
| | | | | | | | (AE003539) RpS4 gene product [alt 1] [Drosophila |
| | | | | | | | melanogaster] |
| 1361 | LIB3602-006-Q1-K1-E3 | 7294504 | BLASTX | 214 | 7.00E−21 | 68 | (AE003539) RpS4 gene product [alt 2] [Drosophila |
| | | | | | | | melanogaster] >gi\|7294505\|gb\|AAF49847.1\| |
| | | | | | | | (AE003539) RpS4 gene product [alt 1] [Drosophila |
| | | | | | | | melanogaster] |
| 1362 | LIB3602-054-Q6-K1-C12 | 7440943 | BLASTX | 498 | 3.00E−50 | 72 | ribosomal protein L19.T2H3.3 - Arabidopsis |
| | | | | | | | thaliana >gi\|3377797\|gb\|AAC28170.1\| (AF075597) |
| | | | | | | | Similar to 60S ribosome protein L19; coded for by |
| | | | | | | | A. thaliana cDNA T04719; coded for by A. thaliana |
| | | | | | | | cDNA H36046; coded for by A. thaliana cDNA |
| | | | | | | | T44067; coded for by A |
| 1363 | LIB3602-043-Q6-K1-E10 | 7440943 | BLASTX | 341 | 6.00E−32 | 68 | ribosomal protein L19.T2H3.3 - Arabidopsis |
| | | | | | | | thaliana >gi\|3377797\|gb\|AAC28170.1\| (AF075597) |
| | | | | | | | Similar to 60S ribosome protein L19; coded for by |
| | | | | | | | A. thaliana cDNA T04719; coded for by A. thaliana |
| | | | | | | | cDNA H36046; coded for by A. thaliana cDNA |
| | | | | | | | T44067; coded for by A |
| 1364 | LIB3602-044-Q6-K1-H8 | 7440943 | BLASTX | 251 | 2.00E−21 | 63 | ribosomal protein L19.T2H3.3 - Arabidopsis |
| | | | | | | | thaliana >gi\|3377797\|gb\|AAC28170.1\| (AF075597) |
| | | | | | | | Similar to 60S ribosome protein L19; coded for by |
| | | | | | | | A. thaliana cDNA T04719; coded for by A. thaliana |
| | | | | | | | cDNA H36046; coded for by A. thaliana cDNA |
| | | | | | | | T44067; coded for by A |
| 1365 | LIB3602-039-Q6-K1-B8 | 7440943 | BLASTX | 190 | 3.00E−14 | 75 | ribosomal protein L19.T2H3.3 - Arabidopsis |
| | | | | | | | thaliana >gi\|3377797\|gb\|AAC28170.1\| (AF075597) |
| | | | | | | | Similar to 60S ribosome protein L19; coded for by |
| | | | | | | | A. thaliana cDNA T04719; coded for by A. thaliana |
| | | | | | | | cDNA H36046; coded for by A. thaliana cDNA |
| | | | | | | | T44067; coded for by A |
| 1366 | LIB3602-022-Q6-K1-E8 | 7433282 | BLASTX | 575 | 2.00E−59 | 74 | omega 6 desaturase (EC 1.14.99.-) precursor, |
| | | | | | | | chloroplast - Chlamydomonas reinhardtii |
| | | | | | | | >gi\|2696717\|dbj\|BAA23881.1\| (AB007640) |
| | | | | | | | chloroplast w6 desaturase [Chlamydomonas |
| | | | | | | | reinhardtii] |
| 1367 | LIB3602-012-Q6-K1-F3 | 7433282 | BLASTX | 394 | 4.00E−38 | 68 | omega 6 desaturase (EC 1.14.99.-) precursor, |
| | | | | | | | chloroplast - Chlamydomonas reinhardtii |
| | | | | | | | >gi\|2696717\|dbj\|BAA23881.1\| (AB007640) |
| | | | | | | | chloroplast w6 desaturase [Chlamydomonas |
| | | | | | | | reinhardtii] |
| 1368 | LIB3602-016-Q6-K1-D3 | 7433282 | BLASTX | 151 | 7.00E−10 | 59 | omega 6 desaturase (EC 1.14.99.-) precursor, |
| | | | | | | | chloroplast - Chlamydomonas reinhardtii |
| | | | | | | | >gi\|2696717\|dbj\|BAA23881.1\| (AB007640) |
| | | | | | | | chloroplast w6 desaturase [Chlamydomonas |
| | | | | | | | reinhardtii] |
| 1369 | LIB3602-053-Q6-K1-B7 | 7433282 | BLASTX | 151 | 1.00E−09 | 59 | omega 6 desaturase (EC 1.14.99.-) precursor, |
| | | | | | | | chloroplast - Chlamydomonas reinhardtii |
| | | | | | | | >gi\|2696717\|dbj\|BAA23881.1\| (AB007640) |
| | | | | | | | chloroplast w6 desaturase [Chlamydomonas |
| | | | | | | | reinhardtii] |
| 1370 | LIB3602-083-Q6-K6-C6 | 7484374 | BLASTX | 433 | 2.00E−42 | 51 | envelope protein LIP-36G1, low CO2 inducible - |
| | | | | | | | Chlamydomonas reinhardtii |
| | | | | | | | >gi\|2459573\|gb\|AAB71743.1\| (U75345) envelope |
| | | | | | | | protein [Chlamydomonas reinhardtii] |
| 1371 | LIB3602-118-Q1-K1-D1 | 7484374 | BLASTX | 334 | 4.00E−40 | 68 | envelope protein LIP-36G1, low CO2 inducible - |
| | | | | | | | Chlamydomonas reinhardtii |
| | | | | | | | >gi\|2459573\|gb\|AAB71743.1\| (U75345) envelope |
| | | | | | | | protein [Chlamydomonas reinhardtii] |
| 1372 | LIB3602-109-Q1-K1-C6 | 7484374 | BLASTX | 393 | 7.00E−38 | 50 | envelope protein LIP-36G1, low CO2 inducible - |
| | | | | | | | Chlamydomonas reinhardtii |
| | | | | | | | >gi\|2459573\|gb\|AAB71743.1\| (U75345) envelope |
| | | | | | | | protein [Chlamydomonas reinhardtii] |
| 1373 | LIB3602-064-Q1-K6-F7 | 7484374 | BLASTX | 153 | 6.00E−10 | 42 | envelope protein LIP-36G1, low CO2 inducible - |
| | | | | | | | Chlamydomonas reinhardtii |
| | | | | | | | >gi\|2459573\|gb\|AAB71743.1\| (U75345) envelope |
| | | | | | | | protein [Chlamydomonas reinhardtii] |
| 1374 | LIB3602-112-Q1-K1-G4 | 3776572 | BLASTX | 307 | 9.00E−28 | 38 | (AC005388) ESTs gb\|R65052, gb\|AA712146, |
| | | | | | | | gb\|H76533, gb\|H76282, gb\|AA650771, gb\|H76287, |
| | | | | | | | gb\|AA650887, gb\|N37383, gb\|Z29721 and |
| | | | | | | | gb\|Z29722 come from this gene. [Arabidopsis |
| | | | | | | | thaliana] |
| 1375 | LIB3602-032-Q6-K1-G3 | 3776572 | BLASTX | 188 | 6.00E−14 | 38 | (AC005388) ESTs gb\|R65052, gb\|AA712146, |
| | | | | | | | gb\|H76533, gb\|H76282, gb\|AA650771, gb\|H76287, |
| | | | | | | | gb\|AA650887, gb\|N37383, gb\|Z29721 and |
| | | | | | | | gb\|Z29722 come from this gene. [Arabidopsis |
| | | | | | | | thaliana] |
| 1376 | LIB3602-032-Q6-K1-F12 | 3776572 | BLASTX | 187 | 8.00E−14 | 39 | (AC005388) ESTs gb\|R65052, gb\|AA712146, |
| | | | | | | | gb\|H76533, gb\|H76282, gb\|AA650771, gb\|H76287, |
| | | | | | | | gb\|AA650887, gb\|N37383, gb\|Z29721 and |
| | | | | | | | gb\|Z29722 come from this gene. [Arabidopsis |
| | | | | | | | thaliana] |
| 1377 | LIB3602-044-Q6-K1-E4 | 3776572 | BLASTX | 185 | 1.00E−13 | 39 | (AC005388) ESTs gb\|R65052, gb\|AA712146, |
| | | | | | | | gb\|H76533, gb\|H76282, gb\|AA650771, gb\|H76287, |
| | | | | | | | gb\|AA650887, gb\|N37383, gb\|Z29721 and |
| | | | | | | | gb\|Z29722 come from this gene. [Arabidopsis |
| | | | | | | | thaliana] |
| 1378 | LIB3602-027-Q6-K1-C9 | 2492870 | BLASTX | 474 | 2.00E−47 | 52 | SERINE--GLYOXYLATE |
| | | | | | | | AMINOTRANSFERASE (SGAT) |
| 1379 | LIB3602-046-Q6-K1-F9 | 2492870 | BLASTX | 422 | 2.00E−41 | 51 | SERINE--GLYOXYLATE |
| | | | | | | | AMINOTRANSFERASE (SGAT) |
| 1380 | LIB3602-013-Q6-K1-B5 | 2492870 | BLASTX | 419 | 5.00E−41 | 51 | SERINE--GLYOXYLATE |
| | | | | | | | AMINOTRANSFERASE (SGAT) |
| 1381 | LIB3602-045-Q6-K1-D2 | 2492870 | BLASTX | 259 | 3.00E−22 | 50 | SERINE--GLYOXYLATE |
| | | | | | | | AMINOTRANSFERASE (SGAT) |
| 1382 | LIB3602-076-Q6-K6-G4 | 6513924 | BLASTX | 182 | 3.00E−20 | 42 | (AC011664) putative 40S ribosomal protein S19 |
| | | | | | | | [Arabidopsis thaliana] |
| 1383 | LIB3602-085-Q6-K1-E2 | 6513924 | BLASTX | 200 | 3.00E−15 | 35 | (AC011664) putative 40S ribosomal protein S19 |
| | | | | | | | [Arabidopsis thaliana] |
| 1384 | LIB3602-077-Q6-K6-G2 | 6513924 | BLASTX | 146 | 4.00E−09 | 55 | (AC011664) putative 40S ribosomal protein S19 |
| | | | | | | | [Arabidopsis thaliana] |
| 1385 | LIB3602-065-Q1-K6-C7 | 6513924 | BLASTX | 146 | 4.00E−09 | 55 | (AC011664) putative 40S ribosomal protein S19 |
| | | | | | | | [Arabidopsis thaliana] |
| 1386 | LIB3602-113-Q1-K1-A2 | 4406134 | BLASTX | 320 | 2.00E−29 | 62 | (AF083392) promoter active fragment E3 |
| | | | | | | | [Synechococcus PCC7942] |
| 1387 | LIB3602-112-Q1-K1-A2 | 4406134 | BLASTX | 320 | 3.00E−29 | 62 | (AF083392) promoter active fragment E3 |
| | | | | | | | [Synechococcus PCC7942] |
| 1388 | LIB3602-093-Q6-K6-A6 | 4406134 | BLASTX | 320 | 3.00E−29 | 62 | (AF083392) promoter active fragment E3 |
| | | | | | | | [Synechococcus PCC7942] |
| 1389 | LIB3602-044-Q6-K1-B9 | 4406134 | BLASTX | 272 | 9.00E−24 | 66 | (AF083392) promoter active fragment E3 |
| | | | | | | | [Synechococcus PCC7942] |
| 1390 | LIB3602-007-Q1-K1-F9 | 7448603 | BLASTX | 650 | 7.00E−68 | 53 | flavoprotein, 63.5K - Synechocystis sp. (strain PCC |
| | | | | | | | 6803) >gi\|1001242\|dbj\|BAA10483.1\| (D64003) |
| | | | | | | | flavoprotein [Synechocystis sp.] |
| 1391 | LIB3602-072-Q1-K1-G1 | 7448603 | BLASTX | 504 | 8.00E−51 | 59 | flavoprotein, 63.5K - Synechocystis sp. (strain PCC |
| | | | | | | | 6803) >gi\|1001242\|dbj\|BAA10483.1\| (D64003) |
| | | | | | | | flavoprotein [Synechocystis sp.] |
| 1392 | LIB3602-004-Q1-K1-G7 | 7448603 | BLASTX | 226 | 2.00E−18 | 57 | flavoprotein, 63.5K - Synechocystis sp. (strain PCC |
| | | | | | | | 6803) >gi\|1001242\|dbj\|BAA10483.1\| (D64003) |
| | | | | | | | flavoprotein [Synechocystis sp.] |
| 1393 | LIB3602-107-Q1-K1-B1 | 7448603 | BLASTX | 141 | 2.00E−14 | 65 | flavoprotein, 63.5K - Synechocystis sp. (strain PCC |
| | | | | | | | 6803) >gi\|1001242\|dbj\|BAA10483.1\| (D64003) |
| | | | | | | | flavoprotein [Synechocystis sp.] |
| 1394 | LIB3602-090-Q6-K6-B12 | 2290991 | BLASTX | 425 | 1.00E−41 | 57 | (AF006000) unknown [Bordetella pertussis] |
| 1395 | LIB3602-091-Q6-K6-B12 | 2290991 | BLASTX | 425 | 1.00E−41 | 57 | (AF006000) unknown [Bordetella pertussis] |
| 1396 | LIB3602-094-Q6-K6-B12 | 2290991 | BLASTX | 347 | 6.00E−34 | 55 | (AF006000) unknown [Bordetella pertussis] |
| 1397 | LIB3602-039-Q6-K1-D1 | 2290991 | BLASTX | 297 | 1.00E−26 | 55 | (AF006000) unknown [Bordetella pertussis] |
| 1398 | LIB3602-074-Q1-K1-A5 | 6714451 | BLASTX | 319 | 1.00E−37 | 80 | (AC011620) putative 60S ribosomal protein L18 |
| | | | | | | | [Arabidopsis thaliana] |
| 1399 | LIB3602-037-Q6-K1-F9 | 6714451 | BLASTX | 370 | 2.00E−35 | 78 | (AC011620) putative 60S ribosomal protein L18 |
| | | | | | | | [Arabidopsis thaliana] |
| 1400 | LIB3602-069-Q1-K1-D4 | 6714451 | BLASTX | 308 | 2.00E−28 | 81 | (AC011620) putative 60S ribosomal protein L18 |
| | | | | | | | [Arabidopsis thaliana] |
| 1401 | LIB3602-086-Q6-K1-B2 | 6714451 | BLASTX | 163 | 3.00E−11 | 85 | (AC011620) putative 60S ribosomal protein L18 |
| | | | | | | | [Arabidopsis thaliana] |
| 1402 | LIB3602-056-Q6-K1-B11 | 3851636 | BLASTX | 482 | 2.00E−48 | 60 | (AF098519) unknown [Avicennia marina] |
| | | | | | | | >gi\|4128206\|gb\|AAD03501.1\| (AF056316) 40S |
| | | | | | | | ribosome protein S7 [Avicennia marina] |
| 1403 | LIB3602-047-Q6-K1-D3 | 3851636 | BLASTX | 300 | 3.00E−27 | 67 | (AF098519) unknown [Avicennia marina] |
| | | | | | | | >gi\|4128206\|gb\|AAD03501.1\| (AF056316) 40S |
| | | | | | | | ribosome protein S7 [Avicennia marina] |
| 1404 | LIB3602-084-Q6-K1-A1 | 3851636 | BLASTX | 192 | 2.00E−14 | 40 | (AF098519) unknown [Avicennia marina] |
| | | | | | | | >gi\|4128206\|gb\|AAD03501.1\| (AF056316) 40S |
| | | | | | | | ribosome protein S7 [Avicennia marina] |
| 1405 | LIB3602-091-Q6-K6-B3 | 3851636 | BLASTX | 146 | 3.00E−14 | 62 | (AF098519) unknown [Avicennia marina] |
| | | | | | | | >gi\|4128206\|gb\|AAD03501.1\| (AF056316) 40S |
| | | | | | | | ribosome protein S7 [Avicennia marina] |
| 1406 | LIB3602-071-Q1-K1-D7 | 4836876 | BLASTX | 565 | 5.00E−58 | 66 | (AC007260) Similar to dTDP-D-glucose 4,6- |
| | | | | | | | dehydratase [Arabidopsis thaliana] |
| 1407 | LIB3602-010-Q6-K1-B3 | 4836876 | BLASTX | 441 | 2.00E−43 | 57 | (AC007260) Similar to dTDP-D-glucose 4,6- |
| | | | | | | | dehydratase [Arabidopsis thaliana] |
| 1408 | LIB3602-037-Q6-K1-F10 | 4836876 | BLASTX | 334 | 6.00E−31 | 52 | (AC007260) Similar to dTDP-D-glucose 4,6- |
| | | | | | | | dehydratase [Arabidopsis thaliana] |
| 1409 | LIB3602-057-Q6-K1-A3 | 4836876 | BLASTX | 170 | 2.00E−24 | 52 | (AC007260) Similar to dTDP-D-glucose 4,6- |
| | | | | | | | dehydratase [Arabidopsis thaliana] |
| 1410 | LIB3602-062-Q6-K1-D10 | 5902590 | BLASTX | 577 | 2.00E−59 | 69 | (AF110783) rieske iron-sulfur protein precursor |
| | | | | | | | [Volvox carteri f. nagariensis] |
| 1411 | LIB3602-013-Q6-K1-D4 | 5902590 | BLASTX | 540 | 3.00E−55 | 77 | (AF110783) rieske iron-sulfur protein precursor |
| | | | | | | | [Volvox carteri f. nagariensis] |
| 1412 | LIB3602-008-Q6-K1-B11 | 5902590 | BLASTX | 458 | 2.00E−45 | 81 | (AF110783) rieske iron-sulfur protein precursor |
| | | | | | | | [Volvox carteri f. nagariensis] |
| 1413 | LIB3602-008-Q6-K1-H6 | 5902590 | BLASTX | 378 | 4.00E−36 | 57 | (AF110783) rieske iron-sulfur protein precursor |
| | | | | | | | [Volvox carteri f. nagariensis] |
| 1414 | LIB3602-050-Q6-K1-B2 | 7488227 | BLASTX | 566 | 3.00E−58 | 74 | prohibitin-like protein F20O9.200 - Arabidopsis |
| | | | | | | | thaliana >gi\|2842494\|emb\|CAA16891.1\| |
| | | | | | | | (AL021749) prohibitin-like protein [Arabidopsis |
| | | | | | | | thaliana] >gi\|4097688\|gb\|AAD00155.1\| (U66591) |
| | | | | | | | prohibitin 1 [Arabidopsis thaliana] |
| | | | | | | | >gi\|4097694\|gb\|AAD00158.1\| (U66594) proh |
| 1415 | LIB3602-011-Q6-K1-F1 | 7488227 | BLASTX | 483 | 2.00E−48 | 71 | prohibitin-like protein F20O9.200 - Arabidopsis |
| | | | | | | | thaliana >gi\|2842494\|emb\|CAA16891.1\| |
| | | | | | | | (AL021749) prohibitin-like protein [Arabidopsis |
| | | | | | | | thaliana] >gi\|4097688\|gb\|AAD00155.1\| (U66591) |
| | | | | | | | prohibitin 1 [Arabidopsis thaliana] |
| | | | | | | | >gi\|4097694\|gb\|AAD00158.1\| (U66594) proh |
| 1416 | LIB3602-086-Q6-K1-G3 | 7488227 | BLASTX | 451 | 1.00E−44 | 70 | prohibitin-like protein F20O9.200 - Arabidopsis |
| | | | | | | | thaliana >gi\|2842494\|emb\|CAA16891.1\| |
| | | | | | | | (AL021749) prohibitin-like protein [Arabidopsis |
| | | | | | | | thaliana] >gi\|4097688\|gb\|AAD00155.1\| (U66591) |
| | | | | | | | prohibitin 1 [Arabidopsis thaliana] |
| | | | | | | | >gi\|4097694\|gb\|AAD00158.1\| (U66594) proh |
| 1417 | LIB3602-013-Q6-K1-B6 | 7488227 | BLASTX | 398 | 2.00E−38 | 73 | prohibitin-like protein F20O9.200 - Arabidopsis |
| | | | | | | | thaliana >gi\|2842494\|emb\|CAA16891.1\| |
| | | | | | | | (AL021749) prohibitin-like protein [Arabidopsis |
| | | | | | | | thaliana] >gi\|4097688\|gb\|AAD00155.1\| (U66591) |
| | | | | | | | prohibitin 1 [Arabidopsis thaliana] |
| | | | | | | | >gi\|4097694\|gb\|AAD00158.1\| (U66594) proh |
| 1418 | LIB3602-005-Q1-K1-F3 | 7484402 | BLASTX | 398 | 2.00E−38 | 68 | protochlorophyllide reductase (EC 1.3.1.33) |
| | | | | | | | precursor - Chlamydomonas reinhardtii |
| | | | | | | | >gi\|1408176\|gb\|AAB04951.1\| (U36752) |
| | | | | | | | NADPH: protochlorophyllide oxidoreductase |
| | | | | | | | [Chlamydomonas reinhardtii] |
| 1419 | LIB3602-085-Q6-K1-C11 | 7484402 | BLASTX | 387 | 4.00E−37 | 66 | protochlorophyllide reductase (EC 1.3.1.33) |
| | | | | | | | precursor - Chlamydomonas reinhardtii |
| | | | | | | | >gi\|1408176\|gb\|AAB04951.1\| (U36752) |
| | | | | | | | NADPH: protochlorophyllide oxidoreductase |
| | | | | | | | [Chlamydomonas reinhardtii] |
| 1420 | LIB3602-112-Q1-K1-F1 | 7484402 | BLASTX | 222 | 6.00E−18 | 61 | protochlorophyllide reductase (EC 1.3.1.33) |
| | | | | | | | precursor - Chlamydomonas reinhardtii |
| | | | | | | | >gi\|1408176\|gb\|AAB04951.1\| (U36752) |
| | | | | | | | NADPH: protochlorophyllide oxidoreductase |
| | | | | | | | [Chlamydomonas reinhardtii] |
| 1421 | LIB3602-093-Q6-K6-C7 | 7484402 | BLASTX | 222 | 6.00E−18 | 61 | protochlorophyllide reductase (EC 1.3.1.33) |
| | | | | | | | precursor - Chlamydomonas reinhardtii |
| | | | | | | | >gi\|1408176\|gb\|AAB04951.1\| (U36752) |
| | | | | | | | NADPH: protochlorophyllide oxidoreductase |
| | | | | | | | [Chlamydomonas reinhardtii] |
| 1422 | LIB3602-050-Q6-K1-D11 | 7488810 | BLASTX | 276 | 3.00E−24 | 47 | hydroxyproline-rich glycoprotein 1 - garden pea |
| | | | | | | | (fragment) >gi\|1711036\|gb\|AAB97098.1\| (U78952) |
| | | | | | | | hydroxyproline rich glycoprotein PsHRGP1 [Pisum |
| | | | | | | | sativum] |
| 1423 | LIB3602-058-Q6-K1-B3 | 7488810 | BLASTX | 224 | 4.00E−18 | 40 | hydroxyproline-rich glycoprotein 1 - garden pea |
| | | | | | | | (fragment) >gi\|1711036\|gb\|AAB97098.1\| (U78952) |
| | | | | | | | hydroxyproline rich glycoprotein PsHRGP1 [Pisum |
| | | | | | | | sativum] |
| 1424 | LIB3602-055-Q6-K1-C6 | 7488810 | BLASTX | 224 | 4.00E−18 | 40 | hydroxyproline-rich glycoprotein 1 - garden pea |
| | | | | | | | (fragment) >gi\|1711036\|gb\|AAB97098.1\| (U78952) |
| | | | | | | | hydroxyproline rich glycoprotein PsHRGP1 [Pisum |
| | | | | | | | sativum] |
| 1425 | LIB3602-067-Q1-K1-E10 | 7488810 | BLASTX | 217 | 3.00E−17 | 39 | hydroxyproline-rich glycoprotein 1 - garden pea |
| | | | | | | | (fragment) >gi\|1711036\|gb\|AAB97098.1\| (U78952) |
| | | | | | | | hydroxyproline rich glycoprotein PsHRGP1 [Pisum |
| | | | | | | | sativum] |
| 1426 | LIB3602-091-Q6-K6-E10 | 3914425 | BLASTX | 696 | 2.00E−73 | 73 | PROTEASOME EPSILON CHAIN PRECURSOR |
| | | | | | | | (MACROPAIN EPSILON CHAIN) |
| | | | | | | | (MULTICATALYTIC ENDOPEPTIDASE |
| | | | | | | | COMPLEX EPSILON CHAIN) |
| | | | | | | | >gi\|2511596\|emb\|CAA74029.1\| (Y13695) |
| | | | | | | | multicatalytic endopeptidase complex, proteasome |
| | | | | | | | precursor, beta subunit [Arabidopsis thaliana] |
| | | | | | | | >gi\|3421 |
| 1427 | LIB3602-073-Q1-K1-E1 | 3914425 | BLASTX | 560 | 2.00E−57 | 71 | PROTEASOME EPSILON CHAIN PRECURSOR |
| | | | | | | | (MACROPAIN EPSILON CHAIN) |
| | | | | | | | (MULTICATALYTIC ENDOPEPTIDASE |
| | | | | | | | COMPLEX EPSILON CHAIN) |
| | | | | | | | >gi\|2511596\|emb\|CAA74029.1\| (Y13695) |
| | | | | | | | multicatalytic endopeptidase complex, proteasome |
| | | | | | | | precursor, beta subunit [Arabidopsis thaliana] |
| | | | | | | | >gi\|3421 |
| 1428 | LIB3602-102-Q1-K1-D3 | 3914425 | BLASTX | 560 | 2.00E−57 | 71 | PROTEASOME EPSILON CHAIN PRECURSOR |
| | | | | | | | (MACROPAIN EPSILON CHAIN) |
| | | | | | | | (MULTICATALYTIC ENDOPEPTIDASE |
| | | | | | | | COMPLEX EPSILON CHAIN) |
| | | | | | | | >gi\|2511596\|emb\|CAA74029.1\| (Y13695) |
| | | | | | | | multicatalytic endopeptidase complex, proteasome |
| | | | | | | | precursor, beta subunit [Arabidopsis thaliana] |
| | | | | | | | >gi\|3421 |
| 1429 | LIB3602-057-Q6-K1-D11 | 3914425 | BLASTX | 251 | 5.00E−37 | 69 | PROTEASOME EPSILON CHAIN PRECURSOR |
| | | | | | | | (MACROPAIN EPSILON CHAIN) |
| | | | | | | | (MULTICATALYTIC ENDOPEPTIDASE |
| | | | | | | | COMPLEX EPSILON CHAIN) |
| | | | | | | | >gi\|2511596\|emb\|CAA74029.1\| (Y13695) |
| | | | | | | | multicatalytic endopeptidase complex, proteasome |
| | | | | | | | precursor, beta subunit [Arabidopsis thaliana] |
| | | | | | | | >gi\|3421 |
| 1430 | LIB3602-050-Q6-K1-E4 | 131220 | BLASTX | 249 | 4.00E−21 | 48 | PHOTOSYSTEM I REACTION CENTRE |
| | | | | | | | SUBUNIT X PRECURSOR (LIGHT- |
| | | | | | | | HARVESTING COMPLEX I 8.4 KD PROTEIN) |
| | | | | | | | (PSI-K) (P37 PROTEIN) >gi\|81243\|pir\|\|S06684 |
| | | | | | | | photosystem I 8.4K protein precursor - |
| | | | | | | | Chlamydomonas reinhardtii >gi\|81249\|pir\|\|JQ0372 |
| | | | | | | | photosystem I protein P37 - Ch |
| 1431 | LIB3602-050-Q6-K1-E3 | 131220 | BLASTX | 248 | 6.00E−21 | 60 | PHOTOSYSTEM I REACTION CENTRE |
| | | | | | | | SUBUNIT X PRECURSOR (LIGHT- |
| | | | | | | | HARVESTING COMPLEX I 8.4 KD PROTEIN) |
| | | | | | | | (PSI-K) (P37 PROTEIN) >gi\|81243\|pir\|\|S06684 |
| | | | | | | | photosystem I 8.4K protein precursor - |
| | | | | | | | Chlamydomonas reinhardtii >gi\|81249\|pir\|\|JQ0372 |
| | | | | | | | photosystem I protein P37 - Ch |
| 1432 | LIB3602-011-Q6-K1-H6 | 131220 | BLASTX | 237 | 1.00E−19 | 58 | PHOTOSYSTEM I REACTION CENTRE |
| | | | | | | | SUBUNIT X PRECURSOR (LIGHT- |
| | | | | | | | HARVESTING COMPLEX I 8.4 KD PROTEIN) |
| | | | | | | | (PSI-K) (P37 PROTEIN) >gi\|81243\|pir\|\|S06684 |
| | | | | | | | photosystem I 8.4K protein precursor - |
| | | | | | | | Chlamydomonas reinhardtii >gi\|81249\|pir\|\|JQ0372 |
| | | | | | | | photosystem I protein P37 - Ch |
| 1433 | LIB3602-053-Q6-K1-G4 | 131220 | BLASTX | 202 | 8.00E−16 | 62 | PHOTOSYSTEM I REACTION CENTRE |
| | | | | | | | SUBUNIT X PRECURSOR (LIGHT- |
| | | | | | | | HARVESTING COMPLEX I 8.4 KD PROTEIN) |
| | | | | | | | (PSI-K) (P37 PROTEIN) >gi\|81243\|pir\|\|S06684 |
| | | | | | | | photosystem I 8.4K protein precursor - |
| | | | | | | | Chlamydomonas reinhardtii >gi\|81249\|pir\|\|JQ0372 |
| | | | | | | | photosystem I protein P37 - Ch |
| 1434 | LIB3602-003-Q1-K1-F1 | 7211992 | BLASTX | 537 | 7.00E−55 | 68 | (AC004809) Strong simialrity to the disulfide |
| | | | | | | | isomerase precursor homolog T21L14.14 |
| | | | | | | | gi\|2702281 from A. thaliana on BAC gb\|AC003033. |
| | | | | | | | [Arabidopsis thaliana] |
| 1435 | LIB3602-018-Q6-K1-G7 | 7211992 | BLASTX | 354 | 3.00E−33 | 48 | (AC004809) Strong simialrity to the disulfide |
| | | | | | | | isomerase precursor homolog T21L14.14 |
| | | | | | | | gi\|2702281 from A. thaliana on BAC gb\|AC003033. |
| | | | | | | | [Arabidopsis thaliana] |
| 1436 | LIB3602-063-Q1-K6-D12 | 7211992 | BLASTX | 344 | 4.00E−32 | 44 | (AC004809) Strong simialrity to the disulfide |
| | | | | | | | isomerase precursor homolog T21L14.14 |
| | | | | | | | gi\|2702281 from A. thaliana on BAC gb\|AC003033. |
| | | | | | | | [Arabidopsis thaliana] |
| 1437 | LIB3602-052-Q6-K1-C2 | 7211992 | BLASTX | 322 | 1.00E−29 | 48 | (AC004809) Strong simialrity to the disulfide |
| | | | | | | | isomerase precursor homolog T21L14.14 |
| | | | | | | | gi\|2702281 from A. thaliana on BAC gb\|AC003033. |
| | | | | | | | [Arabidopsis thaliana] |
| 1438 | LIB3602-115-Q1-K1-C12 | 2754849 | BLASTX | 565 | 5.00E−58 | 61 | (AF039000) putative serine-glyoxylate |
| | | | | | | | aminotransferase [Fritillaria agrestis] |
| 1439 | LIB3602-088-Q6-K6-C12 | 2754849 | BLASTX | 559 | 3.00E−57 | 59 | (AF039000) putative serine-glyoxylate |
| | | | | | | | aminotransferase [Fritillaria agrestis] |
| 1440 | LIB3602-104-Q1-K1-F7 | 2754849 | BLASTX | 557 | 5.00E−57 | 62 | (AF039000) putative serine-glyoxylate |
| | | | | | | | aminotransferase [Fritillaria agrestis] |
| 1441 | LIB3602-049-Q6-K1-G1 | 2754849 | BLASTX | 152 | 2.00E−12 | 39 | (AF039000) putative serine-glyoxylate |
| | | | | | | | aminotransferase [Fritillaria agrestis] |
| 1442 | LIB3602-035-Q1-K1-B2 | 2582351 | BLASTX | 473 | 3.00E−47 | 56 | (AF018639) unknown [Dictyostelium discoideum] |
| 1443 | LIB3602-034-Q6-K1-B2 | 2582351 | BLASTX | 456 | 3.00E−45 | 57 | (AF018639) unknown [Dictyostelium discoideum] |
| 1444 | LIB3602-008-Q6-K1-B1 | 2582351 | BLASTX | 277 | 2.00E−24 | 53 | (AF018639) unknown [Dictyostelium discoideum] |
| 1445 | LIB3602-008-Q6-K1-D5 | 2582351 | BLASTX | 212 | 9.00E−17 | 50 | (AF018639) unknown [Dictyostelium discoideum] |
| 1446 | LIB3602-113-Q1-K1-A1 | 3914473 | BLASTX | 456 | 2.00E−45 | 64 | PHOTOSYSTEM I REACTION CENTRE |
| | | | | | | | SUBUNIT XI PRECURSOR (SUBUNIT V) (PSI- |
| | | | | | | | L) >gi\|479684\|pir\|\|S35151 photosystem I chain XI |
| | | | | | | | precursor - spinach >gi\|396275\|emb\|CAA45775.1\| |
| | | | | | | | (X64445) subunit XI of photosystem I reaction |
| | | | | | | | center [Spinacia oleracea] |
| 1447 | LIB3602-115-Q1-K1-F8 | 3914473 | BLASTX | 404 | 4.00E−39 | 59 | PHOTOSYSTEM I REACTION CENTRE |
| | | | | | | | SUBUNIT XI PRECURSOR (SUBUNIT V) (PSI- |
| | | | | | | | L) >gi\|479684\|pir\|\|S35151 photosystem I chain XI |
| | | | | | | | precursor - spinach >gi\|396275\|emb\|CAA45775.1\| |
| | | | | | | | (X64445) subunit XI of photosystem I reaction |
| | | | | | | | center [Spinacia oleracea] |
| 1448 | LIB3602-106-Q1-K1-G12 | 3914473 | BLASTX | 372 | 2.00E−35 | 59 | PHOTOSYSTEM I REACTION CENTRE |
| | | | | | | | SUBUNIT XI PRECURSOR (SUBUNIT V) (PSI- |
| | | | | | | | L) >gi\|479684\|pir\|\|S35151 photosystem I chain XI |
| | | | | | | | precursor - spinach >gi\|396275\|emb\|CAA45775.1\| |
| | | | | | | | (X64445) subunit XI of photosystem I reaction |
| | | | | | | | center [Spinacia oleracea] |
| 1449 | LIB3602-019-Q6-K1-A5 | 3914473 | BLASTX | 324 | 5.00E−30 | 84 | PHOTOSYSTEM I REACTION CENTRE |
| | | | | | | | SUBUNIT XI PRECURSOR (SUBUNIT V) (PSI- |
| | | | | | | | L) >gi\|479684\|pir\|\|S35151 photosystem I chain XI |
| | | | | | | | precursor - spinach >gi\|396275\|emb\|CAA45775.1\| |
| | | | | | | | (X64445) subunit XI of photosystem I reaction |
| | | | | | | | center [Spinacia oleracea] |
| 1450 | LIB3602-034-Q6-K1-C8 | 1172816 | BLASTX | 647 | 1.00E−67 | 80 | 60S RIBOSOMAL PROTEIN L11A (L16A) |
| | | | | | | | >gi\|624938\|emb\|CAA57395.1\| (X81799) ribosomal |
| | | | | | | | protein L16 [Arabidopsis thaliana] |
| 1451 | LIB3602-079-Q6-K6-D10 | 1172816 | BLASTX | 613 | 1.00E−63 | 79 | 60S RIBOSOMAL PROTEIN L11A (L16A) |
| | | | | | | | >gi\|624938\|emb\|CAA57395.1\| (X81799) ribosomal |
| | | | | | | | protein L16 [Arabidopsis thaliana] |
| 1452 | LIB3602-077-Q6-K6-E5 | 1172816 | BLASTX | 613 | 1.00E−63 | 79 | 60S RIBOSOMAL PROTEIN L11A (L16A) |
| | | | | | | | >gi\|624938\|emb\|CAA57395.1\| (X81799) ribosomal |
| | | | | | | | protein L16 [Arabidopsis thaliana] |
| 1453 | LIB3602-035-Q1-K1-C8 | 1172816 | BLASTX | 613 | 1.00E−63 | 79 | 60S RIBOSOMAL PROTEIN L11A (L16A) |
| | | | | | | | >gi\|624938\|emb\|CAA57395.1\| (X81799) ribosomal |
| | | | | | | | protein L16 [Arabidopsis thaliana] |
| 1454 | LIB3602-035-Q1-K1-H8 | 3747050 | BLASTX | 435 | 9.00E−43 | 83 | (AF093540) ribosomal protein L26 [Zea mays] |
| 1455 | LIB3602-064-Q1-K6-C4 | 3747050 | BLASTX | 425 | 1.00E−41 | 83 | (AF093540) ribosomal protein L26 [Zea mays] |
| 1456 | LIB3602-036-Q6-K1-B6 | 3747050 | BLASTX | 256 | 1.00E−21 | 85 | (AF093540) ribosomal protein L26 [Zea mays] |
| 1457 | LIB3602-034-Q6-K1-H8 | 3747050 | BLASTX | 244 | 3.00E−21 | 81 | (AF093540) ribosomal protein L26 [Zea mays] |
| 1458 | LIB3602-112-Q1-K1-G6 | 118241 | BLASTX | 327 | 4.00E−30 | 49 | DIHYDRODIPICOLINATE SYNTHASE |
| | | | | | | | PRECURSOR (DHDPS) |
| 1459 | LIB3602-092-Q6-K6-G11 | 118241 | BLASTX | 327 | 4.00E−30 | 49 | DIHYDRODIPICOLINATE SYNTHASE |
| | | | | | | | PRECURSOR (DHDPS) |
| 1460 | LIB3602-029-Q6-K1-D5 | 118241 | BLASTX | 295 | 2.00E−26 | 55 | DIHYDRODIPICOLINATE SYNTHASE |
| | | | | | | | PRECURSOR (DHDPS) |
| 1461 | LIB3602-028-Q6-K1-C9 | 118241 | BLASTX | 279 | 1.00E−24 | 55 | DIHYDRODIPICOLINATE SYNTHASE |
| | | | | | | | PRECURSOR (DHDPS) |
| 1462 | LIB3602-076-Q6-K6-B11 | 7239379 | BLASTX | 647 | 6.00E−73 | 72 | (AF234984) putative pseudouridine synthase |
| | | | | | | | [Arabidopsis thaliana] |
| 1463 | LIB3602-070-Q1-K1-A4 | 7239379 | BLASTX | 653 | 2.00E−68 | 66 | (AF234984) putative pseudouridine synthase |
| | | | | | | | [Arabidopsis thaliana] |
| 1464 | LIB3602-074-Q1-K1-C7 | 7239379 | BLASTX | 577 | 2.00E−59 | 73 | (AF234984) putative pseudouridine synthase |
| | | | | | | | [Arabidopsis thaliana] |
| 1465 | LIB3602-105-Q1-K1-B9 | 7239379 | BLASTX | 349 | 5.00E−53 | 72 | (AF234984) putative pseudouridine synthase |
| | | | | | | | [Arabidopsis thaliana] |
| 1466 | LIB3602-067-Q1-K1-A3 | 6093871 | BLASTX | 724 | 1.00E−76 | 74 | 60S RIBOSOMAL PROTEIN L15-1 |
| | | | | | | | >gi\|2982249\|gb\|AAC32112.1\| (AF051207) probable |
| | | | | | | | 60S ribosomal protein L15 [Picea mariana] |
| 1467 | LIB3602-028-Q6-K1-B1 | 6093871 | BLASTX | 676 | 4.00E−71 | 72 | 60S RIBOSOMAL PROTEIN L15-1 |
| | | | | | | | >gi\|2982249\|gb\|AAC32112.1\| (AF051207) probable |
| | | | | | | | 60S ribosomal protein L15 [Picea mariana] |
| 1468 | LIB3602-044-Q6-K1-A9 | 6093871 | BLASTX | 621 | 1.00E−64 | 73 | 60S RIBOSOMAL PROTEIN L15-1 |
| | | | | | | | >gi\|2982249\|gb\|AAC32112.1\| (AF051207) probable |
| | | | | | | | 60S ribosomal protein L15 [Picea mariana] |
| 1469 | LIB3602-015-Q6-K1-A9 | 6093871 | BLASTX | 346 | 4.00E−40 | 58 | 60S RIBOSOMAL PROTEIN L15-1 |
| | | | | | | | >gi\|2982249\|gb\|AAC32112.1\| (AF051207) probable |
| | | | | | | | 60S ribosomal protein L15 [Picea mariana] |
| 1470 | LIB3602-030-Q6-K1-G7 | 115828 | BLASTX | 438 | 3.00E−43 | 76 | CHLOROPHYLL A-B BINDING PROTEIN OF |
| | | | | | | | LHCII TYPE I PRECURSOR (CAB) (LHCP) |
| | | | | | | | >gi\|81223\|pir\|\|JS0172 chlorophyll a/b-binding |
| | | | | | | | protein precursor - green alga (Dunaliella salina) |
| | | | | | | | >gi\|167987\|gb\|AAA33278.1\| (M23531) major |
| | | | | | | | chlorophyll binding protein [Dunaliella salina |
| 1471 | LIB3602-037-Q6-K1-E7 | 115828 | BLASTX | 438 | 3.00E−43 | 76 | CHLOROPHYLL A-B BINDING PROTEIN OF |
| | | | | | | | LHCII TYPE I PRECURSOR (CAB) (LHCP) |
| | | | | | | | >gi\|81223\|pir\|\|JS0172 chlorophyll a/b-binding |
| | | | | | | | protein precursor - green alga (Dunaliella salina) |
| | | | | | | | >gi\|167987\|gb\|AAA33278.1\| (M23531) major |
| | | | | | | | chlorophyll binding protein [Dunaliella salina |
| 1472 | LIB3602-020-Q6-K1-G11 | 115828 | BLASTX | 427 | 7.00E−42 | 76 | CHLOROPHYLL A-B BINDING PROTEIN OF |
| | | | | | | | LHCII TYPE I PRECURSOR (CAB) (LHCP) |
| | | | | | | | >gi\|81223\|pir\|\|JS0172 chlorophyll a/b-binding |
| | | | | | | | protein precursor - green alga (Dunaliella salina) |
| | | | | | | | >gi\|167987\|gb\|AAA33278.1\| (M23531) major |
| | | | | | | | chlorophyll binding protein [Dunaliella salina |
| 1473 | LIB3602-101-Q1-K1-D10 | 115828 | BLASTX | 393 | 8.00E−38 | 75 | CHLOROPHYLL A-B BINDING PROTEIN OF |
| | | | | | | | LHCII TYPE I PRECURSOR (CAB) (LHCP) |
| | | | | | | | >gi\|81223\|pir\|\|JS0172 chlorophyll a/b-binding |
| | | | | | | | protein precursor - green alga (Dunaliella salina) |
| | | | | | | | >gi\|167987\|gb\|AAA33278.1\| (M23531) major |
| | | | | | | | chlorophyll binding protein [Dunaliella salina |
| 1474 | LIB3602-012-Q6-K1-D1 | 115770 | BLASTX | 672 | 2.00E−70 | 79 | CHLOROPHYLL A-B BINDING PROTEIN OF |
| | | | | | | | LHCII TYPE I PRECURSOR (CAB) (LHCP) |
| | | | | | | | >gi\|100533\|pir\|\|S07448 chlorophyll a/b-binding |
| | | | | | | | protein - swollen duckweed |
| | | | | | | | >gi\|168290\|gb\|AAA33392.1\| (M12152) chlorophyll |
| | | | | | | | a/b apoprotein [Lemna gibba] |
| 1475 | LIB3602-086-Q6-K1-A11 | 115770 | BLASTX | 544 | 8.00E−70 | 81 | CHLOROPHYLL A-B BINDING PROTEIN OF |
| | | | | | | | LHCII TYPE I PRECURSOR (CAB) (LHCP) |
| | | | | | | | >gi\|100533\|pir\|\|S07448 chlorophyll a/b-binding |
| | | | | | | | protein - swollen duckweed |
| | | | | | | | >gi\|168290\|gb\|AAA33392.1\| (M12152) chlorophyll |
| | | | | | | | a/b apoprotein [Lemna gibba] |
| 1476 | LIB3602-018-Q6-K1-C8 | 115770 | BLASTX | 650 | 5.00E−68 | 78 | CHLOROPHYLL A-B BINDING PROTEIN OF |
| | | | | | | | LHCII TYPE I PRECURSOR (CAB) (LHCP) |
| | | | | | | | >gi\|100533\|pir\|\|S07448 chlorophyll a/b-binding |
| | | | | | | | protein - swollen duckweed |
| | | | | | | | >gi\|168290\|gb\|AAA33392.1\| (M12152) chlorophyll |
| | | | | | | | a/b apoprotein [Lemna gibba] |
| 1477 | LIB3602-048-Q6-K1QA-E1 | 115770 | BLASTX | 606 | 7.00E−63 | 73 | CHLOROPHYLL A-B BINDING PROTEIN OF |
| | | | | | | | LHCII TYPE I PRECURSOR (CAB) (LHCP) |
| | | | | | | | >gi\|100533\|pir\|\|S07448 chlorophyll a/b-binding |
| | | | | | | | protein - swollen duckweed |
| | | | | | | | >gi\|168290\|gb\|AAA33392.1\| (M12152) chlorophyll |
| | | | | | | | a/b apoprotein [Lemna gibba] |
| 1478 | LIB3602-048-Q6-K1QA-C9 | 6682246 | BLASTX | 404 | 3.00E−39 | 93 | (AC016661) putative 40S ribosomal protein S23 |
| | | | | | | | [Arabidopsis thaliana] |
| 1479 | LIB3602-101-Q1-K1-F10 | 6682246 | BLASTX | 347 | 1.00E−32 | 91 | (AC016661) putative 40S ribosomal protein S23 |
| | | | | | | | [Arabidopsis thaliana] |
| 1480 | LIB3602-077-Q6-K6-A4 | 6682246 | BLASTX | 284 | 2.00E−25 | 91 | (AC016661) putative 40S ribosomal protein S23 |
| | | | | | | | [Arabidopsis thaliana] |
| 1481 | LIB3602-074-Q1-K1-C5 | 1350995 | BLASTX | 714 | 2.00E−75 | 68 | 40S RIBOSOMAL PROTEIN S4 |
| | | | | | | | >gi\|1362730\|pir\|\|A56537 ribosomal protein S4, |
| | | | | | | | cytosolic - chicken >gi\|402296\|gb\|AAB59946.1\| |
| | | | | | | | (L24368) ribosomal protein S4 [Gallus gallus] |
| 1482 | LIB3602-023-Q6-K1-G1 | 1350995 | BLASTX | 674 | 8.00E−71 | 70 | 40S RIBOSOMAL PROTEIN S4 |
| | | | | | | | >gi\|1362730\|pir\|\|A56537 ribosomal protein S4, |
| | | | | | | | cytosolic - chicken >gi\|402296\|gb\|AAB59946.1\| |
| | | | | | | | (L24368) ribosomal protein S4 [Gallus gallus] |
| 1483 | LIB3602-061-Q6-K1-D8 | 1350995 | BLASTX | 535 | 1.00E−54 | 62 | 40S RIBOSOMAL PROTEIN S4 |
| | | | | | | | >gi\|1362730\|pir\|\|A56537 ribosomal protein S4, |
| | | | | | | | cytosolic - chicken >gi\|402296\|gb\|AAB59946.1\| |
| | | | | | | | (L24368) ribosomal protein S4 [Gallus gallus] |
| 1484 | LIB3602-046-Q6-K1-H5 | 7485005 | BLASTX | 382 | 1.00E−36 | 59 | helicase homolog T6H20.10 - Arabidopsis thaliana |
| | | | | | | | (fragment) >gi\|5541663\|emb\|CAB51169.1\| |
| | | | | | | | (AL096859) putative helicase, fragment |
| | | | | | | | [Arabidopsis thaliana] |
| 1485 | LIB3602-112-Q1-K1-B9 | 7485005 | BLASTX | 319 | 3.00E−29 | 66 | helicase homolog T6H20.10 - Arabidopsis thaliana |
| | | | | | | | (fragment) >gi\|5541663\|emb\|CAB51169.1\| |
| | | | | | | | (AL096859) putative helicase, fragment |
| | | | | | | | [Arabidopsis thaliana] |
| 1486 | LIB3602-094-Q6-K6-B9 | 7485005 | BLASTX | 310 | 4.00E−28 | 64 | helicase homolog T6H20.10 - Arabidopsis thaliana |
| | | | | | | | (fragment) >gi\|5541663\|emb\|CAB51169.1\| |
| | | | | | | | (AL096859) putative helicase, fragment |
| | | | | | | | [Arabidopsis thaliana] |
| 1487 | LIB3602-076-Q6-K6-D10 | 6587821 | BLASTX | 230 | 6.00E−19 | 57 | (AC010924) Contains similarity to gb\|AF181686 |
| | | | | | | | membrane protein TMS1d from Drosophila |
| | | | | | | | melanogaster. ESTs gb\|R64994, gb\|AI994832, |
| | | | | | | | gb\|Z47674 come from this gene. [Arabidopsis |
| | | | | | | | thaliana] |
| 1488 | LIB3602-070-Q1-K1-A9 | 6587821 | BLASTX | 203 | 1.00E−15 | 56 | (AC010924) Contains similarity to gb\|AF181686 |
| | | | | | | | membrane protein TMS1d from Drosophila |
| | | | | | | | melanogaster. ESTs gb\|R64994, gb\|AI994832, |
| | | | | | | | gb\|Z47674 come from this gene. [Arabidopsis |
| | | | | | | | thaliana] |
| 1489 | LIB3602-010-Q6-K1-E4 | 6587821 | BLASTX | 190 | 3.00E−14 | 36 | (AC010924) Contains similarity to gb\|AF181686 |
| | | | | | | | membrane protein TMS1d from Drosophila |
| | | | | | | | melanogaster. ESTs gb\|R64994, gb\|AI994832, |
| | | | | | | | gb\|Z47674 come from this gene. [Arabidopsis |
| | | | | | | | thaliana] |
| 1490 | LIB3602-116-Q1-K1-A5 | 4139217 | BLASTN | 61 | 9.00E−26 | 92 | Chlamydomonas reinhardtii light harvesting |
| | | | | | | | complex II protein precursor (Lhcb3) mRNA, |
| | | | | | | | complete cds |
| 1491 | LIB3602-004-Q1-K1-B3 | 4139217 | BLASTN | 51 | 2.00E−19 | 92 | Chlamydomonas reinhardtii light harvesting |
| | | | | | | | complex II protein precursor (Lhcb3) mRNA, |
| | | | | | | | complete cds |
| 1492 | LIB3602-063-Q1-K6-B8 | 4139217 | BLASTN | 42 | 5.00E−14 | 96 | Chlamydomonas reinhardtii light harvesting |
| | | | | | | | complex II protein precursor (Lhcb3) mRNA, |
| | | | | | | | complete cds |
| 1493 | LIB3602-009-Q6-K1-D7 | 4262250 | BLASTX | 691 | 8.00E−73 | 78 | (AC006200) putative fructose-bisphosphate |
| | | | | | | | aldolase, plastidic form [Arabidopsis thaliana] |
| 1494 | LIB3602-004-Q1-K1-C1 | 4262250 | BLASTX | 563 | 5.00E−63 | 73 | (AC006200) putative fructose-bisphosphate |
| | | | | | | | aldolase, plastidic form [Arabidopsis thaliana] |
| 1495 | LIB3602-043-Q6-K1-A8 | 4262250 | BLASTX | 473 | 3.00E−47 | 72 | (AC006200) putative fructose-bisphosphate |
| | | | | | | | aldolase, plastidic form [Arabidopsis thaliana] |
| 1496 | LIB3602-009-Q6-K1-B1 | 6996529 | BLASTX | 556 | 5.00E−57 | 71 | (AJ271785) enolase [Lupinus luteus] |
| 1497 | LIB3602-037-Q6-K1-G2 | 6996529 | BLASTX | 249 | 4.00E−21 | 85 | (AJ271785) enolase [Lupinus luteus] |
| 1498 | LIB3602-015-Q6-K1-H10 | 6996529 | BLASTX | 211 | 2.00E−16 | 89 | (AJ271785) enolase [Lupinus luteus] |
| 1499 | LIB3602-023-Q6-K1-A3 | 2708624 | BLASTX | 615 | 6.00E−64 | 66 | (AF036618) acetyl-CoA synthetase [Arabidopsis |
| | | | | | | | thaliana] |
| 1500 | LIB3602-108-Q1-K1-G5 | 2708624 | BLASTX | 595 | 1.00E−61 | 69 | (AF036618) acetyl-CoA synthetase [Arabidopsis |
| | | | | | | | thaliana] |
| 1501 | LIB3602-119-Q1-K1-F11 | 2708624 | BLASTX | 166 | 5.00E−12 | 71 | (AF036618) acetyl-CoA synthetase [Arabidopsis |
| | | | | | | | thaliana] |
| 1502 | LIB3602-063-Q1-K6-F4 | 131174 | BLASTX | 272 | 4.00E−24 | 77 | PHOTOSYSTEM I REACTION CENTRE |
| | | | | | | | SUBUNIT IV PRECURSOR (PHOTOSYSTEM I |
| | | | | | | | 8.1 KD PROTEIN) (P30 PROTEIN) (PSI-E) |
| | | | | | | | >gi\|81245\|pir\|\|S04134 photosystem I chain IV |
| | | | | | | | precursor - Chlamydomonas reinhardtii |
| | | | | | | | >gi\|18180\|emb\|CAA31850.1\| (X13496) P30 |
| | | | | | | | precursor protein [Chlamydomo |
| 1503 | LIB3602-070-Q1-K1-E6 | 131174 | BLASTX | 268 | 2.00E−23 | 78 | PHOTOSYSTEM I REACTION CENTRE |
| | | | | | | | SUBUNIT IV PRECURSOR (PHOTOSYSTEM I |
| | | | | | | | 8.1 KD PROTEIN) (P30 PROTEIN) (PSI-E) |
| | | | | | | | >gi\|81245\|pir\|\|S04134 photosystem I chain IV |
| | | | | | | | precursor - Chlamydomonas reinhardtii |
| | | | | | | | >gi\|18180\|emb\|CAA31850.1\| (X13496) P30 |
| | | | | | | | precursor protein [Chlamydomo |
| 1504 | LIB3602-021-Q6-K1-A5 | 131174 | BLASTX | 219 | 6.00E−18 | 78 | PHOTOSYSTEM I REACTION CENTRE |
| | | | | | | | SUBUNIT IV PRECURSOR (PHOTOSYSTEM I |
| | | | | | | | 8.1 KD PROTEIN) (P30 PROTEIN) (PSI-E) |
| | | | | | | | >gi\|81245\|pir\|\|S04134 photosystem I chain IV |
| | | | | | | | precursor - Chlamydomonas reinhardtii |
| | | | | | | | >gi\|18180\|emb\|CAA31850.1\| (X13496) P30 |
| | | | | | | | precursor protein [Chlamydomo |
| 1505 | LIB3602-066-Q1-K6-D9 | 1345698 | BLASTX | 528 | 9.00E−54 | 68 | CHLOROPHYLL A-B BINDING PROTEIN 151 |
| | | | | | | | PRECURSOR (LHCII TYPE II CAB-151) (LHCP) |
| | | | | | | | >gi\|99601\|pir\|\|S20917 chlorophyll a/b-binding |
| | | | | | | | protein - upland cotton |
| | | | | | | | >gi\|452314\|emb\|CAA38025.1\| (X54090) |
| | | | | | | | chlorophyll ab binding protein [Gossypium |
| | | | | | | | hirsutum] |
| 1506 | LIB3602-065-Q1-K6-B9 | 1345698 | BLASTX | 418 | 2.00E−48 | 71 | CHLOROPHYLL A-B BINDING PROTEIN 151 |
| | | | | | | | PRECURSOR (LHCII TYPE II CAB-151) (LHCP) |
| | | | | | | | >gi\|99601\|pir\|\|S20917 chlorophyll a/b-binding |
| | | | | | | | protein - upland cotton |
| | | | | | | | >gi\|452314\|emb\|CAA38025.1\| (X54090) |
| | | | | | | | chlorophyll ab binding protein [Gossypium |
| | | | | | | | hirsutum] |
| 1507 | LIB3602-053-Q6-K1-C1 | 1345698 | BLASTX | 301 | 4.00E−27 | 78 | CHLOROPHYLL A-B BINDING PROTEIN 151 |
| | | | | | | | PRECURSOR (LHCII TYPE II CAB-151) (LHCP) |
| | | | | | | | >gi\|99601\|pir\|\|S20917 chlorophyll a/b-binding |
| | | | | | | | protein - upland cotton |
| | | | | | | | >gi\|452314\|emb\|CAA38025.1\| (X54090) |
| | | | | | | | chlorophyll ab binding protein [Gossypium |
| | | | | | | | hirsutum] |
| 1508 | LIB3602-069-Q1-K1-D2 | 7329685 | BLASTX | 306 | 1.00E−27 | 69 | (AL162295) transketolase-like protein [Arabidopsis |
| | | | | | | | thaliana] |
| 1509 | LIB3602-086-Q6-K1-G1 | 7329685 | BLASTX | 306 | 1.00E−27 | 69 | (AL162295) transketolase-like protein [Arabidopsis |
| | | | | | | | thaliana] |
| 1510 | LIB3602-026-Q6-K1-E6 | 7329685 | BLASTX | 231 | 6.00E−19 | 68 | (AL162295) transketolase-like protein [Arabidopsis |
| | | | | | | | thaliana] |
| 1511 | LIB3602-010-Q6-K1-D3 | 115519 | BLASTX | 667 | 5.00E−70 | 85 | CALMODULIN>gi\|169306\|gb\|AAA21424.1\| |
| | | | | | | | (M83535) calmodulin [Phytophthora infestans] |
| 1512 | LIB3602-039-Q6-K1-E10 | 115519 | BLASTX | 634 | 4.00E−66 | 87 | CALMODULIN >gi\|169306\|gb\|AAA21424.1\| |
| | | | | | | | (M83535) calmodulin [Phytophthora infestans] |
| 1513 | LIB3602-019-Q6-K1-C5 | 115519 | BLASTX | 349 | 5.00E−33 | 84 | CALMODULIN >gi\|169306\|gb\|AAA21424.1\| |
| | | | | | | | (M83535) calmodulin [Phytophthora infestans] |
| 1514 | LIB3602-004-Q1-K1-C4 | 100573 | BLASTX | 363 | 2.00E−34 | 48 | chlorophyll a/b-binding protein CP29 precursor - |
| | | | | | | | barley >gi\|18958\|emb\|CAA44777.1\| (X63052) |
| | | | | | | | Precursor of CP29, core chlorophyll a/b binding |
| | | | | | | | (CAB) protein of photosystem II (PSII) [Hordeum |
| | | | | | | | vulgare] >gi\|445122\|prf\|\|1908428A chlorophyll a/b- |
| | | | | | | | binding protein [ |
| 1515 | LIB3602-021-Q6-K1-B4 | 100573 | BLASTX | 293 | 1.00E−26 | 64 | chlorophyll a/b-binding protein CP29 precursor - |
| | | | | | | | barley >gi\|18958\|emb\|CAA44777.1\| (X63052) |
| | | | | | | | Precursor of CP29, core chlorophyll a/b binding |
| | | | | | | | (CAB) protein of photosystem II (PSII) [Hordeum |
| | | | | | | | vulgare] >gi\|445122\|prf\|\|1908428A chlorophyll a/b- |
| | | | | | | | binding protein [ |
| 1516 | LIB3602-052-Q6-K1-B10 | 100573 | BLASTX | 185 | 6.00E−14 | 60 | chlorophyll a/b-binding protein CP29 precursor - |
| | | | | | | | barley >gi\|18958\|emb\|CAA44777.1\| (X63052) |
| | | | | | | | Precursor of CP29, core chlorophyll a/b binding |
| | | | | | | | (CAB) protein of photosystem II (PSII) [Hordeum |
| | | | | | | | vulgare] >gi\|445122\|prf\|\|1908428A chlorophyll a/b- |
| | | | | | | | binding protein [ |
| 1517 | LIB3602-085-Q6-K1-D12 | 548770 | BLASTX | 629 | 1.00E−65 | 71 | 60S RIBOSOMAL PROTEIN L3 |
| | | | | | | | >gi\|481228\|pir\|\|S38359 ribosomal protein L3.e, |
| | | | | | | | cytosolic - rice >gi\|303853\|dbj\|BAA02155.1\| |
| | | | | | | | (D12630) ribosomal protein L3 [Oryza sativa] |
| 1518 | LIB3602-013-Q6-K1-B12 | 548770 | BLASTX | 607 | 4.00E−63 | 75 | 60S RIBOSOMAL PROTEIN L3 |
| | | | | | | | >gi\|481228\|pir\|\|S38359 ribosomal protein L3.e, |
| | | | | | | | cytosolic - rice >gi\|303853\|dbj\|BAA02155.1\| |
| | | | | | | | (D12630) ribosomal protein L3 [Oryza sativa] |
| 1519 | LIB3602-112-Q1-K1-H12 | 548770 | BLASTX | 259 | 3.00E−45 | 59 | 60S RIBOSOMAL PROTEIN L3 |
| | | | | | | | >gi\|481228\|pir\|\|S38359 ribosomal protein L3.e, |
| | | | | | | | cytosolic - rice >gi\|303853\|dbj\|BAA02155.1\| |
| | | | | | | | (D12630) ribosomal protein L3 [Oryza sativa] |
| 1520 | LIB3602-069-Q1-K1-A12 | 1663720 | BLASTX | 528 | 1.00E−53 | 57 | (U49976) beta-type carbonic anhydrase beta-CA1 |
| | | | | | | | [Coccomyxa sp. PA] |
| 1521 | LIB3602-068-Q1-K1-A12 | 1663720 | BLASTX | 519 | 1.00E−52 | 56 | (U49976) beta-type carbonic anhydrase beta-CA1 |
| | | | | | | | [Coccomyxa sp. PA] |
| 1522 | LIB3602-062-Q6-K1-G1 | 1663720 | BLASTX | 216 | 4.00E−17 | 53 | (U49976) beta-type carbonic anhydrase beta-CA1 |
| | | | | | | | [Coccomyxa sp. PA] |
| 1523 | LIB3602-064-Q1-K6-G5 | 6440928 | BLASTX | 790 | 2.00E−84 | 71 | (AU066544) 60S ribosomal protein L2 |
| | | | | | | | [Chlamydomonas sp.] |
| 1524 | LIB3602-055-Q6-K1-E11 | 6440928 | BLASTX | 636 | 2.00E−66 | 80 | (AU066544) 60S ribosomal protein L2 |
| | | | | | | | [Chlamydomonas sp.] |
| 1525 | LIB3602-116-Q1-K1-C10 | 6440928 | BLASTX | 487 | 1.00E−59 | 67 | (AU066544) 60S ribosomal protein L2 |
| | | | | | | | [Chlamydomonas sp.] |
| 1526 | LIB3602-074-Q1-K1-B2 | 5734785 | BLASTX | 879 | 8.00E−95 | 81 | (AC007980) phosphoprotein phosphatase |
| | | | | | | | [Arabidopsis thaliana] |
| 1527 | LIB3602-107-Q1-K1-B5 | 5734785 | BLASTX | 852 | 1.00E−91 | 84 | (AC007980) phosphoprotein phosphatase |
| | | | | | | | [Arabidopsis thaliana] |
| 1528 | LIB3602-062-Q6-K1-H9 | 5734785 | BLASTX | 409 | 2.00E−75 | 73 | (AC007980) phosphoprotein phosphatase |
| | | | | | | | [Arabidopsis thaliana] |
| 1529 | LIB3602-028-Q6-K1-C4 | 131199 | BLASTX | 201 | 2.00E−15 | 42 | PHOTOSYSTEM I REACTION CENTRE |
| | | | | | | | SUBUNIT VI PRECURSOR (LIGHT- |
| | | | | | | | HARVESTING COMPLEX I 11 KD PROTEIN) |
| | | | | | | | (PSI-H) >gi\|81470\|pir\|\|S00453 photosystem I |
| | | | | | | | protein psaH precursor - spinach |
| | | | | | | | >gi\|21287\|emb\|CAA34749.1\| (X16858) psaH |
| | | | | | | | [Spinacia oleracea] |
| 1530 | LIB3602-014-Q6-K1-F2 | 131199 | BLASTX | 179 | 8.00E−13 | 40 | PHOTOSYSTEM I REACTION CENTRE |
| | | | | | | | SUBUNIT VI PRECURSOR (LIGHT- |
| | | | | | | | HARVESTING COMPLEX I 11 KD PROTEIN) |
| | | | | | | | (PSI-H) >gi\|81470\|pir\|\|S00453 photosystem I |
| | | | | | | | protein psaH precursor - spinach |
| | | | | | | | >gi\|21287\|emb\|CAA34749.1\| (X16858) psaH |
| | | | | | | | [Spinacia oleracea] |
| 1531 | LIB3602-108-Q1-K1-G10 | 131199 | BLASTX | 149 | 1.00E−11 | 37 | PHOTOSYSTEM I REACTION CENTRE |
| | | | | | | | SUBUNIT VI PRECURSOR (LIGHT- |
| | | | | | | | HARVESTING COMPLEX I 11 KD PROTEIN) |
| | | | | | | | (PSI-H) >gi\|81470\|pir\|\|S00453 photosystem I |
| | | | | | | | protein psaH precursor - spinach |
| | | | | | | | >gi\|21287\|emb\|CAA34749.1\| (X16858) psaH |
| | | | | | | | [Spinacia oleracea] |
| 1532 | LIB3602-039-Q6-K1-G3 | 7630009 | BLASTX | 172 | 1.00E−12 | 63 | (AL132960) 40S ribosomal protein S21 homolog |
| | | | | | | | [Arabidopsis thaliana] |
| 1533 | LIB3602-026-Q6-K1-C6 | 7630009 | BLASTX | 165 | 2.00E−11 | 60 | (AL132960) 40S ribosomal protein S21 homolog |
| | | | | | | | [Arabidopsis thaliana] |
| 1534 | LIB3602-012-Q6-K1-A9 | 7630009 | BLASTX | 153 | 4.00E−10 | 60 | (AL132960) 40S ribosomal protein S21 homolog |
| | | | | | | | [Arabidopsis thaliana] |
| 1535 | LIB3602-077-Q6-K6-D7 | 6647427 | BLASTX | 547 | 7.00E−56 | 73 | ACETYL-COENZYME A SYNTHETASE |
| | | | | | | | (ACETATE-COA LIGASE) (ACYL- |
| | | | | | | | ACTIVATING ENZYME) >gi\|7437830\|pir\|\|T03473 |
| | | | | | | | acetate - CoA ligase (EC 6.2.1.1) - Rhodobacter |
| | | | | | | | capsulatus >gi\|3128274\|gb\|AAC16126.1\| |
| | | | | | | | (AF010496) acetyl-coenzyme a synthetase |
| | | | | | | | [Rhodobacter capsulatus] |
| 1536 | LIB3602-090-Q6-K6-E5 | 6647427 | BLASTX | 280 | 1.00E−24 | 69 | ACETYL-COENZYME A SYNTHETASE |
| | | | | | | | (ACETATE--COA LIGASE) (ACYL- |
| | | | | | | | ACTIVATING ENZYME) >gi\|7437830\|pir\|\|T03473 |
| | | | | | | | acetate - CoA ligase (EC 6.2.1.1) - Rhodobacter |
| | | | | | | | capsulatus >gi\|3128274\|gb\|AAC16126.1\| |
| | | | | | | | (AF010496) acetyl-coenzyme a synthetase |
| | | | | | | | [Rhodobacter capsulatus] |
| 1537 | LIB3602-023-Q6-K1-E3 | 6647427 | BLASTX | 256 | 8.00E−22 | 69 | ACETYL-COENZYME A SYNTHETASE |
| | | | | | | | (ACETATE-COA LIGASE) (ACYL- |
| | | | | | | | ACTIVATING ENZYME) >gi\|7437830\|pir\|\|T03473 |
| | | | | | | | acetate - CoA ligase (EC 6.2.1.1) - Rhodobacter |
| | | | | | | | capsulatus >gi\|3128274\|gb\|AAC16126.1\| |
| | | | | | | | (AF010496) acetyl-coenzyme a synthetase |
| | | | | | | | [Rhodobacter capsulatus] |
| 1538 | LIB3602-010-Q6-K1-G9 | 6325315 | BLASTX | 174 | 3.00E−12 | 36 | putative mitochondrial carrier protein; Ymc1p |
| | | | | | | | >gi\|1084942\|pir\|\|S54080 carrier protein YMC1, |
| | | | | | | | mitochondrial - yeast (Saccharomyces cerevisiae) |
| | | | | | | | >gi\|805039\|emb\|CAA89176.1\| (Z49219) Ymc1p |
| | | | | | | | [Saccharomyces cerevisiae] |
| | | | | | | | >gi\|1314127\|emb\|CAA95003.1\| (Z71255) Ymc1p |
| | | | | | | | [S |
| 1539 | LIB3602-040-Q6-K1-F3 | 6325315 | BLASTX | 173 | 5.00E−12 | 38 | putative mitochondrial carrier protein; Ymc1p |
| | | | | | | | >gi\|1084942\|pir\|\|S54080 carrier protein YMC1, |
| | | | | | | | mitochondrial - yeast (Saccharomyces cerevisiae) |
| | | | | | | | >gi\|805039\|emb\|CAA89176.1\| (Z49219) Ymc1p |
| | | | | | | | [Saccharomyces cerevisiae] |
| | | | | | | | >gi\|1314127\|emb\|CAA95003.1\| (Z71255) Ymc1p |
| | | | | | | | [S |
| 1540 | LIB3602-070-Q1-K1-A6 | 6325315 | BLASTX | 170 | 1.00E−11 | 37 | putative mitochondrial carrier protein; Ymc1p |
| | | | | | | | >gi\|1084942\|pir\|\|S54080 carrier protein YMC1, |
| | | | | | | | mitochondrial - yeast (Saccharomyces cerevisiae) |
| | | | | | | | >gi\|805039\|emb\|CAA89176.1\| (Z49219) Ymc1p |
| | | | | | | | [Saccharomyces cerevisiae] |
| | | | | | | | >gi\|1314127\|emb\|CAA95003.1\| (Z71255) Ymc1p |
| | | | | | | | [S |
| 1541 | LIB3602-094-Q6-K6-D7 | 6093778 | BLASTX | 733 | 1.00E−77 | 76 | PROTEASOME COMPONENT C3 (MACROPAIN |
| | | | | | | | SUBUNIT C3) (MULTICATALYTIC |
| | | | | | | | ENDOPEPTIDASE COMPLEX SUBUNIT C3) |
| | | | | | | | >gi\|2511574\|emb\|CAA73619.1\| (Y13176) |
| | | | | | | | multicatalytic endopeptidase [Arabidopsis thaliana] |
| | | | | | | | >gi\|3421075\|gb\|AAC32056.1\| (AF043520) 20S |
| | | | | | | | proteasome subunit PAB1 [Ar |
| 1542 | LIB3602-088-Q6-K6-G6 | 6093778 | BLASTX | 709 | 7.00E−75 | 76 | PROTEASOME COMPONENT C3 (MACROPAIN |
| | | | | | | | SUBUNIT C3) (MULTICATALYTIC |
| | | | | | | | ENDOPEPTIDASE COMPLEX SUBUNIT C3) |
| | | | | | | | >gi\|2511574\|emb\|CAA73619.1\| (Y13176) |
| | | | | | | | multicatalytic endopeptidase [Arabidopsis thaliana] |
| | | | | | | | >gi\|3421075\|gb\|AAC32056.1\| (AF043520) 20S |
| | | | | | | | proteasome subunit PAB1 [Ar |
| 1543 | LIB3602-118-Q1-K1-G6 | 6093778 | BLASTX | 545 | 2.00E−68 | 76 | PROTEASOME COMPONENT C3 (MACROPAIN |
| | | | | | | | SUBUNIT C3) (MULTICATALYTIC |
| | | | | | | | ENDOPEPTIDASE COMPLEX SUBUNIT C3) |
| | | | | | | | >gi\|2511574\|emb\|CAA73619.1\| (Y13176) |
| | | | | | | | multicatalytic endopeptidase [Arabidopsis thaliana] |
| | | | | | | | >gi\|3421075\|gb\|AAC32056.1\| (AF043520) 20S |
| | | | | | | | proteasome subunit PAB1 [Ar |
| 1544 | LIB3602-005-Q1-K1-A9 | 4557867 | BLASTX | 607 | 7.00E−63 | 59 | sulfite oxidase |
| | | | | | | | >gi\|1711606\|sp\|P51687\|SUOX_HUMAN SULFITE |
| | | | | | | | OXIDASE PRECURSOR >gi\|1362942\|pir\|\|S55874 |
| | | | | | | | sulfite oxidase (EC 1.8.3.1) precursor, |
| | | | | | | | mitochondrial - human >gi\|508502\|gb\|AAA74886.1\| |
| | | | | | | | (L31573) sulfite oxidase [Homo sapiens] |
| | | | | | | | >gi\|1098062\|prf\|\|2115221A su |
| 1545 | LIB3602-053-Q6-K1-A10 | 4557867 | BLASTX | 594 | 2.00E−61 | 60 | sulfite oxidase |
| | | | | | | | >gi\|1711606\|sp\|P51687\|SUOX_HUMAN SULFITE |
| | | | | | | | OXIDASE PRECURSOR >gi\|1362942\|pir\|\|S55874 |
| | | | | | | | sulfite oxidase (EC 1.8.3.1) precursor, |
| | | | | | | | mitochondrial - human >gi\|508502\|gb\|AAA74886.1\| |
| | | | | | | | (L31573) sulfite oxidase [Homo sapiens] |
| | | | | | | | >gi\|1098062\|prf\|\|2115221A su |
| 1546 | LIB3602-105-Q1-K1-C8 | 4557867 | BLASTX | 172 | 6.00E−12 | 45 | sulfite oxidase |
| | | | | | | | >gi\|1711606\|sp\|P51687\|SUOX_HUMAN SULFITE |
| | | | | | | | OXIDASE PRECURSOR >gi\|1362942\|pir\|\|S55874 |
| | | | | | | | sulfite oxidase (EC 1.8.3.1) precursor, |
| | | | | | | | mitochondrial - human >gi\|508502\|gb\|AAA74886.1\| |
| | | | | | | | (L31573) sulfite oxidase [Homo sapiens] |
| | | | | | | | >gi\|1098062\|prf\|\|2115221A su |
| 1547 | LIB3602-118-Q1-K1-A3 | 2688826 | BLASTX | 185 | 1.00E−13 | 52 | (U95179) putative NifU protein [Prunus armeniaca] |
| 1548 | LIB3602-095-Q6-K6-F3 | 2688826 | BLASTX | 185 | 2.00E−13 | 52 | (U95179) putative NifU protein [Prunus armeniaca] |
| 1549 | LIB3602-120-Q1-K1-D7 | 2688826 | BLASTX | 179 | 9.00E−13 | 50 | (U95179) putative NifU protein [Prunus armeniaca] |
| 1550 | LIB3602-046-Q6-K1-A2 | 2583111 | BLASTX | 456 | 2.00E−45 | 58 | (AC002387) putative dihydrodipicolinate synthase |
| | | | | | | | [Arabidopsis thaliana] |
| 1551 | LIB3602-012-Q6-K1-A8 | 2583111 | BLASTX | 430 | 4.00E−42 | 53 | (AC002387) putative dihydrodipicolinate synthase |
| | | | | | | | [Arabidopsis thaliana] |
| 1552 | LIB3602-028-Q6-K1-C2 | 2583111 | BLASTX | 425 | 1.00E−41 | 70 | (AC002387) putative dihydrodipicolinate synthase |
| | | | | | | | [Arabidopsis thaliana] |
| 1553 | LIB3602-056-Q6-K1-H9 | 1350996 | BLASTX | 515 | 3.00E−52 | 66 | 40S RIBOSOMAL PROTEIN S4 |
| | | | | | | | >gi\|453574\|dbj\|BAA05485.1\| (D26473) Ribosomal |
| | | | | | | | Protein [Cricetulus griseus] |
| 1554 | LIB3602-116-Q1-K1-B12 | 1350996 | BLASTX | 338 | 5.00E−47 | 66 | 40S RIBOSOMAL PROTEIN S4 |
| | | | | | | | >gi\|453574\|dbj\|BAA05485.1\| (D26473) Ribosomal |
| | | | | | | | Protein [Cricetulus griseus] |
| 1555 | LIB3602-056-Q6-K1-H10 | 1350996 | BLASTX | 236 | 2.00E−24 | 58 | 40S RIBOSOMAL PROTEIN S4 |
| | | | | | | | >gi\|453574\|dbj\|BAA05485.1\| (D26473) Ribosomal |
| | | | | | | | Protein [Cricetulus griseus] |
| 1556 | LIB3602-032-Q6-K1-C6 | 7443230 | BLASTX | 245 | 9.00E−21 | 52 | probable chlorophyll a/b-binding protein - rice |
| | | | | | | | >gi\|3075488\|gb\|AAC14566.1\| (AF058796) |
| | | | | | | | chlorophyll a/b-binding protein [Oryza sativa] |
| 1557 | LIB3602-019-Q6-K1-F11 | 7443230 | BLASTX | 239 | 7.00E−20 | 56 | probable chlorophyll a/b-binding protein - rice |
| | | | | | | | >gi\|3075488\|gb\|AAC14566.1\| (AF058796) |
| | | | | | | | chlorophyll a/b-binding protein [Oryza sativa] |
| 1558 | LIB3602-059-Q6-K1-H2 | 7443230 | BLASTX | 227 | 1.00E−18 | 56 | probable chlorophyll a/b-binding protein - rice |
| | | | | | | | >gi\|3075488\|gb\|AAC14566.1\| (AF058796) |
| | | | | | | | chlorophyll a/b-binding protein [Oryza sativa] |
| 1559 | LIB3602-111-Q1-K1-G6 | 2500380 | BLASTX | 260 | 6.00E−35 | 84 | 60S RIBOSOMAL PROTEIN L44 |
| | | | | | | | >gi\|2119128\|pir\|\|JC4923 ribosomal protein L36a.e, |
| | | | | | | | cytosolic - upland cotton |
| | | | | | | | >gi\|1553129\|gb\|AAB08726.1\| (U64677) ribosomal |
| | | | | | | | protein L44 isoform a [Gossypium hirsutum] |
| | | | | | | | >gi\|1553131\|gb\|AAB08727.1\| (U64678) ribosomal |
| | | | | | | | protein L44 isofor |
| 1560 | LIB3602-119-Q1-K1-D5 | 2500380 | BLASTX | 218 | 8.00E−31 | 76 | 60S RIBOSOMAL PROTEIN L44 |
| | | | | | | | >gi\|2119128\|pir\|\|JC4923 ribosomal protein L36a.e, |
| | | | | | | | cytosolic - upland cotton |
| | | | | | | | >gi\|1553129\|gb\|AAB08726.1\| (U64677) ribosomal |
| | | | | | | | protein L44 isoform a [Gossypium hirsutum] |
| | | | | | | | >gi\|1553131\|gb\|AAB08727.1\| (U64678) ribosomal |
| | | | | | | | protein L44 isofor |
| 1561 | LIB3602-065-Q1-K6-A12 | 2500380 | BLASTX | 176 | 1.00E−22 | 63 | 60S RIBOSOMAL PROTEIN L44 |
| | | | | | | | >gi\|2119128\|pir\|\|JC4923 ribosomal protein L36a.e, |
| | | | | | | | cytosolic - upland cotton |
| | | | | | | | >gi\|1553129\|gb\|AAB08726.1\| (U64677) ribosomal |
| | | | | | | | protein L44 isoform a [Gossypium hirsutum] |
| | | | | | | | >gi\|1553131\|gb\|AAB08727.1\| (U64678) ribosomal |
| | | | | | | | protein L44 isofor |
| 1562 | LIB3602-089-Q6-K6-G11 | 7436330 | BLASTX | 444 | 8.00E−44 | 57 | probable H+-transporting ATPase (EC 3.6.1.35) |
| | | | | | | | 18K chain - Arabidopsis thaliana |
| | | | | | | | >gi\|4914450\|emb\|CAB43690.1\| (AL050398) H+- |
| | | | | | | | transporting ATPase-like protein [Arabidopsis |
| | | | | | | | thaliana] >gi\|7270157\|emb\|CAB79970.1\| |
| | | | | | | | (AL161581) H+-transporting ATPase-like protein |
| | | | | | | | [Ar |
| 1563 | LIB3602-095-Q6-K6-G11 | 7436330 | BLASTX | 443 | 1.00E−43 | 56 | probable H+-transporting ATPase (EC 3.6.1.35) |
| | | | | | | | 18K chain - Arabidopsis thaliana |
| | | | | | | | >gi\|4914450\|emb\|CAB43690.1\| (AL050398) H+- |
| | | | | | | | transporting ATPase-like protein [Arabidopsis |
| | | | | | | | thaliana] >gi\|7270157\|emb\|CAB79970.1\| |
| | | | | | | | (AL161581) H+-transporting ATPase-like protein |
| | | | | | | | [Ar |
| 1564 | LIB3602-112-Q1-K1-G11 | 7436330 | BLASTX | 443 | 1.00E−43 | 56 | probable H+-transporting ATPase (EC 3.6.1.35) |
| | | | | | | | 18K chain - Arabidopsis thaliana |
| | | | | | | | >gi\|4914450\|emb\|CAB43690.1\| (AL050398) H+- |
| | | | | | | | transporting ATPase-like protein [Arabidopsis |
| | | | | | | | thaliana] >gi\|7270157\|emb\|CAB79970.1\| |
| | | | | | | | (AL161581) H+-transporting ATPase-like protein |
| | | | | | | | [Ar |
| 1565 | LIB3602-089-Q6-K6-B9 | 6522577 | BLASTX | 310 | 3.00E−28 | 64 | (AL133292) putative helicase [Arabidopsis |
| | | | | | | | thaliana] |
| 1566 | LIB3602-095-Q6-K6-B9 | 6522577 | BLASTX | 310 | 3.00E−28 | 64 | (AL133292) putative helicase [Arabidopsis |
| | | | | | | | thaliana] |
| 1567 | LIB3602-116-Q1-K1-B9 | 6522577 | BLASTX | 195 | 7.00E−26 | 69 | (AL133292) putative helicase [Arabidopsis |
| | | | | | | | thaliana] |
| 1568 | LIB3602-085-Q6-K1-C3 | 4775288 | BLASTX | 285 | 6.00E−36 | 61 | (AJ238628) putative ferritin [Chlorella |
| | | | | | | | protothecoides] |
| 1569 | LIB3602-008-Q6-K1-B6 | 4775288 | BLASTX | 297 | 1.00E−26 | 61 | (AJ238628) putative ferritin [Chlorella |
| | | | | | | | protothecoides] |
| 1570 | LIB3602-112-Q1-K1-C5 | 4775288 | BLASTX | 192 | 3.00E−14 | 55 | (AJ238628) putative ferritin [Chlorella |
| | | | | | | | protothecoides] |
| 1571 | LIB3602-022-Q6-K1-G8 | 421766 | BLASTX | 213 | 7.00E−17 | 63 | chlorophyll a/b-binding protein I-20 precursor - |
| | | | | | | | Chlamydomonas reinhardtii |
| | | | | | | | >gi\|18125\|emb\|CAA46235.1\| (X65119) light |
| | | | | | | | harvesting complex protein I-20 [Chlamydomonas |
| | | | | | | | reinhardtii] |
| 1572 | LIB3602-094-Q6-K6-F1 | 421766 | BLASTX | 208 | 3.00E−16 | 72 | chlorophyll a/b-binding protein I-20 precursor - |
| | | | | | | | Chlamydomonas reinhardtii |
| | | | | | | | >gi\|18125\|emb\|CAA46235.1\| (X65119) light |
| | | | | | | | harvesting complex protein I-20 [Chlamydomonas |
| | | | | | | | reinhardtii] |
| 1573 | LIB3602-104-Q1-K1-E4 | 421766 | BLASTX | 182 | 3.00E−13 | 68 | chlorophyll a/b-binding protein I-20 precursor - |
| | | | | | | | Chlamydomonas reinhardtii |
| | | | | | | | >gi\|18125\|emb\|CAA46235.1\| (X65119) light |
| | | | | | | | harvesting complex protein I-20 [Chlamydomonas |
| | | | | | | | reinhardtii] |
| 1574 | LIB3602-120-Q1-K1-D12 | 1346750 | BLASTX | 665 | 6.00E−92 | 92 | SERINE/THREONINE PROTEIN |
| | | | | | | | PHOSPHATASE PP1 ISOZYME 1 |
| | | | | | | | >gi\|2654372\|emb\|CAA82263.1\| (Z28627) protein |
| | | | | | | | phosphatase 1 [Acetabularia cliftonii] |
| 1575 | LIB3602-107-Q1-K1-A2 | 1346750 | BLASTX | 720 | 3.00E−76 | 86 | SERINE/THREONINE PROTEIN |
| | | | | | | | PHOSPHATASE PP1 ISOZYME 1 |
| | | | | | | | >gi\|2654372\|emb\|CAA82263.1\| (Z28627) protein |
| | | | | | | | phosphatase 1 [Acetabularia cliftonii] |
| 1576 | LIB3602-063-Q1-K6-C10 | 1346750 | BLASTX | 705 | 2.00E−74 | 88 | SERINE/THREONINE PROTEIN |
| | | | | | | | PHOSPHATASE PP1 ISOZYME 1 |
| | | | | | | | >gi\|2654372\|emb\|CAA82263.1\| (Z28627) protein |
| | | | | | | | phosphatase 1 [Acetabularia cliftonii] |
| 1577 | LIB3602-090-Q6-K6-H5 | 5080820 | BLASTX | 346 | 2.00E−32 | 35 | (AC007258) Putative ABC transporter [Arabidopsis |
| | | | | | | | thaliana] |
| 1578 | LIB3602-114-Q1-K1-H5 | 5080820 | BLASTX | 346 | 3.00E−32 | 35 | (AC007258) Putative ABC transporter [Arabidopsis |
| | | | | | | | thaliana] |
| 1579 | LIB3602-040-Q6-K1-F5 | 5080820 | BLASTX | 209 | 2.00E−16 | 37 | (AC007258) Putative ABC transporter [Arabidopsis |
| | | | | | | | thaliana] |
| 1580 | LIB3602-036-Q6-K1-A9 | 3334123 | BLASTX | 274 | 1.00E−37 | 39 | ATP SYNTHASE GAMMA CHAIN, |
| | | | | | | | MITOCHONDRIAL PRECURSOR |
| | | | | | | | >gi\|1655480\|dbj\|BAA13599.1\| (D88374) gamma |
| | | | | | | | subunit of mitochondrial F1-ATPase [Arabidopsis |
| | | | | | | | thaliana] >gi\|2924787\|gb\|AAC04916.1\| |
| | | | | | | | (AC002334) mitochondrial F1-ATPase, gamma |
| | | | | | | | subunit (ATP3_ARATH) [Arabidopsis t |
| 1581 | LIB3602-030-Q6-K1-H11 | 3334123 | BLASTX | 304 | 2.00E−27 | 42 | ATP SYNTHASE GAMMA CHAIN, |
| | | | | | | | MITOCHONDRIAL PRECURSOR |
| | | | | | | | >gi\|1655480\|dbj\|BAA13599.1\| (D88374) gamma |
| | | | | | | | subunit of mitochondrial F1-ATPase [Arabidopsis |
| | | | | | | | thaliana] >gi\|2924787\|gb\|AAC04916.1\| |
| | | | | | | | (AC002334) mitochondrial F1-ATPase, gamma |
| | | | | | | | subunit (ATP3_ARATH) [Arabidopsis t |
| 1582 | LIB3602-120-Q1-K1-B7 | 3334123 | BLASTX | 178 | 1.00E−12 | 34 | ATP SYNTHASE GAMMA CHAIN, |
| | | | | | | | MITOCHONDRIAL PRECURSOR |
| | | | | | | | >gi\|1655480\|dbj\|BAA13599.1\| (D88374) gamma |
| | | | | | | | subunit of mitochondrial F1-ATPase [Arabidopsis |
| | | | | | | | thaliana] >gi\|2924787\|gb\|AAC04916.1\| |
| | | | | | | | (AC002334) mitochondrial F1-ATPase, gamma |
| | | | | | | | subunit (ATP3_ARATH) [Arabidopsis t |
| 1583 | LIB3602-019-Q6-K1-F5 | 133883 | BLASTX | 445 | 3.00E−44 | 85 | 40S RIBOSOMAL PROTEIN S20 (S22) |
| | | | | | | | >gi\|85846\|pir\|\|A37974 ribosomal protein S20, |
| | | | | | | | cytosolic - African clawed frog |
| | | | | | | | >gi\|214758\|gb\|AAA49953.1\| (M34706) ribosomal |
| | | | | | | | protein S22, 40S subunit [Xenopus laevis] |
| 1584 | LIB3602-004-Q1-K1-G10 | 133883 | BLASTX | 255 | 3.00E−32 | 70 | 40S RIBOSOMAL PROTEIN S20 (S22) |
| | | | | | | | >gi\|85846\|pir\|\|A37974 ribosomal protein S20, |
| | | | | | | | cytosolic - African clawed frog |
| | | | | | | | >gi\|214758\|gb\|AAA49953.1\| (M34706) ribosomal |
| | | | | | | | protein S22, 40S subunit [Xenopus laevis] |
| 1585 | LIB3602-114-Q1-K1-D4 | 133883 | BLASTX | 169 | 3.00E−12 | 91 | 40S RIBOSOMAL PROTEIN S20 (S22) |
| | | | | | | | >gi\|85846\|pir\|\|A37974 ribosomal protein S20, |
| | | | | | | | cytosolic - African clawed frog |
| | | | | | | | >gi\|214758\|gb\|AAA49953.1\| (M34706) ribosomal |
| | | | | | | | protein S22, 40S subunit [Xenopus laevis] |
| 1586 | LIB3602-003-Q1-K1-B11 | 7573429 | BLASTX | 244 | 2.00E−20 | 43 | (AL163816) putative protein [Arabidopsis thaliana] |
| 1587 | LIB3602-056-Q6-K1-C9 | 7573429 | BLASTX | 169 | 1.00E−11 | 40 | (AL163816) putative protein [Arabidopsis thaliana] |
| 1588 | LIB3602-003-Q1-K1-B5 | 7573429 | BLASTX | 152 | 1.00E−09 | 39 | (AL163816) putative protein [Arabidopsis thaliana] |
| 1589 | LIB3602-026-Q6-K1-B10 | 5758304 | BLASTX | 479 | 6.00E−48 | 77 | (AF161704) 40S ribosomal protein S17 |
| | | | | | | | [Lycopersicon esculentum] |
| 1590 | LIB3602-105-Q1-K1-H7 | 5758304 | BLASTX | 419 | 7.00E−41 | 73 | (AF161704) 40S ribosomal protein S17 |
| | | | | | | | [Lycopersicon esculentum] |
| 1591 | LIB3602-065-Q1-K6-D4 | 5758304 | BLASTX | 325 | 6.00E−30 | 77 | (AF161704) 40S ribosomal protein S17 |
| | | | | | | | [Lycopersicon esculentum] |
| 1592 | LIB3602-002-P1-K6-H6 | 7447940 | BLASTX | 289 | 1.00E−25 | 47 | hypothetical protein slr1503 - Synechocystis sp. |
| | | | | | | | (strain PCC 6803) >gi\|1653089\|dbj\|BAA18005.1\| |
| | | | | | | | (D90911) hypothetical protein [Synechocystis sp.] |
| 1593 | LIB3602-025-Q6-K1-F8 | 7447940 | BLASTX | 189 | 5.00E−14 | 44 | hypothetical protein slr1503 - Synechocystis sp. |
| | | | | | | | (strain PCC 6803) >gi\|1653089\|dbj\|BAA18005.1\| |
| | | | | | | | (D90911) hypothetical protein [Synechocystis sp.] |
| 1594 | LIB3602-047-Q6-K1-H5 | 7447940 | BLASTX | 167 | 8.00E−12 | 58 | hypothetical protein slr1503 - Synechocystis sp. |
| | | | | | | | (strain PCC 6803) >gi\|1653089\|dbj\|BAA18005.1\| |
| | | | | | | | (D90911) hypothetical protein [Synechocystis sp.] |
| 1595 | LIB3602-054-Q6-K1-D5 | 6015437 | BLASTN | 38 | 1.00E−12 | 100 | Homo sapiens PEX1 mRNA, complete cds |
| 1596 | LIB3602-054-Q6-K1-E5 | 6015437 | BLASTN | 37 | 3.00E−11 | 100 | Homo sapiens PEX1 mRNA, complete cds |
| 1597 | LIB3602-052-Q6-K1-B7 | 6015437 | BLASTN | 37 | 5.00E−11 | 100 | Homo sapiens PEX1 mRNA, complete cds |
| 1598 | LIB3602-037-Q6-K1-D2 | 5360595 | BLASTX | 301 | 4.00E−27 | 42 | (AB022330) nClpP5 [Arabidopsis thaliana] |
| 1599 | LIB3602-046-Q6-K1-H11 | 5360595 | BLASTX | 259 | 3.00E−22 | 61 | (AB022330) nClpP5 [Arabidopsis thaliana] |
| 1600 | LIB3602-046-Q6-K1-H12 | 5360595 | BLASTX | 255 | 9.00E−22 | 60 | (AB022330) nClpP5 [Arabidopsis thaliana] |
| 1601 | LIB3602-041-Q6-K1-G8 | 543696 | BLASTX | 656 | 1.00E−68 | 63 | translation elongation factor EF-3 homolog - |
| | | | | | | | Chlorella virus CVK2 >gi\|454301\|dbj\|BAA03956.1\| |
| | | | | | | | (D16505) translation elongation factor-3 [Chlorella |
| | | | | | | | virus] |
| 1602 | LIB3602-073-Q1-K1-F2 | 543696 | BLASTX | 488 | 8.00E−58 | 61 | translation elongation factor EF-3 homolog - |
| | | | | | | | Chlorella virus CVK2 >gi\|454301\|dbj\|BAA03956.1\| |
| | | | | | | | (D16505) translation elongation factor-3 [Chlorella |
| | | | | | | | virus] |
| 1603 | LIB3602-095-Q6-K6-A1 | 543696 | BLASTX | 244 | 8.00E−21 | 55 | translation elongation factor EF-3 homolog - |
| | | | | | | | Chlorella virus CVK2 >gi\|454301\|dbj\|BAA03956.1\| |
| | | | | | | | (D16505) translation elongation factor-3 [Chlorella |
| | | | | | | | virus] |
| 1604 | LIB3602-015-Q6-K1-D10 | 7499991 | BLASTX | 277 | 3.00E−24 | 35 | hypothetical protein F27C1.7 - Caenorhabditis |
| | | | | | | | elegans >gi\|1703605\|gb\|AAB37654.1\| (U80441) |
| | | | | | | | coded for by C. elegans cDNA yk63g10.5; coded |
| | | | | | | | for by C. elegans cDNA yk105c10.5; coded for by |
| | | | | | | | C. elegans cDNA yk167c12.5; coded for by C. elegans |
| | | | | | | | cDNA yk167c12.3; co |
| 1605 | LIB3602-050-Q6-K1-H6 | 7499991 | BLASTX | 234 | 2.00E−19 | 40 | hypothetical protein F27C1.7 - Caenorhabditis |
| | | | | | | | elegans >gi\|1703605\|gb\|AAB37654.1\| (U80441) |
| | | | | | | | coded for by C. elegans cDNA yk63g10.5; coded |
| | | | | | | | for by C. elegans cDNA yk105c10.5; coded for by |
| | | | | | | | C. elegans cDNA yk167c12.5; coded for by C. elegans |
| | | | | | | | cDNA yk167c12.3; co |
| 1606 | LIB3602-074-Q1-K1-E12 | 7499991 | BLASTX | 214 | 8.00E−17 | 38 | hypothetical protein F27C1.7 - Caenorhabditis |
| | | | | | | | elegans >gi\|1703605\|gb\|AAB37654.1\| (U80441) |
| | | | | | | | coded for by C. elegans cDNA yk63g10.5; coded |
| | | | | | | | for by C. elegans cDNA yk105c10.5; coded for by |
| | | | | | | | C. elegans cDNA yk167c12.5; coded for by C. elegans |
| | | | | | | | cDNA yk167c12.3; co |
| 1607 | LIB3602-053-Q6-K1-D5 | 1245180 | BLASTX | 415 | 2.00E−40 | 47 | (U49236) arginine deiminase [Giardia intestinalis] |
| 1608 | LIB3602-053-Q6-K1-D11 | 1245180 | BLASTX | 413 | 4.00E−40 | 47 | (U49236) arginine deiminase [Giardia intestinalis] |
| 1609 | LIB3602-037-Q6-K1-H9 | 1245180 | BLASTX | 199 | 3.00E−15 | 45 | (U49236) arginine deiminase [Giardia intestinalis] |
| 1610 | LIB3602-027-Q6-K1-F3 | 730449 | BLASTX | 390 | 2.00E−37 | 59 | 60S RIBOSOMAL PROTEIN L13-1 (COLD |
| | | | | | | | INDUCED PROTEIN C24A) |
| | | | | | | | >gi\|480647\|pir\|\|S37132 ribosomal protein L13.A - |
| | | | | | | | rape >gi\|398918\|emb\|CAA80341.1\| (Z22618) cold |
| | | | | | | | induced protein (BnC24A) [Brassica napus] |
| 1611 | LIB3602-009-Q6-K1-A2 | 730449 | BLASTX | 342 | 6.00E−32 | 55 | 60S RIBOSOMAL PROTEIN L13-1 (COLD |
| | | | | | | | INDUCED PROTEIN C24A) |
| | | | | | | | >gi\|480647\|pir\|\|S37132 ribosomal protein L13.A - |
| | | | | | | | rape >gi\|398918\|emb\|CAA80341.1\| (Z22618) cold |
| | | | | | | | induced protein (BnC24A) [Brassica napus] |
| 1612 | LIB3602-066-Q1-K6-D2 | 730449 | BLASTX | 296 | 1.00E−26 | 54 | 60S RIBOSOMAL PROTEIN L13-1 (COLD |
| | | | | | | | INDUCED PROTEIN C24A) |
| | | | | | | | >gi\|480647\|pir\|\|S37132 ribosomal protein L13.A - |
| | | | | | | | rape >gi\|398918\|emb\|CAA80341.1\| (Z22618) cold |
| | | | | | | | induced protein (BnC24A) [Brassica napus] |
| 1613 | LIB3602-045-Q6-K1-B12 | 6552397 | BLASTX | 187 | 8.00E−14 | 73 | (AB030493) thiamin biosynthetic enzyme [Glycine |
| | | | | | | | max] |
| 1614 | LIB3602-005-Q1-K1-G9 | 6552397 | BLASTX | 184 | 2.00E−13 | 68 | (AB030493) thiamin biosynthetic enzyme [Glycine |
| | | | | | | | max] |
| 1615 | LIB3602-050-Q6-K1-G8 | 6552397 | BLASTX | 183 | 2.00E−13 | 76 | (AB030493) thiamin biosynthetic enzyme [Glycine |
| | | | | | | | max] |
| 1616 | LIB3602-076-Q6-K6-A3 | 6714365 | BLASTX | 183 | 3.00E−13 | 47 | (AC012562) unknown protein [Arabidopsis |
| | | | | | | | thaliana] |
| 1617 | LIB3602-069-Q1-K1-B1 | 6714365 | BLASTX | 181 | 6.00E−13 | 47 | (AC012562) unknown protein [Arabidopsis |
| | | | | | | | thaliana] |
| 1618 | LIB3602-003-Q1-K1-A4 | 6714365 | BLASTX | 157 | 3.00E−10 | 50 | (AC012562) unknown protein [Arabidopsis |
| | | | | | | | thaliana] |
| 1619 | LIB3602-089-Q6-K6-G9 | 3293539 | BLASTX | 469 | 9.00E−47 | 60 | (AF072709) unknown [Streptomyces lividans] |
| 1620 | LIB3602-095-Q6-K6-G9 | 3293539 | BLASTX | 469 | 1.00E−46 | 60 | (AF072709) unknown [Streptomyces lividans] |
| 1621 | LIB3602-112-Q1-K1-G9 | 3293539 | BLASTX | 469 | 1.00E−46 | 60 | (AF072709) unknown [Streptomyces lividans] |
| 1622 | LIB3602-088-Q6-K6-H3 | 6456166 | BLASTX | 549 | 4.00E−56 | 74 | (AC011622) GMP synthase [Arabidopsis thaliana] |
| 1623 | LIB3602-104-Q1-K1-E6 | 6456166 | BLASTX | 548 | 5.00E−56 | 73 | (AC011622) GMP synthase [Arabidopsis thaliana] |
| 1624 | LIB3602-061-Q6-K1-H12 | 6456166 | BLASTX | 455 | 3.00E−45 | 75 | (AC011622) GMP synthase [Arabidopsis thaliana] |
| 1625 | LIB3602-111-Q1-K1-C10 | 7447845 | BLASTX | 553 | 9.00E−57 | 76 | hypothetical protein T16L1.170 - Arabidopsis |
| | | | | | | | thaliana >gi\|3549670\|emb\|CAA20581.1\| |
| | | | | | | | (AL031394) putative protein [Arabidopsis thaliana] |
| | | | | | | | >gi\|7270317\|emb\|CAB80085.1\| (AL161584) |
| | | | | | | | putative protein [Arabidopsis thaliana] |
| 1626 | LIB3602-006-Q1-K1-B10 | 7447845 | BLASTX | 362 | 3.00E−34 | 73 | hypothetical protein T16L1.170 - Arabidopsis |
| | | | | | | | thaliana >gi\|3549670\|emb\|CAA20581.1\| |
| | | | | | | | (AL031394) putative protein [Arabidopsis thaliana] |
| | | | | | | | >gi\|7270317\|emb\|CAB80085.1\| (AL161584) |
| | | | | | | | putative protein [Arabidopsis thaliana] |
| 1627 | LIB3602-043-Q6-K1-E11 | 7447845 | BLASTX | 299 | 4.00E−27 | 57 | hypothetical protein T16L1.170 - Arabidopsis |
| | | | | | | | thaliana >gi\|3549670\|emb\|CAA20581.1\| |
| | | | | | | | (AL031394) putative protein [Arabidopsis thaliana] |
| | | | | | | | >gi\|7270317\|emb\|CAB80085.1\| (AL161584) |
| | | | | | | | putative protein [Arabidopsis thaliana] |
| 1628 | LIB3602-066-Q1-K6-C3 | 7019650 | BLASTX | 278 | 2.00E−24 | 63 | (AL132954) ribosomal protein L35-like |
| | | | | | | | [Arabidopsis thaliana] |
| 1629 | LIB3602-117-Q1-K1-C8 | 7019650 | BLASTX | 157 | 9.00E−13 | 63 | (AL132954) ribosomal protein L35-like |
| | | | | | | | [Arabidopsis thaliana] |
| 1630 | LIB3602-044-Q6-K1-D10 | 7019650 | BLASTX | 145 | 1.00E−10 | 51 | (AL132954) ribosomal protein L35-like |
| | | | | | | | [Arabidopsis thaliana] |
| 1631 | LIB3602-044-Q6-K1-H9 | 2501354 | BLASTX | 509 | 1.00E−51 | 65 | TRANSKETOLASE 7 (TK) |
| | | | | | | | >gi\|1084441\|pir\|\|S54301 transketolase (EC 2.2.1.1) |
| | | | | | | | 7 - Craterostigma plantagineum |
| | | | | | | | >gi\|664903\|emb\|CAA86609.1\| (Z46648) |
| | | | | | | | transketolase [Craterostigma plantagineum] |
| 1632 | LIB3602-055-Q6-K1-H2 | 2501354 | BLASTX | 479 | 5.00E−48 | 61 | TRANSKETOLASE 7 (TK) |
| | | | | | | | >gi\|1084441\|pir\|\|S54301 transketolase (EC 2.2.1.1) |
| | | | | | | | 7 - Craterostigma plantagineum |
| | | | | | | | >gi\|664903\|emb\|CAA86609.1\| (Z46648) |
| | | | | | | | transketolase [Craterostigma plantagineum] |
| 1633 | LIB3602-044-Q6-K1-H10 | 2501354 | BLASTX | 219 | 1.00E−17 | 45 | TRANSKETOLASE 7 (TK) |
| | | | | | | | >gi\|1084441\|pir\|\|S54301 transketolase (EC 2.2.1.1) |
| | | | | | | | 7 - Craterostigma plantagineum |
| | | | | | | | >gi\|664903\|emb\|CAA86609.1\| (Z46648) |
| | | | | | | | transketolase [Craterostigma plantagineum] |
| 1634 | LIB3602-030-Q6-K1-G6 | 7023084 | BLASTX | 183 | 2.00E−13 | 35 | (AK001677) unnamed protein product [Homo |
| | | | | | | | sapiens] |
| 1635 | LIB3602-093-Q6-K6-C6 | 7023084 | BLASTX | 161 | 1.00E−10 | 37 | (AK001677) unnamed protein product [Homo |
| | | | | | | | sapiens] |
| 1636 | LIB3602-113-Q1-K1-G1 | 7023084 | BLASTX | 161 | 1.00E−10 | 37 | (AK001677) unnamed protein product [Homo |
| | | | | | | | sapiens] |
| 1637 | LIB3602-109-Q1-K1-E10 | 7485750 | BLASTX | 413 | 3.00E−40 | 52 | hypothetical protein F19B15.90 - Arabidopsis |
| | | | | | | | thaliana >gi\|4972052\|emb\|CAB43920.1\| |
| | | | | | | | (AL078470) putative protein [Arabidopsis thaliana] |
| | | | | | | | >gi\|7269804\|emb\|CAB79664.1\| (AL161574) |
| | | | | | | | putative protein [Arabidopsis thaliana] |
| 1638 | LIB3602-078-Q6-K6-B7 | 7485750 | BLASTX | 269 | 3.00E−23 | 60 | hypothetical protein F19B15.90 - Arabidopsis |
| | | | | | | | thaliana >gi\|4972052\|emb\|CAB43920.1\| |
| | | | | | | | (AL078470) putative protein [Arabidopsis thaliana] |
| | | | | | | | >gi\|7269804\|emb\|CAB79664.1\| (AL161574) |
| | | | | | | | putative protein [Arabidopsis thaliana] |
| 1639 | LIB3602-068-Q1-K1-E7 | 7485750 | BLASTX | 263 | 1.00E−22 | 60 | hypothetical protein F19B15.90 - Arabidopsis |
| | | | | | | | thaliana >gi\|4972052\|emb\|CAB43920.1\| |
| | | | | | | | (AL078470) putative protein [Arabidopsis thaliana] |
| | | | | | | | >gi\|7269804\|emb\|CAB79664.1\| (AL161574) |
| | | | | | | | putative protein [Arabidopsis thaliana] |
| 1640 | LIB3602-094-Q6-K6-E12 | 1902882 | BLASTX | 202 | 1.00E−15 | 47 | (AB001833) ribosomal protein YL16 homolog |
| | | | | | | | [Schizosaccharomyces pombe] |
| 1641 | LIB3602-091-Q6-K6-E12 | 1902882 | BLASTX | 193 | 2.00E−14 | 50 | (AB001833) ribosomal protein YL16 homolog |
| | | | | | | | [Schizosaccharomyces pombe] |
| 1642 | LIB3602-040-Q6-K1-A2 | 1902882 | BLASTX | 148 | 1.00E−09 | 60 | (AB001833) ribosomal protein YL16 homolog |
| | | | | | | | [Schizosaccharomyces pombe] |
| 1643 | LIB3602-115-Q1-K1-C1 | 7441176 | BLASTX | 330 | 1.00E−30 | 60 | ribosomal protein L35, cytosolic - Arabidopsis |
| | | | | | | | thaliana >gi\|3355468\|gb\|AAC27830.1\| (AC004218) |
| | | | | | | | 60S ribosomal protein L35 [Arabidopsis thaliana] |
| 1644 | LIB3602-013-Q6-K1-D1 | 7441176 | BLASTX | 238 | 3.00E−20 | 59 | ribosomal protein L35, cytosolic - Arabidopsis |
| | | | | | | | thaliana >gi\|3355468\|gb\|AAC27830.1\| (AC004218) |
| | | | | | | | 60S ribosomal protein L35 [Arabidopsis thaliana] |
| 1645 | LIB3602-070-Q1-K1-E5 | 7441176 | BLASTX | 235 | 8.00E−20 | 59 | ribosomal protein L35, cytosolic - Arabidopsis |
| | | | | | | | thaliana >gi\|3355468\|gb\|AAC27830.1\| (AC004218) |
| | | | | | | | 60S ribosomal protein L35 [Arabidopsis thaliana] |
| 1646 | LIB3602-108-Q1-K1-G1 | 3885884 | BLASTX | 340 | 6.00E−32 | 65 | (AF093630) 60S ribosomal protein L21 [Oryza |
| | | | | | | | sativa] |
| 1647 | LIB3602-106-Q1-K1-B3 | 3885884 | BLASTX | 223 | 6.00E−18 | 41 | (AF093630) 60S ribosomal protein L21 [Oryza |
| | | | | | | | sativa] |
| 1648 | LIB3602-051-Q6-K1-D12 | 3885884 | BLASTX | 150 | 5.00E−10 | 47 | (AF093630) 60S ribosomal protein L21 [Oryza |
| | | | | | | | sativa] |
| 1649 | LIB3602-020-Q6-K1-B9 | 2851583 | BLASTX | 242 | 3.00E−20 | 58 | ALPHA-AMYLASE TYPE B ISOZYME |
| | | | | | | | PRECURSOR (1,4-ALPHA-D-GLUCAN |
| | | | | | | | GLUCANOHYDROLASE) (AMY2-2) (HIGH PI |
| | | | | | | | ALPHA-AMYLASE) >gi\|1070490\|pir\|\|ALBHB |
| | | | | | | | alpha-amylase (EC 3.2.1.1) B precursor 6-4 - barley |
| | | | | | | | >gi\|166995\|gb\|AA98790.1\| (K02637) Hordeum |
| | | | | | | | vulgare alpha-amylase type |
| 1650 | LIB3602-074-Q1-K1-D2 | 2851583 | BLASTX | 212 | 1.00E−16 | 54 | ALPHA-AMYLASE TYPE B ISOZYME |
| | | | | | | | PRECURSOR (1,4-ALPHA-D-GLUCAN |
| | | | | | | | GLUCANOHYDROLASE) (AMY2-2) (HIGH PI |
| | | | | | | | ALPHA-AMYLASE) >gi\|1070490\|pir\|\|ALBHB |
| | | | | | | | alpha-amylase (EC 3.2.1.1) B precursor 6-4 - barley |
| | | | | | | | >gi\|166995\|gb\|AAA98790.1\| (K02637) Hordeum |
| | | | | | | | vulgare alpha-amylase type |
| 1651 | LIB3602-032-Q6-K1-A10 | 2851583 | BLASTX | 189 | 4.00E−14 | 56 | ALPHA-AMYLASE TYPE B ISOZYME |
| | | | | | | | PRECURSOR (1,4-ALPHA-D-GLUCAN |
| | | | | | | | GLUCANOHYDROLASE) (AMY2-2) (HIGH PI |
| | | | | | | | ALPHA-AMYLASE) >gi\|1070490\|pir\|\|ALBHB |
| | | | | | | | alpha-amylase (EC 3.2.1.1) B precursor 6-4 - barley |
| | | | | | | | >gi\|166995\|gb\|AAA98790.1\| (K02637) Hordeum |
| | | | | | | | vulgare alpha-amylase type |
| 1652 | LIB3602-087-Q6-K1-A4 | 132167 | BLASTX | 795 | 5.00E−85 | 87 | RIBULOSE BISPHOSPHATE |
| | | | | | | | CARBOXYLASE/OXYGENASE ACTIVASE, |
| | | | | | | | CHLOROPLAST PRECURSOR (RUBISCO |
| | | | | | | | ACTIVASE) >gi\|320539\|pir\|\|A45507 ribulose- |
| | | | | | | | bisphosphate carboxylase activase (EC 6.3.4.—) |
| | | | | | | | precursor - Chlamydomonas reinhardtii |
| | | | | | | | >gi\|167434\|gb\|AAA33091.1\| (M62962) ribulose |
| 1653 | LIB3602-084-Q6-K1-A4 | 132167 | BLASTX | 774 | 2.00E−82 | 81 | RIBULOSE BISPHOSPHATE |
| | | | | | | | CARBOXYLASE/OXYGENASE ACTIVASE, |
| | | | | | | | CHLOROPLAST PRECURSOR (RUBISCO |
| | | | | | | | ACTIVASE) >gi\|320539\|pir\|\|A45507 ribulose- |
| | | | | | | | bisphosphate carboxylase activase (EC 6.3.4.—) |
| | | | | | | | precursor - Chlamydomonas reinhardtii |
| | | | | | | | >gi\|167434\|gb\|AAA33091.1\| (M62962) ribulose |
| 1654 | LIB3602-050-Q6-K1-C1 | 132167 | BLASTX | 760 | 5.00E−81 | 96 | RIBULOSE BISPHOSPHATE |
| | | | | | | | CARBOXYLASE/OXYGENASE ACTIVASE, |
| | | | | | | | CHLOROPLAST PRECURSOR (RUBISCO |
| | | | | | | | ACTIVASE) >gi\|320539\|pir\|\|A45507 ribulose- |
| | | | | | | | bisphosphate carboxylase activase (EC 6.3.4.—) |
| | | | | | | | precursor - Chlamydomonas reinhardtii |
| | | | | | | | >gi\|167434\|gb\|AAA33091.1\| (M62962) ribulose |
| 1655 | LIB3602-095-Q6-K6-A5 | 117971 | BLASTX | 429 | 5.00E−42 | 79 | CYTOCHROME C >gi\|322374\|pir\|\|S29514 |
| | | | | | | | cytochrome c - Chlamydomonas reinhardtii |
| | | | | | | | >gi\|167413\|gb\|AAA33084.1\| (M35173) |
| | | | | | | | apocytochrome c (cyc) [Chlamydomonas |
| | | | | | | | reinhardtii ] >gi\|2660500\|emb\|CAB16954.1\| |
| | | | | | | | (Z99829) cytochrome c [Chlamydomonas |
| | | | | | | | reinhardtii] >gi\|226382\|prf\| |
| 1656 | LIB3602-117-Q1-K1-D12 | 117971 | BLASTX | 396 | 2.00E−38 | 82 | CYTOCHROME C >gi\|322374\|pir\|\|S29514 |
| | | | | | | | cytochrome c - Chlamydomonas reinhardtii |
| | | | | | | | >gi\|167413\|gb\|AAA33084.1\| (M35173) |
| | | | | | | | apocytochrome c (cyc) [Chlamydomonas |
| | | | | | | | reinhardtii] >gi\|2660500\|emb\|CAB16954.1\| |
| | | | | | | | (Z99829) cytochrome c [Chlamydomonas |
| | | | | | | | reinhardtii] >gi\|226382\|prf\| |
| 1657 | LIB3602-013-Q6-K1-C1 | 117971 | BLASTX | 246 | 1.00E−20 | 85 | CYTOCHROME C >gi\|322374\|pir\|\|S29514 |
| | | | | | | | cytochrome c - Chlamydomonas reinhardtii |
| | | | | | | | >gi\|167413\|gb\|AAA33084.1\| (M35173) |
| | | | | | | | apocytochrome c (cyc) [Chlamydomonas |
| | | | | | | | reinhardtii] >gi\|2660500\|emb\|CAB16954.1\| |
| | | | | | | | (Z99829) cytochrome c [Chlamydomonas |
| | | | | | | | reinhardtii] >gi\|226382\|prf\| |
| 1658 | LIB3602-014-Q6-K1-H9 | 3913425 | BLASTX | 387 | 3.00E−37 | 69 | PUTATIVE PRE-MRNA SPLICING FACTOR |
| | | | | | | | ATP-DEPENDENT RNA HELICASE |
| | | | | | | | >gi\|2275203\|gb\|AAB63825.1\| (AC002337) putative |
| | | | | | | | pre-mRNA splicing factor RNA helicase |
| | | | | | | | [Arabidopsis thaliana] |
| 1659 | LIB3602-035-Q1-K1-G10 | 3913425 | BLASTX | 371 | 2.00E−35 | 67 | PUTATIVE PRE-MRNA SPLICING FACTOR |
| | | | | | | | ATP-DEPENDENT RNA HELICASE |
| | | | | | | | >gi\|2275203\|gb\|AAB63825.1\| (AC002337) putative |
| | | | | | | | pre-mRNA splicing factor RNA helicase |
| | | | | | | | [Arabidopsis thaliana] |
| 1660 | LIB3602-034-Q6-K1-G10 | 3913425 | BLASTX | 312 | 1.00E−28 | 63 | PUTATIVE PRE-MRNA SPLICING FACTOR |
| | | | | | | | ATP-DEPENDENT RNA HELICASE |
| | | | | | | | >gi\|2275203\|gb\|AAB63825.1\| (AC002337) putative |
| | | | | | | | pre-mRNA splicing factor RNA helicase |
| | | | | | | | [Arabidopsis thaliana] |
| 1661 | LIB3602-118-Q1-K1-G11 | 167427 | BLASTN | 46 | 1.00E−16 | 90 | C. reinhardtii oxygen-evolving enhancer protein 2 |
| | | | | | | | (OEE2) mRNA, complete cds |
| 1662 | LIB3602-094-Q6-K6-F12 | 167427 | BLASTN | 46 | 2.00E−16 | 90 | C. reinhardtii oxygen-evolving enhancer protein 2 |
| | | | | | | | (OEE2) mRNA, complete cds |
| 1663 | LIB3602-114-Q1-K1-D11 | 167427 | BLASTN | 46 | 3.00E−16 | 90 | C. reinhardtii oxygen-evolving enhancer protein 2 |
| | | | | | | | (OEE2) mRNA, complete cds |
| 1664 | LIB3602-109-Q1-K1-G1 | 7487122 | BLASTX | 265 | 7.00E−25 | 43 | hypothetical protein T17F15.230 - Arabidopsis |
| | | | | | | | thaliana >gi\|4678338\|emb\|CAB41149.1\| |
| | | | | | | | (AL049658) putative protein [Arabidopsis thaliana] |
| 1665 | LIB3602-058-Q6-K1-B11 | 7487122 | BLASTX | 197 | 5.00E−15 | 41 | hypothetical protein T17F15.230 - Arabidopsis |
| | | | | | | | thaliana >gi\|4678338\|emb\|CAB41149.1\| |
| | | | | | | | (AL049658) putative protein [Arabidopsis thaliana] |
| 1666 | LIB3602-012-Q6-K1-B10 | 7487122 | BLASTX | 198 | 6.00E−15 | 28 | hypothetical protein T17F15.230 - Arabidopsis |
| | | | | | | | thaliana >gi\|4678338\|emb\|CAB41149.1\| |
| | | | | | | | (AL049658) putative protein [Arabidopsis thaliana] |
| 1667 | LIB3602-076-Q6-K6-C2 | 6752882 | BLASTX | 317 | 6.00E−29 | 53 | (AF220200) nascent polypeptide associated |
| | | | | | | | complex alpha chain [Pinus taeda] |
| 1668 | LIB3602-105-Q1-K1-H4 | 6752882 | BLASTX | 309 | 5.00E−28 | 52 | (AF220200) nascent polypeptide associated |
| | | | | | | | complex alpha chain [Pinus taeda] |
| 1669 | LIB3602-050-Q6-K1-A5 | 6752882 | BLASTX | 280 | 1.00E−24 | 78 | (AF220200) nascent polypeptide associated |
| | | | | | | | complex alpha chain [Pinus taeda] |
| 1670 | LIB3602-023-Q6-K1-E2 | 4107276 | BLASTX | 440 | 5.00E−47 | 66 | (X98506) acetyl-CoA synthetase [Solanum |
| | | | | | | | tuberosum] |
| 1671 | LIB3602-089-Q6-K6-F4 | 4107276 | BLASTX | 179 | 9.00E−13 | 69 | (X98506) acetyl-CoA synthetase [Solanum |
| | | | | | | | tuberosum] |
| 1672 | LIB3602-056-Q6-K1-F3 | 4107276 | BLASTX | 178 | 9.00E−13 | 76 | (X98506) acetyl-CoA synthetase [Solanum |
| | | | | | | | tuberosum] |
| 1673 | LIB3602-060-Q6-K1-C7 | 421985 | BLASTX | 311 | 2.00E−28 | 79 | ribosomal protein L17.1, cytosolic - barley |
| 1674 | LIB3602-015-Q6-K1-C3 | 421985 | BLASTX | 275 | 3.00E−24 | 79 | ribosomal protein L17.1, cytosolic - barley |
| 1675 | LIB3602-036-Q6-K1-B8 | 421985 | BLASTX | 245 | 1.00E−20 | 76 | ribosomal protein L17.1, cytosolic - barley |
| 1676 | LIB3602-003-Q1-K1-C8 | 5019305 | BLASTX | 252 | 2.00E−21 | 33 | (AJ011563) carnitine/acyl carnitine carrier |
| | | | | | | | [Emericella nidulans] |
| 1677 | LIB3602-039-Q6-K1-C7 | 5019305 | BLASTX | 251 | 3.00E−21 | 35 | (AJ011563) carnitine/acyl carnitine carrier |
| | | | | | | | [Emericella nidulans] |
| 1678 | LIB3602-003-Q1-K1-C9 | 5019305 | BLASTX | 178 | 9.00E−13 | 33 | (AJ011563) carnitine/acyl carnitine carrier |
| | | | | | | | [Emericella nidulans] |
| 1679 | LIB3602-034-Q6-K1-C6 | 5174741 | BLASTX | 394 | 5.00E−38 | 52 | ubiquitin carboxyl-terminal esterase L3 (ubiquitin |
| | | | | | | | thiolesterase) |
| | | | | | | | >gi\|136682\|sp\|P15374\|UBL3_HUMAN |
| | | | | | | | UBIQUITIN CARBOXYL-TERMINAL |
| | | | | | | | HYDROLASE ISOZYME L3 (UCH-L3) |
| | | | | | | | (UBIQUITIN THIOLESTERASE L3) |
| | | | | | | | >gi\|108014\|pir\|\|A40085 ubiquitin thiolesterase (EC |
| | | | | | | | 3.1.2.15) L3 - huma |
| 1680 | LIB3602-104-Q1-K1-D11 | 5174741 | BLASTX | 393 | 8.00E−38 | 52 | ubiquitin carboxyl-terminal esterase L3 (ubiquitin |
| | | | | | | | thiolesterase) |
| | | | | | | | >gi\|136682\|sp\|P15374\|UBL3_HUMAN |
| | | | | | | | UBIQUITIN CARBOXYL-TERMINAL |
| | | | | | | | HYDROLASE ISOZYME L3 (UCH-L3) |
| | | | | | | | (UBIQUITIN THIOLESTERASE L3) |
| | | | | | | | >gi\|108014\|pir\|\|A40085 ubiquitin thiolesterase (EC |
| | | | | | | | 3.1.2.15) L3 - huma |
| 1681 | LIB3602-035-Q1-K1-C6 | 5174741 | BLASTX | 356 | 1.00E−33 | 54 | ubiquitin carboxyl-terminal esterase L3 (ubiquitin |
| | | | | | | | thiolesterase) |
| | | | | | | | >gi\|136682\|sp\|P15374\|UBL3_HUMAN |
| | | | | | | | UBIQUITIN CARBOXYL-TERMINAL |
| | | | | | | | HYDROLASE ISOZYME L3 (UCH-L3) |
| | | | | | | | (UBIQUITIN THIOLESTERASE L3) |
| | | | | | | | >gi\|108014\|pir\|\|A40085 ubiquitin thiolesterase (EC |
| | | | | | | | 3.1.2.15) L3 - huma |
| 1682 | LIB3602-050-Q6-K1-B11 | 7446976 | BLASTX | 589 | 6.00E−61 | 73 | 1-deoxy-D-xylulose-5-phosphate synthase precursor - |
| | | | | | | | Chlamydomonas reinhardtii |
| | | | | | | | >gi\|4185881\|emb\|CAA07554.1\| (AJ007559) 1- |
| | | | | | | | deoxy-D-xylulose-5-phosphate synthase |
| | | | | | | | [Chlamydomonas reinhardtii] |
| 1683 | LIB3602-109-Q1-K1-E5 | 7446976 | BLASTX | 429 | 1.00E−58 | 69 | 1-deoxy-D-xylulose-5-phosphate synthase precursor - |
| | | | | | | | Chlamydomonas reinhardtii |
| | | | | | | | >gi\|4185881\|emb\|CAA07554.1\| (AJ007559) 1- |
| | | | | | | | deoxy-D-xylulose-5-phosphate synthase |
| | | | | | | | [Chlamydomonas reinhardtii] |
| 1684 | LIB3602-020-Q6-K1-H8 | 7446976 | BLASTX | 521 | 7.00E−53 | 65 | 1-deoxy-D-xylulose-5-phosphate synthase precursor - |
| | | | | | | | Chlamydomonas reinhardtii |
| | | | | | | | >gi\|4185881\|emb\|CAA07554.1\| (AJ007559) 1- |
| | | | | | | | deoxy-D-xylulose-5-phosphate synthase |
| | | | | | | | [Chlamydomonas reinhardtii] |
| 1685 | LIB3602-064-Q1-K6-A2 | 238318 | BLASTX | 578 | 2.00E−59 | 58 | (S62652) branched-chain alpha-keto acid |
| | | | | | | | dehydrogenase E1 alpha subunit [human, Peptide, |
| | | | | | | | 443 aa] [Homo sapiens] |
| 1686 | LIB3602-076-Q6-K6-H5 | 238318 | BLASTX | 544 | 2.00E−55 | 55 | (S62652) branched-chain alpha-keto acid |
| | | | | | | | dehydrogenase E1 alpha subunit [human, Peptide, |
| | | | | | | | 443 aa] [Homo sapiens] |
| 1687 | LIB3602-022-Q6-K1-A10 | 238318 | BLASTX | 177 | 1.00E−12 | 40 | (S62652) branched-chain alpha-keto acid |
| | | | | | | | dehydrogenase E1 alpha subunit [human, Peptide, |
| | | | | | | | 443 aa] [Homo sapiens] |
| 1688 | LIB3602-012-Q6-K1-C3 | 7485188 | BLASTX | 484 | 2.00E−48 | 58 | hypothetical protein - Arabidopsis thaliana |
| | | | | | | | >gi\|2245118\|emb\|CAB10540.1\| (Z97343) |
| | | | | | | | hypothetical protein [Arabidopsis thaliana] |
| | | | | | | | >gi\|7268512\|emb\|CAB78763.1\| (AL161546) |
| | | | | | | | hypothetical protein [Arabidopsis thaliana] |
| 1689 | LIB3602-032-Q6-K1-H9 | 7485188 | BLASTX | 389 | 2.00E−37 | 57 | hypothetical protein - Arabidopsis thaliana |
| | | | | | | | >gi\|2245118\|emb\|CAB10540.1\| (Z97343) |
| | | | | | | | hypothetical protein [Arabidopsis thaliana] |
| | | | | | | | >gi\|7268512\|emb\|CAB78763.1\| (AL161546) |
| | | | | | | | hypothetical protein [Arabidopsis thaliana] |
| 1690 | LIB3602-027-Q6-K1-A10 | 7485188 | BLASTX | 384 | 8.00E−37 | 60 | hypothetical protein - Arabidopsis thaliana |
| | | | | | | | >gi\|2245118\|emb\|CAB10540.1\| (Z97343) |
| | | | | | | | hypothetical protein [Arabidopsis thaliana] |
| | | | | | | | >gi\|7268512\|emb\|CAB78763.1\| (AL161546) |
| | | | | | | | hypothetical protein [Arabidopsis thaliana] |
| 1691 | LIB3602-054-Q6-K1-A2 | 3915826 | BLASTX | 207 | 3.00E−16 | 51 | 60S RIBOSOMAL PROTEIN L5 |
| 1692 | LIB3602-053-Q6-K1-H11 | 3915826 | BLASTX | 159 | 1.00E−10 | 55 | 60S RIBOSOMAL PROTEIN L5 |
| 1693 | LIB3602-052-Q6-K1-C9 | 3915826 | BLASTX | 145 | 6.00E−09 | 53 | 60S RIBOSOMAL PROTEIN L5 |
| 1694 | LIB3602-088-Q6-K6-C5 | 7435750 | BLASTX | 362 | 3.00E−34 | 51 | cell division control protein 48, AAA family |
| | | | | | | | (cdc48-2) homolog - Archaeoglobus fulgidus |
| | | | | | | | >gi\|2648442\|gb\|AAB89157.1\| (AE000959) cell |
| | | | | | | | division control protein 48, AAA family (cdc48-2) |
| | | | | | | | [Archaeoglobus fulgidus] |
| 1695 | LIB3602-118-Q1-K1-C5 | 7435750 | BLASTX | 348 | 1.00E−32 | 52 | cell division control protein 48, AAA family |
| | | | | | | | (cdc48-2) homolog - Archaeoglobus fulgidus |
| | | | | | | | >gi\|2648442\|gb\|AAB89157.1\| (AE000959) cell |
| | | | | | | | division control protein 48, AAA family (cdc48-2) |
| | | | | | | | [Archaeoglobus fulgidus] |
| 1696 | LIB3602-090-Q6-K6-F2 | 7435750 | BLASTX | 331 | 1.00E−30 | 48 | cell division control protein 48, AAA family |
| | | | | | | | (cdc48-2) homolog - Archaeoglobus fulgidus |
| | | | | | | | >gi\|2648442\|gb\|AAB89157.1\| (AE000959) cell |
| | | | | | | | division control protein 48, AAA family (cdc48-2) |
| | | | | | | | [Archaeoglobus fulgidus] |
| 1697 | LIB3602-104-Q1-K1-H9 | 7384996 | BLASTX | 185 | 2.00E−13 | 49 | (AF153422) lacZ [Cloning vector pTG8] |
| 1698 | LIB3602-100-Q1-K1-C11 | 7384996 | BLASTX | 161 | 6.00E−11 | 43 | (AF153422) lacZ [Cloning vector pTG8] |
| 1699 | LIB3602-055-Q6-K1-H7 | 7384996 | BLASTX | 157 | 2.00E−10 | 37 | (AF153422) lacZ [Cloning vector pTG8] |
| 1700 | LIB3602-093-Q6-K6-B7 | 416222 | BLASTX | 585 | 2.00E−60 | 98 | (D16504) alpha-tubulin [Chlorella vulgaris] |
| 1701 | LIB3602-104-Q1-K1-B7 | 416222 | BLASTX | 554 | 9.00E−57 | 99 | (D16504) alpha-tubulin [Chlorella vulgaris] |
| 1702 | LIB3602-117-Q1-K1-B7 | 416222 | BLASTX | 263 | 1.00E−43 | 100 | (D16504) alpha-tubulin [Chlorella vulgaris] |
| 1703 | LIB3602-002-P1-K6-E5 | 6056208 | BLASTX | 440 | 2.00E−43 | 50 | (AC009400) putative ATPase [Arabidopsis |
| | | | | | | | thaliana] |
| 1704 | LIB3602-065-Q1-K6-D5 | 6056208 | BLASTX | 191 | 2.00E−14 | 50 | (AC009400) putative ATPase [Arabidopsis |
| | | | | | | | thaliana] |
| 1705 | LIB3602-111-Q1-K1-A1 | 6056208 | BLASTX | 187 | 5.00E−14 | 50 | (AC009400) putative ATPase [Arabidopsis |
| | | | | | | | thaliana] |
| 1706 | LIB3602-029-Q6-K1-C10 | 1351122 | BLASTX | 502 | 1.00E−50 | 68 | THIAZOLE BIOSYNTHETIC ENZYME |
| | | | | | | | PRECURSOR (STRESS-INDUCIBLE PROTEIN |
| | | | | | | | STI35) >gi\|280494\|pir\|\|B37767 stress-inducible |
| | | | | | | | protein sti35 - fungus (Fusarium oxysporum) |
| | | | | | | | >gi\|168164\|gb\|AAA33341.1\| (M33643) STI35 |
| | | | | | | | protein [Fusarium oxysporum] |
| | | | | | | | >gi\|6045153\|dbj\|BAA85305.1\| ( |
| 1707 | LIB3602-088-Q6-K6-G1 | 1351122 | BLASTX | 477 | 1.00E−47 | 67 | THIAZOLE BIOSYNTHETIC ENZYME |
| | | | | | | | PRECURSOR (STRESS-INDUCIBLE PROTEIN |
| | | | | | | | STI35) >gi\|280494\|pir\|\|B37767 stress-inducible |
| | | | | | | | protein sti35 - fungus (Fusarium oxysporum) |
| | | | | | | | >gi\|168164\|gb\|AAA33341.1\| (M33643) STI35 |
| | | | | | | | protein [Fusarium oxysporum] |
| | | | | | | | >gi\|6045153\|dbj\|BAA85305.1\| ( |
| 1708 | LIB3602-103-Q1-K1-G10 | 1351122 | BLASTX | 391 | 1.00E−37 | 66 | THIAZOLE BIOSYNTHETIC ENZYME |
| | | | | | | | PRECURSOR (STRESS-INDUCIBLE PROTEIN |
| | | | | | | | STI35) >gi\|280494\|pir\|\|B37767 stress-inducible |
| | | | | | | | protein sti35 - fungus (Fusarium oxysporum) |
| | | | | | | | >gi\|168164\|gb\|AAA33341.1\| (M33643) STI35 |
| | | | | | | | protein [Fusarium oxysporum] |
| | | | | | | | >gi\|6045153\|dbj\|BAA85305.1\| ( |
| 1709 | LIB3602-062-Q6-K1-A9 | 3806118 | BLASTX | 182 | 1.00E−13 | 79 | (AF097201) 40S ribosomal protein S8 |
| | | | | | | | [Schizophyllum commune] |
| 1710 | LIB3602-062-Q6-K1-A10 | 3806118 | BLASTX | 181 | 1.00E−13 | 75 | (AF097201) 40S ribosomal protein S8 |
| | | | | | | | [Schizophyllum commune] |
| 1711 | LIB3602-007-Q1-K1-E11 | 3806118 | BLASTX | 165 | 9.00E−12 | 84 | (AF097201) 40S ribosomal protein S8 |
| | | | | | | | [Schizophyllum commune] |
| 1712 | LIB3602-113-Q1-K1-G6 | 132099 | BLASTX | 189 | 3.00E−14 | 92 | RIBULOSE BISPHOSPHATE CARBOXYLASE |
| | | | | | | | SMALL CHAIN PW9 PRECURSOR (RUBISCO |
| | | | | | | | SMALL SUBUNIT PW9) >gi\|68091\|pir\|\|RKWTS9 |
| | | | | | | | ribulose-bisphosphate carboxylase (EC 4.1.1.39) |
| | | | | | | | small chain precursor (clone pW9) - wheat |
| | | | | | | | >gi\|170771\|gb\|AAA34302.1\| (M37477) ribulose- |
| | | | | | | | 1,5-bisphos |
| 1713 | LIB3602-092-Q6-K6-G6 | 132099 | BLASTX | 185 | 8.00E−14 | 97 | RIBULOSE BISPHOSPHATE CARBOXYLASE |
| | | | | | | | SMALL CHAIN PW9 PRECURSOR (RUBISCO |
| | | | | | | | SMALL SUBUNIT PW9) >gi\|68091\|pir\|\|RKWTS9 |
| | | | | | | | ribulose-bisphosphate carboxylase (EC 4.1.1.39) |
| | | | | | | | small chain precursor (clone pW9) - wheat |
| | | | | | | | >gi\|170771\|gb\|AAA34302.1\| (M37477) ribulose- |
| | | | | | | | 1,5-bisphos |
| 1714 | LIB3602-120-Q1-K1-G6 | 132099 | BLASTX | 172 | 2.00E−12 | 100 | RIBULOSE BISPHOSPHATE CARBOXYLASE |
| | | | | | | | SMALL CHAIN PW9 PRECURSOR (RUBISCO |
| | | | | | | | SMALL SUBUNIT PW9) >gi\|68091\|pir\|\|RKWTS9 |
| | | | | | | | ribulose-bisphosphate carboxylase (EC 4.1.1.39) |
| | | | | | | | small chain precursor (clone pW9) - wheat |
| | | | | | | | >gi\|170771\|gb\|AAA34302.1\| (M37477) ribulose- |
| | | | | | | | 1,5-bisphos |
| 1715 | LIB3602-109-Q1-K1-F3 | 6554488 | BLASTX | 343 | 4.00E−32 | 62 | (AC012394) putative small nuclear |
| | | | | | | | ribonucleoprotein Sm D3 [Arabidopsis thaliana] |
| | | | | | | | >gi\|6573711\|gb\|AAF17631.1\|AC009978_7 |
| | | | | | | | (AC009978) T23E18.23 [Arabidopsis thaliana] |
| 1716 | LIB3602-074-Q1-K1-G10 | 6554488 | BLASTX | 327 | 4.00E−30 | 61 | (AC012394) putative small nuclear |
| | | | | | | | ribonucleoprotein Sm D3 [Arabidopsis thaliana] |
| | | | | | | | >gi\|6573711\|gb\|AAF17631.1\|AC009978_7 |
| | | | | | | | (AC009978) T23E18.23 [Arabidopsis thaliana] |
| 1717 | LIB3602-107-Q1-K1-A9 | 6554488 | BLASTX | 319 | 3.00E−29 | 62 | (AC012394) putative small nuclear |
| | | | | | | | ribonucleoprotein Sm D3 [Arabidopsis thaliana] |
| | | | | | | | >gi\|6573711\|gb\|AAF17631.1\|AC009978_7 |
| | | | | | | | (AC009978) T23E18.23 [Arabidopsis thaliana] |
| 1718 | LIB3602-074-Q1-K1-H11 | 417103 | BLASTX | 627 | 3.00E−65 | 99 | HISTONE H3.2, MINOR >gi\|282871\|pir\|\|S24346 |
| | | | | | | | histone H3.3-like protein - Arabidopsis thaliana |
| | | | | | | | >gi\|16324\|emb\|CAA42957.1\| (X60429) histone |
| | | | | | | | H3.3 like protein [Arabidopsis thaliana] |
| | | | | | | | >gi\|404825\|emb\|CAA42958.1\| (X60429) histone |
| | | | | | | | H3.3 like protein [Arabidopsis thal |
| 1719 | LIB3602-087-Q6-K1-E12 | 417103 | BLASTX | 425 | 1.00E−58 | 98 | HISTONE H3.2, MINOR >gi\|282871\|pir\|\|S24346 |
| | | | | | | | histone H3.3-like protein - Arabidopsis thaliana |
| | | | | | | | >gi\|16324\|emb\|CAA42957.1\| (X60429) histone |
| | | | | | | | H3.3 like protein [Arabidopsis thaliana] |
| | | | | | | | >gi\|404825\|emb\|CAA42958.1\| (X60429) histone |
| | | | | | | | H3.3 like protein [Arabidopsis thal |
| 1720 | LIB3602-007-Q1-K1-C5 | 417103 | BLASTX | 539 | 6.00E−55 | 94 | HISTONE H3.2, MINOR >gi\|282871\|pir\|\|S24346 |
| | | | | | | | histone H3.3-like protein - Arabidopsis thaliana |
| | | | | | | | >gi\|16324\|emb\|CAA42957.1\| (X60429) histone |
| | | | | | | | H3.3 like protein [Arabidopsis thaliana] |
| | | | | | | | >gi\|404825\|emb\|CAA42958.1\| (X60429) histone |
| | | | | | | | H3.3 like protein [Arabidopsis thal |
| 1721 | LIB3602-073-Q1-K1-G3 | 4512679 | BLASTX | 595 | 2.00E−61 | 80 | (AC006931) 60S ribosomal protein L11B |
| | | | | | | | [Arabidopsis thaliana] |
| 1722 | LIB3602-017-Q6-K1-E1 | 4512679 | BLASTX | 484 | 1.00E−48 | 84 | (AC006931) 60S ribosomal protein L11B |
| | | | | | | | [Arabidopsis thaliana] |
| 1723 | LIB3602-009-Q6-K1-H9 | 4512679 | BLASTX | 309 | 3.00E−28 | 82 | (AC006931) 60S ribosomal protein L11B |
| | | | | | | | [Arabidopsis thaliana] |
| 1724 | LIB3602-040-Q6-K1-H4 | 7488407 | BLASTX | 308 | 4.00E−28 | 55 | ubiquinol-cytochrome-c reductase (EC 1.10.2.2) |
| | | | | | | | 14K chain - Arabidopsis thaliana |
| | | | | | | | >gi\|4049349\|emb\|CAA22574.1\| (AL034567) |
| | | | | | | | ubiquinol-cytochrome c reductase-like protein |
| | | | | | | | [Arabidopsis thaliana] |
| | | | | | | | >gi\|7270151\|emb\|CAB79964.1\| (AL161581) |
| | | | | | | | ubiquinol-cytochrome c redu |
| 1725 | LIB3602-108-Q1-K1-H11 | 7488407 | BLASTX | 277 | 2.00E−24 | 53 | ubiquinol-cytochrome-c reductase (EC 1.10.2.2) |
| | | | | | | | 14K chain - Arabidopsis thaliana |
| | | | | | | | >gi\|4049349\|emb\|CAA22574.1\| (AL034567) |
| | | | | | | | ubiquinol-cytochrome c reductase-like protein |
| | | | | | | | [Arabidopsis thaliana] |
| | | | | | | | >gi\|7270151\|emb\|CAB79964.1\| (AL161581) |
| | | | | | | | ubiquinol-cytochrome c redu |
| 1726 | LIB3602-046-Q6-K1-D4 | 7488407 | BLASTX | 236 | 1.00E−19 | 63 | ubiquinol- cytochrome-c reductase (EC 1.10.2.2) |
| | | | | | | | 14K chain - Arabidopsis thaliana |
| | | | | | | | >gi\|4049349\|emb\|CAA22574.1\| (AL034567) |
| | | | | | | | ubiquinol-cytochrome c reductase-like protein |
| | | | | | | | [Arabidopsis thaliana] |
| | | | | | | | >gi\|7270151\|emb\|CAB79964.1\| (AL161581) |
| | | | | | | | ubiquinol-cytochrome c redu |
| 1727 | LIB3602-040-Q6-K1-F1 | 131183 | BLASTX | 315 | 8.00E−29 | 63 | PHOTOSYSTEM I REACTION CENTRE |
| | | | | | | | SUBUNIT III PRECURSOR (LIGHT- |
| | | | | | | | HARVESTING COMPLEX I 17 KD PROTEIN) |
| | | | | | | | (PSI-F) (P21 PROTEIN) >gi\|81244\|pir\|\|S04133 |
| | | | | | | | photosystem I chain III precursor - Chlamydomonas |
| | | | | | | | reinhardtii >gi\|18184\|emb\|CAA31849.1\| (X13495) |
| | | | | | | | P21 precursor prote |
| 1728 | LIB3602-045-Q6-K1-B8 | 131183 | BLASTX | 290 | 7.00E−26 | 61 | PHOTOSYSTEM I REACTION CENTRE |
| | | | | | | | SUBUNIT III PRECURSOR (LIGHT- |
| | | | | | | | HARVESTING COMPLEX I 17 KD PROTEIN) |
| | | | | | | | (PSI-F) (P21 PROTEIN) >gi\|81244\|pir\|\|S04133 |
| | | | | | | | photosystem I chain III precursor - Chlamydomonas |
| | | | | | | | reinhardtii >gi\|18184\|emb\|CAA31849.1\| (X13495) |
| | | | | | | | P21 precursor prote |
| 1729 | LIB3602-114-Q1-K1-C1 | 131183 | BLASTX | 288 | 1.00E−25 | 62 | PHOTOSYSTEM I REACTION CENTRE |
| | | | | | | | SUBUNIT III PRECURSOR (LIGHT- |
| | | | | | | | HARVESTING COMPLEX I 17 KD PROTEIN) |
| | | | | | | | (PSI-F) (P21 PROTEIN) >gi\|81244\|pir\|\|S04133 |
| | | | | | | | photosystem I chain III precursor - Chlamydomonas |
| | | | | | | | reinhardtii >gi\|18184\|emb\|CAA31849.1\| (X13495) |
| | | | | | | | P21 precursor prote |
| 1730 | LIB3602-019-Q6-K1-H12 | 3914658 | BLASTX | 331 | 1.00E−30 | 47 | 50S RIBOSOMAL PROTEIN L24, |
| | | | | | | | CHLOROPLAST PRECURSOR |
| | | | | | | | >gi\|1694974\|emb\|CAA70851.1\| (Y09635) plastid |
| | | | | | | | ribosomal protein [Arabidopsis thaliana] |
| 1731 | LIB3602-025-Q6-K1-F11 | 3914658 | BLASTX | 331 | 1.00E−30 | 47 | 50S RIBOSOMAL PROTEIN L24, |
| | | | | | | | CHLOROPLAST PRECURSOR |
| | | | | | | | >gi\|1694974\|emb\|CAA70851.1\| (Y09635) plastid |
| | | | | | | | ribosomal protein [Arabidopsis thaliana] |
| 1732 | LIB3602-083-Q6-K6-B7 | 3914658 | BLASTX | 331 | 2.00E−30 | 47 | 50S RIBOSOMAL PROTEIN L24, |
| | | | | | | | CHLOROPLAST PRECURSOR |
| | | | | | | | >gi\|1694974\|emb\|CAA70851.1\| (Y09635) plastid |
| | | | | | | | ribosomal protein [Arabidopsis thaliana] |
| 1733 | LIB3602-073-Q1-K1-E6 | 7428008 | BLASTX | 565 | 5.00E−58 | 54 | calcium-dependent protein kinase (EC 2.7.1.—), |
| | | | | | | | calmodulin-independent - maize (fragment) |
| | | | | | | | >gi\|639722\|gb\|AAA61682.1\| (L27484) calcium- |
| | | | | | | | dependent protein kinase [Zea mays] |
| 1734 | LIB3602-093-Q6-K6-F10 | 7428008 | BLASTX | 288 | 2.00E−25 | 45 | calcium-dependent protein kinase (EC 2.7.1.—), |
| | | | | | | | calmodulin-independent - maize (fragment) |
| | | | | | | | >gi\|639722\|gb\|AAA61682.1\| (L27484) calcium- |
| | | | | | | | dependent protein kinase [Zea mays] |
| 1735 | LIB3602-119-Q1-K1-F10 | 7428008 | BLASTX | 273 | 5.00E−24 | 45 | calcium-dependent protein kinase (EC 2.7.1.—), |
| | | | | | | | calmodulin-independent - maize (fragment) |
| | | | | | | | >gi\|639722\|gb\|AAA61682.1\| (L27484) calcium- |
| | | | | | | | dependent protein kinase [Zea mays] |
| 1736 | LIB3602-040-Q6-K1-A5 | 5902365 | BLASTX | 662 | 1.00E−69 | 86 | (AC009322) Putative splicing factor Prp8 |
| | | | | | | | [Arabidopsis thaliana] |
| 1737 | LIB3602-054-Q6-K1-F12 | 5902365 | BLASTX | 177 | 1.00E−12 | 50 | (AC009322) Putative splicing factor Prp8 |
| | | | | | | | [Arabidopsis thaliana] |
| 1738 | LIB3602-056-Q6-K1-D12 | 2492861 | BLASTX | 561 | 1.00E−57 | 77 | GLUTAMATE-1-SEMIALDEHYDE 2,1- |
| | | | | | | | AMINOMUTASE PRECURSOR (GSA) |
| | | | | | | | (GLUTAMATE-1-SEMIALDEHYDE |
| | | | | | | | AMINOTRANSFERASE) (GSA-AT) |
| | | | | | | | >gi\|629466\|pir\|\|S43787 glutamate-1-semialdehyde |
| | | | | | | | 2,1-aminomutase (EC 5.4.3.8) - Chlamydomonas |
| | | | | | | | reinhardtii >gi\|424151\|gb\|AAA18861.1\| (U03632) |
| | | | | | | | gluta |
| 1739 | LIB3602-044-Q6-K1-G6 | 2492861 | BLASTX | 555 | 6.00E−57 | 76 | GLUTAMATE-1-SEMIALDEHYDE 2,1- |
| | | | | | | | AMINOMUTASE PRECURSOR (GSA) |
| | | | | | | | (GLUTAMATE-1-SEMIALDEHYDE |
| | | | | | | | AMINOTRANSFERASE) (GSA-AT) |
| | | | | | | | >gi\|629466\|pir\|\|S43787 glutamate-1-semialdehyde |
| | | | | | | | 2,1-aminomutase (EC 5.4.3.8) - Chlamydomonas |
| | | | | | | | reinhardtii >gi\|424151\|gb\|AAA18861.1\| (U03632) |
| | | | | | | | gluta |
| 1740 | LIB3602-035-Q1-K1-B11 | 6647650 | BLASTX | 504 | 8.00E−54 | 62 | NADH-UBIQUINONE OXIDOREDUCTASE 24 KD |
| | | | | | | | SUBUNIT PRECURSOR |
| | | | | | | | >gi\|7427765\|pir\|\|T01091 NADH dehydrogenase |
| | | | | | | | (ubiquinone) (EC 1.6.5.3) 24K chain homolog - |
| | | | | | | | Arabidopsis thaliana |
| | | | | | | | >gi\|3892051\|gb\|AAC78260.1\|AAC78260 |
| | | | | | | | (AC002330) predicted NADH dehydrogenase 24 kD |
| | | | | | | | subunit [ |
| 1741 | LIB3602-034-Q6-K1-B11 | 6647650 | BLASTX | 490 | 3.00E−49 | 61 | NADH-UBIQUINONE OXIDOREDUCTASE 24 KD |
| | | | | | | | SUBUNIT PRECURSOR |
| | | | | | | | >gi\|7427765\|pir\|\|T01091 NADH dehydrogenase |
| | | | | | | | (ubiquinone) (EC 1.6.5.3) 24K chain homolog - |
| | | | | | | | Arabidopsis thaliana |
| | | | | | | | >gi\|3892051\|gb\|AAC78260.1\|AAC78260 |
| | | | | | | | (AC002330) predicted NADH dehydrogenase 24 kD |
| | | | | | | | subunit [ |
| 1742 | LIB3602-106-Q1-K1-B10 | 7438140 | BLASTX | 521 | 8.00E−53 | 67 | acetyl-CoA carboxylase (EC 6.4.1.2), biotin |
| | | | | | | | carboxylase chain precursor - soybean |
| | | | | | | | >gi\|3219361\|gb\|AAC23573.1\| (AF068249) biotin |
| | | | | | | | carboxylase precursor [Glycine max] |
| 1743 | LIB3602-100-Q1-K1-B10 | 7438140 | BLASTX | 485 | 1.00E−48 | 65 | acetyl-CoA carboxylase (EC 6.4.1.2), biotin |
| | | | | | | | carboxylase chain precursor - soybean |
| | | | | | | | >gi\|3219361\|gb\|AAC23573.1\| (AF068249) biotin |
| | | | | | | | carboxylase precursor [Glycine max] |
| 1744 | LIB3602-085-Q6-K1-F9 | 115575 | BLASTX | 447 | 4.00E−44 | 51 | PHOSPHOENOLPYRUVATE CARBOXYLASE 1 |
| | | | | | | | (PEPCASE) >gi\|68032\|pir\|\|QYIX1 |
| | | | | | | | phosphoenolpyruvate carboxylase (EC 4.1.1.31) 1 - |
| | | | | | | | common ice plant >gi\|19536\|emb\|CAA31956.1\| |
| | | | | | | | (X13660) phosphoenolpyruvate carboxylase |
| | | | | | | | (AA 1-966) |
| | | | | | | | [Mesembryanthemum crystallinum] |
| | | | | | | | >gi\|22559\|e |
| 1745 | LIB3602-022-Q6-K1-A2 | 115575 | BLASTX | 338 | 1.00E−31 | 50 | PHOSPHOENOLPYRUVATE CARBOXYLASE 1 |
| | | | | | | | (PEPCASE) >gi\|68032\|pir\|\|QYIX1 |
| | | | | | | | phosphoenolpyruvate carboxylase (EC 4.1.1.31) 1 - |
| | | | | | | | common ice plant >gi\|19536\|emb\|CAA31956.1\| |
| | | | | | | | (X13660) phosphoenolpyruvate carboxylase |
| | | | | | | | (AA 1-966) |
| | | | | | | | [Mesembryanthemum crystallinum] |
| | | | | | | | >gi\|22559\|e |
| 1746 | LIB3602-078-Q6-K6-C7 | 7437844 | BLASTX | 382 | 2.00E−36 | 46 | probable long-chain-fatty-acid--CoA ligase (EC |
| | | | | | | | 6.2.1.3) isoform 1 - rape |
| | | | | | | | >gi\|1617268\|emb\|CAA96523.1\| (Z72153) acyl CoA |
| | | | | | | | synthetase [Brassica napus] |
| 1747 | LIB3602-038-Q6-K1-B7 | 7437844 | BLASTX | 301 | 4.00E−27 | 47 | probable long-chain-fatty-acid--CoA ligase (EC |
| | | | | | | | 6.2.1.3) isoform 1 - rape |
| | | | | | | | >gi\|1617268\|emb\|CAA96523.1\| (Z72153) acyl CoA |
| | | | | | | | synthetase [Brassica napus] |
| 1748 | LIB3602-040-Q6-K1-G4 | 166985 | BLASTX | 532 | 3.00E−54 | 60 | (J04202) alpha-amylase [Hordeum vulgare] |
| 1749 | LIB3602-056-Q6-K1-E11 | 166985 | BLASTX | 500 | 1.00E−50 | 64 | (J04202) alpha-amylase [Hordeum vulgare] |
| 1750 | LIB3602-085-Q6-K1-D6 | 5708095 | BLASTX | 524 | 3.00E−53 | 59 | (AJ245502) ATP synthase gamma chain, |
| | | | | | | | chloroplast precursor [Arabidopsis thaliana] |
| 1751 | LIB3602-063-Q1-K6-E7 | 5708095 | BLASTX | 493 | 1.00E−49 | 55 | (AJ245502) ATP synthase gamma chain, |
| | | | | | | | chloroplast precursor [Arabidopsis thaliana] |
| 1752 | LIB3602-014-Q6-K1-H2 | 7481092 | BLASTX | 273 | 7.00E−24 | 52 | probable oxidoreductase - Streptomyces coelicolor |
| | | | | | | | >gi\|2815335\|emb\|CAA16459.1\| (AL021529) |
| | | | | | | | SC10A5.27c, possible oxidoreductase, len: 326 aa; |
| | | | | | | | so me similarity to many members of the SHORT- |
| | | | | | | | CHAIN DEHYDROGEN ASES/REDUCTASES |
| | | | | | | | FAMILY (SDR) eg. YGFF_ECOLI P52037 hy |
| 1753 | LIB3602-058-Q6-K1-G9 | 7481092 | BLASTX | 191 | 2.00E−14 | 40 | probable oxidoreductase - Streptomyces coelicolor |
| | | | | | | | >gi\|2815335\|emb\|CAA16459.1\| (AL021529) |
| | | | | | | | SC10A5.27c, possible oxidoreductase, len: 326 aa; |
| | | | | | | | so me similarity to many members of the SHORT- |
| | | | | | | | CHAIN DEHYDROGEN ASES/REDUCTASES |
| | | | | | | | FAMILY (SDR) eg. YGFF_ECOLI P52037 hy |
| 1754 | LIB3602-073-Q1-K1-A3 | 5902400 | BLASTX | 419 | 7.00E−41 | 51 | (AC008148) Unknown protein [Arabidopsis |
| | | | | | | | thaliana] |
| 1755 | LIB3602-010-Q6-K1-G11 | 5902400 | BLASTX | 410 | 7.00E−40 | 50 | (AC008148) Unknown protein [Arabidopsis |
| | | | | | | | thaliana] |
| 1756 | LIB3602-019-Q6-K1-G6 | 6403490 | BLASTX | 375 | 9.00E−36 | 51 | (AC010871) putative SCO1 protein [Arabidopsis |
| | | | | | | | thaliana] |
| 1757 | LIB3602-057-Q6-K1-E4 | 6403490 | BLASTX | 321 | 2.00E−29 | 60 | (AC010871) putative SCO1 protein [Arabidopsis |
| | | | | | | | thaliana] |
| 1758 | LIB3602-041-Q6-K1-D10 | 322391 | BLASTX | 346 | 2.00E−32 | 51 | chlorophyll a/b-binding protein Lhcb5 - Scotch pine |
| | | | | | | | >gi\|22750\|emb\|CAA78900.1\| (Z16408) Lhcb5 |
| | | | | | | | protein [Pinus sylvestris] |
| | | | | | | | >gi\|1093837\|prf\|\|2104448A Lhcb5 gene [Pinus |
| | | | | | | | sylvestris] |
| 1759 | LIB3602-072-Q1-K1-D5 | 322391 | BLASTX | 346 | 3.00E−32 | 51 | chlorophyll a/b-binding protein Lhcb5 - Scotch pine |
| | | | | | | | >gi\|22750\|emb\|CAA78900.1\| (Z16408) Lhcb5 |
| | | | | | | | protein [Pinus sylvestris] |
| | | | | | | | >gi\|1093837\|prf\|\|2104448A Lhcb5 gene [Pinus |
| | | | | | | | sylvestris] |
| 1760 | LIB3602-047-Q6-K1-F10 | 2494745 | BLASTX | 385 | 5.00E−37 | 81 | GLUTAMINE SYNTHETASE, CHLOROPLAST |
| | | | | | | | PRECURSOR (GLUTAMATE-AMMONIA |
| | | | | | | | LIGASE) (GS2) >gi\|7437923\|pir\|\|T08090 probable |
| | | | | | | | glutamate-ammonia ligase (EC 6.3.1.2), chloroplast - |
| | | | | | | | Chlamydomonas reinhardtii |
| | | | | | | | >gi\|1353878\|gb\|AAB01818.1\| (U46208) glutamine |
| | | | | | | | synthetase [Chlamy |
| 1761 | LIB3602-090-Q6-K6-D5 | 2494745 | BLASTX | 256 | 2.00E−22 | 78 | GLUTAMINE SYNTHETASE, CHLOROPLAST |
| | | | | | | | PRECURSOR (GLUTAMATE-AMMONIA |
| | | | | | | | LIGASE) (GS2) >gi\|7437923\|pir\|\|T08090 probable |
| | | | | | | | glutamate-ammonia ligase (EC 6.3.1.2), chloroplast - |
| | | | | | | | Chlamydomonas reinhardtii |
| | | | | | | | >gi\|1353878\|gb\|AAB01818.1\| (U46208) glutamine |
| | | | | | | | synthetase [Chlamy |
| 1762 | LIB3602-062-Q6-K1-B4 | 6671953 | BLASTX | 401 | 8.00E−39 | 62 | (AC016795) putative pre-rRNA processing protein, |
| | | | | | | | 5′ partial [Arabidopsis thaliana] |
| 1763 | LIB3602-062-Q6-K1-B5 | 6671953 | BLASTX | 245 | 1.00E−20 | 53 | (AC016795) putative pre-rRNA processing protein, |
| | | | | | | | 5′ partial [Arabidopsis thaliana] |
| 1764 | LIB3602-074-Q1-K1-E4 | 1085669 | BLASTX | 197 | 6.00E−15 | 38 | methylcrotonoyl-CoA carboxylase (EC 6.4.1.4) |
| | | | | | | | biotin-binding chain - tomato (fragment) |
| | | | | | | | >gi\|497181\|gb\|AAA19157.1\| (U07745) biotin- |
| | | | | | | | containing subunit of methylcrotonyl-CoA |
| | | | | | | | carboxylase [Lycopersicon esculentum] |
| 1765 | LIB3602-087-Q6-K1-H6 | 1085669 | BLASTX | 197 | 7.00E−15 | 38 | methylcrotonoyl-CoA carboxylase (EC 6.4.1.4) |
| | | | | | | | biotin-binding chain - tomato (fragment) |
| | | | | | | | >gi\|497181\|gb\|AAA19157.1\| (U07745) biotin- |
| | | | | | | | containing subunit of methylcrotonyl-CoA |
| | | | | | | | carboxylase [Lycopersicon esculentum] |
| 1766 | LIB3602-077-Q6-K6-H8 | 1730560 | BLASTX | 226 | 3.00E−18 | 63 | ALPHA-GLUCAN PHOSPHORYLASE, H |
| | | | | | | | ISOZYME (STARCH PHOSPHORYLASE H) |
| | | | | | | | >gi\|7433824\|pir\|\|T12091 starch phosphorylase (EC |
| | | | | | | | 2.4.1.1) H, cytosolic isoform - fava bean |
| | | | | | | | >gi\|510932\|emb\|CAA84494.1\| (Z35117) alpha 1,4- |
| | | | | | | | glucan phosphorylase type H [Vicia faba] |
| 1767 | LIB3602-088-Q6-K6-D10 | 1730560 | BLASTX | 226 | 3.00E−18 | 63 | ALPHA-GLUCAN PHOSPHORYLASE, H |
| | | | | | | | ISOZYME (STARCH PHOSPHORYLASE H) |
| | | | | | | | >gi\|7433824\|pir\|\|T12091 starch phosphorylase (EC |
| | | | | | | | 2.4.1.1) H, cytosolic isoform - fava bean |
| | | | | | | | >gi\|510932\|emb\|CAA84494.1\| (Z35117) alpha 1,4- |
| | | | | | | | glucan phosphorylase type H [Vicia faba] |
| 1768 | LIB3602-016-Q6-K1-D10 | 7487536 | BLASTX | 332 | 8.00E−31 | 48 | hypothetical protein T29H11.60 - Arabidopsis |
| | | | | | | | thaliana >gi\|4678346\|emb\|CAB41156.1\| |
| | | | | | | | (AL049659) putative protein [Arabidopsis thaliana] |
| 1769 | LIB3602-017-Q6-K1-B4 | 7487536 | BLASTX | 182 | 3.00E−13 | 72 | hypothetical protein T29H11.60 - Arabidopsis |
| | | | | | | | thaliana >gi\|4678346\|emb\|CAB41156.1\| |
| | | | | | | | (AL049659) putative protein [Arabidopsis thaliana] |
| 1770 | LIB3602-025-Q6-K1-A12 | 6468487 | BLASTX | 352 | 4.00E−33 | 68 | (AJ251083) putative cytosolic malate |
| | | | | | | | dehydrogenase [Beta vulgaris] |
| 1771 | LIB3602-037-Q6-K1-C12 | 6468487 | BLASTX | 235 | 2.00E−19 | 71 | (AJ251083) putative cytosolic malate |
| | | | | | | | dehydrogenase [Beta vulgaris] |
| 1772 | LIB3602-050-Q6-K1-B10 | 167408 | BLASTN | 38 | 1.00E−11 | 91 | C. reinhardtii encoding chlorophyll a/b-binding |
| | | | | | | | protein (cabII-1) gene, complete cds |
| 1773 | LIB3602-019-Q6-K1-A6 | 167408 | BLASTN | 33 | 9.00E−09 | 89 | C. reinhardtii encoding chlorophyll a/b-binding |
| | | | | | | | protein (cabII-1) gene, complete cds |
| 1774 | LIB3602-011-Q6-K1-D11 | 4115942 | BLASTX | 212 | 1.00E−16 | 50 | (AF118223) contains similarity to eukaryotic |
| | | | | | | | protein kinase domains (Pfam: PF00069, |
| | | | | | | | score = 238.4, E = 1e−67, N = 1) and EF |
| | | | | | | | hand domains |
| | | | | | | | (Pfam: PF00036, score = 109.0, E = 8.9e−29, N = 5) |
| | | | | | | | [Arabidopsis thaliana] |
| | | | | | | | >gi\|7267229\|emb\|CAB80836.1\| (AL161501) |
| | | | | | | | putative calcium |
| 1775 | LIB3602-053-Q6-K1-B11 | 4115942 | BLASTX | 153 | 1.00E−09 | 49 | (AF118223) contains similarity to eukaryotic |
| | | | | | | | protein kinase domains (Pfam: PF00069, |
| | | | | | | | score = 238.4, E = 1e−67, N = 1) and EF |
| | | | | | | | hand domains |
| | | | | | | | (Pfam: PF00036, score = 109.0, E = 8.9e−29, N = 5) |
| | | | | | | | [Arabidopsis thaliana] |
| | | | | | | | >gi\|7267229\|emb\|CAB80836.1\| (AL161501) |
| | | | | | | | putative calcium |
| 1776 | LIB3602-064-Q1-K6-F10 | 7485715 | BLASTX | 288 | 1.00E−25 | 59 | hypothetical protein F18E5.180 - Arabidopsis |
| | | | | | | | thaliana >gi\|3080400\|emb\|CAA18720.1\| |
| | | | | | | | (AL022603) putative protein [Arabidopsis thaliana] |
| | | | | | | | >gi\|4455264\|emb\|CAB36800.1\| (AL035527) |
| | | | | | | | putative protein [Arabidopsis thaliana] |
| | | | | | | | >gi\|7268953\|emb\|CAB81263.1\| (AL161555) puta |
| 1777 | LIB3602-059-Q6-K1-B7 | 7485715 | BLASTX | 173 | 2.00E−12 | 50 | hypothetical protein F18E5.180 - Arabidopsis |
| | | | | | | | thaliana >gi\|3080400\|emb\|CAA18720.1\| |
| | | | | | | | (AL022603) putative protein [Arabidopsis thaliana] |
| | | | | | | | >gi\|4455264\|emb\|CAB36800.1\| (AL035527) |
| | | | | | | | putative protein [Arabidopsis thaliana] |
| | | | | | | | >gi\|7268953\|emb\|CAB81263.1\| (AL161555) puta |
| 1778 | LIB3602-053-Q6-K1-G7 | 4514360 | BLASTX | 234 | 2.00E−19 | 63 | (AB013377) BsaA [Bacillus halodurans] |
| 1779 | LIB3602-055-Q6-K1-D11 | 4514360 | BLASTX | 216 | 3.00E−17 | 68 | (AB013377) BsaA [Bacillus halodurans] |
| 1780 | LIB3602-109-Q1-K1-H8 | 2232057 | BLASTX | 230 | 9.00E−19 | 59 | (AF000177) CaSm [Homo sapiens] |
| | | | | | | | >gi\|5262854\|emb\|CAB45865.1\| (AJ238094) Lsm1 |
| | | | | | | | protein [Homo sapiens] |
| 1781 | LIB3602-083-Q6-K6-H8 | 2232057 | BLASTX | 230 | 1.00E−18 | 59 | (AF000177) CaSm [Homo sapiens] |
| | | | | | | | >gi\|5262854\|emb\|CAB45865.1\| (AJ238094) Lsm1 |
| | | | | | | | protein [Homo sapiens] |
| 1782 | LIB3602-025-Q6-K1-C4 | 2462781 | BLASTX | 617 | 4.00E−64 | 67 | (U73175) carbamoyl phosphate synthetase small |
| | | | | | | | subunit [Arabidopsis thaliana] |
| 1783 | LIB3602-002-P1-K6-H9 | 2462781 | BLASTX | 254 | 1.00E−21 | 62 | (U73175) carbamoyl phosphate synthetase small |
| | | | | | | | subunit [Arabidopsis thaliana] |
| 1784 | LIB3602-093-Q6-K6-C8 | 7381458 | BLASTX | 472 | 4.00E−47 | 56 | (AF210322) UMP synthase [Oryza sativa] |
| 1785 | LIB3602-104-Q1-K1-C8 | 7381458 | BLASTX | 437 | 5.00E−43 | 57 | (AF210322) UMP synthase [Oryza sativa] |
| 1786 | LIB3602-104-Q1-K1-G9 | 1419687 | BLASTX | 425 | 1.00E−41 | 50 | (X98825) 40-kDa V-ATPase subunit [Manduca |
| | | | | | | | sexta] |
| 1787 | LIB3602-093-Q6-K6-G9 | 1419687 | BLASTX | 424 | 2.00E−41 | 50 | (X98825) 40-kDa V-ATPase subunit [Manduca |
| | | | | | | | sexta] |
| 1788 | LIB3602-095-Q6-K6-H1 | 2117676 | BLASTX | 692 | 7.00E−73 | 65 | superoxide dismutase (EC 1.15.1.1) (Fe) precursor - |
| | | | | | | | Chlamydomonas reinhardtii |
| | | | | | | | >gi\|726293\|gb\|AAB04944.1\| (U22416) superoxide |
| | | | | | | | dismutase precursor [Chlamydomonas reinhardtii] |
| 1789 | LIB3602-077-Q6-K6-F8 | 2117676 | BLASTX | 421 | 1.00E−42 | 66 | superoxide dismutase (EC 1.15.1.1) (Fe) precursor - |
| | | | | | | | Chlamydomonas reinhardtii |
| | | | | | | | >gi\|726293\|gb\|AAB04944.1\| (U22416) superoxide |
| | | | | | | | dismutase precursor [Chlamydomonas reinhardtii] |
| 1790 | LIB3602-059-Q6-K1-B1 | 6466939 | BLASTX | 177 | 1.00E−12 | 49 | (AC009176) unknown protein, 5′ partial |
| | | | | | | | [Arabidopsis thaliana] |
| 1791 | LIB3602-059-Q6-K1-B2 | 6466939 | BLASTX | 175 | 3.00E−12 | 47 | (AC009176) unknown protein, 5′ partial |
| | | | | | | | [Arabidopsis thaliana] |
| 1792 | LIB3602-067-Q1-K1-A8 | 6911856 | BLASTX | 248 | 2.00E−30 | 88 | (AL138649) putative protein [Arabidopsis thaliana] |
| 1793 | LIB3602-084-Q6-K1-G11 | 6911856 | BLASTX | 193 | 8.00E−26 | 81 | (AL138649) putative protein [Arabidopsis thaliana] |
| 1794 | LIB3602-072-Q1-K1-B8 | 130264 | BLASTX | 231 | 2.00E−19 | 77 | PLASTOCYANIN PRECURSOR (PC6-2) |
| | | | | | | | >gi\|99419\|pir\|\|A36569 plastocyanin precursor - |
| | | | | | | | Chlamydomonas reinhardtii |
| | | | | | | | >gi\|167401\|gb\|AAA33078.1\| (J05524) |
| | | | | | | | apoplastocyanin (PC6-2) precursor |
| | | | | | | | [Chlamydomonas reinhardtii] |
| | | | | | | | >gi\|167430\|gb\|AAA33089.1\| (L07282) plastocyanin |
| | | | | | | | [Chlam |
| 1795 | LIB3602-040-Q6-K1-F8 | 130264 | BLASTX | 227 | 6.00E−19 | 78 | PLASTOCYANIN PRECURSOR (PC6-2) |
| | | | | | | | >gi\|99419\|pir\|\|A36569 plastocyanin precursor - |
| | | | | | | | Chlamydomonas reinhardtii |
| | | | | | | | >gi\|167401\|gb\|AAA33078.1\| (J05524) |
| | | | | | | | apoplastocyanin (PC6-2) precursor |
| | | | | | | | [Chlamydomonas reinhardtii] |
| | | | | | | | >gi\|167430\|gb\|AAA33089.1\| (L07282) plastocyanin |
| | | | | | | | [Chlam |
| 1796 | LIB3602-060-Q6-K1-H1 | 4530100 | BLASTX | 345 | 3.00E−32 | 43 | (AF063418) elongation factor 1-alpha [Enchytraeus |
| | | | | | | | sp. ‘Enc’] |
| 1797 | LIB3602-063-Q1-K6-F10 | 4530100 | BLASTX | 272 | 8.00E−24 | 42 | (AF063418) elongation factor 1-alpha [Enchytraeus |
| | | | | | | | sp. ‘Enc’] |
| 1798 | LIB3602-059-Q6-K1-G2 | 6907102 | BLASTX | 218 | 2.00E−17 | 66 | (AP001129) ESTs |
| | | | | | | | AU032852(S15362), AU070591(S5037) correspond |
| | | | | | | | to a region of the predicted gene.; Similar to |
| | | | | | | | Caenorhabditis elegans cosmid T10C6. (Z93388) |
| | | | | | | | [Oryza sativa] |
| 1799 | LIB3602-059-Q6-K1-G3 | 6907102 | BLASTX | 189 | 5.00E−14 | 45 | (AP001129) ESTs |
| | | | | | | | AU032852(S15362), AU070591(S5037) correspond |
| | | | | | | | to a region of the predicted gene.; Similar to |
| | | | | | | | Caenorhabditis elegans cosmid T10C6. (Z93388) |
| | | | | | | | [Oryza sativa] |
| 1800 | LIB3602-070-Q1-K1-D8 | 7340289 | BLASTX | 251 | 4.00E−21 | 44 | (AF245222) OP1 [Cucumis sativus] |
| 1801 | LIB3602-076-Q6-K6-B9 | 7340289 | BLASTX | 251 | 4.00E−21 | 44 | (AF245222) OP1 [Cucumis sativus] |
| 1802 | LIB3602-070-Q1-K1-A5 | 4972728 | BLASTX | 529 | 9.00E−54 | 57 | (AF132171) unknown [Drosophila melanogaster] |
| | | | | | | | >gi\|7300952\|gb\|AAF56091.1\| (AE003741) |
| | | | | | | | BcDNA: LD21504 gene product [Drosophila |
| | | | | | | | melanogaster] |
| 1803 | LIB3602-001-P1-K6-F12 | 4972728 | BLASTX | 382 | 1.00E−36 | 55 | (AF132171) unknown [Drosophila melanogaster] |
| | | | | | | | >gi\|7300952\|gb\|AAF56091.1\| (AE003741) |
| | | | | | | | BcDNA: LD21504 gene product [Drosophila |
| | | | | | | | melanogaster] |
| 1804 | LIB3602-045-Q6-K1-D11 | 914284 | BLASTX | 232 | 4.00E−19 | 84 | light-harvesting complex b type 3, Lhcb3 [Ginkgo |
| | | | | | | | biloba, 3-4 week old seedlings, Peptide Partial, 132 |
| | | | | | | | aa] |
| 1805 | LIB3602-058-Q6-K1-C10 | 914284 | BLASTX | 232 | 4.00E−19 | 84 | light-harvesting complex b type 3, Lhcb3 [Ginkgo |
| | | | | | | | biloba, 3-4 week old seedlings, Peptide Partial, 132 |
| | | | | | | | aa] |
| 1806 | LIB3602-076-Q6-K6-C11 | 4731372 | BLASTX | 191 | 4.00E−14 | 46 | (AF133838) papain-like cysteine protease |
| | | | | | | | [Sandersonia aurantiaca] |
| 1807 | LIB3602-112-Q1-K1-H2 | 4731372 | BLASTX | 175 | 3.00E−12 | 44 | (AF133838) papain-like cysteine protease |
| | | | | | | | [Sandersonia aurantiaca] |
| 1808 | LIB3602-050-Q6-K1-A12 | 6599226 | BLASTX | 346 | 2.00E−32 | 46 | (AL133613) hypothetical protein [Homo sapiens] |
| 1809 | LIB3602-050-Q6-K1-A11 | 6599226 | BLASTX | 305 | 1.00E−27 | 42 | (AL133613) hypothetical protein [Homo sapiens] |
| 1810 | LIB3602-115-Q1-K1-D7 | 7433571 | BLASTX | 636 | 2.00E−66 | 67 | probable |
| | | | | | | | phosphoribosylaminoimidazolecarboxamide |
| | | | | | | | formyltransferase (EC 2.1.2.3) - Arabidopsis |
| | | | | | | | thaliana >gi\|3033398\|gb\|AAC12842.1\| (AC004238) |
| | | | | | | | putative |
| | | | | | | | phosphoribosylaminoimidazolecarboxamide |
| | | | | | | | formyltransferase [Arabidopsis thaliana] |
| 1811 | LIB3602-115-Q1-K1-A7 | 7433571 | BLASTX | 550 | 2.00E−56 | 65 | probable |
| | | | | | | | phosphoribosylaminoimidazolecarboxamide |
| | | | | | | | formyltransferase (EC 2.1.2.3) - Arabidopsis |
| | | | | | | | thaliana >gi\|3033398\|gb\|AAC12842.1\| (AC004238) |
| | | | | | | | putative |
| | | | | | | | phosphoribosylaminoimidazolecarboxamide |
| | | | | | | | formyltransferase [Arabidopsis thaliana] |
| 1812 | LIB3602-005-Q1-K1-C11 | 3915430 | BLASTX | 280 | 1.00E−24 | 59 | HYPOTHETICAL 11.3 KD PROTEIN IN RIBE- |
| | | | | | | | PYKF INTERGENIC REGION PRECURSOR |
| | | | | | | | >gi\|7459798\|pir\|\|C64924 hypothetical protein b1667 - |
| | | | | | | | >gi\|1549278\|gb\|AAB47943.1\| |
| | | | | | | | (U68703) hypothetical protein [Escherichia coli] |
| | | | | | | | >gi\|1787956\|gb\|AAC74737.1\| (AE000262) o |
| 1813 | LIB3602-078-Q6-K6-C3 | 3915430 | BLASTX | 267 | 3.00E−23 | 60 | HYPOTHETICAL 11.3 KD PROTEIN IN RIBE- |
| | | | | | | | PYKF INTERGENIC REGION PRECURSOR |
| | | | | | | | >gi\|7459798\|pir\|\|C64924 hypothetical protein b1667 - |
| | | | | | | | Escherichia coli >gi\|1549278\|gb\|AAB47943.1\| |
| | | | | | | | (U68703) hypothetical protein [Escherichia coli] |
| | | | | | | | >gi\|1787956\|gb\|AAC74737.1\| (AE000262) o |
| 1814 | LIB3602-109-Q1-K1-B2 | 7484357 | BLASTX | 515 | 9.00E−63 | 83 | carbonate dehydratase (EC 4.2.1.1) 2 beta, |
| | | | | | | | mitochondrial - Chlamydomonas reinhardtii |
| | | | | | | | >gi\|1737488\|gb\|AAC49888.1\| (U80805) beta- |
| | | | | | | | carbonic anhydrase [Chlamydomonas reinhardtii] |
| 1815 | LIB3602-040-Q6-K1-F9 | 7484357 | BLASTX | 233 | 3.00E−19 | 74 | carbonate dehydratase (EC 4.2.1.1) 2 beta, |
| | | | | | | | mitochondrial - Chlamydomonas reinhardtii |
| | | | | | | | >gi\|1737488\|gb\|AAC49888.1\| (U80805) beta- |
| | | | | | | | carbonic anhydrase [Chlamydomonas reinhardtii] |
| 1816 | LIB3602-004-Q1-K1-D9 | 7298333 | BLASTX | 185 | 2.00E−13 | 32 | (AE003652) CG17905 gene product [Drosophila |
| | | | | | | | melanogaster] |
| 1817 | LIB3602-085-Q6-K1-E3 | 7298333 | BLASTX | 171 | 9.00E−12 | 29 | (AE003652) CG17905 gene product [Drosophila |
| | | | | | | | melanogaster] |
| 1818 | LIB3602-029-Q6-K1-A4 | 7435330 | BLASTX | 412 | 4.00E−40 | 48 | alpha-amylase (EC 3.2.1.1) - Arabidopsis thaliana |
| | | | | | | | >gi\|4455243\|emb\|CAB36742.1\| (AL035523) alpha- |
| | | | | | | | amylase-like protein [Arabidopsis thaliana] |
| | | | | | | | >gi\|7269350\|emb\|CAB79409.1\| (AL161562) alpha- |
| | | | | | | | amylase-like protein [Arabidopsis thaliana] |
| 1819 | LIB3602-051-Q6-K1-F9 | 7435330 | BLASTX | 401 | 7.00E−39 | 50 | alpha-amylase (EC 3.2.1.1) - Arabidopsis thaliana |
| | | | | | | | >gi\|4455243\|emb\|CAB36742.1\| (AL035523) alpha- |
| | | | | | | | amylase-like protein [Arabidopsis thaliana] |
| | | | | | | | >gi\|7269350\|emb\|CAB79409.1\| (AL161562) alpha- |
| | | | | | | | amylase-like protein [Arabidopsis thaliana] |
| 1820 | LIB3602-108-Q1-K1-F10 | 7443228 | BLASTX | 188 | 6.00E−18 | 63 | chlorophyll a/b-binding protein F24G24.140 - |
| | | | | | | | Arabidopsis thaliana |
| | | | | | | | >gi\|4538963\|emb\|CAB39787.1\| (AL049488) |
| | | | | | | | chlorophyll a/b-binding protein-like [Arabidopsis |
| | | | | | | | thaliana] |
| | | | | | | | >gi\|4741958\|gb\|AAD28776.1\|AF134129_1 |
| | | | | | | | (AF134129) Lhcb5 protein [Arabidopsis thaliana] |
| | | | | | | | >gi\|7 |
| 1821 | LIB3602-052-Q6-K1-E6 | 7443228 | BLASTX | 163 | 4.00E−11 | 59 | chlorophyll a/b-binding protein F24G24.140 - |
| | | | | | | | Arabidopsis thaliana |
| | | | | | | | >gi\|4538963\|emb\|CAB39787.1\| (AL049488) |
| | | | | | | | chlorophyll a/b-binding protein-like [Arabidopsis |
| | | | | | | | thaliana] |
| | | | | | | | >gi\|4741958\|gb\|AAD28776.1\|AF134129_1 |
| | | | | | | | (AF134129) Lhcb5 protein [Arabidopsis thaliana] |
| | | | | | | | >gi\|7 |
| 1822 | LIB3602-014-Q6-K1-H11 | 7442279 | BLASTX | 295 | 2.00E−26 | 60 | probable acyl carrier protein T8F5.6 - Arabidopsis |
| | | | | | | | thaliana >gi\|3335337\|gb\|AAC27139.1\| (AC004512) |
| | | | | | | | Similar to acyl carrier protein, mitochondrial |
| | | | | | | | precursor (ACP) NADH-ubiquinone oxidoreductase |
| | | | | | | | 9.6 KD subunit (MYACP-1), gb\|L23574 from |
| | | | | | | | A. thaliana. ESTs gb\| |
| 1823 | LIB3602-044-Q6-K1-E5 | 7442279 | BLASTX | 283 | 5.00E−25 | 67 | probable acyl carrier protein T8F5.6 - Arabidopsis |
| | | | | | | | thaliana >gi\|3335337\|gb\|AAC27139.1\| (AC004512) |
| | | | | | | | Similar to acyl carrier protein, mitochondrial |
| | | | | | | | precursor (ACP) NADH-ubiquinone oxidoreductase |
| | | | | | | | 9.6 KD subunit (MYACP-1), gb\|L23574 from |
| | | | | | | | A. thaliana. ESTs gb\| |
| 1824 | LIB3602-113-Q1-K1-E4 | 4558549 | BLASTX | 710 | 5.00E−75 | 71 | (AC007138) putative SecA-type chloroplast protein |
| | | | | | | | transport factor [Arabidopsis thaliana] |
| | | | | | | | >gi\|7268223\|emb\|CAB77750.1\| (AL161492) |
| | | | | | | | putative SecA-type chloroplast protein transport |
| | | | | | | | factor [Arabidopsis thaliana] |
| 1825 | LIB3602-114-Q1-K1-F7 | 4558549 | BLASTX | 700 | 8.00E−74 | 71 | (AC007138) putative SecA-type chloroplast protein |
| | | | | | | | transport factor [Arabidopsis thaliana] |
| | | | | | | | >gi\|7268223\|emb\|CAB77750.1\| (AL161492) |
| | | | | | | | putative SecA-type chloroplast protein transport |
| | | | | | | | factor [Arabidopsis thaliana] |
| 1826 | LIB3602-103-Q1-K1-F7 | 3107919 | BLASTX | 792 | 1.00E−84 | 95 | (AB013098) actin [Nannochloris bacillaris] |
| 1827 | LIB3602-109-Q1-K1-G10 | 3107919 | BLASTX | 672 | 1.00E−70 | 90 | (AB013098) actin [Nannochloris bacillaris] |
| 1828 | LIB3602-084-Q6-K1-H9 | 6984130 | BLASTX | 688 | 4.00E−73 | 82 | (AF227620) 60S ribosomal protein L10 [Euphorbia |
| | | | | | | | esula] |
| 1829 | LIB3602-007-Q1-K1-G2 | 6984130 | BLASTX | 264 | 4.00E−46 | 94 | (AF227620) 60S ribosomal protein L10 [Euphorbia |
| | | | | | | | esula] |
| 1830 | LIB3602-072-Q1-K1-A8 | 3122234 | BLASTX | 477 | 1.00E−47 | 63 | EUKARYOTIC TRANSLATION INITIATION |
| | | | | | | | FACTOR 2 BETA SUBUNIT (EIF-2-BETA) (P38) |
| | | | | | | | >gi\|7450843\|pir\|\|T06992 translation initiation factor |
| | | | | | | | eIF-2 beta chain - wheat |
| | | | | | | | >gi\|2306768\|gb\|AAB65774.1\| (U87163) eIF-2 beta |
| | | | | | | | subunit [Triticum aestivum] |
| 1831 | LIB3602-109-Q1-K1-D12 | 3122234 | BLASTX | 210 | 8.00E−31 | 59 | EUKARYOTIC TRANSLATION INITIATION |
| | | | | | | | FACTOR 2 BETA SUBUNIT (EIF-2-BETA) (P38) |
| | | | | | | | >gi\|7450843\|pir\|\|T06992 translation initiation factor |
| | | | | | | | eIF-2 beta chain - wheat |
| | | | | | | | >gi\|2306768\|gb\|AAB65774.1\| (U87163) eIF-2 beta |
| | | | | | | | subunit [Triticum aestivum] |
| 1832 | LIB3602-034-Q6-K1-C7 | 6523090 | BLASTX | 296 | 1.00E−26 | 71 | (AL133315) transcription factor Hap5a |
| | | | | | | | [Arabidopsis thaliana] |
| 1833 | LIB3602-035-Q1-K1-C7 | 6523090 | BLASTX | 291 | 5.00E−26 | 71 | (AL133315) transcription factor Hap5a |
| | | | | | | | [Arabidopsis thaliana] |
| 1834 | LIB3602-027-Q6-K1-E5 | 3122707 | BLASTX | 292 | 4.00E−26 | 58 | 50S RIBOSOMAL PROTEIN L24 |
| | | | | | | | >gi\|2446901\|dbj\|BAA22460.1\| (AB000111) 50S |
| | | | | | | | ribosomal protein L24 [Synechococcus sp.] |
| 1835 | LIB3602-109-Q1-K1-B7 | 3122707 | BLASTX | 246 | 9.00E−21 | 58 | 50S RIBOSOMAL PROTEIN L24 |
| | | | | | | | >gi\|2446901\|dbj\|BAA22460.1\| (AB000111) 50S |
| | | | | | | | ribosomal protein L24 [Synechococcus sp.] |
| 1836 | LIB3602-062-Q6-K1-B2 | 1173071 | BLASTX | 181 | 3.00E−13 | 41 | 60S ACIDIC RIBOSOMAL PROTEIN P2 (MINOR |
| | | | | | | | ALLERGEN ALT A 6) (ALT A VI) |
| | | | | | | | >gi\|1085614\|pir\|\|S43109 acidic ribosomal protein |
| | | | | | | | P2 - Alternaria alternata |
| | | | | | | | >gi\|467617\|emb\|CAA55066.1\| (X78222) minor |
| | | | | | | | allergen, ribosomal protein [Alternaria alternata] |
| 1837 | LIB3602-057-Q6-K1-D10 | 1173071 | BLASTX | 157 | 2.00E−10 | 40 | 60S ACIDIC RIBOSOMAL PROTEIN P2 (MINOR |
| | | | | | | | ALLERGEN ALT A 6) (ALT A VI) |
| | | | | | | | >gi\|1085614\|pir\|\|S43109 acidic ribosomal protein |
| | | | | | | | P2 - Alternaria alternata |
| | | | | | | | >gi\|467617\|emb\|CAA55066.1\| (X78222) minor |
| | | | | | | | allergen, ribosomal protein [Alternaria alternata] |
| 1838 | LIB3602-010-Q6-K1-G10 | 1173070 | BLASTX | 201 | 2.00E−15 | 52 | 50S RIBOSOMAL PROTEIN L9 |
| | | | | | | | >gi\|485508\|pir\|\|S33614 ribosomal protein L9 - |
| | | | | | | | Synechocystis sp. (strain PCC 6803) |
| | | | | | | | >gi\|217101\|dbj\|BAA38819.1\| (D10716) 50S |
| | | | | | | | ribosomal protein L9 [Synechocystis sp.] |
| | | | | | | | >gi\|1653258\|dbj\|BAA18173.1\| (D90912) 50S |
| | | | | | | | ribosomal protein L9 [Syne |
| 1839 | LIB3602-011-Q6-K1-B7 | 1173070 | BLASTX | 176 | 2.00E−12 | 38 | 50S RIBOSOMAL PROTEIN L9 |
| | | | | | | | >gi\|485508\|pir\|\|S33614 ribosomal protein L9 - |
| | | | | | | | Synechocystis sp. (strain PCC 6803) |
| | | | | | | | >gi\|217101\|dbj\|BAA38819.1\| (D10716) 50S |
| | | | | | | | ribosomal protein L9 [Synechocystis sp.] |
| | | | | | | | >gi\|1653258\|dbj\|BAA18173.1\| (D90912) 50S |
| | | | | | | | ribosomal protein L9 [Syne |
| 1840 | LIB3602-056-Q6-K1-C1 | 2765356 | BLASTX | 556 | 4.00E−57 | 80 | (Y13865) chlorophyll a/b-binding protein [Beta |
| | | | | | | | vulgaris] |
| 1841 | LIB3602-013-Q6-K1-E5 | 2765356 | BLASTX | 535 | 1.00E−54 | 80 | (Y13865) chlorophyll a/b-binding protein [Beta |
| | | | | | | | vulgaris] |
| 1842 | LIB3602-076-Q6-K6-D3 | 3024019 | BLASTX | 586 | 2.00E−60 | 74 | INITIATION FACTOR 5A (EIF-5A) (EIF-4D) |
| | | | | | | | >gi\|2225879\|dbj\|BAA20876.1\| (AB004823) |
| | | | | | | | eukaryotic initiation factor 5A2 [Solanum |
| | | | | | | | tuberosum] >gi\|2225887\|dbj\|BAA20880.1\| |
| | | | | | | | (AB004827) eukaryotic initiation factor 5A1 |
| | | | | | | | [Solanum tuberosum] |
| 1843 | LIB3602-061-Q6-K1-F3 | 3024019 | BLASTX | 353 | 3.00E−33 | 66 | INITIATION FACTOR 5A (EIF-5A) (EIF-4D) |
| | | | | | | | >gi\|2225879\|dbj\|BAA20876.1\| (AB004823) |
| | | | | | | | eukaryotic initiation factor 5A2 [Solanum |
| | | | | | | | tuberosum] >gi\|2225887\|dbj\|BAA20880.1\| |
| | | | | | | | (AB004827) eukaryotic initiation factor 5A1 |
| | | | | | | | [Solanum tuberosum] |
| 1844 | LIB3602-007-Q1-K1-E10 | 543867 | BLASTX | 431 | 3.00E−42 | 52 | ATP SYNTHASE GAMMA CHAIN, |
| | | | | | | | MITOCHONDRIAL PRECURSOR |
| | | | | | | | >gi\|1076684\|pir\|\|A47493 H+-transporting ATP |
| | | | | | | | synthase (EC 3.6.1.34) gamma chain precursor, |
| | | | | | | | mitochondrial - sweet potato |
| | | | | | | | >gi\|303626\|dbj\|BAA03526.1\| (D14699) F1-ATPase |
| | | | | | | | gammma subunit [Ipomoea batatas] |
| 1845 | LIB3602-072-Q1-K1-D4 | 543867 | BLASTX | 385 | 6.00E−37 | 60 | ATP SYNTHASE GAMMA CHAIN, |
| | | | | | | | MITOCHONDRIAL PRECURSOR |
| | | | | | | | >gi\|1076684\|pir\|\|A47493 H+-transporting ATP |
| | | | | | | | synthase (EC 3.6.1.34) gamma chain precursor, |
| | | | | | | | mitochondrial - sweet potato |
| | | | | | | | >gi\|303626\|dbj\|BAA03526.1\| (D14699) F1-ATPase |
| | | | | | | | gammma subunit [Ipomoea batatas] |
| 1846 | LIB3602-032-Q6-K1-F1 | 3293547 | BLASTX | 298 | 8.00E−27 | 46 | (AF072709) putative oxidoreductase [Streptomyces |
| | | | | | | | lividans] |
| 1847 | LIB3602-023-Q6-K1-F1 | 3293547 | BLASTX | 215 | 5.00E−17 | 33 | (AF072709) putative oxidoreductase [Streptomyces |
| | | | | | | | lividans] |
| 1848 | LIB3602-032-Q6-K1-B4 | 7024455 | BLASTX | 588 | 7.00E−61 | 77 | (AB034696) vacuolar-pyrophosphatase like protein |
| | | | | | | | [Arabidopsis thaliana] |
| 1849 | LIB3602-050-Q6-K1-C4 | 7024455 | BLASTX | 238 | 7.00E−20 | 77 | (AB034696) vacuolar-pyrophosphatase like protein |
| | | | | | | | [Arabidopsis thaliana] |
| 1850 | LIB3602-118-Q1-K1-F12 | 5052206 | BLASTX | 216 | 4.00E−17 | 38 | (AF100198) putative NAD(P)H steroid |
| | | | | | | | dehydrogenase [Mus musculus] |
| | | | | | | | >gi\|7619723\|emb\|CAA15948.2\| (AL021127) |
| | | | | | | | NAD(P)H steroid dehydrogenase [Mus musculus] |
| 1851 | LIB3602-105-Q1-K1-C4 | 5052206 | BLASTX | 211 | 2.00E−16 | 38 | (AF100198) putative NAD(P)H steroid |
| | | | | | | | dehydrogenase [Mus musculus] |
| | | | | | | | >gi\|7619723\|emb\|CAA15948.2\| (AL021127) |
| | | | | | | | NAD(P)H steroid dehydrogenase [Mus musculus] |
| 1852 | LIB3602-070-Q1-K1-F7 | 7297921 | BLASTX | 674 | 9.00E−71 | 63 | (AE003635) CG5353 gene product [alt 1] |
| | | | | | | | [Drosophila melanogaster] |
| | | | | | | | >gi\|7297922\|gb\|AAF53167.1\| (AE003635) CG5353 |
| | | | | | | | gene product [alt 2] [Drosophila melanogaster] |
| 1853 | LIB3602-012-Q6-K1-B7 | 7297921 | BLASTX | 493 | 1.00E−49 | 56 | (AE003635) CG5353 gene product [alt 1] |
| | | | | | | | [Drosophila melanogaster] |
| | | | | | | | >gi\|7297922\|gb\|AAF53167.1\| (AE003635) CG5353 |
| | | | | | | | gene product [alt 2] [Drosophila melanogaster] |
| 1854 | LIB3602-058-Q6-K1-H3 | 2129459 | BLASTX | 612 | 1.00E−63 | 76 | chaperonin 60 alpha chain precursor, chloroplast - |
| | | | | | | | Chlamydomonas reinhardtii |
| 1855 | LIB3602-017-Q6-K1-G3 | 2129459 | BLASTX | 214 | 7.00E−17 | 62 | chaperonin 60 alpha chain precursor, chloroplast - |
| | | | | | | | Chlamydomonas reinhardtii |
| 1856 | LIB3602-076-Q6-K6-G5 | 3776005 | BLASTX | 386 | 5.00E−37 | 83 | (AJ010466) RNA helicase [Arabidopsis thaliana] |
| 1857 | LIB3602-076-Q6-K6-H1 | 3776005 | BLASTX | 149 | 2.00E−09 | 83 | (AJ010466) RNA helicase [Arabidopsis thaliana] |
| 1858 | LIB3602-066-Q1-K6-G2 | 2911276 | BLASTX | 174 | 4.00E−12 | 70 | (U63631) LMW heat shock protein [Fragaria x |
| | | | | | | | ananassa] |
| 1859 | LIB3602-106-Q1-K1-B1 | 2911276 | BLASTX | 174 | 4.00E−12 | 70 | (U63631) LMW heat shock protein [Fragaria x |
| | | | | | | | ananassa] |
| 1860 | LIB3602-100-Q1-K1-G3 | 7484780 | BLASTX | 447 | 4.00E−44 | 46 | 26S proteasome regulatory particle chain RPN7 |
| | | | | | | | homolog F6I7.30 - Arabidopsis thaliana |
| | | | | | | | >gi\|4678261\|emb\|CAB41122.1\| (AL049657) |
| | | | | | | | putative proteasome regulatory subunit [Arabidopsis |
| | | | | | | | thaliana] >gi\|7269333\|emb\|CAB79392.1\| |
| | | | | | | | (AL161562) putative proteasome regulatory |
| 1861 | LIB3602-106-Q1-K1-G3 | 7484780 | BLASTX | 419 | 7.00E−41 | 45 | 26S proteasome regulatory particle chain RPN7 |
| | | | | | | | homolog F6I7.30 - Arabidopsis thaliana |
| | | | | | | | >gi\|4678261\|emb\|CAB41122.1\| (AL049657) |
| | | | | | | | putative proteasome regulatory subunit [Arabidopsis |
| | | | | | | | thaliana] >gi\|7269333\|emb\|CAB79392.1\| |
| | | | | | | | (AL161562) putative proteasome regulatory |
| 1862 | LIB3602-100-Q1-K1-H7 | 2494116 | BLASTX | 352 | 4.00E−33 | 52 | (AC002376) Similar to Synechocystis hypothetical |
| | | | | | | | protein (gb\|D90915). [Arabidopsis thaliana] |
| 1863 | LIB3602-106-Q1-K1-H7 | 2494116 | BLASTX | 297 | 1.00E−27 | 51 | (AC002376) Similar to Synechocystis hypothetical |
| | | | | | | | protein (gb\|D90915). [Arabidopsis thaliana] |
| 1864 | LIB3602-026-Q6-K1-H2 | 7262687 | BLASTX | 147 | 5.00E−09 | 45 | (AC012188) Contains similarity to an unknown |
| | | | | | | | protein from Arabidopsis thaliana gb\|AC004136.2. |
| | | | | | | | ESTs gb\|Z47683, gb\|Z47682, gb\|AA597850, |
| | | | | | | | gb\|Z29736, gb\|Z29735, gb\|AA042623 come from |
| | | | | | | | this gene |
| 1865 | LIB3602-036-Q6-K1-C9 | 7262687 | BLASTX | 147 | 6.00E−09 | 45 | (AC012188) Contains similarity to an unknown |
| | | | | | | | protein from Arabidopsis thaliana gb\|AC004136.2. |
| | | | | | | | ESTs gb\|Z47683, gb\|Z47682, gb\|AA597850, |
| | | | | | | | gb\|Z29736, gb\|Z29735, gb\|AA042623 come from |
| | | | | | | | this gene |
| 1866 | LIB3602-084-Q6-K1-E12 | 4049408 | BLASTX | 278 | 2.00E−24 | 52 | (Y10224) L-ascorbate oxidase [Cucumis melo] |
| 1867 | LIB3602-095-Q6-K6-B2 | 4049408 | BLASTX | 166 | 3.00E−11 | 54 | (Y10224) L-ascorbate oxidase [Cucumis melo] |
| 1868 | LIB3602-034-Q6-K1-E8 | 5921663 | BLASTX | 745 | 4.00E−79 | 76 | (AF162279) 10-formyltetrahydrofolate synthetase |
| | | | | | | | [Arabidopsis thaliana] |
| 1869 | LIB3602-035-Q1-K1-E8 | 5921663 | BLASTX | 665 | 1.00E−71 | 76 | (AF162279) 10-formyltetrahydrofolate synthetase |
| | | | | | | | [Arabidopsis thaliana] |
| 1870 | LIB3602-003-Q1-K1-G9 | 6010630 | BLASTX | 184 | 2.00E−13 | 41 | (AF179401) TspO [Sinorhizobium meliloti] |
| 1871 | LIB3602-050-Q6-K1-E7 | 6010630 | BLASTX | 167 | 2.00E−11 | 48 | (AF179401) TspO [Sinorhizobium meliloti] |
| 1872 | LIB3602-114-Q1-K1-F8 | 280386 | BLASTX | 318 | 5.00E−43 | 90 | ubiquitin/ribosomal protein CEP52 - Arabidopsis |
| | | | | | | | thaliana >gi\|166930\|gb\|AAA32904.1\| (J05507) |
| | | | | | | | ubiquitin extension protein (UBQ1) [Arabidopsis |
| | | | | | | | thaliana] >gi\|166932\|gb\|AAA32905.1\| (J05508) |
| | | | | | | | ubiquitin extension protein (UBQ2) [Arabidopsis |
| | | | | | | | thaliana] >gi\|488626 |
| 1873 | LIB3602-116-Q1-K1-C3 | 280386 | BLASTX | 170 | 3.00E−15 | 60 | ubiquitin/ribosomal protein CEP52 - Arabidopsis |
| | | | | | | | thaliana >gi\|166930\|gb\|AAA32904.1\| (J05507) |
| | | | | | | | ubiquitin extension protein (UBQ1) [Arabidopsis |
| | | | | | | | thaliana] >gi\|166932\|gb\|AAA32905.1\| (J05508) |
| | | | | | | | ubiquitin extension protein (UBQ2) [Arabidopsis |
| | | | | | | | thaliana] >gi\|488626 |
| 1874 | LIB3602-013-Q6-K1-G6 | 82080 | BLASTX | 445 | 4.00E−44 | 66 | chlorophyll a/b-binding protein type III precursor - |
| | | | | | | | tomato >gi\|226872\|prf\|\|1609235A chlorophyll a/b |
| | | | | | | | binding protein [Lycopersicon esculentum] |
| 1875 | LIB3602-058-Q6-K1-F8 | 82080 | BLASTX | 352 | 4.00E−33 | 69 | chlorophyll a/b-binding protein type III precursor - |
| | | | | | | | tomato >gi\|226872\|prf\|\|1609235A chlorophyll a/b |
| | | | | | | | binding protein [Lycopersicon esculentum] |
| 1876 | LIB3602-067-Q1-K1-F5 | 7437318 | BLASTX | 649 | 8.00E−68 | 73 | peptidylprolyl isomerase (EC 5.2.1.8) 1 - |
| | | | | | | | Chlamydomonas reinhardtii |
| | | | | | | | >gi\|2959712\|gb\|AAC05639.1\| (AF052206) |
| | | | | | | | cyclophilin 1 [Chlamydomonas reinhardtii] |
| 1877 | LIB3602-085-Q6-K1-C10 | 7437318 | BLASTX | 642 | 5.00E−67 | 72 | peptidylprolyl isomerase (EC 5.2.1.8) 1 - |
| | | | | | | | Chlamydomonas reinhardtii |
| | | | | | | | >gi\|2959712\|gb\|AAC05639.1\| (AF052206) |
| | | | | | | | cyclophilin 1 [Chlamydomonas reinhardtii] |
| 1878 | LIB3602-093-Q6-K6-G3 | 1173194 | BLASTX | 242 | 2.00E−23 | 59 | 30S RIBOSOMAL PROTEIN S13, |
| | | | | | | | CHLOROPLAST PRECURSOR (CS13) |
| | | | | | | | >gi\|2119093\|pir\|\|S59594 ribosomal protein S13 |
| | | | | | | | precursor, choroplast - Arabidopsis thaliana |
| | | | | | | | >gi\|16767\|emb\|CAA79013.1\| (Z17611) chloroplast |
| | | | | | | | 30S ribosomal protein S13 [Arabidopsis thaliana] |
| | | | | | | | >gi\|662869\| |
| 1879 | LIB3602-048-Q6-K1QA-H7 | 1173194 | BLASTX | 205 | 5.00E−16 | 62 | 30S RIBOSOMAL PROTEIN S13, |
| | | | | | | | CHLOROPLAST PRECURSOR (CS13) |
| | | | | | | | >gi\|2119093\|pir\|\|S59594 ribosomal protein S13 |
| | | | | | | | precursor, choroplast - Arabidopsis thaliana |
| | | | | | | | >gi\|16767\|emb\|CAA79013.1\| (Z17611) chloroplast |
| | | | | | | | 30S ribosomal protein S13 [Arabidopsis thaliana] |
| | | | | | | | >gi\|662869\| |
| 1880 | LIB3602-055-Q6-K1-C3 | 6822076 | BLASTX | 382 | 9.00E−37 | 58 | (AL132957) synaptobrevin-like protein |
| | | | | | | | [Arabidopsis thaliana] |
| 1881 | LIB3602-100-Q1-K1-A11 | 6822076 | BLASTX | 322 | 1.00E−29 | 50 | (AL132957) synaptobrevin-like protein |
| | | | | | | | [Arabidopsis thaliana] |
| 1882 | LIB3602-083-Q6-K6-H9 | 7439994 | BLASTX | 171 | 8.00E−12 | 37 | glycine-rich RNA-binding protein - garden pea |
| | | | | | | | >gi\|1778374\|gb\|AAB71417.1\| (U81287) glycine- |
| | | | | | | | rich RNA-binding protein PsGRBP [Pisum sativum] |
| 1883 | LIB3602-109-Q1-K1-H9 | 7439994 | BLASTX | 146 | 7.00E−09 | 36 | glycine-rich RNA-binding protein - garden pea |
| | | | | | | | >gi\|1778374\|gb\|AAB71417.1\| (U81287) glycine- |
| | | | | | | | rich RNA-binding protein PsGRBP [Pisum sativum] |
| 1884 | LIB3602-043-Q6-K1-F3 | 6175164 | BLASTX | 376 | 6.00E−36 | 60 | (AC011437) putative tryptophanyl-tRNA synthetase |
| | | | | | | | [Arabidopsis thaliana] |
| 1885 | LIB3602-112-Q1-K1-E4 | 6175164 | BLASTX | 148 | 3.00E−17 | 42 | (AC011437) putative tryptophanyl-tRNA synthetase |
| | | | | | | | [Arabidopsis thaliana] |
| 1886 | LIB3602-049-Q6-K1-C5 | 7381225 | BLASTX | 240 | 6.00E−20 | 49 | (AF139187) root border cell-specific protein [Pisum |
| | | | | | | | sativum] |
| 1887 | LIB3602-048-Q6-K1QA-E4 | 7381225 | BLASTX | 212 | 9.00E−17 | 53 | (AF139187) root border cell-specific protein [Pisum |
| | | | | | | | sativum] |
| 1888 | LIB3602-118-Q1-K1-F9 | 7492651 | BLASTX | 154 | 5.00E−10 | 83 | probable histone h3 variant - fission yeast |
| | | | | | | | (Schizosaccharomyces pombe) |
| | | | | | | | >gi\|5531479\|emb\|CAB50980.1\| (AL096851) |
| | | | | | | | probable histone h3 variant [Schizosaccharomyces |
| | | | | | | | pombe] >gi\|7630185\|dbj\|BAA94760.1\| (AB041724) |
| | | | | | | | CENP-A-like protein SpCENP-A |
| | | | | | | | [Schizosaccharomyces |
| 1889 | LIB3602-095-Q6-K6-E8 | 7492651 | BLASTX | 149 | 3.00E−09 | 80 | probable histone h3 variant - fission yeast |
| | | | | | | | (Schizosaccharomyces pombe) |
| | | | | | | | >gi\|5531479\|emb\|CAB50980.1\| (AL096851) |
| | | | | | | | probable histone h3 variant [Schizosaccharomyces |
| | | | | | | | pombe] >gi\|7630185\|dbj\|BAA94760.1\| (AB041724) |
| | | | | | | | CENP-A-like protein SpCENP-A |
| | | | | | | | [Schizosaccharomyces |
| 1890 | LIB3602-034-Q6-K1-F8 | 485512 | BLASTX | 308 | 6.00E−28 | 63 | glutathione peroxidase (EC 1.11.1.9) - sweet orange |
| 1891 | LIB3602-035-Q1-K1-F8 | 485512 | BLASTX | 308 | 7.00E−28 | 63 | glutathione peroxidase (EC 1.11.1.9) - sweet orange |
| 1892 | LIB3602-068-Q1-K1-H7 | 7438196 | BLASTX | 243 | 3.00E−43 | 74 | probable sulfate adenylyltransferase (EC 2.7.7.4) |
| | | | | | | | ATS1 - Chlamydomonas reinhardtii |
| | | | | | | | >gi\|1336213\|gb\|AAB01234.1\| (U57088) ATP |
| | | | | | | | sulfurylase Ats1 [Chlamydomonas reinhardtii] |
| 1893 | LIB3602-008-Q6-K1-D8 | 7438196 | BLASTX | 418 | 7.00E−41 | 60 | probable sulfate adenylyltransferase (EC 2.7.7.4) |
| | | | | | | | ATS1 - Chlamydomonas reinhardtii |
| | | | | | | | >gi\|1336213\|gb\|AAB01234.1\| (U57088) ATP |
| | | | | | | | sulfurylase Ats1 [Chlamydomonas reinhardtii] |
| 1894 | LIB3602-036-Q6-K1-C10 | 7451353 | BLASTX | 683 | 1.00E−71 | 75 | SAR DNA-binding protein-1 - garden pea |
| | | | | | | | >gi\|3132696\|gb\|AAC16330.1\| (AF061962) SAR |
| | | | | | | | DNA-binding protein-1 [Pisum sativum] |
| 1895 | LIB3602-058-Q6-K1-G12 | 7451353 | BLASTX | 307 | 3.00E−28 | 68 | SAR DNA-binding protein-1 - garden pea |
| | | | | | | | >gi\|3132696\|gb\|AAC16330.1\| (AF061962) SAR |
| | | | | | | | DNA-binding protein-1 [Pisum sativum] |
| 1896 | LIB3602-017-Q6-K1-F7 | 6272283 | BLASTX | 468 | 1.00E−46 | 62 | (AJ250770) plastidial phosphoglucomutase [Pisum |
| | | | | | | | sativum] |
| 1897 | LIB3602-101-Q1-K1-H8 | 6272283 | BLASTX | 451 | 9.00E−45 | 57 | (AJ250770) plastidial phosphoglucomutase [Pisum |
| | | | | | | | sativum] |
| 1898 | LIB3602-081-Q6-K6-G3 | 4567256 | BLASTX | 164 | 2.00E−11 | 90 | (AC007070) 60S ribosomal protein L39 |
| | | | | | | | [Arabidopsis thaliana] |
| 1899 | LIB3602-082-Q6-K6-B3 | 4567256 | BLASTX | 164 | 2.00E−11 | 90 | (AC007070) 60S ribosomal protein L39 |
| | | | | | | | [Arabidopsis thaliana] |
| 1900 | LIB3602-047-Q6-K1-E6 | 401237 | BLASTX | 489 | 3.00E−49 | 60 | UBIQUITIN-ACTIVATING ENZYME E1 2 |
| | | | | | | | >gi\|170684\|gb\|AAA34265.1\| (M90663) ubiquitin |
| | | | | | | | activating enyme [Triticum aestivum] |
| 1901 | LIB3602-090-Q6-K6-A1 | 401237 | BLASTX | 265 | 6.00E−23 | 64 | UBIQUITIN-ACTIVATING ENZYME E1 2 |
| | | | | | | | >gi\|170684\|gb\|AAA34265.1\| (M90663) ubiquitin |
| | | | | | | | activating enyme [Triticum aestivum] |
| 1902 | LIB3602-039-Q6-K1-A6 | 1065365 | BLASTX | 184 | 3.00E−13 | 57 | Alpha-1,4 Glycan-4-Glucanohydrolase (Alpha- |
| | | | | | | | Amylase, High Pi Isozyme (Amy2)) (E.C.3.2.1.1) |
| | | | | | | | >gi\|4699831\|pdb\|1AVA\|A Chain A, Amy2BASI |
| | | | | | | | PROTEIN-Protein Complex From Barley Seed |
| | | | | | | | >gi\|4699832\|pdb\|1AVA\|B Chain B, Amy2BASI |
| | | | | | | | PROTEIN-Protein Complex From Barley Seed > |
| 1903 | LIB3602-050-Q6-K1-E8 | 1065365 | BLASTX | 180 | 3.00E−13 | 54 | Alpha-1,4 Glycan-4-Glucanohydrolase (Alpha- |
| | | | | | | | Amylase, High Pi Isozyme (Amy2)) (E.C.3.2.1.1) |
| | | | | | | | >gi\|4699831\|pdb\|1AVA\|A Chain A, Amy2BASI |
| | | | | | | | PROTEIN-Protein Complex From Barley Seed |
| | | | | | | | >gi\|4699832\|pdb\|1AVA\|B Chain B, Amy2BASI |
| | | | | | | | PROTEIN-Protein Complex From Barley Seed > |
| 1904 | LIB3602-094-Q6-K6-B2 | 595775 | BLASTX | 199 | 5.00E−15 | 36 | (U13869) lacZ alpha peptide [unidentified cloning |
| | | | | | | | vector] |
| 1905 | LIB3602-022-Q6-K1-H10 | 595775 | BLASTX | 150 | 1.00E−09 | 42 | (U13869) lacZ alpha peptide [unidentified cloning |
| | | | | | | | vector] |
| 1906 | LIB3602-065-Q1-K6-C4 | 6094085 | BLASTX | 697 | 2.00E−73 | 72 | 60S RIBOSOMAL PROTEIN L5 |
| | | | | | | | >gi\|7440744\|pir\|\|T08009 probable ribosomal protein |
| | | | | | | | L5 - green alga (Dunaliella salina) |
| | | | | | | | >gi\|2599104\|gb\|AAB84056.1\| (AF028833) 60S |
| | | | | | | | ribosomal protein [Dunaliella salina] |
| 1907 | LIB3602-080-Q6-K6-H9 | 6094085 | BLASTX | 489 | 4.00E−49 | 58 | 60S RIBOSOMAL PROTEIN L5 |
| | | | | | | | >gi\|7440744\|pir\|\|T08009 probable ribosomal protein |
| | | | | | | | L5 - green alga (Dunaliella salina) |
| | | | | | | | >gi\|2599104\|gb\|AAB84056.1\| (AF028833) 60S |
| | | | | | | | ribosomal protein [Dunaliella salina] |
| 1908 | LIB3602-018-Q6-K1-C4 | 4762038 | BLASTX | 190 | 5.00E−14 | 34 | (AL031909) probable surface antigen [Leishmania |
| | | | | | | | major] |
| 1909 | LIB3602-049-Q6-K1-D9 | 4762038 | BLASTX | 164 | 4.00E−11 | 31 | (AL031909) probable surface antigen [Leishmania |
| | | | | | | | major] |
| 1910 | LIB3602-092-Q6-K6-C5 | 6466950 | BLASTX | 824 | 2.00E−88 | 75 | (AC009176) putative ribulose-1,5-bisphosphate |
| | | | | | | | carboxylase/oxygenase small subunit N- |
| | | | | | | | methyltransferase I [Arabidopsis thaliana] |
| | | | | | | | >gi\|6648179\|gb\|AAF21177.1\|AC013483_1 |
| | | | | | | | (AC013483) putative ribulose-1,5-bisphosphate |
| | | | | | | | carboxylase/oxygenase small subunit N-methylt |
| 1911 | LIB3602-120-Q1-K1-C5 | 6466950 | BLASTX | 329 | 9.00E−31 | 72 | (AC009176) putative ribulose-1,5-bisphosphate |
| | | | | | | | carboxylase/oxygenase small subunit N- |
| | | | | | | | methyltransferase I [Arabidopsis thaliana] |
| | | | | | | | >gi\|6648179\|gb\|AAF21177.1\|AC013483_1 |
| | | | | | | | (AC013483) putative ribulose-1,5-bisphosphate |
| | | | | | | | carboxylase/oxygenase small subunit N-methylt |
| 1912 | LIB3602-057-Q6-K1-D6 | 129916 | BLASTX | 350 | 2.00E−50 | 51 | PHOSPHOGLYCERATE KINASE, CYTOSOLIC |
| | | | | | | | >gi\|66911\|pir\|\|TVWTGY phosphoglycerate kinase |
| | | | | | | | (EC 2.7.2.3), cytosolic - wheat |
| | | | | | | | >gi\|21835\|emb\|CAA33302.1\| (X15232) |
| | | | | | | | phosphoglycerate kinase (AA 1-401) [Triticum |
| | | | | | | | aestivum] |
| 1913 | LIB3602-032-Q6-K1-F5 | 129916 | BLASTX | 466 | 2.00E−46 | 64 | PHOSPHOGLYCERATE KINASE, CYTOSOLIC |
| | | | | | | | >gi\|66911\|pir\|\|TVWTGY phosphoglycerate kinase |
| | | | | | | | (EC 2.7.2.3), cytosolic - wheat |
| | | | | | | | >gi\|21835\|emb\|CAA33302.1\| (X15232) |
| | | | | | | | phosphoglycerate kinase (AA 1-401) [Triticum |
| | | | | | | | aestivum] |
| 1914 | LIB3602-041-Q6-K1-A5 | 4586054 | BLASTX | 320 | 2.00E−29 | 41 | (AC007020) unknown protein [Arabidopsis |
| | | | | | | | thaliana] |
| 1915 | LIB3602-013-Q6-K1-H3 | 4586054 | BLASTX | 191 | 2.00E−14 | 45 | (AC007020) unknown protein [Arabidopsis |
| | | | | | | | thaliana] |
| 1916 | LIB3602-092-Q6-K6-H3 | 7471624 | BLASTX | 163 | 8.00E−11 | 58 | conserved hypothetical protein - Deinococcus |
| | | | | | | | radiodurans (strain R1) |
| | | | | | | | >gi\|6458170\|gb\|AAF10062.1\|AE001907_8 |
| | | | | | | | (AE001907) conserved hypothetical protein |
| | | | | | | | [Deinococcus radiodurans] |
| 1917 | LIB3602-113-Q1-K1-H5 | 7471624 | BLASTX | 163 | 8.00E−11 | 58 | conserved hypothetical protein - Deinococcus |
| | | | | | | | radiodurans (strain R1) |
| | | | | | | | >gi\|6458170\|gb\|AAF10062.1\|AE001907_8 |
| | | | | | | | (AE001907) conserved hypothetical protein |
| | | | | | | | [Deinococcus radiodurans] |
| 1918 | LIB3602-100-Q1-K1-H1 | 5734741 | BLASTX | 434 | 9.00E−43 | 54 | (AC007651) Similar to Ubiquitin Conjugating |
| | | | | | | | Enzyme [Arabidopsis thaliana] |
| 1919 | LIB3602-105-Q1-K1-H10 | 5734741 | BLASTX | 282 | 8.00E−25 | 39 | (AC007651) Similar to Ubiquitin Conjugating |
| | | | | | | | Enzyme [Arabidopsis thaliana] |
| 1920 | LIB3602-036-Q6-K1-H6 | 7431451 | BLASTX | 375 | 1.00E−35 | 57 | rf2 nuclear restorer protein - maize |
| | | | | | | | >gi\|1421730\|gb\|AAC49371.1\| (U43082) RF2 [Zea |
| | | | | | | | mays] |
| 1921 | LIB3602-030-Q6-K1-H10 | 7431451 | BLASTX | 342 | 5.00E−32 | 57 | rf2 nuclear restorer protein - maize |
| | | | | | | | >gi\|1421730\|gb\|AAC49371.1\| (U43082) RF2 [Zea |
| | | | | | | | mays] |
| 1922 | LIB3602-043-Q6-K1-C2 | 7445551 | BLASTX | 203 | 2.00E−15 | 55 | ABC-type transport protein T18B16.180 - |
| | | | | | | | Arabidopsis thaliana |
| | | | | | | | >gi\|2828296\|emb\|CAA16710.1\| (AL021687) RNase |
| | | | | | | | L inhibitor-like protein [Arabidopsis thaliana] |
| | | | | | | | >gi\|17268716\|emb\|CAB78923.1\| (AL161550) RNase |
| | | | | | | | L inhibitor-like protein [Arabidopsis thaliana] |
| 1923 | LIB3602-061-Q6-K1-B4 | 7445551 | BLASTX | 196 | 7.00E−15 | 78 | ABC-type transport protein T18B16.180 - |
| | | | | | | | Arabidopsis thaliana |
| | | | | | | | >gi\|2828296\|emb\|CAA16710.1\| (AL021687) RNase |
| | | | | | | | L inhibitor-like protein [Arabidopsis thaliana] |
| | | | | | | | >gi\|7268716\|emb\|CAB78923.1\| (AL161550) RNase |
| | | | | | | | L inhibitor-like protein [Arabidopsis thaliana] |
| 1924 | LIB3602-070-Q1-K1-C5 | 6671365 | BLASTX | 639 | 1.00E−66 | 61 | (AF216497) P-glycoprotein [Gossypium hirsutum] |
| 1925 | LIB3602-021-Q6-K1-C10 | 6671365 | BLASTX | 161 | 4.00E−11 | 63 | (AF216497) P-glycoprotein [Gossypium hirsutum] |
| 1926 | LIB3602-063-Q1-K6-F8 | 7413536 | BLASTX | 194 | 2.00E−14 | 41 | (AL162972) putative protein [Arabidopsis thaliana] |
| 1927 | LIB3602-072-Q1-K1-G7 | 7413536 | BLASTX | 194 | 2.00E−14 | 41 | (AL162972) putative protein [Arabidopsis thaliana] |
| 1928 | LIB3602-087-Q6-K1-E5 | 7486255 | BLASTX | 293 | 4.00E−26 | 41 | hypothetical protein F27G19.20 - Arabidopsis |
| | | | | | | | thaliana >gi\|4972067\|emb\|CAB43874.1\| |
| | | | | | | | (AL078467) putative protei [Arabidopsis thaliana] |
| | | | | | | | >gi\|7269596\|emb\|CAB81392.1\| (AL161571) |
| | | | | | | | putative protein [Arabidopsis thaliana] |
| 1929 | LIB3602-029-Q6-K1-H2 | 7486255 | BLASTX | 221 | 1.00E−17 | 32 | hypothetical protein F27G19.20 - Arabidopsis |
| | | | | | | | thaliana >gi\|4972067\|emb\|CAB43874.1\| |
| | | | | | | | (AL078467) putative protei [Arabidopsis thaliana] |
| | | | | | | | >gi\|7269596\|emb\|CAB81392.1\| (AL161571) |
| | | | | | | | putative protein [Arabidopsis thaliana] |
| 1930 | LIB3602-109-Q1-K1-C4 | 3261517 | BLASTN | 34 | 3.00E−09 | 97 | Mycobacterium tuberculosis H37Rv complete |
| | | | | | | | genome; segment 143/162 |
| 1931 | LIB3602-083-Q6-K6-C4 | 3261517 | BLASTN | 34 | 4.00E−09 | 97 | Mycobacterium tuberculosis H37Rv complete |
| | | | | | | | genome; segment 143/162 |
| 1932 | LIB3602-052-Q6-K1-E7 | 6539249 | BLASTX | 520 | 7.00E−53 | 69 | (AC011765) geranylgeranyl reductase [Arabidopsis |
| | | | | | | | thaliana] |
| 1933 | LIB3602-012-Q6-K1-H2 | 6539249 | BLASTX | 477 | 7.00E−48 | 65 | (AC011765) geranylgeranyl reductase [Arabidopsis |
| | | | | | | | thaliana] |
| 1934 | LIB3602-022-Q6-K1-D9 | 541954 | BLASTX | 301 | 3.00E−27 | 45 | ubiquitin/ribosomal protein S27a fusion protein - |
| | | | | | | | white lupine >gi\|438111\|emb\|CAA80334.1\| |
| | | | | | | | (Z22613) ubiquitin extension protein [Lupinus |
| | | | | | | | albus] |
| 1935 | LIB3602-037-Q6-K1-B12 | 541954 | BLASTX | 186 | 5.00E−14 | 43 | ubiquitin/ribosomal protein S27a fusion protein - |
| | | | | | | | white lupine >gi\|438111\|emb\|CAA80334.1\| |
| | | | | | | | (Z22613) ubiquitin extension protein [Lupinus |
| | | | | | | | albus] |
| 1936 | LIB3602-073-Q1-K1-H5 | 6091731 | BLASTX | 489 | 5.00E−49 | 48 | (AC010797) hypothetical protein [Arabidopsis |
| | | | | | | | thaliana] |
| 1937 | LIB3602-102-Q1-K1-F5 | 6091731 | BLASTX | 408 | 1.00E−39 | 48 | (AC010797) hypothetical protein [Arabidopsis |
| | | | | | | | thaliana] |
| 1938 | LIB3602-108-Q1-K1-E3 | 730652 | BLASTX | 401 | 5.00E−55 | 81 | 40S RIBOSOMAL PROTEIN S2 (STRINGS OF |
| | | | | | | | PEARLS PROTEIN) >gi\|1085158\|pir\|\|S50325 |
| | | | | | | | ribosomal protein S2 - fruit fly (Drosophila |
| | | | | | | | melanogaster) >gi\|515971\|gb\|AAC34198.1\| |
| | | | | | | | (U01334) ribosomal protein S2 [Drosophila |
| | | | | | | | melanogaster] >gi\|515972\|gb\|AAA87053.1\| |
| | | | | | | | (U01335) ri |
| 1939 | LIB3602-083-Q6-K6-D3 | 730652 | BLASTX | 464 | 3.00E−46 | 66 | 40S RIBOSOMAL PROTEIN S2 (STRINGS OF |
| | | | | | | | PEARLS PROTEIN) >gi\|1085158\|pir\|\|S50325 |
| | | | | | | | ribosomal protein S2 - fruit fly (Drosophila |
| | | | | | | | melanogaster) >gi\|515971\|gb\|AAC34198.1\| |
| | | | | | | | (U01334) ribosomal protein S2 [Drosophila |
| | | | | | | | melanogaster] >gi\|515972\|gb\|AAA87053.1\| |
| | | | | | | | (U01335) ri |
| 1940 | LIB3602-108-Q1-K1-F7 | 464705 | BLASTX | 183 | 3.00E−15 | 88 | 40S RIBOSOMAL PROTEIN S13 |
| | | | | | | | >gi\|419802\|pir\|\|S30146 ribosomal protein S13, |
| | | | | | | | cytosolic - maize >gi\|288059\|emb\|CAA44311.1\| |
| | | | | | | | (X62455) cytoplasmatic ribosomal protein S13 |
| | | | | | | | [Zea mays] |
| 1941 | LIB3602-047-Q6-K1-A5 | 464705 | BLASTX | 187 | 5.00E−14 | 87 | 40S RIBOSOMAL PROTEIN S13 |
| | | | | | | | >gi\|419802\|pir\|\|S30146 ribosomal protein S13, |
| | | | | | | | cytosolic - maize >gi\|288059\|emb\|CAA44311.1\| |
| | | | | | | | (X62455) cytoplasmatic ribosomal protein S13 |
| | | | | | | | [Zea mays] |
| 1942 | LIB3602-009-Q6-K1-A9 | 1173055 | BLASTX | 474 | 1.00E−47 | 77 | 60S RIBOSOMAL PROTEIN L11 (L5) |
| | | | | | | | >gi\|541961\|pir\|\|S42497 ribosomal protein L11.e - |
| | | | | | | | alfalfa >gi\|1076504\|pir\|\|S51819 ribosomal protein |
| | | | | | | | L11, cytosolic - alfalfa |
| | | | | | | | >gi\|463252\|emb\|CAA55090.1\| (X78284) RL5 |
| | | | | | | | ribosomal protein [Medicago sativa] |
| 1943 | LIB3602-050-Q6-K1-F6 | 1173055 | BLASTX | 207 | 8.00E−17 | 70 | 60S RIBOSOMAL PROTEIN L11 (L5) |
| | | | | | | | >gi\|541961\|pir\|\|S42497 ribosomal protein L11.e - |
| | | | | | | | alfalfa >gi\|1076504\|pir\|\|S51819 ribosomal protein |
| | | | | | | | L11, cytosolic - alfalfa |
| | | | | | | | >gi\|463252\|emb\|CAA55090.1\| (X78284) RL5 |
| | | | | | | | ribosomal protein [Medicago sativa] |
| 1944 | LIB3602-006-Q1-K1-G11 | 567893 | BLASTX | 208 | 3.00E−16 | 43 | (L37382) beta-galactosidase-complementation |
| | | | | | | | protein [unidentified cloning vector] |
| 1945 | LIB3602-045-Q6-K1-G10 | 567893 | BLASTX | 204 | 8.00E−16 | 40 | (L37382) beta-galactosidase-complementation |
| | | | | | | | protein [unidentified cloning vector] |
| 1946 | LIB3602-026-Q6-K1-F10 | 7469882 | BLASTX | 181 | 5.00E−13 | 40 | hypothetical protein sll0408 - Synechocystis sp. |
| | | | | | | | (strain PCC 6803) >gi\|1001111\|dbj\|BAA10250.1\| |
| | | | | | | | (D64001) hypothetical protein [Synechocystis sp.] |
| 1947 | LIB3602-042-Q6-K1-H4 | 7469882 | BLASTX | 181 | 5.00E−13 | 40 | hypothetical protein sll0408 - Synechocystis sp. |
| | | | | | | | (strain PCC 6803) >gi\|1001111\|dbj\|BAA10250.1\| |
| | | | | | | | (D64001) hypothetical protein [Synechocystis sp.] |
| 1948 | LIB3602-072-Q1-K1-G2 | 7488914 | BLASTX | 681 | 1.00E−71 | 69 | embryogenic callus protein 181 - carrot (fragment) |
| | | | | | | | >gi\|3551247\|dbj\|BAA32822.1\| (AB012703) 181 |
| | | | | | | | [Daucus carota] |
| 1949 | LIB3602-065-Q1-K6-G2 | 7488914 | BLASTX | 457 | 2.00E−45 | 65 | embryogenic callus protein 181 - carrot (fragment) |
| | | | | | | | >gi\|3551247\|dbj\|BAA32822.1\| (AB012703) 181 |
| | | | | | | | [Daucus carota] |
| 1950 | LIB3602-081-Q6-K6-B1 | 6652882 | BLASTX | 501 | 1.00E−50 | 83 | (AF123392) 26S proteasome AAA-ATPase subunit |
| | | | | | | | RPT3 [Arabidopsis thaliana] |
| 1951 | LIB3602-115-Q1-K1-A4 | 6652882 | BLASTX | 326 | 5.00E−30 | 77 | (AF123392) 26S proteasome AAA-ATPase subunit |
| | | | | | | | RPT3 [Arabidopsis thaliana] |
| 1952 | LIB3602-070-Q1-K1-H10 | 7431102 | BLASTX | 277 | 3.00E−24 | 41 | plant metabolite dehydrogenase homolog ytbE - |
| | | | | | | | Bacillus subtilis >gi\|2293328\|gb\|AAC00406.1\| |
| | | | | | | | (AF008220) putative morphine dehydrogenase |
| | | | | | | | [Bacillus subtilis] >gi\|2635370\|emb\|CAB14865.1\| |
| | | | | | | | (Z99118) similar to plant metabolite dehydrogenase |
| | | | | | | | [Bacillus subtilis] |
| 1953 | LIB3602-102-Q1-K1-D9 | 7431102 | BLASTX | 256 | 7.00E−22 | 39 | plant metabolite dehydrogenase homolog ytbE - |
| | | | | | | | Bacillus subtilis >gi\|2293328\|gb\|AAC00406.1\| |
| | | | | | | | (AF008220) putative morphine dehydrogenase |
| | | | | | | | [Bacillus subtilis] >gi\|2635370\|emb\|CAB14865.1\| |
| | | | | | | | (Z99118) similar to plant metabolite dehydrogenase |
| | | | | | | | [Bacillus subtilis] |
| 1954 | LIB3602-013-Q6-K1-A5 | 2499807 | BLASTX | 426 | 1.00E−41 | 47 | GLUTAMATE 5-KINASE (GAMMA- |
| | | | | | | | GLUTAMYL KINASE) (GK) |
| | | | | | | | >gi\|7434577\|pir\|\|S75182 glutamate 5-kinase (EC |
| | | | | | | | 2.7.2.11) - Synechocystis sp. (strain PCC 6803) |
| | | | | | | | >gi\|1652172\|dbj\|BAA17096.1\| (D90903) glutamate |
| | | | | | | | 5-kinase [Synechocystis sp.] |
| 1955 | LIB3602-005-Q1-K1-H5 | 2499807 | BLASTX | 172 | 1.00E−12 | 51 | GLUTAMATE 5-KINASE (GAMMA- |
| | | | | | | | GLUTAMYL KINASE) (GK) |
| | | | | | | | >gi\|7434577\|pir\|\|S75182 glutamate 5-kinase (EC |
| | | | | | | | 2.7.2.11) - Synechocystis sp. (strain PCC 6803) |
| | | | | | | | >gi\|1652172\|dbj\|BAA17096.1\| (D90903) glutamate |
| | | | | | | | 5-kinase [Synechocystis sp.] |
| 1956 | LIB3602-056-Q6-K1-A2 | 7487663 | BLASTX | 152 | 1.00E−09 | 34 | hypothetical protein T4L20.280 - Arabidopsis |
| | | | | | | | thaliana >gi\|3096939\|emb\|CAA18849.1\| |
| | | | | | | | (AL023094) putative protein [Arabidopsis thaliana] |
| | | | | | | | >gi\|7270421\|emb\|CAB80187.1\| (AL161586) |
| | | | | | | | putative protein [Arabidopsis thaliana] |
| 1957 | LIB3602-039-Q6-K1-F8 | 7487663 | BLASTX | 150 | 2.00E−09 | 34 | hypothetical protein T4L20.280 - Arabidopsis |
| | | | | | | | thaliana >gi\|3096939\|emb\|CAA18849.1\| |
| | | | | | | | (AL023094) putative protein [Arabidopsis thaliana] |
| | | | | | | | >gi\|7270421\|emb\|CAB80187.1\| (AL161586) |
| | | | | | | | putative protein [Arabidopsis thaliana] |
| 1958 | LIB3602-018-Q6-K1-C1 | 4139215 | BLASTN | 49 | 2.00E−18 | 92 | Chlamydomonas reinhardtii light harvesting |
| | | | | | | | complex II protein precursor (Lhcb2) mRNA, |
| | | | | | | | complete cds |
| 1959 | LIB3602-061-Q6-K1-F8 | 4139215 | BLASTN | 44 | 2.00E−15 | 92 | Chlamydomonas reinhardtii light harvesting |
| | | | | | | | complex II protein precursor (Lhcb2) mRNA, |
| | | | | | | | complete cds |
| 1960 | LIB3602-018-Q6-K1-B11 | 6630729 | BLASTX | 298 | 6.00E−27 | 71 | (AL132958) putative protein [Arabidopsis thaliana] |
| 1961 | LIB3602-036-Q6-K1-A7 | 6630729 | BLASTX | 205 | 9.00E−16 | 47 | (AL132958) putative protein [Arabidopsis thaliana] |
| 1962 | LIB3602-101-Q1-K1-G11 | 7547401 | BLASTX | 202 | 6.00E−30 | 84 | (S66866) cytochrome c1 precursor [Solanum |
| | | | | | | | tuberosum] |
| 1963 | LIB3602-101-Q1-K1-G6 | 7547401 | BLASTX | 154 | 1.00E−21 | 72 | (S66866) cytochrome c1 precursor [Solanum |
| | | | | | | | tuberosum] |
| 1964 | LIB3602-070-Q1-K1-B3 | 7469888 | BLASTX | 335 | 5.00E−31 | 48 | hypothetical protein sll0424 - Synechocystis sp. |
| | | | | | | | (strain PCC 6803) >gi\|1653565\|dbj\|BAA18478.1\| |
| | | | | | | | (D90914) hypothetical protein [Synechocystis sp.] |
| 1965 | LIB3602-081-Q6-K6-F2 | 7469888 | BLASTX | 319 | 3.00E−29 | 43 | hypothetical protein sll0424 - Synechocystis sp. |
| | | | | | | | (strain PCC 6803) >gi\|1653565\|dbj\|BAA18478.1\| |
| | | | | | | | (D90914) hypothetical protein [Synechocystis sp.] |
| 1966 | LIB3602-061-Q6-K1-G1 | 7500560 | BLASTX | 306 | 1.00E−27 | 51 | hypothetical protein F35G2.2 - Caenorhabditis |
| | | | | | | | elegans >gi\|3876766\|emb\|CAA93466.1\| (Z69637) |
| | | | | | | | predicted using Genefinder; Similarity to E. coli |
| | | | | | | | hypothetical protein YCAC (SW: YCAC_ECOLI); |
| | | | | | | | cDNA EST yk555d12.3 comes from this gene |
| | | | | | | | [Caenorhabditis elegans] |
| 1967 | LIB3602-026-Q6-K1-B9 | 7500560 | BLASTX | 214 | 5.00E−17 | 48 | hypothetical protein F35G2.2 - Caenorhabditis |
| | | | | | | | elegans >gi\|3876766\|emb\|CAA93466.1\| (Z69637) |
| | | | | | | | predicted using Genefinder; Similarity to E. coli |
| | | | | | | | hypothetical protein YCAC (SW: YCAC_ECOLI); |
| | | | | | | | cDNA EST yk555d12.3 comes from this gene |
| | | | | | | | [Caenorhabditis elegans] |
| 1968 | LIB3602-063-Q1-K6-H4 | 7486624 | BLASTX | 354 | 3.00E−33 | 46 | hypothetical protein F7N22.3 - Arabidopsis thaliana |
| | | | | | | | >gi\|3047064\|gb\|AAC13578.1\| (AF058825) contains |
| | | | | | | | similarity to peptidyl-prolyl cis-trans isomerase |
| | | | | | | | (Pfam: pro_isomerase.hmm, score: 23.86 and 28.41 |
| | | | | | | | [Arabidopsis thaliana] |
| 1969 | LIB3602-109-Q1-K1-F2 | 7486624 | BLASTX | 329 | 2.00E−30 | 58 | hypothetical protein F7N22.3 - Arabidopsis thaliana |
| | | | | | | | >gi\|3047064\|gb\|AAC13578.1\| (AF058825) contains |
| | | | | | | | similarity to peptidyl-prolyl cis-trans isomerase |
| | | | | | | | (Pfam: pro_isomerase.hmm, score: 23.86 and 28.41 |
| | | | | | | | [Arabidopsis thaliana] |
| 1970 | LIB3602-064-Q1-K6-B6 | 3947719 | BLASTX | 195 | 7.00E−15 | 90 | (AJ012653) ribosomal protein S28 [Prunus persica] |
| | | | | | | | >gi\|3947721\|emb\|CAA10102.1\| (AJ012654) |
| | | | | | | | ribosomal protein S28 [Prunus persica] |
| | | | | | | | >gi\|3947723\|emb\|CAA10103.1\| (AJ012655) |
| | | | | | | | ribosomal protein S28 [Prunus persica] |
| 1971 | LIB3602-063-Q1-K6-H5 | 3947719 | BLASTX | 191 | 2.00E−14 | 97 | (AJ012653) ribosomal protein S28 [Prunus persica] |
| | | | | | | | >gi\|3947721\|emb\|CAA10102.1\| (AJ012654) |
| | | | | | | | ribosomal protein S28 [Prunus persica] |
| | | | | | | | >gi\|3947723\|emb\|CAA10103.1\| (AJ012655) |
| | | | | | | | ribosomal protein S28 [Prunus persica] |
| 1972 | LIB3602-010-Q6-K1-C1 | 5902598 | BLASTX | 484 | 1.00E−48 | 69 | (AF110787) light harvesting complex a protein |
| | | | | | | | [Volvox carteri f. nagariensis] |
| 1973 | LIB3602-077-Q6-K6-B7 | 5902598 | BLASTX | 307 | 1.00E−27 | 48 | (AF110787) light harvesting complex a protein |
| | | | | | | | [Volvox carteri f. nagariensis] |
| 1974 | LIB3602-068-Q1-K1-C1 | 549810 | BLASTX | 575 | 4.00E−59 | 70 | GTP-BINDING PROTEIN YPTV3 |
| | | | | | | | >gi\|486945\|pir\|\|S36366 GTP-binding protein yptV3 - |
| | | | | | | | Volvox carteri >gi\|409164\|gb\|AAA34252.1\| |
| | | | | | | | (L08129) GTP-binding protein [Volvox carteri] |
| 1975 | LIB3602-060-Q6-K1-A10 | 549810 | BLASTX | 402 | 6.00E−39 | 69 | GTP-BINDING PROTEIN YPTV3 |
| | | | | | | | >gi\|486945\|pir\|\|S36366 GTP-binding protein yptV3 - |
| | | | | | | | Volvox carteri >gi\|409164\|gb\|AAA34252.1\| |
| | | | | | | | (L08129) GTP-binding protein [Volvox carteri] |
| 1976 | LIB3602-001-P1-K6-G10 | 4204304 | BLASTX | 629 | 2.00E−65 | 72 | (AC003027) lcl\|prt_seq No definition line found |
| | | | | | | | [Arabidopsis thaliana] |
| 1977 | LIB3602-021-Q6-K1-A6 | 4204304 | BLASTX | 228 | 6.00E−19 | 80 | (AC003027) lcl\|prt_seq No definition line found |
| | | | | | | | [Arabidopsis thaliana] |
| 1978 | LIB3602-089-Q6-K6-A9 | 6934302 | BLASTX | 679 | 2.00E−71 | 98 | (AF221858) polyubiquitin [Euphorbia esula] |
| 1979 | LIB3602-032-Q6-K1-F9 | 6934302 | BLASTX | 327 | 2.00E−30 | 98 | (AF221858) polyubiquitin [Euphorbia esula] |
| 1980 | LIB3602-052-Q6-K1-B5 | 115769 | BLASTX | 301 | 3.00E−27 | 54 | CHLOROPHYLL A-B BINDING PROTEIN OF |
| | | | | | | | LHCII TYPE I (CAB) (LHCP) |
| | | | | | | | >gi\|81190\|pir\|\|S00653 chlorophyll a/b-binding |
| | | | | | | | protein precursor - Euglena gracilis (fragment) |
| | | | | | | | >gi\|829262\|emb\|CAA29821.1\| (X06602) |
| | | | | | | | chlorophyll a/b protein (128 AA) [Euglena gracilis] |
| 1981 | LIB3602-022-Q6-K1-H2 | 115769 | BLASTX | 274 | 5.00E−24 | 55 | CHLOROPHYLL A-B BINDING PROTEIN OF |
| | | | | | | | LHCII TYPE I (CAB) (LHCP) |
| | | | | | | | >gi\|81190\|pir\|\|S00653 chlorophyll a/b-binding |
| | | | | | | | protein precursor - Euglena gracilis (fragment) |
| | | | | | | | >gi\|829262\|emb\|CAA29821.1\| (X06602) |
| | | | | | | | chlorophyll a/b protein (128 AA) [Euglena gracilis] |
| 1982 | LIB3602-070-Q1-K1-A1 | 7108521 | BLASTX | 578 | 2.00E−59 | 65 | (AF127564) ubiquitin-protein ligase 1 [Arabidopsis |
| | | | | | | | thaliana] |
| 1983 | LIB3602-067-Q1-K1-H12 | 7108521 | BLASTX | 520 | 5.00E−55 | 68 | (AF127564) ubiquitin-protein ligase 1 [Arabidopsis |
| | | | | | | | thaliana] |
| 1984 | LIB3602-006-Q1-K1-E6 | 5739404 | BLASTX | 173 | 5.00E−12 | 40 | (AF170026) core subunit of photosystem II |
| | | | | | | | precursor [Chlamydomonas reinhardtii] |
| 1985 | LIB3602-084-Q6-K1-F7 | 5739404 | BLASTX | 156 | 5.00E−10 | 33 | (AF170026) core subunit of photosystem II |
| | | | | | | | precursor [Chlamydomonas reinhardtii] |
| 1986 | LIB3602-030-Q6-K1-A11 | 7486848 | BLASTX | 383 | 8.00E−37 | 60 | hypothetical protein T10P11.1 - Arabidopsis |
| | | | | | | | thaliana >gi\|2262136\|gb\|AAC78251.1\|AAC78251 |
| | | | | | | | (AC002330) predicted protein of unknown function |
| | | | | | | | [Arabidopsis thaliana] |
| | | | | | | | >gi\|4263520\|gb\|AAD15346.1\| (AC004044) |
| | | | | | | | predicted protein of unknown function [Arabidopsis |
| | | | | | | | thalia |
| 1987 | LIB3602-063-Q1-K6-E10 | 7486848 | BLASTX | 375 | 8.00E−36 | 69 | hypothetical protein T10P11.1 - Arabidopsis |
| | | | | | | | thaliana >gi\|2262136\|gb\|AAC78251.1\|AAC78251 |
| | | | | | | | (AC002330) predicted protein of unknown function |
| | | | | | | | [Arabidopsis thaliana] |
| | | | | | | | >gi\|4263520\|gb\|AAD15346.1\| (AC004044) |
| | | | | | | | predicted protein of unknown function [Arabidopsis |
| | | | | | | | thalia |
| 1988 | LIB3602-090-Q6-K6-E11 | 1173218 | BLASTX | 340 | 7.00E−32 | 81 | 40S RIBOSOMAL PROTEIN S15A |
| | | | | | | | >gi\|440824\|gb\|AAA61608.1\| (L27461) ribosomal |
| | | | | | | | protein S15 [Arabidopsis thaliana] |
| | | | | | | | >gi\|2150130\|gb\|AAB58750.1\| (AF001412) |
| | | | | | | | cytoplasmic ribosomal protein S15a [Arabidopsis |
| | | | | | | | thaliana] |
| 1989 | LIB3602-013-Q6-K1-F6 | 1173218 | BLASTX | 284 | 2.00E−25 | 79 | 40S RIBOSOMAL PROTEIN S15A |
| | | | | | | | >gi\|440824\|gb\|AAA61608.1\| (L27461) ribosomal |
| | | | | | | | protein S15 [Arabidopsis thaliana] |
| | | | | | | | >gi\|2150130\|gb\|AAB58750.1\| (AF001412) |
| | | | | | | | cytoplasmic ribosomal protein S15a [Arabidopsis |
| | | | | | | | thaliana] |
| 1990 | LIB3602-070-Q1-K1-G12 | 7489195 | BLASTX | 261 | 2.00E−22 | 47 | ribosomal protein L10, chloroplast - common |
| | | | | | | | tobacco >gi\|3298441\|dbj\|BAA31511.1\| (AB010879) |
| | | | | | | | chloroplast ribosomal protein L10 [Nicotiana |
| | | | | | | | tabacum] |
| 1991 | LIB3602-067-Q1-K1-B1 | 7489195 | BLASTX | 253 | 2.00E−21 | 46 | ribosomal protein L10, chloroplast - common |
| | | | | | | | tobacco >gi\|3298441\|dbj\|BAA31511.1\| (AB010879) |
| | | | | | | | chloroplast ribosomal protein L10 [Nicotiana |
| | | | | | | | tabacum] |
| 1992 | LIB3602-016-Q6-K1-F11 | 7076783 | BLASTX | 438 | 3.00E−43 | 54 | (AL132975) methionyl-tRNA synthetase |
| | | | | | | | (AtcpMetRS) [Arabidopsis thaliana] |
| 1993 | LIB3602-072-Q1-K1-B9 | 7076783 | BLASTX | 162 | 2.00E−14 | 53 | (AL132975) methionyl-tRNA synthetase |
| | | | | | | | (AtcpMetRS) [Arabidopsis thaliana] |
| 1994 | LIB3602-014-Q6-K1-G8 | 586145 | BLASTX | 605 | 1.00E−62 | 69 | UBIQUINOL-CYTOCHROME C REDUCTASE |
| | | | | | | | IRON-SULFUR SUBUNIT, MITOCHONDRIAL |
| | | | | | | | PRECURSOR (RIESKE IRON-SULFUR |
| | | | | | | | PROTEIN) (RISP) >gi\|488848\|emb\|CAA55894.1\| |
| | | | | | | | (X79332) Rieske iron sulphur protein [Solanum |
| | | | | | | | tuberosum] |
| 1995 | LIB3602-072-Q1-K1-F3 | 586145 | BLASTX | 550 | 3.00E−56 | 67 | UBIQUINOL-CYTOCHROME C REDUCTASE |
| | | | | | | | IRON-SULFUR SUBUNIT, MITOCHONDRIAL |
| | | | | | | | PRECURSOR (RIESKE IRON-SULFUR |
| | | | | | | | PROTEIN) (RISP) >gi\|488848\|emb\|CAA55894.1\| |
| | | | | | | | (X79332) Rieske iron sulphur protein [Solanum |
| | | | | | | | tuberosum] |
| 1996 | LIB3602-094-Q6-K6-A6 | 7488696 | BLASTX | 186 | 1.00E−13 | 36 | polyphosphoinositide binding protein Ssh2 - |
| | | | | | | | soybean >gi\|2739046\|gb\|AAB94599.1\| (AF024652) |
| | | | | | | | polyphosphoinositide binding protein Ssh2p |
| | | | | | | | [Glycine max] |
| 1997 | LIB3602-047-Q6-K1-C5 | 7488696 | BLASTX | 162 | 7.00E−11 | 32 | polyphosphoinositide binding protein Ssh2 - |
| | | | | | | | soybean >gi\|2739046\|gb\|AAB94599.1\| (AF024652) |
| | | | | | | | polyphosphoinositide binding protein Ssh2p |
| | | | | | | | [Glycine max] |
| 1998 | LIB3602-114-Q1-K1-B10 | 4185133 | BLASTX | 189 | 7.00E−14 | 45 | (AC005724) putative C3HC4-type RING zinc |
| | | | | | | | finger protein [Arabidopsis thaliana] |
| 1999 | LIB3602-090-Q6-K6-B10 | 4185133 | BLASTX | 185 | 2.00E−13 | 45 | (AC005724) putative C3HC4-type RING zinc |
| | | | | | | | finger protein [Arabidopsis thaliana] |
| 2000 | LIB3602-011-Q6-K1-E6 | 7290666 | BLASTX | 330 | 1.00E−30 | 59 | (AE003436) CG5941 gene product [Drosophila |
| | | | | | | | melanogaster] |
| 2001 | LIB3602-112-Q1-K1-D12 | 7290666 | BLASTX | 147 | 2.00E−09 | 54 | (AE003436) CG5941 gene product [Drosophila |
| | | | | | | | melanogaster] |
| 2002 | LIB3602-069-Q1-K1-G4 | 7291506 | BLASTX | 192 | 3.00E−14 | 42 | (AE003459) CG3800 gene product [Drosophila |
| | | | | | | | melanogaster] |
| 2003 | LIB3602-086-Q6-K1-D2 | 7291506 | BLASTX | 192 | 3.00E−14 | 42 | (AE003459) CG3800 gene product [Drosophila |
| | | | | | | | melanogaster] |
| 2004 | LIB3602-104-Q1-K1-F5 | 266685 | BLASTX | 163 | 7.00E−11 | 72 | DIHYDROLIPOAMIDE |
| | | | | | | | ACETYLTRANSFERASE COMPONENT OF |
| | | | | | | | PYRUVATE DEHYDROGENASE COMPLEX |
| | | | | | | | (E2) (PDC-E2) (70 KD MITOCHONDRIAL |
| | | | | | | | AUTOANTIGEN OF PRIMARY BILIARY |
| | | | | | | | CIRRHOSIS) (PBC) >gi\|111580\|pir\|\|S21766 |
| | | | | | | | dihydrolipoamide S-acetyltransferase (EC 2.3.1.12) - |
| | | | | | | | rat (fragment) |
| 2005 | LIB3602-104-Q1-K1-H6 | 266685 | BLASTX | 163 | 7.00E−11 | 72 | DIHYDROLIPOAMIDE |
| | | | | | | | ACETYLTRANSFERASE COMPONENT OF |
| | | | | | | | PYRUVATE DEHYDROGENASE COMPLEX |
| | | | | | | | (E2) (PDC-E2) (70 KD MITOCHONDRIAL |
| | | | | | | | AUTOANTIGEN OF PRIMARY BILIARY |
| | | | | | | | CIRRHOSIS) (PBC) >gi\|111580\|pir\|\|S21766 |
| | | | | | | | dihydrolipoamide S-acetyltransferase (EC 2.3.1.12) - |
| | | | | | | | rat (fragment) |
| 2006 | LIB3602-012-Q6-K1-G1 | 3015514 | BLASTX | 533 | 3.00E−54 | 55 | (U72351) ADPG pyrophosphorylase small subunit |
| | | | | | | | [Arabidopsis thaliana] |
| | | | | | | | >gi\|7242894\|dbj\|BAA92523.1\| (AB039889) |
| | | | | | | | glucose-1-phosphate adenylyltransferase |
| | | | | | | | [Arabidopsis thaliana] |
| 2007 | LIB3602-066-Q1-K6-C1 | 3015514 | BLASTX | 522 | 6.00E−53 | 55 | (U72351) ADPG pyrophosphorylase small subunit |
| | | | | | | | [Arabidopsis thaliana] |
| | | | | | | | >gi\|7242894\|dbj\|BAA92523.1\| (AB039889) |
| | | | | | | | glucose-1-phosphate adenylyltransferase |
| | | | | | | | [Arabidopsis thaliana] |
| 2008 | LIB3602-107-Q1-K1-A10 | 118024 | BLASTX | 209 | 2.00E−16 | 72 | CYTOCHROME C >gi\|65518\|pir\|\|CCSP |
| | | | | | | | cytochrome c - spinach |
| 2009 | LIB3602-120-Q1-K1-G8 | 118024 | BLASTX | 204 | 4.00E−16 | 82 | CYTOCHROME C >gi\|65518\|pir\|\|CCSP |
| | | | | | | | cytochrome c - spinach |
| 2010 | LIB3602-022-Q6-K1-D5 | 7299915 | BLASTN | 45 | 5.00E−16 | 89 | Drosophila melanogaster genomic scaffold |
| | | | | | | | 142000013386035 section 31 of 105, complete |
| | | | | | | | sequence |
| 2011 | LIB3602-068-Q1-K1-F7 | 7299915 | BLASTN | 43 | 2.00E−14 | 88 | Drosophila melanogaster genomic scaffold |
| | | | | | | | 142000013386035 section 31 of 105, complete |
| | | | | | | | sequence |
| 2012 | LIB3602-083-Q6-K6-A3 | 7629994 | BLASTX | 278 | 8.00E−25 | 73 | (AL132960) 60S RIBOSOMAL PROTEIN L36 |
| | | | | | | | homolog [Arabidopsis thaliana] |
| 2013 | LIB3602-035-Q1-K1-D7 | 7629994 | BLASTX | 252 | 1.00E−21 | 71 | (AL132960) 60S RIBOSOMAL PROTEIN L36 |
| | | | | | | | homolog [Arabidopsis thaliana] |
| 2014 | LIB3602-039-Q6-K1-B10 | 7498202 | BLASTX | 327 | 5.00E−30 | 52 | hypothetical protein D2030.5 - Caenorhabditis |
| | | | | | | | elegans >gi\|3875398\|emb\|CAA98118.1\| (Z73906) |
| | | | | | | | Similarity to B. subtilis YQJC protein |
| | | | | | | | (TR: G1303954); cDNA EST EMBL: T01187 comes |
| | | | | | | | from this gene [Caenorhabditis elegans] |
| 2015 | LIB3602-004-Q1-K1-B8 | 7498202 | BLASTX | 322 | 2.00E−29 | 51 | hypothetical protein D2030.5 - Caenorhabditis |
| | | | | | | | elegans >gi\|3875398\|emb\|CAA98118.1\| (Z73906) |
| | | | | | | | Similarity to B. subtilis YQJC protein |
| | | | | | | | (TR: G1303954); cDNA EST EMBL: T01187 comes |
| | | | | | | | from this gene [Caenorhabditis elegans] |
| 2016 | LIB3602-052-Q6-K1-G1 | 7492314 | BLASTX | 303 | 2.00E−27 | 51 | pop-interacting protein 1 - fission yeast |
| | | | | | | | (Schizosaccharomyces pombe) |
| | | | | | | | >gi\|5853264\|gb\|AAD54393.1\|AF179228_1 |
| | | | | | | | (AF179228) pop-interacting protein 1 |
| | | | | | | | [Schizosaccharomyces pombe] |
| | | | | | | | >gi\|6073753\|emb\|CAB58559.1\| (Z98977) pop- |
| | | | | | | | interacting protein 1. [Schizosaccharomyce |
| 2017 | LIB3602-115-Q1-K1-B11 | 7492314 | BLASTX | 302 | 3.00E−27 | 51 | pop-interacting protein 1 - fission yeast |
| | | | | | | | (Schizosaccharomyces pombe) |
| | | | | | | | >gi\|5853264\|gb\|AAD54393.1\|AF179228_1 |
| | | | | | | | (AF179228) pop-interacting protein 1 |
| | | | | | | | [Schizosaccharomyces pombe] |
| | | | | | | | >gi\|6073753\|emb\|CAB58559.1\| (Z98977) pop- |
| | | | | | | | interacting protein 1. [Schizosaccharomyce |
| 2018 | LIB3602-022-Q6-K1-C5 | 6015158 | BLASTX | 364 | 1.00E−34 | 62 | FK506-BINDING PROTEIN (FKBP) (PEPTIDYL- |
| | | | | | | | PROLYL CIS-TRANS ISOMERASE) (PPIASE) |
| | | | | | | | >gi\|7492278\|pir\|\|T40724 peptidyl-prolyl cis-trans |
| | | | | | | | isomerase - fission yeast (Schizosaccharomyces |
| | | | | | | | pombe) >gi\|2879879\|emb\|CAA17020.1\| |
| | | | | | | | (AL021816) peptidyl-prolyl cis-trans isomerase; |
| 2019 | LIB3602-101-Q1-K1-F5 | 6015158 | BLASTX | 253 | 8.00E−28 | 67 | FK506-BINDING PROTEIN (FKBP) (PEPTIDYL- |
| | | | | | | | PROLYL CIS-TRANS ISOMERASE) (PPIASE) |
| | | | | | | | >gi\|7492278\|pir\|\|T40724 peptidyl-prolyl cis-trans |
| | | | | | | | isomerase - fission yeast (Schizosaccharomyces |
| | | | | | | | pombe) >gi\|2879879\|emb\|CAA17020.1\| |
| | | | | | | | (AL021816) peptidyl-prolyl cis-trans isomerase; |
| 2020 | LIB3602-107-Q1-K1-A12 | 2500365 | BLASTX | 176 | 2.00E−12 | 36 | PROBABLE 60 RIBOSOMAL PROTEIN L14 |
| | | | | | | | (HYDROXYPROLINE RICH GLYCOPROTEIN |
| | | | | | | | HRGP1) |
| 2021 | LIB3602-006-Q1-K1-E4 | 2500365 | BLASTX | 171 | 6.00E−12 | 38 | PROBABLE 60 RIBOSOMAL PROTEIN L14 |
| | | | | | | | (HYDROXYPROLINE RICH GLYCOPROTEIN |
| | | | | | | | HRGP1) |
| 2022 | LIB3602-067-Q1-K1-F3 | 7485991 | BLASTX | 282 | 8.00E−25 | 44 | hypothetical protein F22O13.29 - Arabidopsis |
| | | | | | | | thaliana >gi\|3063467\|gb\|AAC14055.1\| (AC003981) |
| | | | | | | | F22O13.29 [Arabidopsis thaliana] |
| | | | | | | | >gi\|6996317\|emb\|CAB75510.1\| (AJ251088) ABI3- |
| | | | | | | | interacting protein 3, AIP3 [Arabidopsis thaliana] |
| 2023 | LIB3602-084-Q6-K1-H7 | 7485991 | BLASTX | 177 | 2.00E−16 | 45 | hypothetical protein F22O13.29 - Arabidopsis |
| | | | | | | | thaliana >gi\|3063467\|gb\|AAC14055.1\| (AC003981) |
| | | | | | | | F22O13.29 [Arabidopsis thaliana] |
| | | | | | | | >gi\|6996317\|emb\|CAB75510.1\| (AJ251088) ABI3- |
| | | | | | | | interacting protein 3, AIP3 [Arabidopsis thaliana] |
| 2024 | LIB3602-001-P1-K6-H8 | 585338 | BLASTX | 755 | 3.00E−80 | 72 | ADENYLATE KINASE B (ATP-AMP |
| | | | | | | | TRANSPHOSPHORYLASE) |
| | | | | | | | >gi\|391879\|dbj\|BAA01181.1\| (D10335) adenylate |
| | | | | | | | kinase-b [Oryza sativa] |
| 2025 | LIB3602-037-Q6-K1-D7 | 585338 | BLASTX | 376 | 5.00E−36 | 64 | ADENYLATE KINASE B (ATP-AMP |
| | | | | | | | TRANSPHOSPHORYLASE) |
| | | | | | | | >gi\|391879\|dbj\|BAA01181.1\| (D10335) adenylate |
| | | | | | | | kinase-b [Oryza sativa] |
| 2026 | LIB3602-118-Q1-K1-D12 | 7488897 | BLASTX | 292 | 5.00E−26 | 57 | hypothetical protein - castor bean |
| | | | | | | | >gi\|1632831\|emb\|CAA89698.1\| (Z49698) orf |
| | | | | | | | [Ricinus communis] |
| 2027 | LIB3602-084-Q6-K1-A2 | 7488897 | BLASTX | 196 | 6.00E−15 | 71 | hypothetical protein - castor bean |
| | | | | | | | >gi\|1632831\|emb\|CAA89698.1\| (Z49698) orf |
| | | | | | | | [Ricinus communis] |
| 2028 | LIB3602-045-Q6-K1-F2 | 7362767 | BLASTX | 402 | 5.00E−39 | 54 | (AL162651) 60S RIBOSOMAL PROTEIN L7A |
| | | | | | | | protein [Arabidopsis thaliana] |
| 2029 | LIB3602-012-Q6-K1-B12 | 7362767 | BLASTX | 152 | 9.00E−10 | 57 | (AL162651) 60S RIBOSOMAL PROTEIN L7A |
| | | | | | | | protein [Arabidopsis thaliana] |
| 2030 | LIB3602-114-Q1-K1-B1 | 6006684 | BLASTX | 247 | 9.00E−21 | 44 | (AF089106) unknown [Homo sapiens] |
| 2031 | LIB3602-088-Q6-K6-D4 | 6006684 | BLASTX | 236 | 2.00E−19 | 44 | (AF089106) unknown [Homo sapiens] |
| 2032 | LIB3602-100-Q1-K1-E11 | 2398681 | BLASTX | 390 | 1.00E−37 | 61 | (Y14798) 3-deoxy-D-arabino-heptulosonate 7- |
| | | | | | | | phosphate synthase [Morinda citrifolia] |
| 2033 | LIB3602-066-Q1-K6-E6 | 2398681 | BLASTX | 370 | 4.00E−35 | 58 | (Y14798) 3-deoxy-D-arabino-heptulosonate 7- |
| | | | | | | | phosphate synthase [Morinda citrifolia] |
| 2034 | LIB3602-034-Q6-K1-F11 | 6714302 | BLASTX | 189 | 4.00E−14 | 67 | (AC013354) F15H18.8 [Arabidopsis thaliana] |
| 2035 | LIB3602-035-Q1-K1-F11 | 6714302 | BLASTX | 171 | 5.00E−12 | 68 | (AC013354) F15H18.8 [Arabidopsis thaliana] |
| 2036 | LIB3602-068-Q1-K1-E6 | 6687300 | BLASTN | 38 | 8.00E−12 | 92 | Cyanophora paradoxa partial mRNA for 60S |
| | | | | | | | ribosomal protein L7 |
| 2037 | LIB3602-036-Q6-K1-D10 | 6687300 | BLASTN | 33 | 7.00E−09 | 93 | Cyanophora paradoxa partial mRNA for 60S |
| | | | | | | | ribosomal protein L7 |
| 2038 | LIB3602-106-Q1-K1-G2 | 3747049 | BLASTN | 86 | 3.00E−40 | 87 | Zea mays ribosomal protein L26 mRNA, partial cds |
| 2039 | LIB3602-005-Q1-K1-F8 | 3747049 | BLASTN | 61 | 3.00E−25 | 89 | Zea mays ribosomal protein L26 mRNA, partial cds |
| 2040 | LIB3602-047-Q6-K1-G12 | 4507873 | BLASTX | 280 | 1.00E−24 | 40 | von Hippel-Lindau binding protein 1 |
| | | | | | | | >gi\|3212112\|emb\|CAA76761.1\| (Y17394) prefoldin |
| | | | | | | | subunit 3 [Homo sapiens] |
| 2041 | LIB3602-030-Q6-K1-H6 | 4507873 | BLASTX | 251 | 3.00E−21 | 39 | von Hippel-Lindau binding protein 1 |
| | | | | | | | >gi\|3212112\|emb\|CAA76761.1\| (Y17394) prefoldin |
| | | | | | | | subunit 3 [Homo sapiens] |
| 2042 | LIB3602-069-Q1-K1-G7 | 3860277 | BLASTX | 579 | 1.00E−59 | 62 | (AC005824) 60S ribosomal protein L10A |
| | | | | | | | [Arabidopsis thaliana] |
| 2043 | LIB3602-025-Q6-K1-G3 | 3860277 | BLASTX | 415 | 1.00E−40 | 70 | (AC005824) 60S ribosomal protein L10A |
| | | | | | | | [Arabidopsis thaliana] |
| 2044 | LIB3602-011-Q6-K1-C8 | 2499932 | BLASTX | 298 | 9.00E−27 | 59 | ADENINE PHOSPHORIBOSYLTRANSFERASE |
| | | | | | | | 1 (APRT) >gi\|7433931\|pir\|\|T06263 adenine |
| | | | | | | | phosphoribosyltransferase (EC 2.4.2.7) APT1 - |
| | | | | | | | wheat >gi\|726305\|gb\|AAA80609.1\| (U22442) |
| | | | | | | | adenine phosphoribosyltransferase form 1 [Triticum |
| | | | | | | | aestivum] |
| 2045 | LIB3602-084-Q6-K1-G3 | 2499932 | BLASTX | 166 | 9.00E−20 | 66 | ADENINE PHOSPHORIBOSYLTRANSFERASE |
| | | | | | | | 1 (APRT) >gi\|7433931\|pir\|\|T06263 adenine |
| | | | | | | | phosphoribosyltransferase (EC 2.4.2.7) APT1 - |
| | | | | | | | wheat >gi\|726305\|gb\|AAA80609.1\| (U22442) |
| | | | | | | | adenine phosphoribosyltransferase form 1 [Triticum |
| | | | | | | | aestivum] |
| 2046 | LIB3602-114-Q1-K1-F11 | 7487365 | BLASTX | 408 | 1.00E−39 | 57 | hypothetical protein T23J7.140 - Arabidopsis |
| | | | | | | | thaliana >gi\|4741198\|emb\|CAB41864.1\| |
| | | | | | | | (AL049746) putative protein [Arabidopsis thaliana] |
| 2047 | LIB3602-118-Q1-K1-G2 | 7487365 | BLASTX | 286 | 1.00E−35 | 60 | hypothetical protein T23J7.140 - Arabidopsis |
| | | | | | | | thaliana >gi\|4741198\|emb\|CAB41864.1\| |
| | | | | | | | (AL049746) putative protein [Arabidopsis thaliana] |
| 2048 | LIB3602-013-Q6-K1-B4 | 3387899 | BLASTX | 789 | 2.00E−84 | 88 | (AF070540) putative nuclear protein [Homo |
| | | | | | | | sapiens] |
| 2049 | LIB3602-087-Q6-K1-G7 | 3387899 | BLASTX | 597 | 9.00E−62 | 67 | (AF070540) putative nuclear protein [Homo |
| | | | | | | | sapiens] |
| 2050 | LIB3602-010-Q6-K1-F11 | 464621 | BLASTX | 465 | 2.00E−46 | 64 | 60S RIBOSOMAL PROTEIN L6 (YL16-LIKE) |
| | | | | | | | >gi\|280374\|pir\|\|S28586 ribosomal protein ML16, |
| | | | | | | | cytosolic - common ice plant |
| | | | | | | | >gi\|19539\|emb\|CAA49175.1\| (X69378) ribosomal |
| | | | | | | | protein YL16 [Mesembryanthemum crystallinum] |
| 2051 | LIB3602-039-Q6-K1-G8 | 464621 | BLASTX | 433 | 1.00E−42 | 65 | 60S RIBOSOMAL PROTEIN L6 (YL16-LIKE) |
| | | | | | | | >gi\|280374\|pir\|\|S28586 ribosomal protein ML16, |
| | | | | | | | cytosolic - common ice plant |
| | | | | | | | >gi\|19539\|emb\|CAA49175.1\| (X69378) ribosomal |
| | | | | | | | protein YL16 [Mesembryanthemum crystallinum] |
| 2052 | LIB3602-058-Q6-K1-E4 | 6446570 | BLASTX | 449 | 2.00E−44 | 71 | (AU066541) hypothetical protein [Chlamydomonas |
| | | | | | | | sp.] |
| 2053 | LIB3602-046-Q6-K1-G7 | 6446570 | BLASTX | 446 | 3.00E−44 | 70 | (AU066541) hypothetical protein [Chlamydomonas |
| | | | | | | | sp.] |
| 2054 | LIB3602-042-Q6-K1-E3 | 7445817 | BLASTX | 356 | 2.00E−33 | 59 | ABC-type transport protein slr0864 - Synechocystis |
| | | | | | | | sp. (strain PCC 6803) |
| | | | | | | | >gi\|1652892\|dbj\|BAA17810.1\| (D90909) ABC |
| | | | | | | | transporter [Synechocystis sp.] |
| 2055 | LIB3602-003-Q1-K1-C4 | 7445817 | BLASTX | 332 | 9.00E−31 | 61 | ABC-type transport protein slr0864 - Synechocystis |
| | | | | | | | sp. (strain PCC 6803) |
| | | | | | | | >gi\|1652892\|dbj\|BAA17810.1\| (D90909) ABC |
| | | | | | | | transporter [Synechocystis sp.] |
| 2056 | LIB3602-118-Q1-K1-E9 | 18163 | BLASTN | 39 | 3.00E−12 | 85 | C. reinhardtii psb3 mRNA for OEE3 protein of |
| | | | | | | | photosystem II (oxygen-evolving protein) |
| 2057 | LIB3602-035-Q1-K1-E4 | 18163 | BLASTN | 37 | 6.00E−11 | 97 | C. reinhardtii psb3 mRNA for OEE3 protein of |
| | | | | | | | photosystem II (oxygen-evolving protein) |
| 2058 | LIB3602-065-Q1-K6-F12 | 1361925 | BLASTX | 283 | 6.00E−25 | 36 | translation elongation factor aEF-1 alpha chain- |
| | | | | | | | Desulfurococcus mobilis |
| 2059 | LIB3602-071-Q1-K1-B5 | 1361925 | BLASTX | 257 | 7.00E−22 | 37 | translation elongation factor aEF-1 alpha chain - |
| | | | | | | | Desulfurococcus mobilis |
| 2060 | LIB3602-026-Q6-K1-C9 | 5442410 | BLASTX | 304 | 1.00E−32 | 52 | (AF159254) ascorbate peroxidase [Zantedeschia |
| | | | | | | | aethiopica] |
| 2061 | LIB3602-005-Q1-K1-G1 | 5442410 | BLASTX | 298 | 9.00E−27 | 41 | (AF159254) ascorbate peroxidase [Zantedeschia |
| | | | | | | | aethiopica] |
| 2062 | LIB3602-029-Q6-K1-B12 | 2739219 | BLASTX | 248 | 5.00E−21 | 92 | (AJ001161) rpS28 [Hordeum vulgare] |
| 2063 | LIB3602-030-Q6-K1-F5 | 2739219 | BLASTX | 248 | 5.00E−21 | 92 | (AJ001161) rpS28 [Hordeum vulgare] |
| 2064 | LIB3602-090-Q6-K6-C8 | 6633821 | BLASTX | 180 | 7.00E−13 | 39 | (AC009519) F1N19.23 [Arabidopsis thaliana] |
| 2065 | LIB3602-091-Q6-K6-C8 | 6633821 | BLASTX | 180 | 7.00E−13 | 39 | (AC009519) F1N19.23 [Arabidopsis thaliana] |
| 2066 | LIB3602-001-P1-K6-B1 | 6320203 | BLASTX | 262 | 2.00E−22 | 38 | Ydl001wp >gi\|1077511\|pir\|\|S50981 probable |
| | | | | | | | membrane protein YDL001w - yeast |
| | | | | | | | (Saccharomyces cerevisiae) |
| | | | | | | | >gi\|642805\|emb\|CAA88060.1\| (Z48008) unknown |
| | | | | | | | [Saccharomyces cerevisiae] |
| 2067 | LIB3602-002-P1-K6-C4 | 6320203 | BLASTX | 194 | 1.00E−14 | 34 | Ydl001wp >gi\|1077511\|pir\|\|S50981 probable |
| | | | | | | | membrane protein YDL001w - yeast |
| | | | | | | | (Saccharomyces cerevisiae) |
| | | | | | | | >gi\|642805\|emb\|CAA88060.1\| (Z48008) unknown |
| | | | | | | | [Saccharomyces cerevisiae] |
| 2068 | LIB3602-065-Q1-K6-D12 | 7488076 | BLASTX | 532 | 3.00E−54 | 67 | probable clathrin-associated protein F23E12.30 - |
| | | | | | | | Arabidopsis thaliana >gi\|2231702\|gb\|AAB96889.1\| |
| | | | | | | | (U92086) clathrin assembly protein AP19 homolog |
| | | | | | | | [Arabidopsis thaliana] |
| | | | | | | | >gi\|3080409\|emb\|CAA18728.1\| (AL022604) |
| | | | | | | | clathrin assembly protein AP19 homolog [Arabidop |
| 2069 | LIB3602-004-Q1-K1-H1 | 7488076 | BLASTX | 190 | 4.00E−14 | 64 | probable clathrin-associated protein F23E12.30 - |
| | | | | | | | Arabidopsis thaliana >gi\|2231702\|gb\|AAB96889.1\| |
| | | | | | | | (U92086) clathrin assembly protein AP19 homolog |
| | | | | | | | [Arabidopsis thaliana] |
| | | | | | | | >gi\|3080409\|emb\|CAA18728.1\| (AL022604) |
| | | | | | | | clathrin assembly protein AP19 homolog [Arabidop |
| 2070 | LIB3602-070-Q1-K1-F10 | 6321354 | BLASTX | 430 | 4.00E−42 | 43 | Ygl084cp >gi\|1723878\|sp\|P53154\|YGI4_YEAST |
| | | | | | | | HYPOTHETICAL 65.3 KD PROTEIN IN MAD1- |
| | | | | | | | SCY1 INTERGENIC REGION |
| | | | | | | | >gi\|2132541\|pir\|\|S64091 probable membrane |
| | | | | | | | protein YGL084c - yeast (Saccharomyces |
| | | | | | | | cerevisiae) >gi\|1322607\|emb\|CAA96789.1\| |
| | | | | | | | (Z72606) ORF YGL084c [Saccharomy |
| 2071 | LIB3602-054-Q6-K1-E2 | 6321354 | BLASTX | 209 | 2.00E−16 | 35 | Ygl084cp >gi\|1723878\|sp\|P53154\|YGI4_YEAST |
| | | | | | | | HYPOTHETICAL 65.3 KD PROTEIN IN MAD1- |
| | | | | | | | SCY1 INTERGENIC REGION |
| | | | | | | | >gi\|2132541\|pir\|\|S64091 probable membrane |
| | | | | | | | protein YGL084c - yeast (Saccharomyces |
| | | | | | | | cerevisiae) >gi\|1322607\|emb\|CAA96789.1\| |
| | | | | | | | (Z72606) ORF YGL084c [Saccharomy |
| 2072 | LIB3602-062-Q6-K1-H5 | 1707012 | BLASTX | 692 | 6.00E−73 | 72 | (U78721) putative tyrosyl-tRNA synthetase |
| | | | | | | | [Arabidopsis thaliana] |
| 2073 | LIB3602-062-Q6-K1-H6 | 1707012 | BLASTX | 301 | 5.00E−27 | 64 | (U78721) putative tyrosyl-tRNA synthetase |
| | | | | | | | [Arabidopsis thaliana] |
| 2074 | LIB3602-107-Q1-K1-H1 | 7543908 | BLASTX | 600 | 4.00E−62 | 66 | (AL163572) putative protein [Arabidopsis thaliana] |
| 2075 | LIB3602-079-Q6-K6-H1 | 7543908 | BLASTX | 236 | 2.00E−19 | 75 | (AL163572) putative protein [Arabidopsis thaliana] |
| 2076 | LIB3602-089-Q6-K6-E6 | 1170507 | BLASTX | 550 | 3.00E−56 | 92 | EUKARYOTIC INITIATION FACTOR 4A-3 (EIF- |
| | | | | | | | 4A-3) >gi\|100276\|pir\|\|S22579 translation initiation |
| | | | | | | | factor eIF-4A - curled-leaved tobacco |
| | | | | | | | >gi\|19699\|emb\|CAA43514.1\| (X61206) nicotiana |
| | | | | | | | eukaryotic translation initiation factor 4A |
| | | | | | | | [Nicotiana plumbaginifolia] |
| 2077 | LIB3602-118-Q1-K1-H8 | 1170507 | BLASTX | 403 | 7.00E−55 | 95 | EUKARYOTIC INITIATION FACTOR 4A-3 (EIF- |
| | | | | | | | 4A-3) >gi\|100276\|pir\|\|S22579 translation initiation |
| | | | | | | | factor eIF-4A - curled-leaved tobacco |
| | | | | | | | >gi\|19699\|emb\|CAA43514.1\| (X61206) nicotiana |
| | | | | | | | eukaryotic translation initiation factor 4A |
| | | | | | | | [Nicotiana plumbaginifolia] |
| 2078 | LIB3602-010-Q6-K1-G3 | 7378766 | BLASTX | 704 | 2.00E−74 | 75 | (AJ277097) putative kinetochore protein [Hordeum |
| | | | | | | | vulgare] |
| 2079 | LIB3602-100-Q1-K1-B6 | 7378766 | BLASTX | 575 | 3.00E−59 | 72 | (AJ277097) putative kinetochore protein [Hordeum |
| | | | | | | | vulgare] |
| 2080 | LIB3602-100-Q1-K1-C6 | 3881976 | BLASTX | 173 | 3.00E−24 | 74 | (AJ012409) hypothetical protein [Homo sapiens] |
| 2081 | LIB3602-108-Q1-K1-C6 | 3881976 | BLASTX | 162 | 4.00E−23 | 70 | (AJ012409) hypothetical protein [Homo sapiens] |
| 2082 | LIB3602-065-Q1-K6-D11 | 5817608 | BLASTX | 349 | 8.00E−33 | 46 | (AF137288) putative translation initiation factor 2B |
| | | | | | | | beta subunit [Nicotiana tabacum] |
| 2083 | LIB3602-111-Q1-K1-H6 | 5817608 | BLASTX | 197 | 2.00E−15 | 45 | (AF137288) putative translation initiation factor 2B |
| | | | | | | | beta subunit [Nicotiana tabacum] |
| 2084 | LIB3602-100-Q1-K1-C8 | 7431833 | BLASTX | 308 | 7.00E−44 | 67 | NAD(P)+ transhydrogenase (B-specific) (EC |
| | | | | | | | 1.6.1.1) precursor, mitochondrial - human |
| | | | | | | | >gi\|1110520\|gb\|AAC51914.1\| (U40490) |
| | | | | | | | nicotinamide nucleotide transhydrogenase [Homo |
| | | | | | | | sapiens] |
| 2085 | LIB3602-001-P1-K6-A11 | 7431833 | BLASTX | 245 | 2.00E−20 | 67 | NAD(P)+ transhydrogenase (B-specific) (EC |
| | | | | | | | 1.6.1.1) precursor, mitochondrial - human |
| | | | | | | | >gi\|1110520\|gb\|AAC51914.1\| (U40490) |
| | | | | | | | nicotinamide nucleotide transhydrogenase [Homo |
| | | | | | | | sapiens] |
| 2086 | LIB3602-067-Q1-K1-G4 | 465847 | BLASTX | 697 | 2.00E−73 | 67 | HYPOTHETICAL 66.5 KD PROTEIN F02A9.5 IN |
| | | | | | | | CHROMOSOME III >gi\|280542\|pir\|\|S28313 |
| | | | | | | | hypothetical protein F02A9.5 - Caenorhabditis |
| | | | | | | | elegans >gi\|3875448\|emb\|CAA79618.1\| (Z19555) |
| | | | | | | | predicted using Genefinder; similar to Propionyl- |
| | | | | | | | CoA carboxylase beta chain; cDNA EST |
| 2087 | LIB3602-104-Q1-K1-F2 | 465847 | BLASTX | 141 | 4.00E−09 | 66 | HYPOTHETICAL 66.5 KD PROTEIN F02A9.5 IN |
| | | | | | | | CHROMOSOME III >gi\|280542\|pir\|\|S28313 |
| | | | | | | | hypothetical protein F02A9.5 - Caenorhabditis |
| | | | | | | | elegans >gi\|3875448\|emb\|CAA79618.1\| (Z19555) |
| | | | | | | | predicted using Genefinder; similar to Propionyl- |
| | | | | | | | CoA carboxylase beta chain; cDNA EST |
| 2088 | LIB3602-086-Q6-K1-F2 | 7469487 | BLASTX | 178 | 1.00E−12 | 37 | hypothetical protein - Synechocystis sp. (strain PCC |
| | | | | | | | 6803) >gi\|1653572\|dbj\|BAA18485.1\| (D90914) |
| | | | | | | | sterol-C-methyltransferase [Synechocystis sp.] |
| 2089 | LIB3602-067-Q1-K1-E12 | 7469487 | BLASTX | 177 | 2.00E−12 | 42 | hypothetical protein - Synechocystis sp. (strain PCC |
| | | | | | | | 6803) >gi\|1653572\|dbj\|BAA18485.1\| (D90914) |
| | | | | | | | sterol-C-methyltransferase [Synechocystis sp.] |
| 2090 | LIB3602-022-Q6-K1-F3 | 266947 | BLASTX | 225 | 3.00E−18 | 47 | 60S ACIDIC RIBOSOMAL PROTEIN P1 |
| | | | | | | | >gi\|71168\|- Chlamydomonas reinhardtii |
| | | | | | | | >gi\|18211\|emb\|CAA47042.1\| (X66411) ribosomal |
| | | | | | | | protein P1 [Chlamydomonas reinhardtii] |
| 2091 | LIB3602-042-Q6-K1-F8 | 266947 | BLASTX | 148 | 3.00E−09 | 40 | 60S ACIDIC RIBOSOMAL PROTEIN P1 |
| | | | | | | | >gi\|71168\|pir\|\|R6KM1C acidic ribosomal protein |
| | | | | | | | P1, cytosolic - Chlamydomonas reinhardtii |
| | | | | | | | >gi\|18211\|emb\|CAA47042.1\| (X66411) ribosomal |
| | | | | | | | protein P1 [Chlamydomonas reinhardtii] |
| 2092 | LIB3602-069-Q1-K1-E7 | 4218951 | BLASTX | 399 | 2.00E−38 | 80 | (AF081796) fructose-1,6-bisphosphatase precursor |
| | | | | | | | [Brassica napus] |
| 2093 | LIB3602-086-Q6-K1-F3 | 4218951 | BLASTX | 210 | 2.00E−16 | 65 | (AF081796) fructose-1,6-bisphosphatase precursor |
| | | | | | | | [Brassica napus] |
| 2094 | LIB3602-041-Q6-K1-C4 | 6815060 | BLASTX | 894 | 1.00E−96 | 96 | (AP001080) EST C26994(C50622) corresponds to |
| | | | | | | | a region of the predicted gene.; Similar to ADP- |
| | | | | | | | ribosylation factor. (D17760) [Oryza sativa] |
| | | | | | | | >gi\|7242921\|dbj\|BAA92519.1\| (AP001383) EST |
| | | | | | | | C26994(C50622) corresponds to a region of the |
| | | | | | | | predicted gene.; Similar to |
| 2095 | LIB3602-058-Q6-K1-B8 | 6815060 | BLASTX | 634 | 3.00E−66 | 97 | (AP001080) EST C26994(C50622) corresponds to |
| | | | | | | | a region of the predicted gene.; Similar to ADP- |
| | | | | | | | ribosylation factor. (D17760) [Oryza sativa] |
| | | | | | | | >gi\|7242921\|dbj\|BAA92519.1\| (AP001383) EST |
| | | | | | | | C26994(C50622) corresponds to a region of the |
| | | | | | | | predicted gene.; Similar to |
| 2096 | LIB3602-060-Q6-K1-G3 | 4138855 | BLASTX | 489 | 4.00E−49 | 54 | (AF098072) IMMUTANS [Arabidopsis thaliana] |
| 2097 | LIB3602-017-Q6-K1-C2 | 4138855 | BLASTX | 475 | 2.00E−47 | 53 | (AF098072) IMMUTANS [Arabidopsis thaliana] |
| 2098 | LIB3602-112-Q1-K1-A4 | 4759280 | BLASTX | 194 | 1.00E−14 | 68 | U5 snRNP-specific protein, 116 kD |
| | | | | | | | >gi\|434759\|dbj\|BAA04699.1\| (D21163) similar to |
| | | | | | | | human elongation factor 2 mRNA (HSEF2). [Homo |
| | | | | | | | sapiens] |
| 2099 | LIB3602-089-Q6-K6-A4 | 4759280 | BLASTX | 190 | 5.00E−14 | 66 | U5 snRNP-specific protein, 116 kD |
| | | | | | | | >gi\|434759\|dbj\|BAA04699.1\| (D21163) similar to |
| | | | | | | | human elongation factor 2 mRNA (HSEF2). [Homo |
| | | | | | | | sapiens] |
| 2100 | LIB3602-074-Q1-K1-E1 | 3687251 | BLASTX | 183 | 2.00E−13 | 42 | (AC005169) putative ribosomal protein L28 |
| | | | | | | | [Arabidopsis thaliana] |
| 2101 | LIB3602-087-Q6-K1-A2 | 3687251 | BLASTX | 177 | 1.00E−12 | 40 | (AC005169) putative ribosomal protein L28 |
| | | | | | | | [Arabidopsis thaliana] |
| 2102 | LIB3602-050-Q6-K1-C2 | 7489246 | BLASTX | 374 | 9.00E−36 | 55 | oxoglutarate/malate translocator - potato |
| | | | | | | | >gi\|1486472\|emb\|CAA68164.1\| (X99853) |
| | | | | | | | oxoglutarate malate translocator [Solanum |
| | | | | | | | tuberosum] |
| 2103 | LIB3602-063-Q1-K6-D5 | 7489246 | BLASTX | 357 | 1.00E−33 | 49 | oxoglutarate/malate translocator - potato |
| | | | | | | | >gi\|1486472\|emb\|CAA68164.1\| (X99853) |
| | | | | | | | oxoglutarate malate translocator [Solanum |
| | | | | | | | tuberosum] |
| 2104 | LIB3602-012-Q6-K1-A12 | 7435806 | BLASTX | 356 | 2.00E−33 | 48 | cysteine proteinase mir3 (EC 3.4.22.—) - maize |
| | | | | | | | >gi\|2425066\|gb\|AAB88263.1\| (AF019147) cysteine |
| | | | | | | | proteinase Mir3 [Zea mays] |
| 2105 | LIB3602-036-Q6-K1-F11 | 7435806 | BLASTX | 255 | 1.00E−21 | 42 | cysteine proteinase mir3 (EC 3.4.22.—) - maize |
| | | | | | | | >gi\|2425066\|gb\|AAB88263.1\| (AF019147) cysteine |
| | | | | | | | proteinase Mir3 [Zea mays] |
| 2106 | LIB3602-064-Q1-K6-B11 | 3334112 | BLASTX | 279 | 2.00E−24 | 60 | ACYL-COA-BINDING PROTEIN (ACBP) |
| | | | | | | | >gi\|7441625\|pir\|\|T09844 acyl-CoA-binding protein - |
| | | | | | | | castor bean >gi\|1938236\|emb\|CAA70200.1\| |
| | | | | | | | (Y08996) acyl-CoA-binding protein [Ricinus |
| | | | | | | | communis] |
| 2107 | LIB3602-011-Q6-K1-H5 | 3334112 | BLASTX | 278 | 2.00E−24 | 60 | ACYL-COA-BINDING PROTEIN (ACBP) |
| | | | | | | | >gi\|7441625\|pir\|\|T09844 acyl-CoA-binding protein - |
| | | | | | | | castor bean >gi\|1938236\|emb\|CAA70200.1\| |
| | | | | | | | (Y08996) acyl-CoA-binding protein [Ricinus |
| | | | | | | | communis] |
| 2108 | LIB3602-078-Q6-K6-F9 | 6498428 | BLASTX | 684 | 6.00E−72 | 69 | (AP000815) Similar to Arabidopsis thaliana |
| | | | | | | | chromosome II BAC T27A16 sequence; |
| | | | | | | | hypothetical protein. (AC005496) [Oryza sativa] |
| 2109 | LIB3602-072-Q1-K1-E5 | 6498428 | BLASTX | 648 | 1.00E−67 | 68 | (AP000815) Similar to Arabidopsis thaliana |
| | | | | | | | chromosome II BAC T27A16 sequence; |
| | | | | | | | hypothetical protein. (AC005496) [Oryza sativa] |
| 2110 | LIB3602-041-Q6-K1-A4 | 7549645 | BLASTX | 199 | 1.00E−15 | 82 | (AC023912) ribosomal protein L29, putative |
| | | | | | | | [Arabidopsis thaliana] |
| 2111 | LIB3602-010-Q6-K1-H9 | 7549645 | BLASTX | 199 | 2.00E−15 | 82 | (AC023912) ribosomal protein L29, putative |
| | | | | | | | [Arabidopsis thaliana] |
| 2112 | LIB3602-074-Q1-K1-C9 | 3153873 | BLASTX | 829 | 6.00E−89 | 77 | (AF065393) putative G-binding protein [Homo |
| | | | | | | | sapiens] |
| 2113 | LIB3602-107-Q1-K1-B12 | 3153873 | BLASTX | 773 | 2.00E−82 | 79 | (AF065393) putative G-binding protein [Homo |
| | | | | | | | sapiens] |
| 2114 | LIB3602-027-Q6-K1-A6 | 7271018 | BLASTX | 274 | 5.00E−24 | 54 | (AJ390506) ribosomal protein L16 [Candida |
| | | | | | | | albicans] |
| 2115 | LIB3602-049-Q6-K1-C12 | 7271018 | BLASTX | 202 | 1.00E−15 | 50 | (AJ390506) ribosomal protein L16 [Candida |
| | | | | | | | albicans] |
| 2116 | LIB3602-041-Q6-K1-A3 | 7469371 | BLASTX | 654 | 2.00E−68 | 60 | hypothetical protein - Synechocystis sp. (strain PCC |
| | | | | | | | 6803) >gi\|1001311\|dbj\|BAA10798.1\| (D64006) |
| | | | | | | | hypothetical protein [Synechocystis sp.] |
| 2117 | LIB3602-041-Q6-K1-A8 | 7469371 | BLASTX | 199 | 4.00E−15 | 52 | hypothetical protein - Synechocystis sp. (strain PCC |
| | | | | | | | 6803) >gi\|1001311\|dbj\|BAA10798.1\| (D64006) |
| | | | | | | | hypothetical protein [Synechocystis sp.] |
| 2118 | LIB3602-091-Q6-K6-B11 | 7484843 | BLASTX | 397 | 3.00E−38 | 66 | cell division protein ftsY homolog F4I18.25 - |
| | | | | | | | Arabidopsis thaliana >gi\|3386617\|gb\|AAC28547.1\| |
| | | | | | | | (AC004665) putative signal recognition particle |
| | | | | | | | receptor (alpha subunit) [Arabidopsis thaliana] |
| 2119 | LIB3602-094-Q6-K6-B11 | 7484843 | BLASTX | 285 | 3.00E−25 | 54 | cell division protein ftsY homolog F4I18.25 - |
| | | | | | | | Arabidopsis thaliana >gi\|3386617\|gb\|AAC28547.1\| |
| | | | | | | | (AC004665) putative signal recognition particle |
| | | | | | | | receptor (alpha subunit) [Arabidopsis thaliana] |
| 2120 | LIB3602-093-Q6-K6-H4 | 729396 | BLASTX | 278 | 2.00E−24 | 36 | ELONGATION FACTOR 1-ALPHA (EF-1- |
| | | | | | | | ALPHA) (ELONGATION FACTOR TU) (EF-TU) |
| | | | | | | | >gi\|581023\|emb\|CAA51984.1\| (X73582) elongation |
| | | | | | | | factor 1-alpha [Desulfurococcus mobilis] |
| 2121 | LIB3602-101-Q1-K1-C3 | 729396 | BLASTX | 226 | 2.00E−18 | 37 | ELONGATION FACTOR 1-ALPHA (EF-1- |
| | | | | | | | ALPHA) (ELONGATION FACTOR TU) (EF-TU) |
| | | | | | | | >gi\|581023\|emb\|CAA51984.1\| (X73582) elongation |
| | | | | | | | factor 1-alpha [Desulfurococcus mobilis] |
| 2122 | LIB3602-038-Q6-K1-D11 | 2494208 | BLASTX | 265 | 5.00E−23 | 58 | DYNEIN BETA CHAIN, FLAGELLAR OUTER |
| | | | | | | | ARM >gi\|7484362\|pir\|\|T08030 dynein beta heavy |
| | | | | | | | chain - Chlamydomonas reinhardtii |
| | | | | | | | >gi\|514215\|gb\|AAA19956.1\| (U02963) dynein beta |
| | | | | | | | heavy chain [Chlamydomonas reinhardtii] |
| 2123 | LIB3602-038-Q6-K1-D12 | 2494208 | BLASTX | 153 | 5.00E−10 | 40 | DYNEIN BETA CHAIN, FLAGELLAR OUTER |
| | | | | | | | ARM >gi\|7484362\|pir\|\|T08030 dynein beta heavy |
| | | | | | | | chain - Chlamydomonas reinhardtii |
| | | | | | | | >gi\|514215\|gb\|AAA19956.1\| (U02963) dynein beta |
| | | | | | | | heavy chain [Chlamydomonas reinhardtii] |
| 2124 | LIB3602-072-Q1-K1-D11 | 4836948 | BLASTX | 526 | 2.00E−53 | 64 | (AC006085) Similar to human CGI-33 protein |
| | | | | | | | [Arabidopsis thaliana] |
| 2125 | LIB3602-028-Q6-K1-B7 | 4836948 | BLASTX | 367 | 7.00E−35 | 63 | (AC006085) Similar to human CGI-33 protein |
| | | | | | | | [Arabidopsis thaliana] |
| 2126 | LIB3602-047-Q6-K1-F2 | 3023740 | BLASTX | 367 | 7.00E−35 | 75 | FERREDOXIN >gi\|7430737\|pir\|\|A68399 ferredoxin |
| | | | | | | | [2Fe-2S] - Chlorella fusca >gi\|2914662\|pdb\|1AWD\| |
| | | | | | | | Ferredoxin [2fe-2s] Oxidized Form From Chlorella |
| | | | | | | | Fusca |
| 2127 | LIB3602-029-Q6-K1-A12 | 3023740 | BLASTX | 340 | 9.00E−32 | 82 | FERREDOXIN >gi\|7430737\|pir\|\|A68399 ferredoxin |
| | | | | | | | [2Fe-2S] - Chlorella fusca >gi\|2914662\|pdb\|1AWD\| |
| | | | | | | | Ferredoxin [2fe-2s] Oxidized Form From Chlorella |
| | | | | | | | Fusca |
| 2128 | LIB3602-003-Q1-K1-D5 | 417744 | BLASTX | 635 | 3.00E−66 | 74 | ADENOSYLHOMOCYSTEINASE (S- |
| | | | | | | | ADENOSYL-L-HOMOCYSTEINE |
| | | | | | | | HYDROLASE) (ADOHCYASE) |
| | | | | | | | >gi\|169663\|gb\|AAA33856.1\| (M81885) S- |
| | | | | | | | adenosylhomocysteine hydrolase [Petroselinum |
| | | | | | | | crispum] |
| 2129 | LIB3602-115-Q1-K1-G10 | 417744 | BLASTX | 492 | 7.00E−62 | 71 | ADENOSYLHOMOCYSTEINASE (S- |
| | | | | | | | ADENOSYL-L-HOMOCYSTEINE |
| | | | | | | | HYDROLASE) (ADOHCYASE) |
| | | | | | | | >gi\|169663\|gb\|AAA33856.1\| (M81885) S- |
| | | | | | | | adenosylhomocysteine hydrolase [Petroselinum |
| | | | | | | | crispum] |
| 2130 | LIB3602-064-Q1-K6-E11 | 1172811 | BLASTX | 479 | 4.00E−48 | 89 | 60S RIBOSOMAL PROTEIN L10-1 (PUTATIVE |
| | | | | | | | TUMOR SUPRESSOR SC34) |
| | | | | | | | >gi\|1076751\|pir\|S49575 ribosomal protein L10.e, |
| | | | | | | | cytosolic - rice >gi\|575355\|emb\|CAA57339.1\| |
| | | | | | | | (X81691) putative tumor suppresser [Oryza sativa] |
| 2131 | LIB3602-117-Q1-K1-E9 | 1172811 | BLASTX | 195 | 1.00E−27 | 87 | 60S RIBOSOMAL PROTEIN L10-1 (PUTATIVE |
| | | | | | | | TUMOR SUPRESSOR SC34) |
| | | | | | | | >gi\|1076751\|pir\|\|S549575 ribosomal protein L10.e, |
| | | | | | | | cytosolic - rice >gi\|575355\|emb\|CAA57339.1\| |
| | | | | | | | (X81691) putative tumor suppresser [Oryza sativa] |
| 2132 | LIB3602-040-Q6-K1-B11 | 6319773 | BLASTX | 235 | 2.00E−19 | 36 | Probable Na+/Pi symporter; Pho89p |
| | | | | | | | >gi\|586363\|sp\|P38361\|YB81_YEAST PUTATIVE |
| | | | | | | | PHOSPHATE-REPRESSIBLE PHOSPHATE |
| | | | | | | | PERMEASE YBR29C >gi\|626777\|pir\|\|S46178 |
| | | | | | | | phosphate-repressible phosphate permease homolog |
| | | | | | | | YBR296c - yeast (Saccharomyces cerevisiae) |
| | | | | | | | >gi\|536756\|emb\|CA |
| 2133 | LIB3602-053-Q6-K1-H12 | 6319773 | BLASTX | 221 | 6.00E−18 | 36 | Probable Na+/Pi symporter; Pho89p |
| | | | | | | | >gi\|586363\|sp\|P38361\|YB8I_YEAST PUTATIVE |
| | | | | | | | PHOSPHATE-REPRESSIBLE PHOSPHATE |
| | | | | | | | PERMEASE YBR29C >gi\|626777\|pir\|\|S46178 |
| | | | | | | | phosphate-repressible phosphate permease homolog |
| | | | | | | | YBR296c - yeast (Saccharomyces cerevisiae) |
| | | | | | | | >gi\|536756\|emb\|CA |
| 2134 | LIB3602-106-Q1-K1-F10 | 7322532 | BLASTX | 206 | 7.00E−16 | 45 | (AC024756) contains similarity to |
| | | | | | | | SW: GLRX_RABIT [Caenorhabditis elegans] |
| 2135 | LIB3602-100-Q1-K1-F10 | 7322532 | BLASTX | 205 | 7.00E−16 | 46 | (AC024756) contains similarity to |
| | | | | | | | SW: GLRX_RABIT [Caenorhabditis elegans] |
| 2136 | LIB3602-047-Q6-K1-C6 | 5714433 | BLASTX | 325 | 5.00E−30 | 41 | (AF120112) chloroplast SRP receptor homolog, |
| | | | | | | | alpha subunit CPFTSY; chloroplast signal |
| | | | | | | | recognition particle receptor alpha homolog |
| | | | | | | | CPFTSY [Arabidopsis thaliana] |
| 2137 | LIB3602-066-Q1-K6-E3 | 5714433 | BLASTX | 202 | 2.00E−15 | 44 | (AF120112) chloroplast SRP receptor homolog, |
| | | | | | | | alpha subunit CPFTSY; chloroplast signal |
| | | | | | | | recognition particle receptor alpha homolog |
| | | | | | | | CPFTSY [Arabidopsis thaliana] |
| 2138 | LIB3602-047-Q6-K1-F4 | 6644196 | BLASTX | 193 | 2.00E−14 | 86 | (AF207690) chlorophyll a/b-binding protein |
| | | | | | | | [Daucus carota] |
| 2139 | LIB3602-059-Q6-K1-H9 | 6644196 | BLASTX | 193 | 2.00E−14 | 86 | (AF207690) chlorophyll a/b-binding protein |
| | | | | | | | [Daucus carota] |
| 2140 | LIB3602-065-Q1-K6-H11 | 4835754 | BLASTX | 624 | 6.00E−65 | 76 | (AC007202) Is a member of the PF\|00162 |
| | | | | | | | Phosphoglycerate kinase family. ESTs gb\|N38721, |
| | | | | | | | gb\|T22178, gb\|R90345, gb\|R90715, gb\|T21140, |
| | | | | | | | gb\|T46295, gb\|H37082, gb\|T46076, gb\|N37132, |
| | | | | | | | gb\|AA597649, gb\|AI100648 and gb\|Z48462 come |
| | | | | | | | from this gene. [Arabidopsis tha> |
| 2141 | LIB3602-057-Q6-K1-F2 | 4835754 | BLASTX | 542 | 2.00E−55 | 67 | (AC007202) Is a member of the PF\|00162 |
| | | | | | | | Phosphoglycerate kinase family. ESTs gb\|N38721, |
| | | | | | | | gb\|T22178, gb\|R90345, gb\|R90715, gb\|T21140, |
| | | | | | | | gb\|T46295, gb\|H37082, gb\|T46076, gb\|N37132, |
| | | | | | | | gb\|AA597649, gb\|AI100648 and gb\|Z48462 come |
| | | | | | | | from this gene. [Arabidopsis tha> |
| 2142 | LIB3602-083-Q6-K6-E4 | 7385201 | BLASTX | 632 | 8.00E−66 | 70 | (AF243182) beta-ketoacyl-ACP synthetase I |
| | | | | | | | [Glycine max] |
| 2143 | LIB3602-062-Q6-K1-E3 | 7331195 | BLASTX | 149 | 3.00E−09 | 33 | (AF236108) putative purple acid phosphatase |
| | | | | | | | precursor [Glycine max] |
| 2144 | LIB3602-068-Q1-K1-H1 | 5441551 | BLASTX | 362 | 2.00E−34 | 63 | (AJ388528) Ribosomal protein [Canis familiaris] |
| 2145 | LIB3602-063-Q1-K6-A2 | 7300833 | BLASTX | 314 | 1.00E−28 | 37 | (AE003738) CG5383 gene product [Drosophila |
| | | | | | | | melanogaster] |
| 2146 | LIB3602-038-Q6-K1-F5 | 7487011 | BLASTX | 193 | 2.00E−14 | 36 | hypothetical protein T14P8.20 - Arabidopsis |
| | | | | | | | thaliana >gi\|3193300\|gb\|AAC19284.1\| (AF069298) |
| | | | | | | | T14P8.20 gene product [Arabidopsis thaliana] |
| | | | | | | | >gi\|7269000\|emb\|CAB80733.1\| (AL161494) |
| | | | | | | | contains EST gb: AI998867.1 [Arabidopsis thaliana] |
| 2147 | LIB3602-042-Q6-K1-E7 | 5478530 | BLASTX | 261 | 2.00E−22 | 40 | (AF130441) UVB-resistance protein UVR8 |
| | | | | | | | [Arabidopsis thaliana] |
| 2148 | LIB3602-074-Q1-K1-A11 | 7108615 | BLASTX | 380 | 4.00E−41 | 63 | AF130845) homogentisate 1,2-dioxygenase |
| | | | | | | | [Arabidopsis thaliana] |
| 2149 | LIB3602-086-Q6-K1-G7 | 6912654 | BLASTX | 456 | 3.00E−45 | 56 | splicing factor 3b, subunit 1, 155 kD |
| | | | | | | | >gi\|4033735\|gb\|AAC97189.1\| (AF054284) |
| | | | | | | | spliceosomal protein SAP 155 [Homo sapiens] |
| 2150 | LIB3602-104-Q1-K1-G1 | 477724 | BLASTX | 221 | 1.00E−17 | 73 | acetyl-CoA synthetase homolog - Escherichia coli |
| | | | | | | | (fragment) >gi\|148105\|gb\|AAA24715.1\| (M87509) |
| | | | | | | | acetyl-CoA synthetase [Escherichia coli] |
| 2151 | LIB3602-051-Q6-K1-B3 | 4874275 | BLASTX | 403 | 4.00E−39 | 53 | (AC007354) Similar to gb\|L26291 clathrin- |
| | | | | | | | associated protein unc-101 from Caenorhabditis |
| | | | | | | | elegans and is a member of the PF\|00928 Adapter |
| | | | | | | | complexes medium subunit family. [Arabidopsis |
| | | | | | | | thaliana] |
| 2152 | LIB3602-086-Q6-K1-A12 | 7485223 | BLASTX | 309 | 5.00E−28 | 62 | hypothetical protein A_IG002N01.18 - Arabidopsis |
| | | | | | | | thaliana >gi\|2191138\|gb\|AAB61025.1\| (AF007269) |
| | | | | | | | A_IG002N01.18 gene product [Arabidopsis |
| | | | | | | | thaliana]>gi\|7267612\|emb\|CAB80924.1\| |
| | | | | | | | (AL161491) hypothetical protein [Arabidopsis |
| | | | | | | | thaliana] |
| 2153 | LIB3602-015-Q6-K1-F6 | 5729802 | BLASTX | 601 | 3.00E−62 | 87 | similar to S. pombe dim1+ |
| | | | | | | | >gi\|6225270\|sp\|O14834\|DIM1_HUMAN DIM1 |
| | | | | | | | PROTEIN HOMOLOG >gi\|6730460\|pdb\|1QGV\|A |
| | | | | | | | Chain A, Human Spliceosomal Protein U5-15 kd |
| | | | | | | | >gi\|2565275\|gb\|AAB81950.1\| (AF023611) Dim1p |
| | | | | | | | homolog [Homo sapiens] |
| | | | | | | | >gi\|6572636\|gb\|AAF17332.1\|AF146373_1 (AF1 |
| 2154 | LIB3602-045-Q6-K1-H6 | 4506729 | BLASTX | 162 | 4.00E−11 | 35 | ribosomal protein S5 |
| | | | | | | | >gi\|1173267\|sp\|P46782\|RS5_HUMAN 40S |
| | | | | | | | RIBOSOMAL PROTEIN S5 |
| | | | | | | | >gi\|1362935\|pir\|\|S55916 ribosomal protein S5, |
| | | | | | | | cytosolic - human >gi\|550021\|gb\|AAA85658.1\| |
| | | | | | | | (U14970) ribosomal protein S5 [Homo sapiens] |
| | | | | | | | >gi\|1096942\|prf\|\|2113200E ribosomal protei |
| 2155 | LIB3602-020-Q6-K1-C11 | 6681153 | BLASTX | 255 | 9.00E−22 | 50 | dolichyl-di-phosphooligosaccharide-protein |
| | | | | | | | glycotransferase >gi\|2662377\|dbj\|BAA23671.1\| |
| | | | | | | | (D89063) oligosaccharyltransferase [Mus musculus] |
| 2156 | LIB3602-023-Q6-K1-A4 | 6041851 | BLASTX | 155 | 6.00E−10 | 56 | (AC009853) unknown protein [Arabidopsis |
| | | | | | | | thaliana] |
| 2157 | LIB3602-006-Q1-K1-F8 | 7293667 | BLASTX | 232 | 7.00E−19 | 40 | (AE003514) CG6597 gene product [Drosophila |
| | | | | | | | melanogaster] |
| 2158 | LIB3602-019-Q6-K1-C11 | 6652878 | BLASTX | 645 | 1.00E−67 | 92 | (AF123390) 26S proteasome AAA-ATPase subunit |
| | | | | | | | RPT1a [Arabidopsis thaliana] |
| 2159 | LIB3602-076-Q6-K6-B2 | 6322518 | BLASTX | 197 | 6.00E−15 | 59 | Clathrin-associated protein, small subunit; Aps2p |
| | | | | | | | >gi\|231554\|sp\|Q00381\|AP17_YEAST CLATHRIN |
| | | | | | | | COAT ASSEMBLY PROTEIN AP17 (CLATHRIN |
| | | | | | | | COAT ASSOCIATED PROTEIN AP17) |
| | | | | | | | (PLASMA MEMBRANE ADAPTOR AP-2 17 KD |
| | | | | | | | PROTEIN) (HA2 17 KD SUBUNIT) (CLATHRIN |
| | | | | | | | ASSEMBLY PROTEIN 2 SMA |
| 2160 | LIB3602-001-P1-K6-E2 | 2497984 | BLASTX | 218 | 3.00E−17 | 31 | MITOCHONDRIAL |
| | | | | | | | CARNITINE/ACYLCARNITINE CARRIER |
| | | | | | | | PROTEIN (CARNITINE/ACYLCARNITINE |
| | | | | | | | TRANSLOCASE) (CAC) |
| | | | | | | | >gi\|1842211\|emb\|CAA66410.1\| (X97831) |
| | | | | | | | carnitine/acylcarnitine carrier protein [Rattus |
| | | | | | | | norvegicus] |
| 2161 | LIB3602-089-Q6-K6-B2 | 7025513 | BLASTX | 167 | 2.00E−11 | 54 | (AF233593) ascorbate oxidase AO1 [Cucumis |
| | | | | | | | melo] |
| 2162 | LIB3602-101-Q1-K1-G1 | 6840800 | BLASTX | 247 | 1.00E−30 | 60 | ADENOSINE KINASE (AK) (ADENOSINE 5′- |
| | | | | | | | PHOSPHOTRANSFERASE) |
| 2163 | LIB3602-077-Q6-K6-A5 | 6525009 | BLASTX | 169 | 1.00E−11 | 46 | (AF198626) copper chaperone homolog CCH |
| | | | | | | | [Oryza sativa] |
| 2164 | LIB3602-077-Q6-K6-G5 | 4836473 | BLASTX | 218 | 3.00E−17 | 45 | (AF123257) 17.6 kD class I small heat shock |
| | | | | | | | protein [Lycopersicon esculentum] |
| 2165 | LIB3602-038-Q6-K1-F6 | 7340070 | BLASTX | 412 | 9.00E−45 | 70 | (AF220552) ribosomal protein L17 [Paralichthys |
| | | | | | | | olivaceus] |
| 2166 | LIB3602-050-Q6-K1-C5 | 6735351 | BLASTX | 433 | 1.00E−42 | 57 | (AL137081) pelota-like protein [Arabidopsis |
| | | | | | | | thaliana] |
| 2167 | LIB3602-003-Q1-K1-E7 | 7302653 | BLASTX | 191 | 3.00E−14 | 52 | (AE003800) Dgp-1 gene product [Drosophila |
| | | | | | | | melanogaster] |
| 2168 | LIB3602-090-Q6-K6-F9 | 6325229 | BLASTX | 204 | 1.00E−15 | 54 | acetoacetyl CoA thiolase; Erg10p |
| | | | | | | | >gi\|730943\|sp\|P41338\|THIL_YEAST ACETYL- |
| | | | | | | | COA ACETYLTRANSFERASE |
| | | | | | | | (ACETOACETYL-COA THIOLASE) |
| | | | | | | | >gi\|1071833\|pir\|\|A55654 acetyl-CoA C- |
| | | | | | | | acetyltransferase (EC 2.3.1.9), cytosolic - yeast |
| | | | | | | | (Saccharomyces cerevisiae) >gi\|311089\|gb\|AAA623 |
| 2169 | LIB3602-087-Q6-K1-B6 | 2500430 | BLASTX | 467 | 6.00E−49 | 70 | 40S RIBOSOMAL PROTEIN S16 |
| 2170 | LIB3602-051-Q6-K1-D4 | 7437805 | BLASTX | 602 | 5.00E−68 | 77 | phenylalanine-tRNA ligase homolog T22F8.180 - |
| | | | | | | | Arabidopsis thaliana |
| | | | | | | | >gi\|4914440\|emb\|CAB43643.1\| (AL050351) |
| | | | | | | | phenylalanyl-trna synthetase-like protein |
| | | | | | | | [Arabidopsis thaliana] |
| | | | | | | | >gi\|7270911\|emb\|CAB80591.1\| (AL161594) |
| | | | | | | | phenylalanyl-trna synthetase-like protein [Ar |
| 2171 | LIB3602-028-Q6-K1-B3 | 5923675 | BLASTX | 347 | 2.00E−32 | 42 | (AC009326) putative mRNA capping enzyme, RNA |
| | | | | | | | guanylyltransferase [Arabidopsis thaliana] |
| 2172 | LIB3602-029-Q6-K1-B2 | 7491269 | BLASTX | 149 | 3.00E−09 | 44 | hypothetical protein SPAC8C9.11 - fission yeast |
| | | | | | | | (Schizosaccharomyces pombe) |
| | | | | | | | >gi\|2408094\|emb\|CAB16299.1\| (Z99168) |
| | | | | | | | hypothetical protein [Schizosaccharomyces pombe] |
| 2173 | LIB3602-068-Q1-K1-B11 | 7267629 | BLASTX | 229 | 9.00E−19 | 54 | (AL161491) putative CAAX prenyl protease |
| | | | | | | | [Arabidopsis thaliana] |
| 2174 | LIB3602-066-Q1-K6-H9 | 4558669 | BLASTX | 328 | 4.00E−30 | 50 | (AC007063) putative nucleotide-sugar transporter |
| | | | | | | | [Arabidopsis thaliana] |
| 2175 | LIB3602-023-Q6-K1-F4 | 2996012 | BLASTX | 627 | 3.00E−65 | 68 | (AF054455) cytosolic phosphoglucose isomerase; |
| | | | | | | | PgiC [Leavenworthia crassa] |
| 2176 | LIB3602-090-Q6-K6-B1 | 7259294 | BLASTX | 254 | 2.00E−21 | 42 | (AB030200) expression of this gene product |
| | | | | | | | inhibits the growth of E. coli [Mus musculus] |
| 2177 | LIB3602-084-Q6-K1-B5 | 6755114 | BLASTX | 331 | 1.00E−30 | 48 | peroxisomal membrane protein 20 |
| | | | | | | | >gi\|6166491\|gb\|AAF04855.1\|AF197951_1 |
| | | | | | | | (AF197951) thioredoxin peroxidase PMP20 [Mus |
| | | | | | | | musculus] |
| 2178 | LIB3602-063-Q1-K6-C8 | 3183373 | BLASTX | 225 | 3.00E−18 | 48 | HYPOTHETICAL 28.3 KD PROTEIN C17A5.05C |
| | | | | | | | IN CHROMOSOME I >gi\|7490843\|pir\|\|T37820 |
| | | | | | | | hypothetical protein SPAC17A5.05c - fission yeast |
| | | | | | | | (Schizosaccharomyces pombe) |
| | | | | | | | >gi\|2370477\|emb\|CAB11505.1\| (Z98849) |
| | | | | | | | hypothetical protein [Schizosaccharomyces pombe] |
| 2179 | LIB3602-109-Q1-K1-H6 | 7329687 | BLASTX | 496 | 4.00E−55 | 83 | (AL162295) ribosomal protein S13-like |
| | | | | | | | [Arabidopsis thaliana] |
| 2180 | LIB3602-011-Q6-K1-G7 | 6751711 | BLASTX | 383 | 1.00E−36 | 50 | (AC018848) putative aspartate aminotransferase |
| | | | | | | | [Arabidopsis thaliana] |
| 2181 | LIB3602-012-Q6-K1-E8 | 6751712 | BLASTX | 287 | 2.00E−25 | 47 | (AC018848) unknown protein [Arabidopsis |
| | | | | | | | thaliana] |
| 2182 | LIB3602-011-Q6-K1-B5 | 2706555 | BLASTX | 593 | 2.00E−61 | 67 | (Y15942) succinate dehydrogenase iron-sulfur |
| | | | | | | | subunit [Agaricus bisporus] |
| 2183 | LIB3602-010-Q6-K1-E8 | 7302498 | BLASTX | 304 | 8.00E−28 | 62 | (AE003796) FK506 [symbol] gene product [Drosophila |
| | | | | | | | melanogaster |
| 2184 | LIB3602-039-Q6-K1-C6 | 7546515 | BLASTX | 474 | 2.00E−47 | 72 | Chain A, Human Translation Initiation Factor Eif1a |
| 2185 | LIB3602-048-Q6-K1QA-E3 | 6573706 | BLASTX | 465 | 2.00E−46 | 56 | (AC009978) T23E18.6 [Arabidopsis thaliana] |
| 2186 | LIB3602-115-Q1-K1-H10 | 6573708 | BLASTX | 234 | 2.00E−19 | 66 | (AC009978) T23E18.8 [Arabidopsis thaliana] |
| 2187 | LIB3602-113-Q1-K1-E6 | 6735373 | BLASTX | 447 | 3.00E−54 | 58 | (AL137082) putative protein [Arabidopsis thaliana] |
| 2188 | LIB3602-057-Q6-K1-G7 | 6323420 | BLASTX | 197 | 5.00E−15 | 76 | Ribosomal protein S29A (S36A) (YS29); Rps29ap |
| | | | | | | | >gi\|730461\|sp\|P41057\|R29A_YEAST 40S |
| | | | | | | | RIBOSOMAL PROTEIN S29-A (S36) (YS29) |
| | | | | | | | >gi\|626904\|pir\|\|S48503 ribosomal protein S29.e.A, |
| | | | | | | | cytosolic - yeast (Saccharomyces cerevisiae) |
| | | | | | | | >gi\|287628\|dbj\|BAA03507.1\| (D14676) ribos |
| 2189 | LIB3602-051-Q6-K1-D8 | 7385055 | BLASTX | 193 | 2.00E−14 | 42 | (AF216387) beta-adaptin-like protein C |
| | | | | | | | [Arabidopsis thaliana] |
| 2190 | LIB3602-116-Q1-K1-E4 | 7304097 | BLASTX | 355 | 2.00E−33 | 54 | (AE003838) CG8711 gene product [Drosophila |
| | | | | | | | melanogaster] |
| 2191 | LIB3602-027-Q6-K1-F1 | 3687243 | BLASTX | 219 | 1.00E−17 | 82 | (AC005169) 40S ribosomal protein S30 |
| | | | | | | | [Arabidopsis thaliana] |
| 2192 | LIB3602-078-Q6-K6-B10 | 7446384 | BLASTX | 327 | 4.00E−30 | 41 | probable protein kinase - tomato |
| | | | | | | | >gi\|237025 [symbol] 722.1\| (Y13273) putative |
| | | | | | | | protein kin [symbol] icon esculentum] |
| | | | | | | | >gi\|5669642\|gb\|AAD [symbol] 406.1\|AF096250_1 |
| | | | | | | | (AF096250) ethylene-responsive protein kinase |
| | | | | | | | TCTR1 [Lycopersicon esculentum] |
| 2193 | LIB3602-117-Q1-K1-G11 | 7487986 | BLASTX | 281 | 6.00E−35 | 49 | outer envelope membrane protein homolog |
| | | | | | | | T6H20.230 - Arabidopsis thaliana |
| | | | | | | | >gi\|5541685\|emb\|CAB51191.1\| (AL096859) |
| | | | | | | | chloroplast import-associated channel homolog |
| | | | | | | | [Arabidopsis thaliana] |
| 2194 | LIB3602-009-Q6-K1-D5 | 3283368 | BLASTX | 317 | 6.00E−29 | 56 | (AF067082) mannitol dehydrogenase [Apium |
| | | | | | | | graveolens] |
| 2195 | LIB3602-058-Q6-K1-B1 | 7076772 | BLASTX | 283 | 4.00E−25 | 47 | (AL138658) dynamin-like protein 4 (ADL4) |
| | | | | | | | [Arabidopsis thaliana] |
| 2196 | LIB3602-093-Q6-K6-H8 | 7294336 | BLASTX | 429 | 4.00E−42 | 58 | (AE003532) Prosbeta2 gene product [Drosophila |
| | | | | | | | melanogaster] |
| 2197 | LIB3602-073-Q1-K1-C2 | 7076779 | BLASTX | 529 | 8.00E−54 | 55 | (AL132975) glycoprotein-like [Arabidopsis |
| | | | | | | | thaliana] |
| 2198 | LIB3602-116-Q1-K1-D11 | 2129893 | BLASTX | 191 | 1.00E−21 | 87 | preprotein translocase secA precursor - garden pea |
| 2199 | LIB3602-011-Q6-K1-D4 | 7445481 | BLASTX | 336 | 3.00E−31 | 54 | hypothetical protein F17M5.230 - Arabidopsis |
| | | | | | | | thaliana>gi\|4490314\|emb\|CAB38805.1\| |
| | | | | | | | (AL035678) putative protein [Arabidopsis thaliana] |
| | | | | | | | >gi\|7270295\|emb\|CAB80064.1\| (AL161583) |
| | | | | | | | putative protein [Arabidopsis thaliana] |
| 2200 | LIB3602-045-Q6-K1-H1 | 5730023 | BLASTX | 629 | 1.00E−65 | 95 | RuvB (E coli homolog)-like 2 |
| | | | | | | | >gi\|4587311\|dbj\|BAA76708.1\| (AB024301) RuvB- |
| | | | | | | | like DNA helicase TIP49b [Homo sapiens] |
| | | | | | | | >gi\|5020422\|gb\|AAD38073.1\|AF155138_1 |
| | | | | | | | (AF155138) RUVBL2 protein [Homo sapiens] |
| | | | | | | | >gi\|5326998\|emb\|CAB46270.1\| (Y18417) |
| | | | | | | | erythrocyte cytosolic prote |
| 2201 | LIB3602-059-Q6-K1-H3 | 5080810 | BLASTX | 457 | 2.00E−45 | 46 | (AC007258) Very similar to helicases [Arabidopsis |
| | | | | | | | thaliana] |
| 2202 | LIB3602-092-Q6-K6-B8 | 6449503 | BLASTN | 35 | 5.00E−10 | 92 | Genomic Sequence For Arabidopsis thaliana Clone |
| | | | | | | | F15F15, Chromosome V, complete sequence |
| 2203 | LIB3602-040-Q6-K1-D3 | 2760327 | BLASTX | 481 | 3.00E−48 | 72 | (AC002130) F1N21.12 [Arabidopsis thaliana] |
| 2204 | LIB3602-042-Q6-K1-A11 | 1708463 | BLASTX | 205 | 8.00E−16 | 31 | IAA-AMINO ACID HYDROLASE |
| | | | | | | | >gi\|887785\|gb\|AAB60293.1\| (U23794) ILR1 |
| | | | | | | | [Arabidopsis thaliana] |
| 2205 | LIB3602-026-Q6-K1-G3 | 586059 | BLASTX | 697 | 2.00E−73 | 74 | LYSYL--TRNA SYNTHETASE (LYSINE-TRNA |
| | | | | | | | LIGASE) (LYSRS) >gi\|543180\|pir\|\|S43187 lysine-- |
| | | | | | | | tRNA ligase (EC 6.1.1.6) - long-tailed hamster |
| | | | | | | | >gi\|469122\|emb\|CAA83505.1\| (Z31711) Lysyl |
| | | | | | | | tRNA Synthetase [Cricetulus longicaudatus] |
| 2206 | LIB3602-068-Q1-K1-A7 | 3980394 | BLASTX | 177 | 2.00E−12 | 41 | (AC004561) putative zinc transporter [Arabidopsis |
| | | | | | | | thaliana] |
| 2207 | LIB3602-032-Q6-K1-C1 | 6553927 | BLASTX | 190 | 2.00E−14 | 86 | (AC012329) putative alpha NAC [Arabidopsis |
| | | | | | | | thaliana] >gi\|6561948\|emb\|CAB62452.1\| |
| | | | | | | | (AL132964) alpha NAC-like protein [Arabidopsis |
| | | | | | | | thaliana] |
| 2208 | LIB3602-087-Q6-K1-G11 | 7329665 | BLASTX | 329 | 9.00E−34 | 43 | (AL162351) putative protein [Arabidopsis thaliana] |
| 2209 | LIB3602-054-Q6-K1-H12 | 4557765 | BLASTX | 475 | 1.00E−47 | 59 | 5-methyltetrahydrofolate-homocysteine |
| | | | | | | | methyltransferase >gi\|2160699\|gb\|AAB58906.1\| |
| | | | | | | | (U75743) methionine synthase [Homo sapiens] |
| 2210 | LIB3602-091-Q6-K6-B9 | 4826686 | BLASTX | 388 | 3.00E−37 | 57 | DEAD/H (Asp-Glu-Ala-Asp/His) box polypeptide 1 |
| | | | | | | | >gi\|6919862\|sp\|Q92499\|DDX1_HUMAN DEAD |
| | | | | | | | BOX PROTEIN 1 (DEAD BOX PROTEIN- |
| | | | | | | | RETINOBLASTOMA) (DBP-RB) |
| | | | | | | | >gi\|3123574\|emb\|CAA49992.1\| (X70649) member |
| | | | | | | | of DEAD box protein family [Homo sapiens] |
| 2211 | LIB3602-116-Q1-K1-A3 | 4506701 | BLASTX | 235 | 2.00E−26 | 89 | ribosomal protein S23 |
| | | | | | | | >gi\|730647\|sp\|P39028\|RS23_HUMAN 40S |
| | | | | | | | RIBOSOMAL PROTEIN S23 |
| | | | | | | | >gi\|543449\|pir\|\|S41955 ribosomal protein S23, |
| | | | | | | | cytosolic - rat >gi\|631360\|pir\|\|S42105 ribosomal |
| | | | | | | | protein S23, cytosolic - human |
| | | | | | | | >gi\|414349\|dbj\|BAA03400.1\| (D14530) ribosomal |
| | | | | | | | pro |
| 2212 | LIB3602-072-Q1-K1-E8 | 6322576 | BLASTX | 186 | 1.00E−13 | 32 | Yjr116wp >gi\|1352917\|sp\|P47153\|YJ86_YEAST |
| | | | | | | | HYPOTHETICAL 32.0 KD PROTEIN IN NNF1- |
| | | | | | | | STE24 INTERGENIC REGION |
| | | | | | | | >gi\|1078275\|pir\|\|S57139 probable membrane |
| | | | | | | | protein YJR116w - yeast (Saccharomyces |
| | | | | | | | cerevisiae) >gi\|1015835\|emb\|CAA89646.1\| |
| | | | | | | | (Z49616) ORF YJR116w [Saccharom |
| 2213 | LIB3602-056-Q6-K1-G11 | 6566272 | BLASTX | 607 | 4.00E−63 | 79 | (AB008016) similar to ribosomal protein S2 |
| | | | | | | | [Arabidopsis thaliana] |
| 2214 | LIB3602-087-Q6-K1-H2 | 4874265 | BLASTX | 595 | 2.00E−61 | 67 | (AC007354) EST gb\|F13926 comes from this gene. |
| | | | | | | | [Arabidopsis thaliana] |
| 2215 | LIB3602-059-Q6-K1-E6 | 2982297 | BLASTX | 584 | 3.00E−60 | 68 | (AF051233) KIAA0107-like protein [Picea |
| | | | | | | | mariana] |
| 2216 | LIB3602-054-Q6-K1-E11 | 7435895 | BLASTX | 145 | 6.00E−09 | 51 | multicatalytic endopeptidase complex (EC |
| | | | | | | | 3.4.99.46) beta chain - Arabidopsis thaliana |
| | | | | | | | >gi\|2511594\|emb\|CAA74028.1\| (Y13694) |
| | | | | | | | multicatalytic endopeptidase complex, proteasome |
| | | | | | | | precursor, beta subunit [Arabidopsis thaliana] |
| | | | | | | | >gi\|2827525\|emb\|CAA16533.1\| (AL02163 |
| 2217 | LIB3602-100-Q1-K1-G11 | 322577 | BLASTX | 294 | 3.00E−26 | 49 | Raf protein kinase homolog CTR1 - Arabidopsis |
| | | | | | | | thaliana |
| 2218 | LIB3602-040-Q6-K1-C4 | 7573420 | BLASTX | 414 | 1.00E−40 | 66 | (AL163816) translation releasing factor RF-1-like |
| | | | | | | | protein [Arabidopsis thaliana] |
| 2219 | LIB3602-055-Q6-K1-F7 | 2462761 | BLASTX | 434 | 9.00E−43 | 56 | (AC002292) Highly similar to auxin-induced |
| | | | | | | | protein (aldo/keto reductase family) [Arabidopsis |
| | | | | | | | thaliana] |
| 2220 | LIB3602-094-Q6-K6-E1 | 7294700 | BLASTX | 150 | 3.00E−09 | 59 | (AE003544) CG7351 gene product [Drosophila |
| | | | | | | | melanogaster] |
| 2221 | LIB3602-092-Q6-K6-F10 | 5281319 | BLASTX | 197 | 8.00E−15 | 34 | (AF134814) ceruloplasmin [Ovis aries] |
| 2222 | LIB3602-088-Q6-K6-F1 | 4587520 | BLASTX | 159 | 2.00E−10 | 45 | (AC007060) Strong similarity to gb\|X71057 protein |
| | | | | | | | kinase from Nicotiana tabacum and contains |
| | | | | | | | PF\|00069 eukaryotic protein kinase domain. |
| | | | | | | | [Arabidopsis thaliana] |
| 2223 | LIB3602-002-P1-K6-D10 | 3928758 | BLASTX | 520 | 1.00E−52 | 62 | (AB007987) Lipoic acid synthase [Arabidopsis |
| | | | | | | | thaliana] >gi\|4454462\|gb\|AAD20909.1\| |
| | | | | | | | (AC006234) lipoic acid synthase (LIP1) |
| | | | | | | | [Arabidopsis thaliana] |
| 2224 | LIB3602-049-Q6-K1-C11 | 2501356 | BLASTX | 406 | 1.00E−39 | 59 | TRANSKETOLASE, CHLOROPLAST |
| | | | | | | | PRECURSOR (TK) >gi\|1658322\|emb\|CAA90427.1\| |
| | | | | | | | (Z50099) transketolase precursor [Solanum |
| | | | | | | | tuberosum] |
| 2225 | LIB3602-104-Q1-K1-H1 | 2494112 | BLASTX | 667 | 6.00E−70 | 66 | (AC002376) Match to Arabidopsis ATHKCP |
| | | | | | | | (gb\|L40948). ESTs gb\|ATTS0764, gb\|R90646, |
| | | | | | | | gb\|AA389809, gb\|ATTS2615 come from this gene. |
| | | | | | | | [Arabidopsis thaliana] |
| | | | | | | | >gi\|3126868\|gb\|AAC15999.1\| (AF061570) |
| | | | | | | | potassium channel beta subunit homolog |
| | | | | | | | [Arabidopsis thaliana] |
| 2226 | LIB3602-038-Q6-K1-B12 | 6503290 | BLASTX | 479 | 5.00E−48 | 56 | (AC011713) Similar to gb\|U21855 CCR4- |
| | | | | | | | associated factor 1 (CAF1) from Mus musculus. |
| | | | | | | | ESTs gb\|AAA394972, gb\|AA585812 and |
| | | | | | | | gb\|H77015 come from this gene. [Arabidopsis |
| | | | | | | | thaliana] |
| 2227 | LIB3602-111-Q1-K1-H3 | 2760362 | BLASTX | 190 | 4.00E−14 | 37 | (AF016511) 15.9 kDa subunit of RNA polymerase |
| | | | | | | | II [Arabidopsis thaliana] |
| 2228 | LIB3602-004-Q1-K1-F12 | 3122387 | BLASTX | 816 | 2.00E−87 | 67 | WD-40 REPEAT PROTEIN MSI1 |
| | | | | | | | >gi\|2394229\|gb\|AAB70242.1\| (AF016846) WD-40 |
| | | | | | | | repeat protein [Arabidopsis thaliana] |
| 2229 | LIB3602-032-Q6-K1-B8 | 7076763 | BLASTX | 615 | 6.00E−64 | 72 | (AL138658) citrate synthase-like protein |
| | | | | | | | [Arabidopsis thaliana] |
| 2230 | LIB3602-058-Q6-K1-B2 | 5566579 | BLASTN | 35 | 8.00E−10 | 92 | Lepilemur dorsalis genomic fragment, RAPD with |
| | | | | | | | primer operon OPH4, clone A8b |
| 2231 | LIB3602-001-P1-K6-D3 | 4666287 | BLASTX | 251 | 2.00E−21 | 50 | (D85764) cytosolic monodehydroascorbate |
| | | | | | | | reductase [Oryza sativa] |
| 2232 | LIB3602-056-Q6-K1-C11 | 3980378 | BLASTX | 147 | 3.00E−09 | 46 | (AC004561) putative RNA-binding protein |
| | | | | | | | [Arabidopsis thaliana] |
| 2233 | LIB3602-037-Q6-K1-H12 | 3687239 | BLASTX | 491 | 2.00E−49 | 66 | (AC005169) putative clathrin assembly protein |
| | | | | | | | [Arabidopsis thaliana] |
| 2234 | LIB3602-040-Q6-K1-A6 | 5002553 | BLASTX | 239 | 6.00E−20 | 42 | (AF074603) NonF [Streptomyces griseus subsp. |
| | | | | | | | griseus] |
| 2235 | LIB3602-025-Q6-K1-D4 | 6403492 | BLASTX | 373 | 1.00E−35 | 43 | (AC010871) unknown protein [Arabidopsis |
| | | | | | | | thaliana] |
| 2236 | LIB3602-012-Q6-K1-D8 | 994736 | BLASTX | 145 | 3.00E−09 | 74 | (M18327) LacOPZ-alpha peptide from pUC9; |
| | | | | | | | putative [unidentified cloning vector] |
| | | | | | | | >gi\|994738\|gb\|AAA75563.1\| (M18328) LacOPZ- |
| | | | | | | | alpha peptide from pUC9; putative [Cloning vector |
| | | | | | | | pBGS9+] >gi\|994740\|gb\|AAA75565.1\| (M18329) |
| | | | | | | | LacOPZ-alpha peptide from pUC9; putative |
| 2237 | LIB3602-006-Q1-K1-D11 | 6690272 | BLASTX | 216 | 5.00E−17 | 50 | (AF114386) putative protease HhoA precursor |
| | | | | | | | [Arabidopsis thaliana] |
| 2238 | LIB3602-023-Q6-K1-A2 | 4507277 | BLASTX | 289 | 9.00E−26 | 38 | serine/threonine kinase 2 |
| | | | | | | | >gi\|1709347\|sp\|P51957\|STK2_HUMAN |
| | | | | | | | SERINE/THREONINE-PROTEIN KINASE NRK2 |
| | | | | | | | (SERINE/THREONINE KINASE 2) |
| | | | | | | | >gi\|7427997\|pir\|\|I78885 serine/threonine-specific |
| | | | | | | | protein kinase (EC 2.7.1.—) STK2 - human |
| | | | | | | | >gi\|348245\|gb\|AAA36658.1\| (L20321) prote |
| 2239 | LIB3602-052-Q6-K1-D6 | 7471680 | BLASTX | 153 | 7.00E−10 | 37 | conserved hypothetical protein - Deinococcus |
| | | | | | | | radiodurans (strain R1) |
| | | | | | | | >gi\|6458157\|gb\|AAF10050.1\|AE001906_6 |
| | | | | | | | (AE001906) conserved hypothetical protein |
| | | | | | | | [Deinococcus radiodurans] |
| 2240 | LIB3602-019-Q6-K1-H3 | 3201626 | BLASTX | 143 | 5.00E−09 | 37 | (AC004669) putative protein kinase [Arabidopsis |
| | | | | | | | thaliana] |
| 2241 | LIB3602-022-Q6-K1-G3 | 6970044 | BLASTX | 481 | 3.00E−48 | 61 | (AF195243) apospory-associated protein C; APOC |
| | | | | | | | [Chlamydomonas reinhardtii] |
| 2242 | LIB3602-066-Q1-K6-F9 | 7208213 | BLASTX | 147 | 4.00E−09 | 41 | (AF160800) constitutive photomorphogenic 11 |
| | | | | | | | [Oryza sativa subsp. indica] |
| 2243 | LIB3602-045-Q6-K1-B1 | 7241508 | BLASTN | 43 | 4.00E−15 | 88 | Sequence 36 from Patent EP0892047 |
| 2244 | LIB3602-103-Q1-K1-E6 | 2462752 | BLASTX | 345 | 9.00E−41 | 56 | (AC002292) Phosphatidylinositol 3-kinase |
| | | | | | | | [Arabidopsis thaliana] |
| 2245 | LIB3602-085-Q6-K1-D8 | 2493046 | BLASTX | 193 | 2.00E−14 | 55 | ATP SYNTHASE DELTA′ CHAIN, |
| | | | | | | | MITOCHONDRIAL PRECURSOR |
| | | | | | | | >gi\|82297\|pir\|\|A41740 H+-transporting ATP |
| | | | | | | | synthase (EC 3.6.1.34) delta′ chain precursor - sweet |
| | | | | | | | potato >gi\|217938\|dbj\|BAA01511.1\| (D10660) |
| | | | | | | | mitochondrial F1-ATPase delta subunit [Ipomoea |
| | | | | | | | batatas] |
| 2246 | LIB3602-079-Q6-K6-C5 | 7303555 | BLASTX | 338 | 2.00E−31 | 48 | (AE003824) CG8983 gene product [Drosophila |
| | | | | | | | melanogaster] |
| 2247 | LIB3602-013-Q6-K1-G3 | 484466 | BLASTX | 345 | 3.00E−32 | 41 | glucan endo-1,3-beta-D-glucosidase (EC 3.2.1.39) |
| | | | | | | | precursor - Bacillus circulans (strain IAM1165) |
| | | | | | | | >gi\|452882\|gb\|AAC60453.1\| (S67033) beta-1,3- |
| | | | | | | | glucanase {EC 3.2.1.39} [Bacillus circulans, |
| | | | | | | | IAM1165, Peptide, 877 aa] |
| | | | | | | | >gi\|601878\|dbj\|BAA04469.1\| (D17519) beta-1, |
| 2248 | LIB3602-017-Q6-K1-A8 | 7362989 | BLASTN | 34 | 2.00E−09 | 82 | Homo sapiens partial mRNA, clone c4-1b12 |
| 2249 | LIB3602-035-Q1-K1-A7 | 2500295 | BLASTX | 275 | 6.00E−24 | 50 | 50S RIBOSOMAL PROTEIN L21 |
| | | | | | | | >gi\|7428682\|pir\|\|S75901 ribosomal protein L21 - |
| | | | | | | | Synechocystis sp. (strain PCC 6803) |
| | | | | | | | >gi\|1653446\|dbj\|BAA18360.1\| (D90913) 50S |
| | | | | | | | ribosomal protein L21 [Synechocystis sp.] |
| 2250 | LIB3602-049-Q6-K1-A4 | 2501188 | BLASTX | 194 | 3.00E−15 | 71 | THIAZOLE BIOSYNTHETIC ENZYME |
| | | | | | | | PRECURSOR (ARA6) >gi\|2129750\|pir\|\|S71191 |
| | | | | | | | thiamin biosynthesis protein thi4 - Arabidopsis |
| | | | | | | | thaliana >gi\|1113783\|gb\|AAC97124.1\| (U17589) |
| | | | | | | | Thi1 protein [Arabidopsis thaliana] |
| 2251 | LIB3602-018-Q6-K1-D11 | 400989 | BLASTX | 150 | 9.00E−10 | 56 | 50S RIBOSOMAL PROTEIN L24, |
| | | | | | | | CHLOROPLAST PRECURSOR (CL24) |
| | | | | | | | >gi\|322771\|pir\|\|A45113 ribosomal protein L24 |
| | | | | | | | precursor - common tobacco |
| | | | | | | | >gi\|170273\|gb\|AAA34086.1\| (M87838) ribosomal |
| | | | | | | | protein L24 [Nicotiana tabacum] |
| | | | | | | | >gi\|170324\|gb\|AAA34114.1\| (M87839) ribosomal |
| | | | | | | | prote |
| 2252 | LIB3602-086-Q6-K1-E1 | 6598752 | BLASTX | 300 | 6.00E−27 | 64 | (AC007290) putative chromosome associated |
| | | | | | | | protein [Arabidopsis thaliana] |
| 2253 | LIB3602-059-Q6-K1-E8 | 7434997 | BLASTX | 268 | 3.00E−23 | 32 | lysosomal acid lipase - human |
| | | | | | | | >gi\|505053\|gb\|AAB60328.1\| (U08464) lysosomal |
| | | | | | | | acid lipase [Homo sapiens] |
| | | | | | | | >gi\|506431\|emb\|CAA83495.1\| (Z31690) lysosomal |
| | | | | | | | acid lipase [Homo sapiens] |
| 2254 | LIB3602-026-Q6-K1-H10 | 7462772 | BLASTX | 170 | 9.00E−12 | 30 | hypothetical protein TM0484 - Thermotoga |
| | | | | | | | maritima (strain MSB8) |
| | | | | | | | >gi\|4980995\|gb\|AAD35569.1\|AE001726_3 |
| | | | | | | | (AE001726) pyrimidine precursor biosynthesis |
| | | | | | | | enzyme, putative [Thermotoga maritima] |
| 2255 | LIB3602-042-Q6-K1-B1 | 2443886 | BLASTX | 363 | 2.00E−34 | 64 | (AC002294) Unknown protein [Arabidopsis |
| | | | | | | | thaliana] |
| 2256 | LIB3602-028-Q6-K1-D7 | 133891 | BLASTX | 222 | 7.00E−18 | 50 | 40S RIBOSOMAL PROTEIN S26 (DS31) |
| | | | | | | | >gi\|71054\|pir\|\|R3FF26 ribosomal protein S26 - fruit |
| | | | | | | | fly (Drosophila melanogaster) |
| | | | | | | | >gi\|8494\|emb\|CAA32463.1\| (X14247) ribosomal |
| | | | | | | | protein S31 [Drosophila melanogaster] |
| | | | | | | | >gi\|4469169\|emb\|CAB38441.1\| (X13625) |
| | | | | | | | ribosomal protein S31 |
| 2257 | LIB3602-119-Q1-K1-B6 | 2500243 | BLASTX | 151 | 3.00E−10 | 72 | 50S RIBOSOMAL PROTEIN L6 |
| | | | | | | | >gi\|2127652\|pir\|\|S62827 ribosomal protein L6 - |
| | | | | | | | Mycoplasma pneumoniae (strain ATCC 29342) |
| | | | | | | | >gi\|2146617\|pir\|\|S73977 ribosomal protein L6 - |
| | | | | | | | Mycoplasma pneumoniae (SGC3) (ATCC 29342) |
| | | | | | | | >gi\|1215708\|gb\|AAC43701.1\| (U34795) RplF |
| | | | | | | | [Mycoplasma |
| 2258 | LIB3602-074-Q1-K1-D5 | 476608 | BLASTN | 37 | 4.00E−11 | 91 | Drosophila melanogaster ribosomal protein L19 |
| | | | | | | | mRNA |
| 2259 | LIB3602-032-Q6-K1-C3 | 7572912 | BLASTX | 150 | 2.00E−09 | 38 | (AL163763) putative protein [Arabidopsis thaliana] |
| 2260 | LIB3602-048-Q6-K1QA-E2 | 1707018 | BLASTX | 287 | 2.00E−25 | 52 | (U78721) putative related to microbial divalent |
| | | | | | | | cation tolerance proteins [Arabidopsis thaliana] |
| 2261 | LIB3602-059-Q6-K1-A2 | 6630731 | BLASTX | 425 | 1.00E−41 | 45 | (AL132958) RNA helicase-like protein |
| | | | | | | | [Arabidopsis thaliana] |
| 2262 | LIB3602-074-Q1-K1-A9 | 1703457 | BLASTX | 288 | 2.00E−25 | 51 | CATION-TRANSPORTING ATPASE CA1 |
| | | | | | | | >gi\|1103646\|emb\|CAA63790.1\| (X93592) CA1 |
| | | | | | | | [Dunaliella bioculata] |
| 2263 | LIB3602-085-Q6-K1-E4 | 6630733 | BLASTX | 510 | 1.00E−64 | 71 | (AL132958) Cytochrom P450-like protein |
| | | | | | | | [Arabidopsis thaliana] |
| 2264 | LIB3602-119-Q1-K1-H10 | 1350947 | BLASTX | 156 | 1.00E−11 | 78 | 40S RIBOSOMAL PROTEIN S18 |
| | | | | | | | >gi\|1076216\|pir\|\|S51145 ribosomal protein S18.e, |
| | | | | | | | cytosolic - Chlamydomonas reinhardtii |
| | | | | | | | >gi\|624957\|emb\|CAA58668.1\| (X83693) ribosomal |
| | | | | | | | protein S18 [Chlamydomonas reinhardtii] |
| | | | | | | | >gi\|1587084\|prf\|\|2205351A ribosomal protein S18 |
| | | | | | | | [Chlamyd |
| 2265 | LIB3602-103-Q1-K1-E1 | 7209723 | BLASTX | 244 | 2.00E−20 | 43 | (AB034912) WD-repeat like sequence [Homo |
| | | | | | | | sapiens] |
| 2266 | LIB3602-014-Q6-K1-A2 | 2511590 | BLASTX | 301 | 2.00E−27 | 58 | (Y13692) multicatalytic endopeptidase complex, |
| | | | | | | | proteasome component, beta subunit [Arabidopsis |
| | | | | | | | thaliana] >gi\|3421111\|gb\|AAC32070.1\| (AF043534) |
| | | | | | | | 20S proteasome beta subunit PBD1 [Arabidopsis |
| | | | | | | | thaliana] |
| 2267 | LIB3602-007-Q1-K1-H12 | 7488326 | BLASTX | 315 | 1.00E−28 | 56 | SEN1 protein homolog T20K24.14 - Arabidopsis |
| | | | | | | | thaliana >gi\|3176714\|gb\|AAD12029.1\| (AC002392) |
| | | | | | | | putative DNA2-NAM7 helicase family protein |
| | | | | | | | [Arabidopsis thaliana] |
| 2268 | LIB3602-039-Q6-K1-D5 | 7485815 | BLASTX | 279 | 1.00E−24 | 60 | hypothetical protein F19I3.9 - Arabidopsis thaliana |
| | | | | | | | >gi\|3033382\|gb\|AAC12826.1\| (AC004238) |
| | | | | | | | unknown protein [Arabidopsis thaliana] |
| 2269 | LIB3602-035-Q1-K1-E5 | 7297653 | BLASIX | 232 | 4.00E−19 | 40 | (AE003628) CG4968 gene product [Drosophila |
| | | | | | | | melanogaster] |
| 2270 | LIB3602-118-Q1-K1-H9 | 7484927 | BLASTX | 146 | 6.00E−09 | 57 | DNA-3-methyladenine glycosidase I homolog |
| | | | | | | | F18B3.160 - Arabidopsis thaliana |
| | | | | | | | >gi\|4835239\|emb\|CAB42917.1\| (AL049862) |
| | | | | | | | putative DNA-3-methyladenine glycosidase |
| | | | | | | | [Arabidopsis thaliana] |
| 2271 | LIB3602-039-Q6-K1-B2 | 5669636 | BLASTX | 328 | 3.00E−30 | 44 | (AF096247) ethylene-responsive elongation factor |
| | | | | | | | EF-Ts precursor [Lycopersicon esculentum] |
| 2272 | LIB3602-077-Q6-K6-G10 | 5669638 | BLASTX | 417 | 1.00E−40 | 74 | (AF096248) ethylene-responsive RNA helicase |
| | | | | | | | [Lycopersicon esculentum] |
| 2273 | LIB3602-039-Q6-K1-E12 | 7459497 | BLASTX | 194 | 1.00E−14 | 32 | hypothetical protein sll0886 - Synechocystis sp. |
| | | | | | | | (strain PCC 6803) >gi\|1001204\|dbj\|BAA10444.1\| |
| | | | | | | | (D64003) hypothetical protein [Synechocystis sp.] |
| 2274 | LIB3602-012-Q6-K1-C11 | 404015 | BLASTX | 174 | 9.00E−24 | 59 | (U02032) ribosomal protein L23a [Homo sapiens] |
| 2275 | LIB3602-094-Q6-K6-F8 | 1172599 | BLASTX | 354 | 3.00E−33 | 54 | PROTEASOME COMPONENT C5 |
| | | | | | | | (MULTICATALYTIC ENDOPEPTIDASE |
| | | | | | | | COMPLEX SUBUNIT C5) (TAS-F22/FAFP98) |
| | | | | | | | >gi\|600387\|emb\|CAA47753.1\| (X67338) |
| | | | | | | | proteosome subunit [Arabidopsis thaliana] |
| 2276 | LIB3602-084-Q6-K1-H1 | 1942873 | BLASTX | 210 | 2.00E−16 | 47 | Thioredoxin H (Oxidized Form), Nmr, 23 Structures |
| 2277 | LIB3602-061-Q6-K1-E4 | 7512679 | BLASTX | 484 | 1.00E−48 | 68 | hypothetical protein DKFZp434N241.1 - human |
| | | | | | | | (fragment) >gi\|5911980\|emb\|CAB55960.1\| |
| | | | | | | | (AL117492) hypothetical protein [Homo sapiens] |
| 2278 | LIB3602-040-Q6-K1-E7 | 7488346 | BLASTX | 316 | 6.00E−29 | 62 | spliceosome-associated protein SAP62 homolog |
| | | | | | | | T26B15.16 - Arabidopsis thaliana |
| | | | | | | | >gi\|3298548\|gb\|AAC25942.1\| (AC004681) putative |
| | | | | | | | spliceosome-associated protein [Arabidopsis |
| | | | | | | | thaliana] |
| 2279 | LIB3602-077-Q6-K6-H12 | 7484782 | BLASTX | 286 | 3.00E−25 | 42 | 4-alpha-glucanotransferase homolog T20B5.4 - |
| | | | | | | | Arabidopsis thaliana >gi\|2623298\|gb\|AAB86444.1\| |
| | | | | | | | (AC002409) 4-alpha-glucanotransferase |
| | | | | | | | [Arabidopsis thaliana] |
| 2280 | LIB3602-034-Q6-K1-E4 | 732535 | BLASTN | 39 | 5.00E−13 | 90 | Volvox carteri oxygen-evolving enhancer protein 3 |
| | | | | | | | mRNA, complete cds |
| 2281 | LIB3602-108-Q1-K1-D1 | 7484784 | BLASTX | 219 | 1.00E−17 | 33 | ABC-type transport protein homolog F12C20.5 - |
| | | | | | | | Arabidopsis thaliana >gi\|3426037\|gb\|AAC32236.1\| |
| | | | | | | | (AC005168) putative ABC transporter [Arabidopsis |
| | | | | | | | thaliana] |
| 2282 | LIB3602-111-Q1-K1-B8 | 3043694 | BLASTX | 182 | 3.00E−23 | 38 | (AB011157) KIAA0585 protein [Homo sapiens] |
| 2283 | LIB3602-109-Q1-K1-D4 | 2492772 | BLASTX | 178 | 9.00E−23 | 73 | ALCOHOL DEHYDROGENASE CLASS III |
| | | | | | | | (GLUTATHIONE-DEPENDENT |
| | | | | | | | FORMALDEHYDE DEHYDROGENASE) (FDH) |
| | | | | | | | (FALDH) (GSH-FDH) |
| | | | | | | | >gi\|1498024\|gb\|AAB06322.1\| (U63931) |
| | | | | | | | glutathione-dependent formaldehyde dehydrogenase |
| | | | | | | | [Arabidopsis thaliana] |
| 2284 | LIB3602-039-Q6-K1-F2 | 7431747 | BLASTX | 176 | 2.00E−12 | 52 | probable acyl-CoA dehydrogenase - Mycobacterium |
| | | | | | | | tuberculosis (strain H37RV) |
| | | | | | | | >gi\|2911026\|emb\|CAA17519.1\| (AL021958) fadE9 |
| | | | | | | | [Mycobacterium tuberculosis] |
| 2285 | LIB3602-085-Q6-K1-F10 | 7485823 | BLASTX | 162 | 9.00E−11 | 45 | hypothetical protein F1C12.70 - Arabidopsis |
| | | | | | | | thaliana >gi\|2982432\|emb\|CAA18240.1\| |
| | | | | | | | (AL022224) putative protein [Arabidopsis thaliana] |
| | | | | | | | >gi\|7268810\|emb\|CAB79015.1\| (AL161552) |
| | | | | | | | putative protein [Arabidopsis thaliana] |
| 2286 | LIB3602-041-Q6-K1-A10 | 7459661 | BLASTX | 242 | 4.00E−20 | 42 | transcription initiation factor IIA gamma chain |
| | | | | | | | homolog T22A6.270 - Arabidopsis thaliana |
| | | | | | | | >gi\|2826882\|emb\|CAA11524.1\| (AJ223634) |
| | | | | | | | transcription factor IIA small subunit [Arabidopsis |
| | | | | | | | thaliana] >gi\|5051786\|emb\|CAB45079.1\| |
| | | | | | | | (AL078637) transcription factor IIA s |
| 2287 | LIB3602-020-Q6-K1-F8 | 4689382 | BLASTX | 315 | 7.00E−29 | 57 | (AF139466) chlorophyll a/b binding protein CP29 |
| | | | | | | | [Vigna radiata] |
| 2288 | LIB3602-048-Q6-K1QA-C6 | 2811131 | BLASTX | 181 | 5.00E−13 | 66 | (AF013216) isocitrate lyase [Myxococcus xanthus] |
| 2289 | LIB3602-111-Q1-K1-D11 | 5103845 | BLASTX | 279 | 2.00E−32 | 49 | (AC007591) Strong similarity to gb\|AF096285 |
| | | | | | | | serine-threonine kinase receptor-associated protein |
| | | | | | | | from Mus musculus and contains 5 PF\|00400 |
| | | | | | | | WD40, G-beta repeat domains. EST gb\|F14050 |
| | | | | | | | comes from this gene. [Arabidopsis thaliana] |
| 2290 | LIB3602-086-Q6-K1-B5 | 7487272 | BLASTX | 171 | 8.00E−12 | 32 | hypothetical protein T20K18.240 - Arabidopsis |
| | | | | | | | thaliana >gi\|4586265\|emb\|CAB41006.1\| |
| | | | | | | | (AL049640) putative protein [Arabidopsis thaliana] |
| | | | | | | | >gi\|7267991\|emb\|CAB78331.1\| (AL161535) |
| | | | | | | | putative protein [Arabidopsis thaliana] |
| 2291 | LIB3602-001-P1-K6-C3 | 3746062 | BLASTX | 150 | 2.00E−09 | 45 | (AC005311) hypothetical protein [Arabidopsis |
| | | | | | | | thaliana] |
| 2292 | LIB3602-084-Q6-K1-H3 | 7452056 | BLASTX | 160 | 1.00E−10 | 67 | hypothetical protein T29H11.100 - Arabidopsis |
| | | | | | | | thaliana >gi\|4678350\|emb\|CAB41160.1\| |
| | | | | | | | (AL049659) putative protein [Arabidopsis thaliana] |
| 2293 | LIB3602-088-Q6-K6-H4 | 6166507 | BLASTX | 168 | 8.00E−12 | 56 | (AF198092) RP42 [Mus musculus] |
| 2294 | LIB3602-036-Q6-K1-D3 | 7406456 | BLASTX | 256 | 9.00E−22 | 38 | (AL162875) 3-oxoacyl-[acyl-carrier-protein] |
| | | | | | | | synthase-like protein [Arabidopsis thaliana] |
| 2295 | LIB3602-092-Q6-K6-C8 | 131196 | BLASTX | 499 | 3.00E−50 | 69 | PHOTOSYSTEM I REACTION CENTRE |
| | | | | | | | SUBUNIT VI PRECURSOR (LIGHT- |
| | | | | | | | HARVESTING COMPLEX I 11 KD PROTEIN) |
| | | | | | | | (PSI-H) >gi\|82412\|pir\|\|S05012 photosystem I |
| | | | | | | | protein psaH precursor - barley |
| | | | | | | | >gi\|19093\|emb\|CAA34218.1\| (X16092) 10.2 kDa |
| | | | | | | | photosystem I polypeptide [Hordeum vulga |
| 2296 | LIB3602-032-Q6-K1-A7 | 7484752 | BLASTX | 355 | 2.00E−33 | 54 | L-ascorbate peroxidase (EC 1.11.1.11), cytosolic - |
| | | | | | | | cucumber >gi\|1669585\|dbj\|BAA13671.1\| (D88649) |
| | | | | | | | cytosolic ascorbate peroxidase [Cucumis sativus] |
| 2297 | LIB3602-019-Q6-K1-G8 | 6714305 | BLASTX | 183 | 2.00E−13 | 38 | (AC013354) F15H18.4 [Arabidopsis thaliana] |
| 2298 | LIB3602-053-Q6-K1-H10 | 7379607 | BLASTX | 381 | 2.00E−36 | 59 | (AL162754) putative |
| | | | | | | | amidophosphoribosyltransferase [Neisseria |
| | | | | | | | meningitidis] |
| 2299 | LIB3602-078-Q6-K6-C4 | 267073 | BLASTX | 669 | 4.00E−72 | 93 | TUBULIN BETA-2/BETA-3 CHAIN |
| | | | | | | | >gi\|320184\|pir\|\|JQ1587 tubulin beta chain - |
| | | | | | | | Arabidopsis thaliana >gi\|166898\|gb\|AAA32881.1\| |
| | | | | | | | (M84700) beta-2 tubulin [Arabidopsis thaliana] |
| | | | | | | | >gi\|166900\|gb\|AAA32882.1\| (M84701) beta-3 |
| | | | | | | | tubulin [Arabidopsis thaliana] |
| 2300 | LIB3602-003-Q1-K1-F11 | 4885539 | BLASTX | 234 | 3.00E−19 | 51 | protein-L-isoaspartate (D-aspartate) O- |
| | | | | | | | methyltransferase >gi\|1332399\|dbj\|BAA05028.1\| |
| | | | | | | | (D25545) PIMT isozyme I [Homo sapiens] |
| | | | | | | | >gi\|1332403\|dbj\|BAA05030.1\| (D25547) PIMT |
| | | | | | | | isozyme I [Homo sapiens] |
| 2301 | LIB3602-078-Q6-K6-G4 | 4929769 | BLASTX | 170 | 9.00E−12 | 68 | (AF151908) CGI-150 protein [Homo sapiens] |
| 2302 | LIB3602-021-Q6-K1-A2 | 1710560 | BLASTX | 166 | 9.00E−12 | 93 | 60S RIBOSOMAL PROTEIN L40 (CEP52) |
| 2303 | LIB3602-006-Q1-K1-D6 | 5107214 | BLASTX | 196 | 1.00E−14 | 63 | (AF150113) small zinc finger-like protein [Oryza |
| | | | | | | | sativa] |
| 2304 | LIB3602-009-Q6-K1-D6 | 549986 | BLASTX | 228 | 1.00E−18 | 46 | (U13149) possible apospory-associated protein |
| | | | | | | | [Pennisetum ciliare] |
| 2305 | LIB3602-101-Q1-K1-E8 | 7486379 | BLASTX | 376 | 5.00E−36 | 57 | hypothetical protein F3L17.100 - Arabidopsis |
| | | | | | | | thaliana >gi\|5262764\|emb\|CAB45912.1\| |
| | | | | | | | (AL080283) putative protein [Arabidopsis thaliana] |
| | | | | | | | >gi\|7270056\|emb\|CAB79871.1\| (AL161579) |
| | | | | | | | putative protein [Arabidopsis thaliana] |
| 2306 | LIB3602-118-Q1-K1-E11 | 3617770 | BLASTX | 358 | 1.00E−33 | 56 | (Y14329) threonyl-tRNA synthetase [Arabidopsis |
| | | | | | | | thaliana] |
| 2307 | LIB3602-111-Q1-K1-G9 | 1351669 | BLASTX | 206 | 5.00E−16 | 36 | HYPOTHETICAL 44.3 KD PROTEIN C1F7.07C |
| | | | | | | | IN CHROMOSOME I >gi\|2130298\|pir\|\|S62579 |
| | | | | | | | hypothetical protein SPAC1F7.07c - fission yeast |
| | | | | | | | (Schizosaccharomyces pombe) |
| | | | | | | | >gi\|7492832\|pir\|\|T38101 probable plasma |
| | | | | | | | membrane iron permease - fission yeast |
| | | | | | | | (Schizosaccharomyces |
| 2308 | LIB3602-046-Q6-K1-E8 | 1350778 | BLASTX | 547 | 5.00E−56 | 66 | 60S ACIDIC RIBOSOMAL PROTEIN P0 (L10E) |
| | | | | | | | >gi\|2119118\|pir\|\|I50151 acidic ribosomal |
| | | | | | | | phosphoprotein - chicken |
| | | | | | | | >gi\|453474\|gb\|AAC38020.1\| (L28704) acidic |
| | | | | | | | ribosomal phosphoprotein [Gallus gallus] |
| 2309 | LIB3602-048-Q6-K1QA-G3 | 6470348 | BLASTX | 305 | 1.00E−27 | 52 | (AF002248) PSI light-harvesting antenna |
| | | | | | | | chlorophyll a/b-binding protein [Pisum sativum] |
| 2310 | LIB3602-092-Q6-K6-A11 | 4574139 | BLASTX | 545 | 8.00E−57 | 58 | (AF073697) cysteine synthase [Oryza sativa] |
| 2311 | LIB3602-015-Q6-K1-B8 | 7431577 | BLASTX | 537 | 9.00E−55 | 62 | probable pyruvate dehydrogenase (lipoamide) (EC |
| | | | | | | | 1.2.4.1) E1 beta chain - Synechocystis sp. (strain |
| | | | | | | | PCC 6803) >gi\|1652524\|dbj\|BAA17445.1\| |
| | | | | | | | (D90906) pyruvate dehydrogenase E1 beta subunit |
| | | | | | | | [Synechocystis sp.] |
| 2312 | LIB3602-041-Q6-K1-C8 | 7469613 | BLASTX | 264 | 1.00E−22 | 61 | hypothetical protein - Synechocystis sp. (strain PCC |
| | | | | | | | 6803) >gi\|1001629\|dbj\|BAA10360.1\| (D64002) |
| | | | | | | | hypothetical protein [Synechocystis sp.] |
| 2313 | LIB3602-092-Q6-K6-E2 | 2493650 | BLASTX | 268 | 4.00E−23 | 79 | RUBISCO SUBUNIT BINDING-PROTEIN BETA |
| | | | | | | | SUBUNIT (60 KD CHAPERONIN BETA |
| | | | | | | | SUBUNIT) (CPN-60 BETA) |
| | | | | | | | >gi\|1167858\|emb\|CAA93139.1\| (Z68903) |
| | | | | | | | chaperonin [Secale cereale] |
| 2314 | LIB3602-055-Q6-K1-H11 | 21309 | BLASTX | 150 | 8.00E−10 | 45 | (X57955) 28 kD RNA binding protein [Spinacia |
| | | | | | | | oleracea] |
| 2315 | LIB3602-005-Q1-K1-D7 | 5103820 | BLASTX | 359 | 8.00E−34 | 34 | (AC007591) Similar to gb\|Z70524 PDR5-like ABC |
| | | | | | | | transporter from Spirodela polyrrhiza and is a |
| | | | | | | | member of the PF\|00005 ABC transporter family. |
| | | | | | | | ESTs gb\|N97039 and gb\|T43169 come from this |
| | | | | | | | gene. [Arabidopsis thaliana] |
| 2316 | LIB3602-115-Q1-K1-B2 | 586845 | BLASTX | 235 | 3.00E−19 | 42 | PROBABLE MALTOSE O- |
| | | | | | | | ACETYLTRANSFERASE (MALTOSE |
| | | | | | | | TRANSACETYLASE) >gi\|2126884\|pir\|\|I39920 |
| | | | | | | | probable O-acetyltransferase (EC 2.3.1.—) yyal - |
| | | | | | | | Bacillus subtilis >gi\|438465\|gb\|AAA64343.1\| |
| | | | | | | | (L16865) Probable operon with orfF. Possible |
| | | | | | | | alternative initiation codon, b |
| 2317 | LIB3602-037-Q6-K1-E3 | 1350930 | BLASTX | 513 | 6.00E−52 | 84 | 40S RIBOSOMAL PROTEIN S13 |
| 2318 | LIB3602-060-Q6-K1-F6 | 4914332 | BLASTX | 164 | 4.00E−11 | 57 | (AC005489) F14N23.18 [Arabidopsis thaliana] |
| 2319 | LIB3602-030-Q6-K1-G8 | 6093612 | BLASTX | 563 | 6.00E−58 | 71 | PYRUVATE DEHYDROGENASE E1 |
| | | | | | | | COMPONENT BETA SUBUNIT, |
| | | | | | | | MITOCHONDRIAL PRECURSOR (PDHE1-B) |
| | | | | | | | >gi\|520478\|gb\|AAA52225.1\| (U09137) pyruvate |
| | | | | | | | dehydrogenase E1 beta subunit [Arabidopsis |
| | | | | | | | thaliana] >gi\|1090498\|prf\|\|2019230A pyruvate |
| | | | | | | | dehydrogenase [Arabidopsis thaliana] |
| 2320 | LIB3602-074-Q1-K1-F6 | 5911363 | BLASTX | 210 | 2.00E−16 | 50 | (AF159699) putative host factor [Nicotiana |
| | | | | | | | tabacum] |
| 2321 | LIB3602-103-Q1-K1-H10 | 7469637 | BLASTX | 145 | 1.00E−16 | 62 | hypothetical protein - Synechocystis sp. (strain PCC |
| | | | | | | | 6803) >gi\|1001676\|dbj\|BAA10411.1\| (D64002) |
| | | | | | | | hypothetical protein [Synechocystis sp.] |
| 2322 | LIB3602-102-Q1-K1-H8 | 3327210 | BLASTX | 161 | 1.00E−10 | 30 | (AB014598) KIAA0698 protein [Homo sapiens] |
| 2323 | LIB3602-107-Q1-K1-H2 | 7544040 | BLASTX | 696 | 2.00E−73 | 67 | (AL163641) acetyl/propionyl CoA carboxylase, |
| | | | | | | | beta subunit [Streptomyces coelicolor A3(2)] |
| 2324 | LIB3602-088-Q6-K6-E12 | 7428213 | BLASTX | 233 | 5.00E−19 | 45 | endopeptidase Clp ATP-binding chain C - |
| | | | | | | | Synechococcus sp. (strain PCC 7942) |
| | | | | | | | >gi\|755163\|gb\|AAB67745.1\| (U16134) ClpC |
| | | | | | | | [Synechococcus sp.] |
| 2325 | LIB3602-026-Q6-K1-H11 | 81679 | BLASTX | 199 | 4.00E−15 | 61 | acyl carrier protein precursor (clone 34C02) - rape |
| 2326 | LIB3602-048-Q6-K1QA- | 6730727 | BLASTX | 492 | 1.00E−49 | 60 | (AC018849) putative acetylornithine transaminase |
| | B11 | | | | | | [Arabidopsis thaliana] |
| 2327 | LIB3602-055-Q6-K1-H9 | 3913791 | BLASTX | 269 | 2.00E−23 | 48 | GLUTAMATE--CYSTEINE LIGASE |
| | | | | | | | PRECURSOR (GAMMA-GLUTAMYLCYSTEINE |
| | | | | | | | SYNTHETASE) (GAMMA-ECS) (GCS) |
| | | | | | | | >gi\|7489004\|pir\|\|T04332 glutamate-cysteine ligase |
| | | | | | | | (EC 6.3.2.2) - tomato >gi\|2407615\|gb\|AAB71230.1\| |
| | | | | | | | (AF017983) gamma-glutamylcysteine synthetase |
| | | | | | | | [Lycopersicon escul |
| 2328 | LIB3602-005-Q1-K1-H11 | 266567 | BLASTX | 329 | 3.00E−30 | 48 | MITOCHONDRIAL PROCESSING PEPTIDASE |
| | | | | | | | ALPHA SUBUNIT PRECURSOR (ALPHA-MPP) |
| | | | | | | | (UBIQUINOL-CYTOCHROME C REDUCTASE |
| | | | | | | | SUBUNIT II) >gi\|421956\|pir\|\|S23558 mitochondrial |
| | | | | | | | processing peptidase (EC 3.4.99.41) alpha chain |
| | | | | | | | precursor - potato >gi\|21493\|emb\|CAA46990.1\| |
| | | | | | | | (X66284) |
| 2329 | LIB3602-063-Q1-K6-G10 | 6984214 | BLASTX | 481 | 2.00E−68 | 62 | (AF228639) lipoamide dehydrogenase precursor |
| | | | | | | | [Arabidopsis thaliana] |
| 2330 | LIB3602-087-Q6-K1-F7 | 7499051 | BLASTX | 328 | 4.00E−47 | 62 | hypothetical protein F13H8.7 - Caenorhabditis |
| | | | | | | | elegans >gi\|722377\|gb\|AAC46683.1\| (U23139) |
| | | | | | | | highly similar to beta-ureidopropionase |
| | | | | | | | (SP: BUP_RAT) [Caenorhabditis elegans] |
| 2331 | LIB3602-028-Q6-K1-H12 | 7488521 | BLASTX | 163 | 6.00E−11 | 43 | cysteine proteinase inhibitor BCPI-2-turnip |
| | | | | | | | >gi\|1256424\|gb\|AAA96316.1\| (U51119) cysteine |
| | | | | | | | proteinase inhibitor [Brassica rapa] |
| 2332 | LIB3602-076-Q6-K6-C3 | 6984216 | BLASTX | 238 | 6.00E−29 | 52 | (AF228640) lipoamide dehydrogenase precursor |
| | | | | | | | [Arabidopsis thaliana] |
| 2333 | LIB3602-076-Q6-K6-H12 | 4884860 | BLASTX | 157 | 8.00E−11 | 60 | (AF133118) nucleic acid binding protein [Oryza |
| | | | | | | | sativa] |
| 2334 | LIB3602-050-Q6-K1-E12 | 7488367 | BLASTX | 203 | 1.00E−15 | 37 | thiamin pyrophosphokinase homolog F16B22.24 - |
| | | | | | | | Arabidopsis thaliana >gi\|3341695\|gb\|AAC27477.1\| |
| | | | | | | | (AC003672) putative thiamin pyrophosphokinase |
| | | | | | | | [Arabidopsis thaliana] |
| 2335 | LIB3602-101-Q1-K1-A3 | 7106101 | BLASTX | 358 | 2.00E−42 | 67 | (AL157917) ap-1 golgi-associated clathrin assembly |
| | | | | | | | protein complex component [Schizosaccharomyces |
| | | | | | | | pombe] |
| 2336 | LIB3602-111-Q1-K1-E7 | 1749716 | BLASTX | 359 | 6.00E−34 | 63 | (D89254) similar to Saccharomyces cerevisiae |
| | | | | | | | dihydroxy-acid dehydratase precursor, SWISS- |
| | | | | | | | PROT Accession Number P39522 |
| | | | | | | | [Schizosaccharomyces pombe] |
| 2337 | LIB3602-073-Q1-K1-G6 | 2398531 | BLASTX | 263 | 1.00E−22 | 70 | (Y13726) Transcription factor [Arabidopsis |
| | | | | | | | thaliana] |
| 2338 | LIB3602-088-Q6-K6-A3 | 7077174 | BLASTX | 163 | 2.00E−11 | 60 | (AB035256) eukaryotic polypeptide chain release |
| | | | | | | | factor 3 [Oryctolagus cuniculus] |
| 2339 | LIB3602-050-Q6-K1-H2 | 7290447 | BLASTX | 166 | 2.00E−11 | 49 | (AE003429) CG2934 gene product [Drosophila |
| | | | | | | | melanogaster] |
| 2340 | LIB3602-109-Q1-K1-E11 | 7442647 | BLASTX | 212 | 6.00E−22 | 37 | hypothetical protein F14M4.17 - Arabidopsis |
| | | | | | | | thaliana >gi\|3522943\|gb\|AAC34225.1\| (AC004411) |
| | | | | | | | putative ABC transporter [Arabidopsis thaliana] |
| 2341 | LIB3602-067-Q1-K1-A9 | 115385 | BLASTX | 243 | 3.00E−20 | 48 | CHLOROPHYLL A-B BINDING PROTEIN 4 |
| | | | | | | | PRECURSOR (LHCI TYPE III CAB-4) (LHCP) |
| | | | | | | | >gi\|166646\|gb\|AAA32760.1\| (M63931) light- |
| | | | | | | | harvesting chlorophyll a/b binding protein |
| | | | | | | | [Arabidopsis thaliana] |
| | | | | | | | >gi\|6522530\|emb\|CAB61973.1\| (AL132955) |
| | | | | | | | CHLOROPHYLL A-B BINDING PROTEIN 4 PR |
| 2342 | LIB3602-011-Q6-K1-G9 | 7488383 | BLASTX | 202 | 2.00E−15 | 40 | transcription factor IID 30K chain homolog |
| | | | | | | | F28M20.90 - Arabidopsis thaliana |
| | | | | | | | >gi\|2072626\|emb\|CAA73389.1\| (Y12904) |
| | | | | | | | hypothetical protein [Arabidopsis thaliana] |
| | | | | | | | >gi\|3281856\|emb\|CAA19751.1\| (AL031004) |
| | | | | | | | Transcription factor II homolog [Arabidopsis |
| | | | | | | | thaliana] >gi\| |
| 2343 | LIB3602-023-Q6-K1-F8 | 7489278 | BLASTX | 254 | 1.00E−21 | 36 | thioredoxin-like protein CDSP32, chloroplast - |
| | | | | | | | potato >gi\|2582822\|emb\|CAA71103.1\| (Y09987) |
| | | | | | | | CDSP32 protein (Chloroplast Drought-induced |
| | | | | | | | Stress Protein of 32 kDa) [Solanum tuberosum] |
| 2344 | LIB3602-107-Q1-K1-G9 | 2129726 | BLASTX | 467 | 2.00E−46 | 51 | DNA-directed RNA polymerase (EC 2.7.7.6) II |
| | | | | | | | 35.5K chain A - Arabidopsis thaliana |
| | | | | | | | >gi\|514318\|gb\|AAB03741.1\| (L34770) RNA |
| | | | | | | | polymerase II third largest subunit [Arabidopsis |
| | | | | | | | thaliana] |
| | | | | | | | >gi\|4544370\|gb\|AAD22281.1\|AC006920_5 |
| | | | | | | | (AC006920) DNA-directed RNA polymerase |
| 2345 | LIB3602-017-Q6-K1-A1 | 7488371 | BLASTX | 329 | 1.00E−30 | 66 | thioredoxin reductase homolog T32G6.20 - |
| | | | | | | | Arabidopsis thaliana >gi\|2618704\|gb\|AAB84351.1\| |
| | | | | | | | (AC002510) putative thioredoxin reductase |
| | | | | | | | [Arabidopsis thaliana] |
| 2346 | LIB3602-080-Q6-K6-A6 | 4887543 | BLASTX | 195 | 1.00E−14 | 75 | (AJ012278) ATP-dependent Clp protease subunit |
| | | | | | | | ClpP [Arabidopsis thaliana] |
| | | | | | | | >gi\|5360579\|dbj\|BAA82065.1\| (AB022326) nClpP1 |
| | | | | | | | [Arabidopsis thaliana] |
| 2347 | LIB3602-045-Q6-K1-F6 | 7469824 | BLASTX | 195 | 1.00E−14 | 32 | hypothetical protein - Synechocystis sp. (strain PCC |
| | | | | | | | 6803) >gi\|1653953\|dbj\|BAA18863.1\| (D90917) |
| | | | | | | | hypothetical protein [Synechocystis sp.] |
| 2348 | LIB3602-030-Q6-K1-E1 | 7485867 | BLASTX | 211 | 1.00E−16 | 37 | hypothetical protein F20D22.10 - Arabidopsis |
| | | | | | | | thaliana >gi\|3142297\|gb\|AAC16748.1\| (AC002411) |
| | | | | | | | Contains similarity to serine/threonine protein |
| | | | | | | | phosphatase gb\|X83099 from S. cerevisiae. |
| | | | | | | | [Arabidopsis thaliana] |
| 2349 | LIB3602-085-Q6-K1-C8 | 7302133 | BLASTX | 251 | 3.00E−21 | 35 | (AE003781) CG1416 gene product [Drosophila |
| | | | | | | | melanogaster] |
| 2350 | LIB3602-055-Q6-K1-D12 | 2351580 | BLASTX | 317 | 5.00E−29 | 60 | (U82433) thymidine diphospho-glucose 4-6- |
| | | | | | | | dehydratase homolog [Prunus armeniaca] |
| 2351 | LIB3602-077-Q6-K6-C11 | 7462403 | BLASTX | 464 | 4.00E−46 | 56 | heat shock protein HslV - Thermotoga maritima |
| | | | | | | | (strain MSB8) |
| | | | | | | | >gi\|4981034\|gb\|AAD35606.1\|AE001728_7 |
| | | | | | | | (AE001728) heat shock protein HslV [Thermotoga |
| | | | | | | | maritima] |
| 2352 | LIB3602-040-Q6-K1-A9 | 2494744 | BLASTX | 400 | 8.00E−39 | 85 | GLUTAMINE SYNTHETASE CYTOSOLIC |
| | | | | | | | ISOZYME (GLUTAMATE--AMMONIA LIGASE) |
| | | | | | | | (GS1) >gi\|7437922\|pir\|\|T08088 glutamate-- |
| | | | | | | | ammonia ligase (EC 6.3.1.2), cytosolic - |
| | | | | | | | Chlamydomonas reinhardtii |
| | | | | | | | >gi\|1353876\|gb\|AAB01817.1\| (U46207) glutamine |
| | | | | | | | synthetase [Chlamydomonas reinhard |
| 2353 | LIB3602-012-Q6-K1-B3 | 122805 | BLASTX | 180 | 7.00E−13 | 32 | 6-HYDROXY-D-NICOTINE OXIDASE (6- |
| | | | | | | | HDNO) >gi\|580720\|emb\|CAA29416.1\| (X05999) 6- |
| | | | | | | | hydroxy-D-nicotine oxidase [Arthrobacter oxidans] |
| 2354 | LIB3602-049-Q6-K1-B9 | 99772 | BLASTX | 209 | 2.00E−16 | 68 | ubiquitin/ribosomal protein S27a.2 - Arabidopsis |
| | | | | | | | thaliana >gi\|166936\|gb\|AAA32907.1\| (J05540) |
| | | | | | | | ubiquitin extension protein (UBQ6) [Arabidopsis |
| | | | | | | | thaliana] >gi\|3522953\|gb\|AAC34235.1\| |
| | | | | | | | (AC004411) ubiquitin extension protein (UBQ6) |
| | | | | | | | [Arabidopsis thaliana] |
| 2355 | LIB3602-103-Q1-K1-F9 | 6679160 | BLASTX | 216 | 3.00E−17 | 39 | nucleoredoxin >gi\|1854550\|emb\|CAA63408.1\| |
| | | | | | | | (X92750) red-1 [Mus musculus] |
| 2356 | LIB3602-023-Q6-K1-D9 | 7594543 | BLASTX | 300 | 6.00E−27 | 41 | (AL163972) putative protein [Arabidopsis thaliana] |
| 2357 | LIB3602-087-Q6-K1-F10 | 7489244 | BLASTX | 275 | 1.00E−32 | 57 | hypothetical protein R1 - potato |
| | | | | | | | >gi\|3287270\|emb\|CAA70725.1\| (Y09533) involved |
| | | | | | | | in starch metabalism [Solanum tuberosum] |
| 2358 | LIB3602-118-Q1-K1-H4 | 7019967 | BLASTX | 156 | 3.00E−10 | 53 | (AK000099) unnamed protein product [Homo |
| | | | | | | | sapiens] |
| 2359 | LIB3602-115-Q1-K1-B7 | 1729938 | BLASTX | 185 | 2.00E−13 | 45 | THIOREDOXIN-LIKE PROTEIN SLR0233 |
| | | | | | | | >gi\|7430831\|pir\|\|S76386 thioredoxin M-1 - |
| | | | | | | | Synechocystis sp. (strain PCC 6803) |
| | | | | | | | >gi\|1001610\|dbj\|BAA10238.1\| (D64000) |
| | | | | | | | thioredoxin M [Synechocystis sp.] |
| 2360 | LIB3602-093-Q6-K6-A4 | 7225945 | BLASTX | 175 | 2.00E−12 | 41 | (AE002426) queuine tRNA-ribosyltransferase |
| | | | | | | | [Neisseria meningitidis] |
| 2361 | LIB3602-023-Q6-K1-F12 | 595780 | BLASTX | 159 | 2.00E−10 | 43 | (U13871) lacZ alpha peptide [unidentified cloning |
| | | | | | | | vector] |
| 2362 | LIB3602-008-Q6-K1-E11 | 7023065 | BLASTX | 606 | 7.00E−63 | 66 | (AK001667) unnamed protein product [Homo |
| | | | | | | | sapiens] |
| 2363 | LIB3602-111-Q1-K1-B3 | 6651403 | BLASTX | 159 | 1.00E−16 | 29 | (AF180734) dynamin-like protein 5 [Arabidopsis |
| | | | | | | | thaliana] |
| 2364 | LIB3602-018-Q6-K1-G8 | 6562305 | BLASTX | 259 | 3.00E−22 | 42 | (AL133421) putative protein [Arabidopsis thaliana] |
| 2365 | LIB3602-014-Q6-K1-F7 | 6562306 | BLASTX | 219 | 1.00E−17 | 45 | (AL133421) diacylglycerol kinase (ATDGK1) |
| | | | | | | | [Arabidopsis thaliana] |
| 2366 | LIB3602-016-Q6-K1-C10 | 1729930 | BLASTX | 204 | 8.00E−16 | 43 | THREONINE DEHYDRATASE BIOSYNTHETIC |
| | | | | | | | (THREONINE DEAMINASE) |
| | | | | | | | >gi\|1113117\|gb\|AAA83215.1\| (U40630) L- |
| | | | | | | | threonine deaminase [Burkholderia cepacia] |
| 2367 | LIB3602-115-Q1-K1-H4 | 7432656 | BLASTX | 158 | 3.00E−10 | 40 | NADH dehydrogenase (ubiquinone) (EC 1.6.5.3) - |
| | | | | | | | fission yeast (Schizosaccharomyces pombe) |
| | | | | | | | >gi\|2414635\|emb\|CAB16382.1\| (Z99260) putative |
| | | | | | | | nadh-dehydrogenase [Schizosaccharomyces pombe] |
| 2368 | LIB3602-012-Q6-K1-F5 | 7489245 | BLASTX | 241 | 2.00E−20 | 50 | kinesin heavy chain-like protein (clone PKCBP) - |
| | | | | | | | potato >gi\|1369852\|gb\|AAB37756.1\| (L46702) |
| | | | | | | | kinesin heavy chain-like protein [Solanum |
| | | | | | | | tuberosum] |
| 2369 | LIB3602-034-Q6-K1-B9 | 7428204 | BLASTX | 353 | 4.00E−33 | 51 | carboxypeptidase D (EC 3.4.16.6) precursor - barley |
| | | | | | | | >gi\|1731990\|emb\|CAA70815.1\| (Y09602) serine |
| | | | | | | | carboxypeptidase II, CP-MII [Hordeum vulgare] |
| 2370 | LIB3602-007-Q1-K1-A11 | 2498140 | BLASTX | 181 | 6.00E−13 | 41 | APAG PROTEIN (CORD PROTEIN) |
| | | | | | | | >gi\|1003021\|gb\|AAA79339.1\| (U24176) CorD |
| | | | | | | | [Salmonella typhimurium] |
| 2371 | LIB3602-076-Q6-K6-F10 | 7433551 | BLASTX | 749 | 1.00E−79 | 71 | glycine hydroxymethyltransferase (EC 2.1.2.1) |
| | | | | | | | F20D10.50 - Arabidopsis thaliana |
| | | | | | | | >gi\|4467099\|emb\|CAB37533.1\| (AL035538) |
| | | | | | | | glycine hydroxymethyltransferase like protein |
| | | | | | | | [Arabidopsis thaliana] |
| | | | | | | | >gi\|6899945\|emb\|CAB71289.1\| (AJ271726) serine |
| | | | | | | | hydroxymethyl transfer |
| 2372 | LIB3602-001-P1-K6-F1 | 4006886 | BLASTX | 284 | 4.00E−25 | 53 | (Z99708) putative protein [Arabidopsis thaliana] |
| | | | | | | | >gi\|7270635\|emb\|CAB80352.1\| (AL161590) |
| | | | | | | | putative protein [Arabidopsis thaliana] |
| 2373 | LIB3602-041-Q6-K1-E7 | 6562319 | BLASTX | 173 | 5.00E−12 | 35 | (AL133421) putative protein [Arabidopsis thaliana] |
| 2374 | LIB3602-064-Q1-K6-B10 | 1350977 | BLASTX | 144 | 2.00E−12 | 71 | PROBABLE 40S RIBOSOMAL PROTEIN S30 |
| 2375 | LIB3602-002-P1-K6-F7 | 2924772 | BLASTX | 203 | 1.00E−15 | 48 | (AC002334) unknown protein [Arabidopsis |
| | | | | | | | thaliana] |
| 2376 | LIB3602-011-Q6-K1-C5 | 2506275 | BLASTX | 199 | 3.00E−19 | 52 | CHAPERONIN CPN60-1, MITOCHONDRIAL |
| | | | | | | | PRECURSOR (HSP60-1) |
| 2377 | LIB3602-084-Q6-K1-G5 | 6692692 | BLASTX | 310 | 4.00E−28 | 54 | (AC007592) F12K11.10 [Arabidopsis thaliana] |
| 2378 | LIB3602-047-Q6-K1-E3 | 5523979 | BLASTX | 252 | 2.00E−21 | 54 | (AF104025) polyprotein [Bovine viral diarrhea |
| | | | | | | | virus-2] |
| 2379 | LIB3602-077-Q6-K6-D2 | 7485688 | BLASTX | 283 | 3.00E−25 | 60 | hypothetical protein F18A5.110 - Arabidopsis |
| | | | | | | | thaliana >gi\|4455301\|emb\|CAB36836.1\| |
| | | | | | | | (AL035528) putative protein [Arabidopsis thaliana] |
| | | | | | | | >gi\|7268076\|emb\|CAB78414.1\| (AL161537) |
| | | | | | | | putative protein [Arabidopsis thaliana] |
| 2380 | LIB3602-100-Q1-K1-E6 | 7298579 | BLASTX | 431 | 3.00E−51 | 56 | (AE003662) CG9987 gene product [Drosophila |
| | | | | | | | melanogaster] |
| 2381 | LIB3602-095-Q6-K6-E4 | 3327204 | BLASTX | 465 | 3.00E−46 | 52 | (AB014595) KIAA0695 protein [Homo sapiens] |
| 2382 | LIB3602-095-Q6-K6-D5 | 3327206 | BLASTX | 199 | 4.00E−15 | 37 | (AB014596) KIAA0696 protein [Homo sapiens] |
| 2383 | LIB3602-036-Q6-K1-E10 | 7300338 | BLASTX | 181 | 5.00E−13 | 41 | (AE003721) CG7217 gene product [Drosophila |
| | | | | | | | melanogaster] |
| 2384 | LIB3602-066-Q1-K6-E11 | 7488307 | BLASTX | 162 | 8.00E−11 | 47 | ribosomal protein L14 homolog T24A18.40 - |
| | | | | | | | Arabidopsis thaliana |
| | | | | | | | >gi\|4490705\|emb\|CAB38839.1\| (AL035680) |
| | | | | | | | ribosomal protein L14-like protein [Arabidopsis |
| | | | | | | | thaliana] >gi\|7269562\|emb\|CAB79564.1\| |
| | | | | | | | (AL161566) ribosomal protein L14-like protein |
| | | | | | | | [Arabidopsis thaliana |
| 2385 | LIB3602-040-Q6-K1-E12 | 5757449 | BLASTX | 157 | 2.00E−10 | 73 | (AB021315) L41 ribosomal protein [Coprinus |
| | | | | | | | cinereus] |
| 2386 | LIB3602-013-Q6-K1-D9 | 7437876 | BLASTX | 285 | 1.00E−25 | 64 | probable acid - CoA ligase (EC 6.2.1.—) fadD35 - |
| | | | | | | | Mycobacterium tuberculosis (strain H37RV) |
| | | | | | | | >gi\|2113938\|emb\|CAB08923.1\| (Z95556) fadD35 |
| | | | | | | | [Mycobacterium tuberculosis] |
| 2387 | LIB3602-042-Q6-K1-D5 | 2499954 | BLASTX | 331 | 1.00E−30 | 54 | URACIL PHOSPHORIBOSYLTRANSFERASE |
| | | | | | | | (UMP PYROPHOSPHORYLASE) (UPRTASE) |
| | | | | | | | >gi\|7427938\|pir\|\|S74616 uracil |
| | | | | | | | phosphoribosyltransferase (EC 2.4.2.9) upp - |
| | | | | | | | Synechocystis sp. (strain PCC 6803) |
| | | | | | | | >gi\|1651841\|dbj\|BAA16768.1\| (D90900) uracil |
| | | | | | | | phosphoribosyltransferase [Synec |
| 2388 | LIB3602-012-Q6-K1-F7 | 81235 | BLASTX | 731 | 2.00E−77 | 76 | chlorophyll a/b-binding protein - Chlamydomonas |
| | | | | | | | reinhardtii |
| 2389 | LIB3602-055-Q6-K1-C1 | 5902062 | BLASTX | 364 | 1.00E−34 | 62 | polymerase (RNA) III (DNA directed) (155 kD) |
| | | | | | | | >gi\|3122765\|sp\|O14802\|RPC1_HUMAN DNA- |
| | | | | | | | DIRECTED RNA POLYMERASE III LARGEST |
| | | | | | | | SUBUNIT (RPC155) >gi\|2460208\|gb\|AAB86536.1\| |
| | | | | | | | (AF021351) RNA polymerase III largest subunit |
| | | | | | | | [Homo sapiens] |
| 2390 | LIB3602-091-Q6-K6-H1 | 5454054 | BLASTX | 162 | 9.00E−11 | 35 | splicing factor, arginine/serine-rich 7 (35 kD) |
| | | | | | | | >gi\|3929380\|sp\|Q16629\|SFR7_HUMAN SPLICING |
| | | | | | | | FACTOR, ARGININE/SERINE-RICH 7 |
| | | | | | | | (SPLICING FACTOR 9G8) |
| | | | | | | | >gi\|2136194\|pir\|\|A57198 splicing factor, |
| | | | | | | | arginine/serine-rich 7 - human |
| | | | | | | | >gi\|506402\|gb\|AAA35495.1\| (L22253) 9G8 sp |
| 2391 | LIB3602-065-Q1-K6-G12 | 3982576 | BLASTX | 803 | 7.00E−86 | 76 | (AF023140) imidazoleglycerol phosphate |
| | | | | | | | dehydratase [Thlaspi goesingense] |
| 2392 | LIB3602-083-Q6-K6-G7 | 6226702 | BLASTX | 555 | 8.00E−57 | 62 | 40S RIBOSOMAL PROTEIN S8 |
| | | | | | | | >gi\|7440237\|pir$$ ribosomal protein S8 - |
| | | | | | | | maize >gi\|14980$$AB06330.1\| (U64436) |
| | | | | | | | ribosomal protein S8 [Zea mays] |
| 2393 | LIB3602-003-Q1-K1-E4 | 2464901 | BLASTX | 232 | 4.00E−19 | 41 | (Z99708) putative protein [Arabidopsis thaliana] |
| | | | | | | | >gi\|7270628\|emb\|CAB80345.1\| (AL161590) |
| | | | | | | | putative protein [Arabidopsis thaliana] |
| 2394 | LIB3602-009-Q6-K1-C9 | 3372671 | BLASTX | 162 | 5.00E−11 | 54 | (AF061286) gamma-adaptin 1 [Arabidopsis |
| | | | | | | | thaliana] |
| | | | | | | | >gi\|4704741\|gb\|AAD28247.1\|AF124524_1 |
| | | | | | | | $$124524$$tin 1 [Arabidopsis |
| | | | | | | | thaliana] |
| 2395 | LIB3602-041-Q6-K1-C1 | 7512095 | BLASTX | 175 | 3.00E−12 | 33 | scavenger receptor cysteine-rich protein precursor - |
| | | | | | | | sea urchin (Strongylocentrotus purpuratus) |
| | | | | | | | >gi\|4165053\|gb\|AAD08654.1\| (AF064259) |
| | | | | | | | scavenger receptor cysteine-rich protein type 12 |
| | | | | | | | precursor [Strongylocentrotus purpuratus] |
| 2396 | LIB3602-074-Q1-K1-B5 | 6225655 | BLASTX | 328 | 3.00E−30 | 51 | MALATE SYNTHASE |
| | | | | | | | >gi\|2811132\|gb\|AAB97829.1\| (AF013216) Mls |
| | | | | | | | [Myxococcus xanthus] |
| 2397 | LIB3602-078-Q6-K6-B4 | 7297250 | BLASTX | 292 | 6.00E−26 | 61 | (AE003617) CG5261 gene product [alt 2] |
| | | | | | | | [Drosophila melanogaster] |
| 2398 | LIB3602-101-Q1-K1-D3 | 7436983 | BLASTX | 404 | 3.00E−50 | 79 | probable imidazoleglycerol-phosphate dehydratase |
| | | | | | | | (EC 4.2.1.19) - wheat (fragment) |
| | | | | | | | >gi\|551331\|gb\|AAA93197.1\| (U02690) |
| | | | | | | | imidazoleglycerolphosphate dehydratase [Triticum |
| | | | | | | | aestivum] |
| 2399 | LIB3602-001-P1-K6-G7 | 6056371 | BLASTX | 653 | 3.00E−68 | 77 | (AC009894) nucleolar protein [Arabidopsis |
| | | | | | | | thaliana] |
| 2400 | LIB3602-051-Q6-K1-B1 | 2116650 | BLASTX | 757 | 9.00E−84 | 94 | (AB004044) alpha-1-antitrypsin [Cercopithecus |
| | | | | | | | aethiops] |
| 2401 | LIB3602-092-Q6-K6-C2 | 6900314 | BLASTX | 238 | 1.00E−19 | 81 | (AJ250663) putative proteinase inhibitor [Hordeum |
| | | | | | | | vulgare] |
| 2402 | LIB3602-062-Q6-K1-F10 | 113324 | BLASTX | 271 | 1.00E−23 | 57 | ACYLPHOSPHATASE, MUSCLE TYPE |
| | | | | | | | ISOZYME (ACYLPHOSPHATE |
| | | | | | | | PHOSPHOHYDROLASE) (ISOZYME TU1) |
| | | | | | | | >gi\|67797\|pir\|\|QPTK acylphosphatase (EC 3.6.1.7) |
| | | | | | | | Tu1, skeletal muscle - turkey |
| | | | | | | | >gi\|223821\|prf\|\|1001154A acylphosphatase |
| | | | | | | | [Meleagris gallopavo] |
| 2403 | LIB3602-115-Q1-K1-D12 | 3293555 | BLASTX | 712 | 3.00E−75 | 70 | (AF072931) chlorophyll a/b binding protein |
| | | | | | | | [Medicago sativa] |
| 2404 | LIB3602-062-Q6-K1-D4 | 7225376 | BLASTX | 177 | 7.00E−13 | 64 | (AE002373) 50S ribosomal protein L18 [Neisseria |
| | | | | | | | meningitidis] >gi\|7378885\|emb\|CAB83428.1\| |
| | | | | | | | (AL162752) 50S ribosomal protein L18 [Neisseria |
| | | | | | | | meningitidis] |
| 2405 | LIB3602-016-Q6-K1-E8 | 1707981 | BLASTX | 259 | 3.00E−22 | 59 | GLUTAREDOXIN >gi\|1076561\|pir\|\|S54825 |
| | | | | | | | glutaredoxin - castor bean |
| 2406 | LIB3602-014-Q6-K1-B10 | 6754812 | BLASTX | 179 | 9.00E−13 | 51 | NADH dehydrogenase (ubiquinone) 1 alpha |
| | | | | | | | subcomplex 2 (8 kDa) |
| | | | | | | | >gi\|4836511\|gb\|AAD30475.1\|AF124786_1 |
| | | | | | | | (AF124786) NADH-ubiquinone oxidoreductase B8 |
| | | | | | | | subunit [Mus musculus] |
| 2407 | LIB3602-095-Q6-K6-B5 | 1408302 | BLASTX | 348 | 1.00E−43 | 43 | (U61987) phosphoprotein phosphatase A |
| | | | | | | | [Dictyostelium discoideum] |
| 2408 | LIB3602-061-Q6-K1-H3 | 7510484 | BLASTX | 151 | 1.00E−09 | 44 | hypothetical protein Y75B8A.26 - Caenorhabditis |
| | | | | | | | elegans >gi\|3980042\|emb\|CAA22110.1\| |
| | | | | | | | (AL033514) similar to ABC transporters; ABC |
| | | | | | | | transporter transmembrane region. [Caenorhabditis |
| | | | | | | | elegans] |
| 2409 | LIB3602-025-Q6-K1-G6 | 5381319 | BLASTX | 658 | 5.00E−69 | 79 | (AF091621) ubiquitin-conjugating enzyme E2 |
| | | | | | | | [Catharanthus roseus] |
| 2410 | LIB3602-069-Q1-K1-A6 | 2565436 | BLASTX | 562 | 1.00E−57 | 58 | (AF028842) DegP protease precursor [Arabidopsis |
| | | | | | | | thaliana] |
| 2411 | LIB3602-094-Q6-K6-C8 | 4587571 | BLASTX | 277 | 2.00E−24 | 50 | (AC006550) Belongs to the PF\|01027 |
| | | | | | | | Uncharacterized protein family UPF0005 with 7 |
| | | | | | | | transmembrane domains. [Arabidopsis thaliana] |
| 2412 | LIB3602-045-Q6-K1-C7 | 7484375 | BLASTX | 310 | 3.00E−28 | 49 | envelope protein LIP-36G2, low CO2 inducible - |
| | | | | | | | Chlamydomonas reinhardtii |
| | | | | | | | >gi\|2459575\|gb\|AAB71744.1\| (U75346) envelope |
| | | | | | | | protein [Chlamydomonas reinhardtii] |
| 2413 | LIB3602-061-Q6-K1-G7 | 4775576 | BLASTX | 591 | 4.00E−61 | 67 | (AJ238785) MUS1 protein [Zea mays] |
| 2414 | LIB3602-076-Q6-K6-B6 | 2499966 | BLASTX | 162 | 1.00E−10 | 50 | PHOTOSYSTEM I REACTION CENTRE |
| | | | | | | | SUBUNIT IV A PRECURSOR (PSI-E A) |
| | | | | | | | >gi\|7443146\|pir\|\|T16962 photosystem I chain PSI-E - |
| | | | | | | | wood tobacco >gi\|632722\|gb\|AAB31704.1\| |
| | | | | | | | (S72356) photosystem I subunit PSI-E [Nicotiana |
| | | | | | | | sylvestris, leaves, Peptide Chloroplast, 141 aa] |
| 2415 | LIB3602-002-P1-K6-B7 | 3025293 | BLASTX | 259 | 3.00E−22 | 83 | RAS-RELATED PROTEIN YPTC6 |
| | | | | | | | >gi\|1363476\|pir\|\|JC4108 GTP-binding protein |
| | | | | | | | yptC6 - Chlamydomonas reinhardtii |
| | | | | | | | >gi\|806728\|gb\|AAA82729.1\| (U13169) YptC6 |
| | | | | | | | [Chlamydomonas reinhardtii] |
| 2416 | LIB3602-115-Q1-K1-G6 | 6652886 | BLASTX | 255 | 7.00E−22 | 80 | (AF123394) 26S proteasome AAA-ATPase subunit |
| | | | | | | | RPT5a [Arabidopsis thaliana] |
| | | | | | | | >gi\|7596759\|gb\|AAF64530.1\| (AC009606) 26S |
| | | | | | | | proteasome AAA-ATPase subunit RPT5a |
| | | | | | | | [Arabidopsis thaliana] |
| 2417 | LIB3602-052-Q6-K1-F6 | 7489990 | BLASTX | 441 | 1.00E−43 | 63 | 40s ribosomal protein s4-2 - fission yeast |
| | | | | | | | (Schizosaccharomyces pombe) |
| | | | | | | | >gi\|6018736\|emb\|CAB57920.1\| (AL121794) 40s |
| | | | | | | | ribosomal protein s4-2 [Schizosaccharomyces |
| | | | | | | | pombe] |
| 2418 | LIB3602-076-Q6-K6-F7 | 3121830 | BLASTX | 725 | 9.00E−77 | 67 | CHROMATIN ASSEMBLY FACTOR 1 P55 |
| | | | | | | | SUBUNIT (CAF-1 P55 SUBUNIT) (DCAF-1) |
| | | | | | | | (NUCLEOSOME REMODELING FACTOR 55 KD |
| | | | | | | | SUBUNIT) (NURF-55) |
| | | | | | | | >gi\|1407828\|gb\|AAB37257.1\| (U62388) chromatin |
| | | | | | | | assembly factor 1 p55 subunit [Drosophila |
| | | | | | | | melanogaster] >gi\|7299974\|gb\|AAF55146.1\| (A |
| 2419 | LIB3602-052-Q6-K1-C5 | 3123614 | BLASTX | 678 | 2.00E−71 | 79 | (Y17225) cyclin-dependent protein kinase p34cdc2 |
| | | | | | | | [Lycopersicon esculentum] |
| 2420 | LIB3602-106-Q1-K1-F1 | 3121836 | BLASTX | 295 | 2.00E−26 | 74 | PHOSPHATIDATE CYTIDYLYLTRANSFERASE |
| | | | | | | | (CDP-DIGLYCERIDE SYNTHETASE) (CDP- |
| | | | | | | | DIGLYCERIDE PYROPHOSPHORYLASE) |
| | | | | | | | (CDP-DIACYLGLYCEROL SYNTHASE) (CDS) |
| | | | | | | | (CTP: PHOSPHATIDATE |
| | | | | | | | CYTIDYLYLTRANSFERASE) (CDP-DAG |
| | | | | | | | SYNTHASE) >gi\|2181182\|emb\|CAA63969.1\| |
| | | | | | | | (X94306) CDP-diacylglycerol syn |
| 2421 | LIB3602-027-Q6-K1-H1 | 2213584 | BLASTX | 192 | 2.00E−14 | 50 | (AC000348) T7N9.4 [Arabidopsis thaliana] |
| 2422 | LIB3602-112-Q1-K1-F9 | 6729509 | BLASTX | 345 | 3.00E−32 | 68 | (AL132966) diaminopimelate epimerase-like |
| | | | | | | | protein [Arabidopsis thaliana] |
| 2423 | LIB3602-067-Q1-K1-D8 | 710550 | BLASTX | 214 | 8.00E−17 | 39 | (L40632) ankyrin 3 [Mus musculus] |
| 2424 | LIB3602-010-Q6-K1-H2 | 710551 | BLASTX | 246 | 1.00E−20 | 37 | (L40632) ankyrin 3 [Mus musculus] |
| 2425 | LIB3602-047-Q6-K1-H2 | 6652880 | BLASTX | 704 | 2.00E−74 | 93 | (AF123391) 26S proteasome AAA-ATPase subunit |
| | | | | | | | RPT2a [Arabidopsis thaliana] |
| 2426 | LIB3602-027-Q6-K1-G10 | 4406787 | BLASTX | 160 | 1.00E−10 | 59 | (AC006532) unknown protein [Arabidopsis |
| | | | | | | | thaliana] |
| 2427 | LIB3602-059-Q6-K1-H1 | 5926716 | BLASTX | 412 | 4.00E−40 | 57 | (AB005903) AtPH1 [Arabidopsis thaliana] |
| 2428 | LIB3602-077-Q6-K6-C6 | 7484346 | BLASTX | 728 | 4.00E−77 | 68 | phytoene synthase (EC 2.5.1.—) - green alga |
| | | | | | | | (Dunaliella bardawil) >gi\|1916990\|gb\|AAB51287.1\| |
| | | | | | | | (U91900) phytoene synthase [Dunaliella bardawil] |
| 2429 | LIB3602-027-Q6-K1-A3 | 6539563 | BLASTX | 325 | 6.00E−30 | 47 | (AP000836) Similar to ISP42-like protein |
| | | | | | | | (AF051231) [Oryza sativa] |
| 2430 | LIB3602-003-Q1-K1-F3 | 1906804 | BLASTX | 254 | 9.00E−22 | 46 | (D87750) farnesyl cysteine carboxyl |
| | | | | | | | methyltransferase [Xenopus laevis] |
| 2431 | LIB3602-057-Q6-K1-F5 | 6755196 | BLASTX | 151 | 3.00E−19 | 66 | proteasome (prosome, macropain) subunit, alpha |
| | | | | | | | type 4 >gi\|5757663\|gb\|AAD50538.1\|AF060093_1 |
| | | | | | | | (AF060093) proteasome subunit C9 [Mus |
| | | | | | | | musculus] |
| 2432 | LIB3602-003-Q1-K1-D2 | 4874296 | BLASTX | 146 | 3.00E−11 | 51 | (AC007443) putative chlorophyll a/b binding |
| | | | | | | | protein [Arabidopsis thaliana] |
| 2433 | LIB3602-019-Q6-K1-D6 | 3894197 | BLASTX | 249 | 5.00E−21 | 68 | (AC005662) hypothetical protein [Arabidopsis |
| | | | | | | | thaliana] |
| 2434 | LIB3602-030-Q6-K1-D4 | 7448559 | BLASTX | 312 | 2.00E−28 | 63 | glutamate N-acetyltransferase (EC 2.3.1.35) - |
| | | | | | | | Synechocystis sp. (strain PCC 6803) |
| | | | | | | | >gi\|1653293\|dbj\|BAA18208.1\| (D90912) ornithine |
| | | | | | | | acetyltransferase [Synechocystis sp.] |
| 2435 | LIB3602-013-Q6-K1-C11 | 2688839 | BLASTX | 144 | 8.00E−09 | 60 | (AF003347) ATP phosphoribosyltransferase |
| | | | | | | | [Thlaspi goesingense] |
| 2436 | LIB3602-062-Q6-K1-H7 | 7630021 | BLASTX | 289 | 1.00E−25 | 35 | (AL132960) pasticcino 1 [Arabidopsis thaliana] |
| 2437 | LIB3602-070-Q1-K1-D7 | 1173223 | BLASTX | 152 | 6.00E−13 | 64 | 40S RIBOSOMAL PROTEIN S11 |
| | | | | | | | >gi\|454848\|gb\|AAC14469.1\| (L28831) ribosomal |
| | | | | | | | protein S11 [Glycine max] |
| 2438 | LIB3602-055-Q6-K1-D6 | 4506589 | BLASTX | 267 | 3.00E−23 | 39 | RNA 3′-terminal phosphate cyclase |
| | | | | | | | >gi\|2500648\|sp\|O00442\|RTC1_HUMAN RNA 3′- |
| | | | | | | | TERMINAL PHOSPHATE CYCLASE 1 (RNA-3′- |
| | | | | | | | PHOSPHATE CYCLASE 1) (RNA CYCLASE 1) |
| | | | | | | | >gi\|2125812\|emb\|CAA72364.1\| (Y11651) |
| | | | | | | | phosphate cyclase [Homo sapiens] |
| 2439 | LIB3602-076-Q6-K6-H9 | 7404436 | BLASTX | 156 | 4.00E−10 | 56 | 60S RIBOSOMAL PROTEIN L6 |
| | | | | | | | >gi\|7490046\|pir\|\|T41499 60s ribosomal protein 16 - |
| | | | | | | | fission yeast (Schizosaccharomyces pombe) |
| | | | | | | | >gi\|3821337\|emb\|CAA21874.1\| (AL033127) 60s |
| | | | | | | | ribosomal protein 16 [Schizosaccharomyces pombe] |
| 2440 | LIB3602-087-Q6-K1-C3 | 7485401 | BLASTX | 145 | 5.00E−09 | 62 | hypothetical protein F12C20.6 - Arabidopsis |
| | | | | | | | thaliana >gi\|3426051\|gb\|AAC32250.1\| (AC005168) |
| | | | | | | | putative Na+ dependent ileal bile acid transporter |
| | | | | | | | [Arabidopsis thaliana] |
| 2441 | LIB3602-016-Q6-K1-A4 | 3157934 | BLASTX | 523 | 3.00E−53 | 66 | (AC002131) Similar to hypothetical protein |
| | | | | | | | F09E5.8 gb\|U37429 from C. elegans. ESTs |
| | | | | | | | gb\|T42019 and gb\|N97000 come from this gene. |
| | | | | | | | [Arabidopsis thaliana] |
| 2442 | LIB3602-019-Q6-K1-E9 | 267002 | BLASTX | 261 | 2.00E−22 | 50 | SULFITE REDUCTASE (FERREDOXIN) |
| | | | | | | | >gi\|66219\|pir\|\|RDYCS7 sulfite reductase |
| | | | | | | | (ferredoxin) (EC 1.8.7.1) - Synechococcus sp |
| | | | | | | | >gi\|38930\|emb\|CAA77809.1\| (Z11755) ferredoxin- |
| | | | | | | | sulfite reductase [Synechococcus PCC6301] |
| 2443 | LIB3602-026-Q6-K1-A4 | 7480951 | BLASTX | 591 | 4.00E−61 | 64 | probable long-chain-fatty-acid-CoA ligase - |
| | | | | | | | Streptomyces coelicolor |
| | | | | | | | >gi\|4455741\|emb\|CAB36604.1\| (AL035478) |
| | | | | | | | putative long-chain-fatty-acid-CoA ligase |
| | | | | | | | [Streptomyces coelicolor A3(2)] |
| 2444 | LIB3602-059-Q6-K1-D4 | 6729515 | BLASTX | 244 | 2.00E−20 | 44 | (AL132966) protein kinase-like protein |
| | | | | | | | [Arabidopsis thaliana] |
| 2445 | LIB3602-067-Q1-K1-C4 | 4836870 | BLASTX | 408 | 1.00E−39 | 56 | (AC007260) 50S Ribosomal protein L13 |
| | | | | | | | [Arabidopsis thaliana] |
| | | | | | | | >gi\|7572938\|emb\|CAA60775.1\| (X87333) |
| | | | | | | | ribosomal protein L13 [Arabidopsis thaliana] |
| 2446 | LIB3602-043-Q6-K1-F8 | 7447850 | BLASTX | 351 | 4.00E−33 | 80 | hypothetical protein F3L17.50 - Arabidopsis |
| | | | | | | | thaliana >gi\|5262759\|emb\|CAB45907.1\| |
| | | | | | | | (AL080283) putative protein [Arabidopsis thaliana] |
| | | | | | | | >gi\|7270051\|emb\|CAB79866.1\| (AL161579) |
| | | | | | | | putative protein [Arabidopsis thaliana] |
| 2447 | LIB3602-042-Q6-K1-H3 | 7413562 | BLASTX | 230 | 9.00E−19 | 53 | (AL162973) 60S ribosomal protein-like |
| | | | | | | | [Arabidopsis thaliana] |
| 2448 | LIB3602-048-Q6-K1QA-G9 | 7630237 | BLASTX | 352 | 4.00E−33 | 44 | (AP001859) ESTs |
| | | | | | | | AU082761(S5084), D42006(S5084) correspond to a |
| | | | | | | | region of the predicted gene. ˜Similar to |
| | | | | | | | Caenorhabditis elegans chromosome 3, cosmid |
| | | | | | | | C17G10; alcohol dehydrogenase/ribitol |
| | | | | | | | dehydrogenase. (U28739) [Oryza sativa] |
| 2449 | LIB3602-061-Q6-K1-E5 | 3122785 | BLASTX | 591 | 4.00E−61 | 86 | 40S RIBOSOMAL PROTEIN S14 |
| | | | | | | | >gi\|7440341\|pir\|\|T07974 ribosomal protein S14 - |
| | | | | | | | yellow lupine >gi\|2565340\|gb\|AAB81972.1\| |
| | | | | | | | (AF026079) ribosomal protein S14 [Lupinus luteus] |
| 2450 | LIB3602-047-Q6-K1-A6 | 6524184 | BLASTX | 318 | 4.00E−29 | 49 | (AC011914) putative mutT protein [Arabidopsis |
| | | | | | | | thaliana] |
| 2451 | LIB3602-011-Q6-K1-G8 | 5262856 | BLASTX | 281 | 9.00E−25 | 60 | (AJ238095) Lsm3 protein [Homo sapiens] |
| | | | | | | | >gi\|5919147\|gb\|AAD56227.1\|AF182289_1 |
| | | | | | | | (AF182289) U6 snRNA-associated Sm-like protein |
| | | | | | | | LSm3 [Homo sapiens] |
| 2452 | LIB3602-034-Q6-K1-B7 | 5757653 | BLASTX | 149 | 2.00E−09 | 43 | (AF060088) proteasome subunit C2 [Mus |
| | | | | | | | musculus] |
| 2453 | LIB3602-066-Q1-K6-F12 | 5007086 | BLASTX | 449 | 2.00E−44 | 59 | (AF155334) NADP-specific isocitrate |
| | | | | | | | dehydrogenase [Oryza sativa] |
| 2454 | LIB3602-026-Q6-K1-G2 | 730536 | BLASTX | 179 | 2.00E−13 | 84 | 60S RIBOSOMAL PROTEIN L23 |
| | | | | | | | >gi\|7440849\|pir\|\|T03693 ribosomal protein L17 - |
| | | | | | | | common tobacco >gi\|310933\|gb\|AAA34113.1\| |
| | | | | | | | (L18915) 60S ribosomal protein subunit L17 |
| | | | | | | | [Nicotiana tabacum] |
| 2455 | LIB3602-059-Q6-K1-B4 | 7492749 | BLASTX | 281 | 9.00E−25 | 45 | probable nadh-cytochrome b5 reductase - fission |
| | | | | | | | yeast (Schizosaccharomyces pombe) |
| | | | | | | | >gi\|3560228\|emb\|CAA20696.1\| (AL031530) |
| | | | | | | | putative nadh-cytochrome b5 reductase |
| | | | | | | | [Schizosaccharomyces pombe] |
| 2456 | LIB3602-040-Q6-K1-F10 | 416583 | BLASTX | 241 | 4.00E−20 | 75 | ACETYL-COENZYME A SYNTHETASE |
| | | | | | | | (ACETATE--COA LIGASE) (ACYL- |
| | | | | | | | ACTIVATING ENZYME) |
| | | | | | | | >gi\|7437823\|pir\|\|D65215 acetate - CoA ligase (EC |
| | | | | | | | 6.2.1.1) - Escherichia coli |
| | | | | | | | >gi\|396404\|gb\|AAC43163.1\| (U00006) acetyl--CoA |
| | | | | | | | sythetase [Escherichia coli] |
| | | | | | | | >gi\|1790505\|gb\|AAC77039.1\| ( |
| 2457 | LIB3602-092-Q6-K6-A2 | 551288 | BLASTX | 710 | 5.00E−75 | 88 | (Z33611) phosphoglycerate mutase [Zea mays] |
| 2458 | LIB3602-066-Q1-K6-B11 | 3599489 | BLASTX | 162 | 9.00E−11 | 40 | (AF085148) 3-oxoacyl-[acyl-carrier-protein] |
| | | | | | | | synthase [Capsicum chinense] |
| 2459 | LIB3602-085-Q6-K1-H3 | 7021222 | BLASTX | 219 | 5.00E−25 | 56 | (AF059510) 3-methylcrotonyl-CoA carboxylase |
| | | | | | | | non-biotinylated subunit [Arabidopsis thaliana] |
| | | | | | | | >gi\|7021224\|gb\|AAF35259.1\|AF059511_1 |
| | | | | | | | (AF059511) 3-methylcrotonyl-CoA carboxylase |
| | | | | | | | nonbiotinylated subunit [Arabidopsis thaliana] |
| 2460 | LIB3602-029-Q6-K1-E2 | 1703091 | BLASTX | 169 | 9.00E−12 | 71 | ACYL CARRIER PROTEIN, MITOCHONDRIAL |
| | | | | | | | PRECURSOR (ACP) (NADH-UBIQUINONE |
| | | | | | | | OXIDOREDUCTASE 9.6 KD SUBUNIT) |
| | | | | | | | (MTACP-1) >gi\|7442278\|pir\|\|T01589 probable acyl |
| | | | | | | | carrier protein F16B22.11 - Arabidopsis thaliana |
| | | | | | | | >gi\|903689\|gb\|AAB96840.1\| (L23574) acyl carrier |
| | | | | | | | protein pr |
| 2461 | LIB3602-027-Q6-K1-E4 | 7469427 | BLASTX | 177 | 1.00E−12 | 33 | hypothetical protein - Synechocystis sp. (strain PCC |
| | | | | | | | 6803) >gi\|1001449\|dbj\|BAA10074.1\| (D63999) |
| | | | | | | | hypothetical protein [Synechocystis sp.] |
| 2462 | LIB3602-011-Q6-K1-A7 | 7431396 | BLASTX | 242 | 3.00E−20 | 61 | xanthine dehydrogenase homolog T11I11.140 - |
| | | | | | | | Arabidopsis thaliana |
| | | | | | | | >gi\|5123707\|emb\|CAB45451.1\| (AL079347) |
| | | | | | | | xanthine dehydrogenase [Arabidopsis thaliana] |
| | | | | | | | >gi\|7270441\|emb\|CAB80207.1 \| (AL161586) |
| | | | | | | | xanthine dehydrogenase [Arabidopsis thaliana] |
| 2463 | LIB3602-002-P1-K6-G12 | 7406448 | BLASTX | 147 | 6.00E−09 | 40 | (AL162875) putative protein [Arabidopsis thaliana] |
| 2464 | LIB3602-042-Q6-K1-A7 | 2853277 | BLASTX | 152 | 7.00E−10 | 60 | (U82756) WD splicing factor Hprp4p [Homo |
| | | | | | | | sapiens] |
| 2465 | LIB3602-070-Q1-K1-G3 | 7431559 | BLASTX | 502 | 1.00E−50 | 73 | hypothetical protein - Synechocystis sp. (strain PCC |
| | | | | | | | 6803) >gi\|1653680\|dbj\|BAA18592.1\| (D90915) |
| | | | | | | | pyruvate dehydrogenase E1 component, alpha |
| | | | | | | | subunit [Synechocystis sp.] |
| 2466 | LIB3602-025-Q6-K1-E2 | 132076 | BLASTX | 523 | 4.00E−53 | 67 | RIBULOSE BISPHOSPHATE CARBOXYLASE |
| | | | | | | | SMALL CHAIN 1 PRECURSOR (RUBISCO |
| | | | | | | | SMALL SUBUNIT 1) >gi\|68109\|pir\|\|RKKMS1 |
| | | | | | | | ribulose-bisphosphate carboxylase (EC 4.1.1.39) |
| | | | | | | | small chain 1 precursor - Chlamydomonas |
| | | | | | | | reinhardtii |
| 2467 | LIB3602-046-Q6-K1-B9 | 7486523 | BLASTX | 231 | 3.00E−19 | 45 | hypothetical protein F6H11.40 - Arabidopsis |
| | | | | | | | thaliana >gi\|2827702\|emb\|CAA16675.1\| |
| | | | | | | | (AL021684) predicted protein [Arabidopsis |
| | | | | | | | thaliana] |
| 2468 | LIB3602-109-Q1-K1-F4 | 7298362 | BLASTX | 152 | 1.00E−09 | 51 | (AE003653) ApepP gene product [Drosophila |
| | | | | | | | melanogaster] |
| 2469 | LIB3602-030-Q6-K1-H3 | 6066383 | BLASTX | 414 | 2.00E−40 | 51 | (AJ011926) Mg-protoporphyrin IX [Hordeum |
| | | | | | | | vulgare] |
| 2470 | LIB3602-112-Q1-K1-B4 | 1905979 | BLASTX | 219 | 2.00E−17 | 46 | (U81052) oligosaccharyltransferase subunit |
| | | | | | | | homolog [Mus musculus] |
| 2471 | LIB3602-041-Q6-K1-H6 | 167433 | BLASTN | 34 | 3.00E−09 | 89 | C. reinhardtii ribulose 1,5-bisphosphate |
| | | | | | | | carboxylase/oxygenase activase mRNA, complete |
| | | | | | | | cds |
| 2472 | LIB3602-025-Q6-K1-A2 | 7485629 | BLASTX | 365 | 1.00E−34 | 57 | hypothetical protein F17K2.15 - Arabidopsis |
| | | | | | | | thaliana >gi\|2979552\|gb\|AAC06161.1\| (AC003680) |
| | | | | | | | unknown protein [Arabidopsis thaliana] |
| 2473 | LIB3602-015-Q6-K1-G7 | 129699 | BLASTX | 582 | 5.00E−60 | 71 | PROLIFERATING CELL NUCLEAR ANTIGEN |
| | | | | | | | (PCNA) (CYCLIN) >gi\|99946\|pir\|\|S14414 |
| | | | | | | | proliferating cell nuclear antigen - soybean |
| | | | | | | | (fragment) >gi\|18726\|emb\|CAA39239.1\| (X55706) |
| | | | | | | | proliferating cell nuclear antigen [Glycine max] |
| 2474 | LIB3602-046-Q6-K1-B4 | 3122952 | BLASTX | 144 | 8.00E−09 | 32 | TIPD PROTEIN >gi\|7489899\|pir\|\|T08602 protein |
| | | | | | | | TipD - slime mold (Dictyostelium discoideum) |
| | | | | | | | >gi\|2407788\|gb\|AAB70659.1\| (AF019236) TipD |
| | | | | | | | [Dictyostelium discoideum] |
| 2475 | LIB3602-025-Q6-K1-B7 | 2773404 | BLASTX | 324 | 8.00E−30 | 46 | (AF041255) pyridoxal kinase [Sus scrofa] |
| 2476 | LIB3602-118-Q1-K1-D4 | 7380038 | BLASTX | 167 | 7.00E−21 | 60 | (AL162755) putative GTP-binding protein |
| | | | | | | | [Neisseria meningitidis] |
| 2477 | LIB3602-010-Q6-K1-A3 | 7487074 | BLASTX | 556 | 5.00E−57 | 61 | hypothetical protein T16H5.240 - Arabidopsis |
| | | | | | | | thaliana (fragment) >gi\|3250697\|emb\|CAA19705.1\| |
| | | | | | | | (AL024486) putative protein [Arabidopsis thaliana] |
| | | | | | | | >gi\|7268784\|emb\|CAB78990.1\| (AL161551) |
| | | | | | | | putative protein [Arabidopsis thaliana] |
| 2478 | LIB3602-062-Q6-K1-F2 | 7021047 | BLASTX | 174 | 3.00E−12 | 41 | (AK000759) unnamed protein product [Homo |
| | | | | | | | sapiens] |
| 2479 | LIB3602-108-Q1-K1-B4 | 7503535 | BLASTX | 181 | 4.00E−13 | 34 | hypothetical protein F46B3.9 - Caenorhabditis |
| | | | | | | | elegans >gi\|3877232\|emb\|CAB04398.1\| (Z81540) |
| | | | | | | | predicted using Genefinder [Caenorhabditis |
| | | | | | | | elegans] |
| 2480 | LIB3602-070-Q1-K1-C8 | 7630059 | BLASTX | 227 | 2.00E−18 | 33 | (AL353013) putative protein [Arabidopsis thaliana] |
| 2481 | LIB3602-090-Q6-K6-A3 | 6226735 | BLASTX | 199 | 4.00E−15 | 37 | PUTATIVE ACETYLTRANSFERASE |
| | | | | | | | C18B11.09C IN CHROMOSOME I |
| | | | | | | | >gi\|7492354\|pir\|\|T37905 probable acetyltransferase - |
| | | | | | | | fission yeast (Schizosaccharomyces pombe) |
| | | | | | | | >gi\|4150918\|emb\|CAA90593.1\| (Z50728) putative |
| | | | | | | | acetyltransferase [Schizosaccharomyces pombe] |
| 2482 | LIB3602-052-Q6-K1-B8 | 7486331 | BLASTX | 175 | 2.00E−12 | 52 | hypothetical protein F28M20.60 - Arabidopsis |
| | | | | | | | thaliana >gi\|3281853\|emb\|CAA19748.1\| |
| | | | | | | | (AL031004) putative protein [Arabidopsis thaliana] |
| | | | | | | | >gi\|7270078\|emb\|CAB79893.1\| (AL161579) |
| | | | | | | | putative protein [Arabidopsis thaliana] |
| 2483 | LIB3602-086-Q6-K1-B7 | 6970282 | BLASTX | 323 | 1.00E−29 | 64 | (AC021666) unknown protein [Arabidopsis |
| | | | | | | | thaliana] |
| 2484 | LIB3602-016-Q6-K1-A6 | 1707992 | BLASTX | 280 | 1.00E−24 | 51 | SERINE HYDROXYMETHYLTRANSFERASE |
| | | | | | | | (SERINE METHYLASE) (GLYCINE |
| | | | | | | | HYDROXYMETHYLTRANSFERASE) (SHMT) |
| | | | | | | | >gi\|485099\|gb\|AAB53830.1\| (U00048) Contains |
| | | | | | | | similarity to Pfam domain: PF00464 (SHMT), |
| | | | | | | | Score = 954.1, E-value = 9.9e−287, N = 1 |
| | | | | | | | [Caenorhabditis elegans] |
| 2485 | LIB3602-114-Q1-K1-F4 | 226788 | BLASTX | 166 | 3.00E−11 | 35 | erythrocyte ankyrin [Homo sapiens] |
| 2486 | LIB3602-100-Q1-K1-C4 | 7019397 | BLASTX | 150 | 2.00E−09 | 34 | GDP-mannose pyrophosphorylase B |
| | | | | | | | >gi\|5052351\|gb\|AAD38516.1\|AF135421_1 |
| | | | | | | | (AF135421) GDP-mannose pyrophosphorylase B |
| | | | | | | | [Homo sapiens] |
| 2487 | LIB3602-008-Q6-K1-G8 | 6056388 | BLASTX | 790 | 2.00E−84 | 94 | (AC009324) 26S proteasome ATPase subunit |
| | | | | | | | [Arabidopsis thaliana] |
| 2488 | LIB3602-085-Q6-K1-H6 | 4263697 | BLASTX | 185 | 9.00E−14 | 46 | (AC006223) 60S ribosomal protein L27 |
| | | | | | | | [Arabidopsis thaliana] |
| 2489 | LIB3602-029-Q6-K1-G2 | 7484385 | BLASTX | 267 | 4.00E−23 | 68 | L-ascorbate peroxidase (EC 1.11.1.11) precursor - |
| | | | | | | | Chlamydomonas reinhardtii |
| | | | | | | | >gi\|2887338\|emb\|CAA11265.1\| (AJ223325) |
| | | | | | | | ascorbate peroxidase [Chlamydomonas reinhardtii] |
| 2490 | LIB3602-115-Q1-K1-E2 | 7466728 | BLASTX | 173 | 4.00E−12 | 39 | probable iron-sulfur-binding protein b0947 - |
| | | | | | | | Escherichia coli >gi\|1787179\|gb\|AAC74033.1\| |
| | | | | | | | (AE000196) orf, hypothetical protein [Escherichia |
| | | | | | | | coli] |
| 2491 | LIB3602-100-Q1-K1-A4 | 7487059 | BLASTX | 180 | 5.00E−13 | 38 | hypothetical protein T16B24.22 - Arabidopsis |
| | | | | | | | thaliana >gi\|3402689\|gb\|AAC28992.1\| (AC004697) |
| | | | | | | | unknown protein [Arabidopsis thaliana] |
| 2492 | LIB3602-059-Q6-K1-C8 | 6978917 | BLASTX | 327 | 2.00E−30 | 60 | (AC021665) putative histidinol-phosphate |
| | | | | | | | aminotransferase [Arabidopsis thaliana] |
| 2493 | LIB3602-040-Q6-K1-H7 | 6807962 | BLASTX | 461 | 4.00E−46 | 72 | (AL137410) hypothetical protein [Homo sapiens] |
| 2494 | LIB3602-115-Q1-K1-B9 | 7340654 | BLASTX | 550 | 3.00E−63 | 68 | (AL162506) fructose-bisphosphate aldolase-like |
| | | | | | | | protein [Arabidopsis thaliana] |
| 2495 | LIB3602-029-Q6-K1-G11 | 7630068 | BLASTX | 206 | 6.00E−16 | 71 | (AL353032) v-ATPase subunit D (vATPD) |
| | | | | | | | [Arabidopsis thaliana] |
| 2496 | LIB3602-066-Q1-K6-C5 | 122090 | BLASTX | 426 | 1.00E−41 | 98 | HISTONE H3 >gi\|81287\|pir\|\|S00940 histone H3 - |
| | | | | | | | Volvox carteri >gi\|2119017\|pir\|\|S59581 histone H3 |
| | | | | | | | (clones CH-II and CH-III) - Chlamydomonas |
| | | | | | | | reinhardtii >gi\|21985\|emb\|CAA30035.1\| (X06963) |
| | | | | | | | put. histone H3 [Volvox carteri] |
| | | | | | | | >gi\|21988\|emb\|CAA30037.1\| (X06964) pu |
| 2497 | LIB3602-037-Q6-K1-G8 | 7206844 | BLASTX | 187 | 6.00E−14 | 50 | (AC006834) contains similarity to NADH- |
| | | | | | | | ubiquinone oxidoreductase 18 KD subunits |
| | | | | | | | [Caenorhabditis elegans] |
| 2498 | LIB3602-052-Q6-K1-A7 | 6165265 | BLASTX | 341 | 7.00E−32 | 62 | (AJ250733) translation elongation factor 1-alpha |
| | | | | | | | [Dreissena polymorpha] |
| 2499 | LIB3602-118-Q1-K1-E1 | 7576173 | BLASTX | 158 | 6.00E−14 | 33 | (AL163912) putative protein [Arabidopsis thaliana] |
| 2500 | LIB3602-108-Q1-K1-D10 | 4689334 | BLASTX | 271 | 8.00E−29 | 63 | (AF132555) BcDNA.GM07659 [Drosophila |
| | | | | | | | melanogaster] |
| 2501 | LIB3602-030-Q6-K1-D2 | 7630065 | BLASTX | 580 | 7.00E−60 | 77 | (AL353032) ribosomal protein L11-like |
| | | | | | | | [Arabidopsis thaliana] |
| 2502 | LIB3602-053-Q6-K1-B1 | 6056399 | BLASTX | 188 | 8.00E−14 | 61 | (AC009324) AP2 domain containing protein |
| | | | | | | | RAP2.12 [Arabidopsis thaliana] |
| 2503 | LIB3602-111-Q1-K1-C12 | 7485448 | BLASTX | 273 | 8.00E−24 | 44 | hypothetical protein F13M23.170 - Arabidopsis |
| | | | | | | | thaliana >gi\|4455246\|emb\|CAB36745.1\| |
| | | | | | | | (AL035523) putative protein [Arabidopsis thaliana] |
| | | | | | | | >gi\|7269353\|emb\|CAB79412.1\| (AL161562) |
| | | | | | | | putative protein [Arabidopsis thaliana] |
| 2504 | LIB3602-038-Q6-K1-H11 | 167253 | BLASTX | 849 | 2.00E−91 | 94 | (M74441) ribulose 1,5-bisphosphate carboxylase |
| | | | | | | | large subunit [Chlorella-like algae] |
| 2505 | LIB3602-042-Q6-K1-C2 | 4689328 | BLASTX | 408 | 1.00E−39 | 59 | (AF132552) BcDNA.GM01838 [Drosophila |
| | | | | | | | melanogaster] >gi\|7301261\|gb\|AAF56391.1\| |
| | | | | | | | (AE003750) OstStt3 gene product [Drosophila |
| | | | | | | | melanogaster] |
| 2506 | LIB3602-039-Q6-K1-G11 | 4585973 | BLASTX | 241 | 5.00E−20 | 66 | (AC005287) translation initiation factor |
| | | | | | | | [Arabidopsis thaliana] |
| 2507 | LIB3602-018-Q6-K1-H1 | 4587598 | BLASTX | 246 | 1.00E−22 | 47 | (AC006951) 3-oxoacyl carrier protein synthase |
| | | | | | | | [Arabidopsis thaliana] |
| 2508 | LIB3602-087-Q6-K1-A10 | 65068 | BLASTX | 274 | 5.00E−24 | 50 | (X05025) ribosomal protein L14 [Xenopus laevis] |
| 2509 | LIB3602-051-Q6-K1-G7 | 1220453 | BLASTX | 383 | 9.00E−37 | 47 | (M79328) alpha-amylase [Solanum tuberosum] |
| 2510 | LIB3602-041-Q6-K1-B12 | 7473394 | BLASTX | 361 | 1.00E−34 | 65 | probable acyl-CoA dehydrogenase - Deinococcus |
| | | | | | | | radiodurans (strain R1) |
| | | | | | | | >gi\|6460476\|gb\|AAF12182.1\|AE001862_8 |
| | | | | | | | (AE001862) acyl-CoA dehydrogenase, putative |
| | | | | | | | [Deinococcus radiodurans] |
| 2511 | LIB3602-072-Q1-K1-B12 | 7437759 | BLASTX | 510 | 2.00E−51 | 51 | arginine - tRNA ligase (EC 6.1.1.19) - Arabidopsis |
| | | | | | | | thaliana >gi\|2632105\|emb\|CAB11468.1\| (Z98760) |
| | | | | | | | arginyl-tRNA synthetase [Arabidopsis thaliana] |
| | | | | | | | >gi\|4539426\|emb\|CAB38959.1\| (AL049171) |
| | | | | | | | arginyl-tRNA synthetase [Arabidopsis thaliana] |
| | | | | | | | >gi\|7269482\|emb\|CAB79485.1 |
| 2512 | LIB3602-104-Q1-K1-H8 | 3421104 | BLASTX | 450 | 1.00E−44 | 71 | (AF043531) 20S proteasome beta subunit PBB2 |
| | | | | | | | [Arabidopsis thaliana] |
| 2513 | LIB3602-004-Q1-K1-E10 | 3212610 | BLASTX | 386 | 5.00E−37 | 57 | Chain A, Sulfite Oxidase From Chicken Liver |
| | | | | | | | >gi\|3212611\|pdb\|1SOX\|B Chain B, Sulfite Oxidase |
| | | | | | | | From Chicken Liver |
| 2514 | LIB3602-003-Q1-K1-G7 | 3041702 | BLASTX | 205 | 8.00E−16 | 30 | TRIACYLGLYCEROL LIPASE, GASTRIC |
| | | | | | | | PRECURSOR (GASTRIC LIPASE) (GL) |
| | | | | | | | >gi\|2204113\|emb\|CAA74198.1\| (Y13899) |
| | | | | | | | triacylglycerol lipase [Canis familiaris] |
| 2515 | LIB3602-064-Q1-K6-A9 | 2500381 | BLASTX | 270 | 1.00E−26 | 65 | 60S RIBOSOMAL PROTEIN L44 P (L41) (L41 P- |
| | | | | | | | TYPE) |
| 2516 | LIB3602-079-Q6-K6-B4 | 3025188 | BLASTX | 285 | 4.00E−25 | 52 | HYPOTHETICAL 11.9 KD PROTEIN SLR1846 |
| | | | | | | | >gi\|7448385\|pir\|\|S75164 hypothetical protein |
| | | | | | | | slr1846 - Synechocystis sp. (strain PCC 6803) |
| | | | | | | | >gi\|1652154\|dbj\|BAA17078.1\| (D90903) |
| | | | | | | | hypothetical protein [Synechocystis sp.] |
| 2517 | LIB3602-059-Q6-K1-G8 | 4587605 | BLASTX | 224 | 5.00E−18 | 41 | (AC006951) putative mutT domain protein |
| | | | | | | | [Arabidopsis thaliana] |
| 2518 | LIB3602-089-Q6-K6-H5 | 21983 | BLASTN | 64 | 3.00E−27 | 97 | Volvox carteri H3-I and H4-I genes for histones H3 |
| | | | | | | | and H4 |
| 2519 | LIB3602-030-Q6-K1-C7 | 4263711 | BLASTX | 515 | 3.00E−52 | 63 | (AC006223) putative CCR4-associated factor |
| | | | | | | | [Arabidopsis thaliana] |
| 2520 | LIB3602-084-Q6-K1-G12 | 6056404 | BLASTX | 409 | 1.00E−39 | 50 | (AC009525) Similar to cullin proteins [Arabidopsis |
| | | | | | | | thaliana] |
| 2521 | LIB3602-039-Q6-K1-B9 | 4263714 | BLASTX | 540 | 4.00E−55 | 59 | (AC006223) unknown protein [Arabidopsis |
| | | | | | | | thaliana] |
| 2522 | LIB3602-105-Q1-K1-E2 | 2583129 | BLASTX | 621 | 1.00E−64 | 64 | (AC002387) putative methionine aminopeptidase |
| | | | | | | | [Arabidopsis thaliana] |
| 2523 | LIB3602-113-Q1-K1-B2 | 1931647 | BLASTX | 573 | 6.00E−59 | 56 | (U95973) endomembrane protein EMP70 precusor |
| | | | | | | | isolog [Arabidopsis thaliana] |
| 2524 | LIB3602-105-Q1-K1-H5 | 6649217 | BLASTX | 199 | 4.00E−15 | 50 | (AF165422) suppressor of K+ transport growth |
| | | | | | | | defect-like protein [Mesembryanthemum |
| | | | | | | | crystallinum] |
| 2525 | LIB3602-101-Q1-K1-D5 | 7573355 | BLASTX | 156 | 3.00E−10 | 61 | (AL163812) diaminopimelate decarboxylase-like |
| | | | | | | | protein [Arabidopsis thaliana] |
| 2526 | LIB3602-094-Q6-K6-F11 | 6119520 | BLASTX | 517 | 2.00E−52 | 50 | (AC011560) unknown protein [Arabidopsis |
| | | | | | | | thaliana] |
| 2527 | LIB3602-017-Q6-K1-D10 | 1583601 | BLASTX | 200 | 2.00E−15 | 76 | zeta carotene desaturase [Capsicum annuum] |
| 2528 | LIB3602-051-Q6-K1-C11 | 3122638 | BLASTX | 345 | 4.00E−49 | 66 | PP1/PP2A PHOSPHATASES PLEIOTROPIC |
| | | | | | | | REGULATOR PRL1 >gi\|1076381\|pir\|\|S49820 |
| | | | | | | | PRL1 protein - Arabidopsis thaliana |
| | | | | | | | >gi\|577733\|emb\|CAA58031.1\| (X82824) PRL1 |
| | | | | | | | [Arabidopsis thaliana] |
| | | | | | | | >gi\|577735\|emb\|CAA58032.1\| (X82825) PRL1 |
| | | | | | | | [Arabidopsis thaliana] >gi\|2244947\|emb\|CA |
| 2529 | LIB3602-046-Q6-K1-G12 | 2501449 | BLASTX | 228 | 1.00E−18 | 47 | UBIQUITIN-LIKE PROTEIN SMT3 |
| | | | | | | | >gi\|7446816\|pir\|\|T04102 smt3 protein - rice |
| | | | | | | | >gi\|1668773\|emb\|CAA67922.1\| (X99608) |
| | | | | | | | ubiquitin-like protein [Oryza sativa] |
| 2530 | LIB3602-106-Q1-K1-C4 | 1323548 | BLASTN | 70 | 1.00E−30 | 90 | Chlamydomonas reinhardtii carbonic anhydrase |
| | | | | | | | precursor (beta-CA1) mRNA, nuclear gene |
| | | | | | | | encoding mitochondrial protein, complete cds |
| 2531 | LIB3602-103-Q1-K1-H4 | 6321942 | BLASTX | 300 | 5.00E−27 | 61 | ribosomal protein (weak similarity); Imp3p |
| | | | | | | | >gi\|418596\|sp\|P32899\|IMP3_YEAST U3 SMALL |
| | | | | | | | NUCLEOLAR RIBONUCLEOPROTEIN |
| | | | | | | | PROTEIN IMP3 >gi\|485540\|pir\|\|S33911 probable |
| | | | | | | | ribosomal protein YHR148w - yeast |
| | | | | | | | (Saccharomyces cerevisiae) |
| | | | | | | | >gi\|4014\|emb\|CAA49237.1\| (X69480) uOR |
| 2532 | LIB3602-057-Q6-K1-E2 | 6119523 | BLASTX | 275 | 6.00E−24 | 32 | (AC011560) putative amino acid transporter |
| | | | | | | | [Arabidopsis thaliana] |
| 2533 | LIB3602-052-Q6-K1-C11 | 7431230 | BLASTX | 184 | 1.00E−13 | 50 | malate dehydrogenase (oxaloacetate- |
| | | | | | | | decarboxylating) (NADP+) (EC 1.1.1.40) - tomato |
| | | | | | | | (fragment) >gi\|804817\|gb\|AAA66051.1\| (L36647) |
| | | | | | | | malic enzyme [Lycopersicon esculentum] |
| 2534 | LIB3602-109-Q1-K1-G7 | 3264759 | BLASTX | 444 | 5.00E−44 | 70 | (AF071889) 40S ribosomal protein S8 [Prunus |
| | | | | | | | armeniaca] |
| 2535 | LIB3602-068-Q1-K1-G3 | 7475184 | BLASTX | 260 | 3.00E−22 | 35 | hypothetical protein ymaE - Bacillus subtilis |
| | | | | | | | >gi\|2634109\|emb\|CAB13609.1\| (Z99113) ymaE |
| | | | | | | | [Bacillus subtilis] |
| 2536 | LIB3602-044-Q6-K1-H6 | 4506489 | BLASTX | 411 | 5.00E−40 | 57 | replication factor C (activator 1) 3 (38 kD) |
| | | | | | | | >gi\|3915601\|sp\|P40938\|AC13_HUMAN |
| | | | | | | | ACTIVATOR 1 38 KD SUBUNIT |
| | | | | | | | (REPLICATION FACTOR C 38 KD SUBUNIT) |
| | | | | | | | (A1 38 KD SUBUNIT) (RF-C 38 KD SUBUNIT) |
| | | | | | | | (RFC38) >gi\|7444557\|pir\|\|T09573 replication factor |
| | | | | | | | C 38K chain - human >gi\| |
| 2537 | LIB3602-040-Q6-K1-D11 | 7486039 | BLASTX | 321 | 2.00E−29 | 40 | hypothetical protein F23F1.14 - Arabidopsis |
| | | | | | | | thaliana >gi\|3420057\|gb\|AAC31858.1\| (AC004680) |
| | | | | | | | putative ABC transporter [Arabidopsis thaliana] |
| 2538 | LIB3602-004-Q1-K1-F10 | 7446679 | BLASTX | 152 | 3.00E−15 | 49 | peptide methionine sulfoxide reductase - |
| | | | | | | | Methanobacterium thermoautotrophicum (strain |
| | | | | | | | Delta H) >gi\|2621609\|gb\|AAB85041.1\| (AE000836) |
| | | | | | | | peptide methionine sulfoxide reductase |
| | | | | | | | [Methanobacterium thermoautotrophicum] |
| 2539 | LIB3602-014-Q6-K1-D10 | 6716785 | BLASTX | 632 | 7.00E−66 | 90 | (AF220539) 40s ribosomal protein S23 [Euphorbia |
| | | | | | | | esula] |
| 2540 | LIB3602-057-Q6-K1-D4 | 4826972 | BLASTX | 315 | 1.00E−28 | 44 | RNA binding motif protein 8 |
| | | | | | | | >gi\|4455129\|gb\|AAD21089.1\| (AF127761) |
| | | | | | | | ribonucleoprotein RBM8 [Homo sapiens] |
| | | | | | | | >gi\|6841450\|gb\|AAF29078.1\|AF161463_1 |
| | | | | | | | (AF161463) HSPC114 [Homo sapiens] |
| 2541 | LIB3602-016-Q6-K1-E6 | 2274859 | BLASTX | 318 | 4.00E−29 | 74 | (AJ000016) Cks1 protein [Arabidopsis thaliana] |
| | | | | | | | >gi\|4510420\|gb\|AAD21506.1\| (AC006929) putative |
| | | | | | | | cyclin-dependent kinase regulatory subunit |
| | | | | | | | [Arabidopsis thaliana] |
| 2542 | LIB3602-041-Q6-K1-G1 | 2160174 | BLASTX | 572 | 8.00E−59 | 62 | (AC000132) Identical to A. thaliana PUR2 |
| | | | | | | | (gb\|X74766). ESTs gb\|ATTS3927, gb\|N96446 come |
| | | | | | | | from this gene. [Arabidopsis thaliana] |
| 2543 | LIB3602-106-Q1-K1-H11 | 5281051 | BLASTX | 296 | 2.00E−26 | 49 | (AL080318) stress-induced protein sti1-like protein |
| | | | | | | | [Arabidopsis thaliana] |
| | | | | | | | >gi\|7267942\|emb\|CAB78283.1\| (AL161534) stress- |
| | | | | | | | induced protein sti1-like protein [Arabidopsis |
| | | | | | | | thaliana] |
| 2544 | LIB3602-062-Q6-K1-G6 | 7288201 | BLASTX | 320 | 3.00E−29 | 68 | (AF108451) phosphoglycerate kinase precursor |
| | | | | | | | [Phaeodactylum tricornutum] |
| 2545 | LIB3602-066-Q1-K6-E1 | 7305087 | BLASTX | 394 | 6.00E−38 | 54 | glutamine fructose-6-phosphate transaminase 2 |
| | | | | | | | >gi\|6226821\|sp\|Q9Z2Z9\|GFA2_MOUSE |
| | | | | | | | GLUCOSAMINE-FRUCTOSE-6-PHOSPHATE |
| | | | | | | | AMINOTRANSFERASE [ISOMERIZING] 2 |
| | | | | | | | (HEXOSEPHOSPHATE AMINOTRANSFERASE |
| | | | | | | | 2) (D-FRUCTOSE-6-PHOSPHATE |
| | | | | | | | AMIDOTRANSFERASE 2) (GFAT 2) (GFAT2) |
| | | | | | | | >gi\|4239879 |
| 2546 | LIB3602-053-Q6-K1-A9 | 7490623 | BLASTX | 185 | 1.00E−13 | 45 | heat shock protein 70 family - fission yeast |
| | | | | | | | (Schizosaccharomyces pombe) |
| | | | | | | | >gi\|2992154\|dbj\|BAA25322.1\| (AB012387) heat |
| | | | | | | | shock protein [Schizosaccharomyces pombe] |
| | | | | | | | >gi\|3581889\|emb\|CAA20787.1\| (AL031540) heat |
| | | | | | | | shock protein 70 family [Schizosaccharomyces |
| | | | | | | | pombe] |
| 2547 | LIB3602-016-Q6-K1-F3 | 4826940 | BLASTX | 156 | 8.00E−15 | 40 | Pro-X carboxypeptidase precursor |
| | | | | | | | >gi\|1172047\|sp\|P42785\|PCP_HUMAN |
| | | | | | | | LYSOSOMAL PRO-X CARBOXYPEPTIDASE |
| | | | | | | | PRECURSOR (PROLYLCARBOXYPEPTIDASE) |
| | | | | | | | (PRCP) (PROLINE CARBOXYPEPTIDASE) |
| | | | | | | | (ANGIOTENSINASE C) (LYSOSOMAL |
| | | | | | | | CARBOXYPEPTIDASE C) |
| | | | | | | | >gi\|476943\|pir\|\|A47352 lysosomal Pro-X |
| 2548 | LIB3602-048-Q6-K1QA- | 3219858 | BLASTX | 245 | 1.00E−20 | 45 | DNA-DIRECTED RNA POLYMERASE II 13.6 KD |
| | D10 | | | | | | POLYPEPTIDE >gi\|2129724\|pir\|\|S71204 |
| | | | | | | | DNA-directed RNA polymerase (EC 2.7.7.6) II |
| | | | | | | | 13.6K chain - Arabidopsis thaliana |
| | | | | | | | >gi\|881501\|gb\|AAB02849.1\| (U28048) RNA |
| | | | | | | | polymerase II 13.6 kDa subunit [Arabidopsis |
| | | | | | | | thaliana] >gi\|4678 |
| 2549 | LIB3602-022-Q6-K1-D12 | 7435799 | BLASTX | 317 | 4.00E−29 | 46 | cysteine proteinase (EC 3.4.22.—) - barley |
| | | | | | | | >gi\|2224810\|emb\|CAB09698.1\| (Z97022) cysteine |
| | | | | | | | proteinase [Hordeum vulgare] |
| 2550 | LIB3602-023-Q6-K1-H2 | 2213612 | BLASTX | 201 | 2.00E−15 | 40 | (AC000103) F21J9.6 [Arabidopsis thaliana] |
| 2551 | LIB3602-010-Q6-K1-E7 | 4512684 | BLASTX | 265 | 7.00E−23 | 61 | (AC006931) unknown protein [Arabidopsis |
| | | | | | | | thaliana] |
| 2552 | LIB3602-042-Q6-K1-A5 | 6692118 | BLASTX | 570 | 1.00E−58 | 89 | (AC007764) F22C12.2 [Arabidopsis thaliana] |
| 2553 | LIB3602-054-Q6-K1-A10 | 5921971 | BLASTX | 469 | 7.00E−47 | 55 | (AF106575) contains similarity to Pfam domain |
| | | | | | | | PF00171 (aldedh), Score = 286.5, E-value = 1.1e−82, |
| | | | | | | | N = 1 [Caenorhabditis elegans] |
| 2554 | LIB3602-062-Q6-K1-H1 | 7267544 | BLASTX | 649 | 7.00E−68 | 64 | (AL161513) isoamylase-like protein [Arabidopsis |
| | | | | | | | thaliana] |
| 2555 | LIB3602-064-Q1-K6-G11 | 4679028 | BLASTX | 145 | 1.00E−08 | 28 | (AF077207) HSPC021 [Homo sapiens] |
| | | | | | | | >gi\|5106781\|gb\|AAD39841.1\| (AF083243) |
| | | | | | | | HSPC025 [Homo sapiens] |
| 2556 | LIB3602-022-Q6-K1-B1 | 6735297 | BLASTX | 290 | 6.00E−26 | 42 | (AL137080) putative protein [Arabidopsis thaliana] |
| 2557 | LIB3602-116-Q1-K1-A11 | 2500352 | BLASTX | 300 | 6.00E−46 | 58 | 60S RIBOSOMAL PROTEIN L10 |
| | | | | | | | >gi\|1129139\|emb\|CAA63831.1\| (X94087) similar to |
| | | | | | | | a gene located in region Xq27-28 of humans |
| | | | | | | | [Euglena gracilis] |
| 2558 | LIB3602-060-Q6-K1-D2 | 464980 | BLASTX | 436 | 5.00E−43 | 55 | UBIQUITIN-CONJUGATING ENZYME E2-17 KD |
| | | | | | | | (UBIQUITIN-PROTEIN LIGASE) |
| | | | | | | | (UBIQUITIN CARRIER PROTEIN) |
| | | | | | | | >gi\|166422\|gb\|AAA18528.1\| (L06967) ubiquitin |
| | | | | | | | carrier protein [Medicago sativa] |
| 2559 | LIB3602-040-Q6-K1-D7 | 6754506 | BLASTX | 188 | 7.00E−14 | 35 | like-glycosyltransferase |
| | | | | | | | >gi\|3954978\|emb\|CAA06945.1\| (AJ006278) |
| | | | | | | | acetylglucosaminyltransferase-like protein [Mus |
| | | | | | | | musculus] |
| 2560 | LIB3602-047-Q6-K1-F9 | 7486019 | BLASTX | 227 | 2.00E−18 | 62 | hypothetical protein F23E12.190 - Arabidopsis |
| | | | | | | | thaliana >gi\|3080425\|emb\|CAA18744.1\| |
| | | | | | | | (AL022604) putative protein [Arabidopsis thaliana] |
| | | | | | | | >gi\|7270477\|emb\|CAB80242.1\| (AL161587) |
| | | | | | | | putative protein [Arabidopsis thaliana] |
| 2561 | LIB3602-076-Q6-K6-B12 | 7428834 | BLASTX | 218 | 4.00E−18 | 68 | probable P-glycoprotein pgp1 - Arabidopsis thaliana |
| | | | | | | | >gi\|3355477\|gb\|AAC27839.1\| (AC004218) putative |
| | | | | | | | ABC transporter [Arabidopsis thaliana] |
| 2562 | LIB3602-038-Q6-K1-G6 | 6580769 | BLASTX | 346 | 2.00E−32 | 67 | (AF088897) formate acetyltransferase [Zymomonas |
| | | | | | | | mobilis] |
| 2563 | LIB3602-034-Q6-K1-E5 | 7020000 | BLASTX | 169 | 1.00E−11 | 41 | (AK000120) unnamed protein product [Homo |
| | | | | | | | sapiens] |
| 2564 | LIB3602-059-Q6-K1-A3 | 421929 | BLASTX | 568 | 1.00E−58 | 85 | polyubiquitin - tomato |
| | | | | | | | >gi\|312160\|emb\|CAA51679.1\| (X73156) ubiquitin |
| | | | | | | | [Lycopersicon esculentum] |
| 2565 | LIB3602-092-Q6-K6-B3 | 296593 | BLASTN | 260 | 1.00E−144 | 94 | H. vulgare pZE40 gene |
| 2566 | LIB3602-063-Q1-K6-E5 | 3450955 | BLASTX | 267 | 2.00E−23 | 72 | (AF020736) ATPase homolog [Homo sapiens] |
| 2567 | LIB3602-048-Q6-K1QA-D7 | 2341033 | BLASTX | 451 | 1.00E−44 | 55 | (AC000104) Similar to Babesia aldo-keto reductase |
| | | | | | | | (gb\|M93122). [Arabidopsis thaliana] |
| 2568 | LIB3602-023-Q6-K1-A8 | 7488984 | BLASTX | 163 | 6.00E−11 | 39 | dem protein - tomato |
| | | | | | | | >gi\|2190419\|emb\|CAA73973.1\| (Y13632) dem |
| | | | | | | | [Lycopersicon esculentum]. |
| 2569 | LIB3602-011-Q6-K1-D8 | 3024430 | BLASTX | 321 | 2.00E−29 | 43 | PYRROLINE-5-CARBOXYLATE REDUCTASE |
| | | | | | | | (P5CR) (P5C REDUCTASE) |
| | | | | | | | >gi\|1928962\|gb\|AAC14482.1\| (U92287) pyrroline- |
| | | | | | | | 5-carboxylate reductase [Actinidia deliciosa] |
| 2570 | LIB3602-101-Q1-K1-B3 | 1351139 | BLASTX | 224 | 4.00E−35 | 51 | SUCROSE SYNTHASE ISOFORM I (SUCROSE- |
| | | | | | | | UDP GLUCOSYLTRANSFERASE 1) |
| | | | | | | | (SUSY*DC1) >gi\|480971\|pir\|\|S37560 sucrose |
| | | | | | | | synthase (EC 2.4.1.13) - carrot |
| | | | | | | | >gi\|406317\|emb\|CAA53081.1\| (X75332) sucrose |
| | | | | | | | synthase [Daucus carota] |
| | | | | | | | >gi\|2760539\|emb\|CAA76056.1\| (Y16090) sucrose |
| | | | | | | | synt |
| 2571 | LIB3602-111-Q1-K1-G11 | 2493127 | BLASTX | 860 | 1.00E−92 | 96 | VACUOLAR ATP SYNTHASE SUBUNIT B |
| | | | | | | | ISOFORM 1 (V-ATPASE B SUBUNIT) |
| | | | | | | | >gi\|1303677\|dbj\|BAA09099.1\| (D50530) adenosine |
| | | | | | | | triphosphatase B subunit [Acetabularia acetabulum] |
| 2572 | LIB3602-011-Q6-K1-D3 | 4508082 | BLASTX | 329 | 2.00E−30 | 83 | (AC005882) Putative RNA polymerase II subunit |
| | | | | | | | Rpb10 [Arabidopsis thaliana] |
| 2573 | LIB3602-072-Q1-K1-D12 | 3182922 | BLASTX | 615 | 7.00E−64 | 72 | ADP-RIBOSYLATION FACTOR 1 |
| | | | | | | | >gi\|1654142\|gb\|AAB17725.1\| (U38470) small GTP- |
| | | | | | | | binding protein ARF [Brassica rapa] |
| 2574 | LIB3602-071-Q1-K1-D10 | 6503190 | BLASTX | 184 | 2.00E−13 | 40 | (AF200688) tyrosine kinase ZAK1 [Dictyostelium |
| | | | | | | | discoideum] |
| 2575 | LIB3602-016-Q6-K1-B11 | 4309741 | BLASTX | 233 | 3.00E−19 | 38 | (AC006439) hypothetical protein [Arabidopsis |
| | | | | | | | thaliana] |
| 2576 | LIB3602-053-Q6-K1-D10 | 1076202 | BLASTX | 217 | 3.00E−17 | 44 | calcium-stimulated protein kinase - |
| | | | | | | | Chlamydomonas eugametos |
| | | | | | | | >gi\|806542\|emb\|CAA89202.1\| (Z49233) calcium- |
| | | | | | | | stimulated protein kinase [Chlamydomonas |
| | | | | | | | eugametos] |
| 2577 | LIB3602-113-Q1-K1-A10 | 1071912 | BLASTX | 410 | 3.00E−51 | 49 | cysteine synthase (EC 4.2.99.8) cpACS1 - |
| | | | | | | | Arabidopsis thaliana >gi\|572517\|emb\|CAA57344.1\| |
| | | | | | | | (X81698) cysteine synthase [Arabidopsis thaliana] |
| 2578 | LIB3602-054-Q6-K1-A7 | 82056 | BLASTX | 258 | 4.00E−22 | 36 | protein kinase, calcium-dependent (EC 2.7.1.—) - |
| | | | | | | | carrot (fragment) |
| 2579 | LIB3602-109-Q1-K1-H10 | 7440340 | BLASTX | 415 | 4.00E−43 | 79 | ribosomal protein S14, cytosolic - Arabidopsis |
| | | | | | | | thaliana >gi\|4886269\|emb\|CAB43407.1\| |
| | | | | | | | (AL050300) putative ribosomal protein S14 |
| | | | | | | | [Arabidopsis thaliana] |
| 2580 | LIB3602-005-Q1-K1-D5 | 2854202 | BLASTX | 243 | 2.00E−20 | 35 | (AF045646) contains similarity to enoly-CoA |
| | | | | | | | hydratases [Caenorhabditis elegans] |
| 2581 | LIB3602-086-Q6-K1-F10 | 2854203 | BLASTX | 197 | 7.00E−15 | 40 | (AF045646) contains similarity to the human |
| | | | | | | | polyposis locus-encoded protein (SW: Q00765) |
| | | | | | | | [Caenorhabditis elegans] |
| 2582 | LIB3602-053-Q6-K1-C2 | 99600 | BLASTX | 301 | 4.00E−27 | 78 | chlorophyll a/b-binding protein - upland cotton |
| 2583 | LIB3602-029-Q6-K1-A11 | 462079 | BLASTX | 393 | 7.00E−38 | 64 | FERREDOXIN PRECURSOR |
| | | | | | | | >gi\|7427604\|pir\|\|FEKM ferredoxin [2Fe—2S] |
| | | | | | | | precursor, chloroplast - Chlamydomonas reinhardtii |
| | | | | | | | >gi\|409202\|gb\|AAA33085.1\| (L10349) ferredoxin |
| | | | | | | | [Chlamydomonas reinhardtii] |
| | | | | | | | >gi\|1009714\|gb\|AAC49171.1\| (U29516) ferredoxin |
| | | | | | | | precursor [Chlamydom |
| 2584 | LIB3602-032-Q6-K1-A11 | 7488014 | BLASTX | 296 | 1.00E−26 | 63 | photosystem II protein W homolog T5F17.110 - |
| | | | | | | | Arabidopsis thaliana |
| | | | | | | | >gi\|7269721\|emb\|CAB81454.1\| (AL161573) |
| | | | | | | | photosystem II protein W-like [Arabidopsis |
| | | | | | | | thaliana] |
| 2585 | LIB3602-060-Q6-K1-H12 | 5729913 | BLASTX | 316 | 6.00E−29 | 49 | mannosidase, alpha, class 1A, member 2 |
| | | | | | | | >gi\|3127047\|gb\|AAC26169.1\| (AF027156) alpha |
| | | | | | | | 1,2-mannosidase IB [Homo sapiens] |
| 2586 | LIB3602-074-Q1-K1-A7 | 3182986 | BLASTX | 222 | 8.00E−18 | 34 | PUTATIVE TRANSLATION INITIATION |
| | | | | | | | FACTOR EIF-2B SUBUNIT 2 (EIF-2B GDP-GTP |
| | | | | | | | EXCHANGE FACTOR) >gi\|7447866\|pir\|\|D69504 |
| | | | | | | | translation initiation factor eIF-2B, subunit delta |
| | | | | | | | (eif2BD) homolog - Archaeoglobus fulgidus |
| | | | | | | | >gi\|2648498\|gb\|AAB89217.1\| (AE000962) |
| | | | | | | | translatio |
| 2587 | LIB3602-085-Q6-K1-C7 | 6646754 | BLASTX | 446 | 5.00E−44 | 50 | (AC013258) unknown protein [Arabidopsis |
| | | | | | | | thaliana] |
| 2588 | LIB3602-051-Q6-K1-E4 | 7486079 | BLASTX | 317 | 3.00E−29 | 56 | hypothetical protein F24J7.100 - Arabidopsis |
| | | | | | | | thaliana >gi\|2853081\|emb\|CAA16931.1\| |
| | | | | | | | (AL021768) ATP binding protein-like [Arabidopsis |
| | | | | | | | thaliana] >gi\|7268750\|emb\|CAB78956.1\| |
| | | | | | | | (AL161551) ATP binding protein-like [Arabidopsis |
| | | | | | | | thaliana] |
| 2589 | LIB3602-014-Q6-K1-A10 | 4585874 | BLASTX | 487 | 3.00E−49 | 75 | (AC005850) 60s ribosomal protein L3 [Arabidopsis |
| | | | | | | | thaliana] |
| 2590 | LIB3602-102-Q1-K1-H7 | 5669169 | BLASTX | 150 | 1.00E−16 | 75 | (AF157017) photosystem I reaction center subunit |
| | | | | | | | V precursor [Tortula ruralis] |
| 2591 | LIB3602-014-Q6-K1-C2 | 5903045 | BLASTX | 550 | 3.00E−56 | 67 | (AC008016) Similar to gb\|AF108945 signal |
| | | | | | | | peptidase 18 kDa subunit from Homo sapiens. |
| | | | | | | | ESTs gb\|H76629, gb\|H76949 and gb\|H76216 come |
| | | | | | | | from this gene. [Arabidopsis thaliana] |
| 2592 | LIB3602-102-Q1-K1-G5 | 7459514 | BLASTX | 246 | 1.00E−20 | 37 | conserved hypothetical protein aq_1088 - Aquifex |
| | | | | | | | aeolicus >gi\|2983568\|gb\|AAC07141.1\| (AE000722) |
| | | | | | | | hypothetical protein [Aquifex aeolicus] |
| 2593 | LIB3602-055-Q6-K1-H1 | 7529742 | BLASTX | 246 | 1.00E−20 | 61 | (AL163527) 3-isopropylmalate dehydratase-like |
| | | | | | | | protein (small subunit) [Arabidopsis thaliana] |
| 2594 | LIB3602-001-P1-K6-D2 | 4886307 | BLASTX | 816 | 2.00E−87 | 84 | (AJ242588) 1-deoxy-d-xylulose-5-phosphate |
| | | | | | | | reductoisomerase [Arabidopsis thaliana] |
| 2595 | LIB3602-030-Q6-K1-B2 | 7492644 | BLASTX | 178 | 9.00E−13 | 29 | probable helicase - fission yeast |
| | | | | | | | (Schizosaccharomyces pombe) |
| | | | | | | | >gi\|3116120\|emb\|CAA18870.1\| (AL023287) SNF2 |
| | | | | | | | family dna repair protein by similarity |
| | | | | | | | [Schizosaccharomyces pombe] |
| 2596 | LIB3602-023-Q6-K1-G3 | 7487137 | BLASTX | 220 | 1.00E−17 | 67 | hypothetical protein T18B16.20 - Arabidopsis |
| | | | | | | | thaliana >gi\|2832633\|emb\|CAA16762.1\| |
| | | | | | | | (AL021711) putative protein [Arabidopsis thaliana] |
| | | | | | | | >gi\|7268700\|emb\|CAB78907.1\| (AL161550) |
| | | | | | | | putative protein [Arabidopsis thaliana] |
| 2597 | LIB3602-092-Q6-K6-G7 | 7447935 | BLASTX | 756 | 2.00E−80 | 86 | probable potassium channel beta chain - rice |
| | | | | | | | >gi\|1197587\|gb\|AAC50046.1\| (U46758) potassium |
| | | | | | | | channel beta subunit protein [Oryza sativa] |
| 2598 | LIB3602-049-Q6-K1-F7 | 3928891 | BLASTX | 415 | 1.00E−40 | 72 | (AF093617) chlorophyll a/b binding protein |
| | | | | | | | [Acetabularia acetabulum] |
| 2599 | LIB3602-040-Q6-K1-G11 | 7484622 | BLASTX | 525 | 2.00E−53 | 74 | L-ascorbate peroxidase (EC 1.11.1.11) precursor, |
| | | | | | | | stromal - common ice plant |
| | | | | | | | >gi\|3202026\|gb\|AAC19394.1\| (AF069316) stromal |
| | | | | | | | L-ascorbate peroxidase precursor |
| | | | | | | | [Mesembryanthemum crystallinum] |
| 2600 | LIB3602-064-Q1-K6-A8 | 5903046 | BLASTX | 243 | 3.00E−20 | 64 | (AC008016) F6D8.19 [Arabidopsis thaliana] |
| 2601 | LIB3602-025-Q6-K1-D12 | 1402884 | BLASTX | 660 | 3.00E−69 | 72 | (X98130) unknown [Arabidopsis thaliana] |
| | | | | | | | >gi\|1495265\|emb\|CAA66120.1\| (X97488) beta- |
| | | | | | | | transducin like protein [Arabidopsis thaliana] |
| 2602 | LIB3602-053-Q6-K1-F10 | 7486400 | BLASTX | 324 | 5.00E−30 | 55 | hypothetical protein F4B14.80 - Arabidopsis |
| | | | | | | | thaliana >gi\|3805847\|emb\|CAA21467.1\| |
| | | | | | | | (AL031986) putative protein [Arabidopsis thaliana] |
| | | | | | | | >gi\|7270533\|emb\|CAB81490.1\| (AL161588) |
| | | | | | | | putative protein [Arabidopsis thaliana] |
| 2603 | LIB3602-094-Q6-K6-E7 | 131225 | BLASTX | 210 | 2.00E−16 | 40 | PHOTOSYSTEM I REACTION CENTRE |
| | | | | | | | SUBUNIT XI PRECURSOR (SUBUNIT V) (PSI- |
| | | | | | | | L) >gi\|100605\|pir\|\|A39759 photosystem I 18K |
| | | | | | | | protein precursor - barley |
| | | | | | | | >gi\|167087\|gb\|AAA62700.1\| (M61146) |
| | | | | | | | photosystem I hydrophobic protein [Hordeum |
| | | | | | | | vulgare] |
| 2604 | LIB3602-022-Q6-K1-G2 | 7493530 | BLASTX | 254 | 1.00E−21 | 43 | trp-asp repeat protein - fission yeast |
| | | | | | | | (Schizosaccharomyces pombe) |
| | | | | | | | >gi\|5706505\|emb\|CAB52267.1\| (AL109739) trp-asp |
| | | | | | | | repeat protein [Schizosaccharomyces pombe] |
| 2605 | LIB3602-057-Q6-K1-G1 | 6094048 | BLASTX | 226 | 7.00E−36 | 75 | 60S RIBOSOMAL PROTEIN L30 |
| | | | | | | | >gi\|2879811\|emb\|CAA11256.1\| (AJ223316) |
| | | | | | | | ribosomal protein L30 [Lupinus luteus] |
| 2606 | LIB3602-027-Q6-K1-C3 | 4193382 | BLASTX | 311 | 3.00E−28 | 86 | (AF083336) ribosomal protein S27 [Arabidopsis |
| | | | | | | | thaliana] >gi\|4193384\|gb\|AAD10030.1\| (AF083337) |
| | | | | | | | ribosomal protein S27 [Arabidopsis thaliana] |
| 2607 | LIB3602-006-Q1-K1-B8 | 6319146 | BLASTX | 219 | 2.00E−17 | 89 | (AF193345) H2A protein [Oryza sativa] |
| 2608 | LIB3602-103-Q1-K1-D3 | 1708781 | BLASTX | 643 | 3.00E−67 | 73 | (X97729) LMP7-like protein [Botryllus schlosseri] |
| 2609 | LIB3602-013-Q6-K1-H9 | 7295382 | BLASTX | 148 | 2.00E−09 | 54 | (AE003564) CG10467 gene product [Drosophila |
| | | | | | | | melanogaster] |
| 2610 | LIB3602-054-Q6-K1-D1 | 6850936 | BLASTX | 169 | 7.00E−12 | 80 | (AJ271667) putative proteasome regulatory subunit |
| | | | | | | | [Cicer arietinum] |
| 2611 | LIB3602-044-Q6-K1-E12 | 7294816 | BLASTX | 540 | 3.00E−55 | 67 | (AE003547) hay gene product [Drosophila |
| | | | | | | | melanogaster] |
| 2612 | LIB3602-069-Q1-K1-B7 | 7529717 | BLASTX | 706 | 2.00E−74 | 72 | (AL132969) fructose bisphosphate aldolase-like |
| | | | | | | | protein [Arabidopsis thaliana] |
| 2613 | LIB3602-005-Q1-K1-F2 | 7384808 | BLASTX | 335 | 5.00E−31 | 57 | (AB040503) cysteine synthase [Allium tuberosum] |
| 2614 | LIB3602-042-Q6-K1-C6 | 7296277 | BLASTX | 200 | 3.00E−15 | 36 | (AE003590) CG2761 gene product [Drosophila |
| | | | | | | | melanogaster] |
| 2615 | LIB3602-006-Q1-K1-D9 | 128825 | BLASTX | 415 | 2.00E−40 | 51 | NADH-UBIQUINONE OXIDOREDUCTASE 75 KD |
| | | | | | | | SUBUNIT PRECURSOR (COMPLEX I- |
| | | | | | | | 75 KD) (CI-75 KD) >gi\|108830\|pir\|\|A33552 NADH |
| | | | | | | | dehydrogenase (ubiquinone) (EC 1.6.5.3) 75K chain |
| | | | | | | | precursor - bovine >gi\|163414\|gb\|AAA30662.1\| |
| | | | | | | | (J02877) NADH: ubiquinone reductase precursor |
| | | | | | | | [Bos |
| 2616 | LIB3602-014-Q6-K1-F10 | 7025849 | BLASTX | 166 | 2.00E−11 | 38 | AC024128) hypothetical protein [Arabidopsis |
| | | | | | | | thaliana] |
| 2617 | LIB3602-066-Q1-K6-F7 | 7493333 | BLASTX | 308 | 5.00E−28 | 50 | rna binding protein - fission yeast |
| | | | | | | | (Schizosaccharomyces pombe) |
| | | | | | | | >gi\|3184100\|emb\|CAA19313.1\| (AL023777) |
| | | | | | | | putative RNA-binding protein |
| | | | | | | | [Schizosaccharomyces pombe] |
| 2618 | LIB3602-064-Q1-K6-B4 | 6721114 | BLASTX | 341 | 8.00E−32 | 59 | (AC007396) T4O12.18 [Arabidopsis thaliana] |
| 2619 | LIB3602-049-Q6-K1-E9 | 4102582 | BLASTX | 198 | 4.00E−15 | 38 | (AF013115) CAO [Arabidopsis thaliana] |
| 2620 | LIB3602-014-Q6-K1-E11 | 2501296 | BLASTX | 211 | 1.00E−16 | 61 | DNA GYRASE SUBUNIT B |
| | | | | | | | >gi\|7469301\|pir\|\|S77162 DNA topoisomerase (ATP- |
| | | | | | | | hydrolyzing) (EC 5.99.1.3) chain B - Synechocystis |
| | | | | | | | sp. (strain PCC 6803) |
| | | | | | | | >gi\|1652801\|dbj\|BAA17720.1\| (D90908) DNA |
| | | | | | | | gyrase B subunit [Synechocystis sp.] |
| 2621 | LIB3602-058-Q6-K1-A3 | 2088652 | BLASTX | 281 | 8.00E−25 | 37 | (AF002109) 26S proteasome regulatory subunit |
| | | | | | | | [Arabidopsis thaliana] |
| | | | | | | | >gi\|2351376\|gb\|AAD03463.1\| (U54561) translation |
| | | | | | | | initiation factor eIF2 p47 subunit homolog |
| | | | | | | | [Arabidopsis thaliana] |
| 2622 | LIB3602-073-Q1-K1-B5 | 3915037 | BLASTX | 355 | 2.00E−33 | 59 | SUCROSE SYNTHASE 2 (SUCROSE-UDP |
| | | | | | | | GLUCOSYLTRANSFERASE 2) |
| | | | | | | | >gi\|7433834\|pir\|\|T06497 probable sucrose synthase |
| | | | | | | | (EC 2.4.1.13) 2 - garden pea |
| | | | | | | | >gi\|2570067\|emb\|CAA04512.1\| (AJ001071) second |
| | | | | | | | sucrose synthase [Pisum sativum] |
| 2623 | LIB3602-012-Q6-K1-D2 | 6225722 | BLASTX | 202 | 2.00E−15 | 36 | MRP PROTEIN HOMOLOG |
| | | | | | | | >gi\|7446831\|pir\|\|G70364 conserved hypothetical |
| | | | | | | | protein aq_737 - Aquifex aeolicus |
| | | | | | | | >gi\|2983325\|gb\|AAC06915.1\| (AE000705) |
| | | | | | | | hypothetical protein [Aquifex aeolicus] |
| 2624 | LIB3602-059-Q6-K1-H6 | 7440317 | BLASTX | 166 | 2.00E−17 | 66 | ribosomal protein S14 - mouse |
| 2625 | LIB3602-022-Q6-K1-C3 | 6358788 | BLASTX | 449 | 2.00E−44 | 54 | (AC010852) unknown protein [Arabidopsis |
| | | | | | | | thaliana] |
| 2626 | LIB3602-021-Q6-K1-C8 | 4581114 | BLASTX | 349 | 3.00E−33 | 69 | (AC005825) putative HesB-like protein |
| | | | | | | | [Arabidopsis thaliana] |
| 2627 | LIB3602-018-Q6-K1-A3 | 3914161 | BLASTX | 175 | 2.00E−12 | 46 | CYTOCHROME P450 55A2 (CYTOCHROME |
| | | | | | | | P450NOR1) >gi\|1107453\|dbj\|BAA11408.1\| |
| | | | | | | | (D78511) cytochrome P450nor1 [Cylindrocarpon |
| | | | | | | | lichenicola] |
| 2628 | LIB3602-092-Q6-K6-H5 | 2492612 | BLASTX | 399 | 2.00E−38 | 73 | 1-AMINOCYCLOPROPANE-1-CARBOXYLATE |
| | | | | | | | OXIDASE (ACC OXIDASE) (ETHYLENE- |
| | | | | | | | FORMING ENZYME) (EFE) |
| | | | | | | | >gi\|1076734\|pir\|\|S52712 1-aminocyclopropane-1- |
| | | | | | | | carboxylate oxidase (ACC oxidase) - rice |
| | | | | | | | >gi\|755773\|emb\|CAA59749.1\| (X85747) 1- |
| | | | | | | | aminocyclopropane-1-carboxylate oxidase (A |
| 2629 | LIB3602-079-Q6-K6-B8 | 7025861 | BLASTX | 226 | 3.00E−18 | 29 | (AC024128) putative transporter [Arabidopsis |
| | | | | | | | thaliana] |
| 2630 | LIB3602-064-Q1-K6-G4 | 3913437 | BLASTX | 279 | 2.00E−24 | 75 | PUTATIVE PRE-MRNA SPLICING FACTOR |
| | | | | | | | ATP-DEPENDENT RNA HELICASE |
| | | | | | | | >gi\|1402875\|emb\|CAA66825.1\| (X98130) RNA |
| | | | | | | | helicase [Arabidopsis thaliana] |
| | | | | | | | >gi\|1495271\|emb\|CAA66613.1\| (X97970) RNA |
| | | | | | | | helicase [Arabidopsis thaliana] |
| 2631 | LIB3602-071-Q1-K1-C12 | 3264790 | BLASTX | 241 | 5.00E−20 | 85 | (AF070942) ribulose-phosphate 3-epimerase transit |
| | | | | | | | form [Expression vector pFL505] |
| 2632 | LIB3602-120-Q1-K1-C12 | 6225908 | BLASTX | 144 | 4.00E−09 | 81 | 60S RIBOSOMAL PROTEIN L37A |
| | | | | | | | >gi\|7441205\|pir\|\|C71614 ribosomal protein L37A |
| | | | | | | | PFB0455w - malaria parasite (Plasmodium |
| | | | | | | | falciparum) >gi\|3845189\|gb\|AAC71880.1\| |
| | | | | | | | (AE001396) ribosomal protein L37A [Plasmodium |
| | | | | | | | falciparum] |
| 2633 | LIB3602-018-Q6-K1-F12 | 5114047 | BLASTX | 351 | 4.00E−33 | 48 | (AF085356) putative RNA helicase [Homo sapiens] |
| 2634 | LIB3602-079-Q6-K6-C6 | 2144171 | BLASTX | 156 | 5.00E−10 | 40 | capreomycin acetyltransferase (EC 2.3.1.—) - |
| | | | | | | | Streptomyces capreolus |
| | | | | | | | >gi\|1223838\|gb\|AAA92035.1\| (U13077) |
| | | | | | | | capreomycin acetyltransferase [Streptomyces |
| | | | | | | | capreolus] >gi\|1586532\|prf\|\|2204233A capreomycin |
| | | | | | | | acetyltransferase [Streptomyces capreolus] |
| 2635 | LIB3602-089-Q6-K6-G4 | 2960216 | BLASTX | 395 | 3.00E−44 | 66 | (AJ223384) 26S proteasome regulatory ATPase |
| | | | | | | | subunit 10b (S10b) [Manduca sexta] |
| 2636 | LIB3602-114-Q1-K1-F5 | 7486220 | BLASTX | 258 | 5.00E−22 | 43 | hypothetical protein F27B13.100 - Arabidopsis |
| | | | | | | | thaliana >gi\|4914410\|emb\|CAB43661.1\| |
| | | | | | | | (AL050352) putative protein [Arabidopsis thaliana] |
| | | | | | | | >gi\|7269885\|emb\|CAB79744.1\| (AL161575) |
| | | | | | | | putative protein [Arabidopsis thaliana] |
| 2637 | LIB3602-045-Q6-K1-B4 | 4758714 | BLASTX | 243 | 2.00E−20 | 40 | microsomal glutathione S-transferase 3 |
| | | | | | | | >gi\|7387731\|sp\|O14880\|GST3_HUMAN |
| | | | | | | | MICROSOMAL GLUTATHIONE S- |
| | | | | | | | TRANSFERASE 3 (MICROSOMAL GST-3) |
| | | | | | | | (MICROSOMAL GST-III) |
| | | | | | | | >gi\|2583081\|gb\|AAB82609.1\| (AF026977) |
| | | | | | | | microsomal glutathione S-transferase 3 [Homo |
| | | | | | | | sapiens] |
| 2638 | LIB3602-017-Q6-K1-H9 | 4206112 | BLASTX | 208 | 1.00E−16 | 100 | (AF097662) alpha tubulin [Mesembryanthemum |
| | | | | | | | crystallinum] |
| 2639 | LIB3602-078-Q6-K6-E2 | 4586592 | BLASTX | 687 | 3.00E−72 | 68 | (AB025000) multicatalytic endopeptidase complex |
| | | | | | | | [Cicer arietinum] |
| 2640 | LIB3602-119-Q1-K1-E8 | 7296284 | BLASTX | 255 | 1.00E−37 | 77 | (AE003591) CG5605 gene product [alt 1] |
| | | | | | | | [Drosophila melanogaster] |
| | | | | | | | >gi\|7296285\|gb\|AAF51575.1\| (AE003591) CG5605 |
| | | | | | | | gene product [alt 2] [Drosophila melanogaster] |
| 2641 | LIB3602-120-Q1-K1-B3 | 100596 | BLASTX | 157 | 3.00E−10 | 100 | metallothionein-like protein - barley |
| | | | | | | | >gi\|234815\|gb\|AAB19699.1\| (S53707) B22EL8 |
| | | | | | | | [Hordeum vulgare = barley, aleurone cells, Peptide, |
| | | | | | | | 115 aa] >gi\|228182\|prf\|\|1718305A B22E protein |
| | | | | | | | [Hordeum vulgare] |
| 2642 | LIB3602-014-Q6-K1-G9 | 7543911 | BLASTX | 477 | 6.00E−48 | 70 | (AL163572) ubiquinol- cytochrome-c reductase- |
| | | | | | | | like protein [Arabidopsis thaliana] |
| 2643 | LIB3602-078-Q6-K6-A7 | 7505775 | BLASTX | 226 | 8.00E−19 | 81 | hypothetical protein K11D2.3 - Caenorhabditis |
| | | | | | | | elegans |
| 2644 | LIB3602-105-Q1-K1-A8 | 117519 | BLASTX | 642 | 6.00E−70 | 76 | PHYTOENE DEHYDROGENASE PRECURSOR |
| | | | | | | | (PHYTOENE DESATURASE) |
| | | | | | | | >gi\|99945\|pir\|\|A39597 phytoene dehydrogenase (EC |
| | | | | | | | 1.3.—.—) - soybean >gi\|170044\|gb\|AAA34001.1\| |
| | | | | | | | (M64704) phytoene desaturase [Glycine max] |
| 2645 | LIB3602-041-Q6-K1-F4 | 6598624 | BLASTX | 189 | 3.00E−14 | 68 | (AC006837) putative ubiquinol-cytochrome c |
| | | | | | | | reductase [Arabidopsis thaliana] |
| 2646 | LIB3602-102-Q1-K1-A10 | 5679842 | BLASTX | 206 | 5.00E−16 | 51 | (AJ243961) 11332.6 [Oryza sativa] |
| 2647 | LIB3602-052-Q6-K1-F8 | 3024020 | BLASTX | 495 | 6.00E−50 | 75 | INITIATION FACTOR 5A-3 (EIF-5A) (EIF-4D) |
| | | | | | | | >gi\|7443511\|pir\|\|T07133 translation initiation factor |
| | | | | | | | eIF-5A3 - potato >gi\|2225881\|dbj\|BAA20877.1\| |
| | | | | | | | (AB004824) eukaryotic initiation factor 5A3 |
| | | | | | | | [Solanum tuberosum] |
| 2648 | LIB3602-076-Q6-K6-A6 | 1213515 | BLASTN | 38 | 2.00E−11 | 89 | Gadus morhua ribosomal protein L22 mRNA, |
| | | | | | | | partial cds |
| 2649 | LIB3602-044-Q6-K1-F11 | 1708311 | BLASTX | 681 | 9.00E−72 | 83 | CHLOROPLAST STROMA 70 KD HEAT |
| | | | | | | | SHOCK-RELATED PROTEIN |
| | | | | | | | >gi\|7441859\|pir\|\|T09119 dnaK-type molecular |
| | | | | | | | chaperone HSP80 precursor, chloroplast - spinach |
| | | | | | | | (fragment) >gi\|170094\|gb\|AAA18570.1\| (M99565) |
| | | | | | | | 80 kDa heat shock protein [Spinacia oleracea] |
| 2650 | LIB3602-004-Q1-K1-C9 | 6069644 | BLASTX | 157 | 2.00E−10 | 35 | (AP000616) similar to Bacillus subtilis genome; |
| | | | | | | | unknown protein (Z99110) [Oryza sativa] |
| 2651 | LIB3602-047-Q6-K1-H9 | 7302323 | BLASTX | 419 | 5.00E−41 | 59 | (AE003790) CG3358 gene product [Drosophila |
| | | | | | | | melanogaster] |
| 2652 | LIB3602-062-Q6-K1-D3 | 7267302 | BLASTX | 510 | 1.00E−51 | 61 | (AL161503) UV-damaged DNA binding factor-like |
| | | | | | | | protein [Arabidopsis thaliana] |
| 2653 | LIB3602-104-Q1-K1-G11 | 1363492 | BLASTX | 353 | 4.00E−33 | 42 | outer envelope membrane protein OEP75 precursor - |
| | | | | | | | garden pea >gi\|576507\|gb\|AAA53275.1\| (L36858) |
| | | | | | | | outer membrane protein [Pisum sativum] |
| | | | | | | | >gi\|633607\|emb\|CAA58720.1\| (X83767) |
| | | | | | | | chloroplastic outer envelope membrane protein |
| | | | | | | | (OEP75) [Pisum sativum] |
| 2654 | LIB3602-019-Q6-K1-B2 | 7435702 | BLASTX | 243 | 1.00E−20 | 50 | hypothetical protein - Synechocystis sp. (strain PCC |
| | | | | | | | 6803) >gi\|1653655\|dbj\|BAA18567.1\| (D90915) |
| | | | | | | | ATP-dependent Clp protease proteolytic subunit |
| | | | | | | | [Synechocystis sp.] |
| 2655 | LIB3602-003-Q1-K1-G1 | 2982322 | BLASTX | 471 | 5.00E−47 | 66 | (AF051246) probable proteasome subunit [Picea |
| | | | | | | | mariana] |
| 2656 | LIB3602-079-Q6-K6-F12 | 1345838 | BLASTX | 774 | 2.00E−82 | 75 | PHYTOENE DEHYDROGENASE PRECURSOR |
| | | | | | | | (PHYTOENE DESATURASE) |
| | | | | | | | >gi\|2130143\|pir\|S65060 phytoene desaturase |
| | | | | | | | precursor - maize >gi\|1051180\|gb\|AAC12846.1\| |
| | | | | | | | (U37285) phytoene desaturase [Zea mays] |
| 2657 | LIB3602-005-Q1-K1-A6 | 5921735 | BLASTX | 305 | 2.00E−27 | 57 | 10 KD CHAPERONIN (PROTEIN CPN10) |
| | | | | | | | (PROTEIN GROES) >gi\|1519241\|gb\|AAB07452.1\| |
| | | | | | | | (U65890) 10 kDa chaperonin [Brassica napus] |
| 2658 | LIB3602-029-Q6-K1-G3 | 6831610 | BLASTX | 377 | 5.00E−36 | 57 | 60S RIBOSOMAL PROTEIN L13 (BBC1 |
| | | | | | | | PROTEIN HOMOLOG) |
| | | | | | | | >gi\|2662188\|dbj\|BAA23724.1\| (AB009086) BBC1 |
| | | | | | | | protein [Chlamydomonas sp.] |
| 2659 | LIB3602-008-Q6-K1-A4 | 4584358 | BLASTX | 198 | 5.00E−15 | 45 | (AC006420) unknown protein [Arabidopsis |
| | | | | | | | thaliana] |
| 2660 | LIB3602-029-Q6-K1-A9 | 4557467 | BLASTX | 167 | 2.00E−11 | 35 | Cockayne syndrome 1 protein |
| | | | | | | | >gi\|3121917\|sp\|Q13216\|CSA_HUMAN |
| | | | | | | | COCKAYNE SYNDROME WD-REPEAT |
| | | | | | | | PROTEIN CSA >gi\|1362773\|pir\|\|A57090 CSA |
| | | | | | | | protein - human >gi\|975302\|gb\|AAA82605.1\| |
| | | | | | | | (U28413) CSA protein [Homo sapiens] |
| 2661 | LIB3602-015-Q6-K1-C6 | 121985 | BLASTX | 342 | 7.00E−32 | 71 | HISTONE H2A-IV >gi\|99437\|pir\|\|JQ0796 histone |
| | | | | | | | H2A.IV - Volvox carteri |
| | | | | | | | >gi\|170658\|gb\|AAA34249.1\| (M31922) histone |
| | | | | | | | H2A-IV [Volvox carteri] |
| 2662 | LIB3602-087-Q6-K1-A12 | 3914899 | BLASTX | 233 | 4.00E−19 | 57 | 40S RIBOSOMAL PROTEIN S4 |
| | | | | | | | >gi\|7440142\|pir\|\|T01187 ribosomal protein S4 type |
| | | | | | | | I - maize >gi\|2331301\|gb\|AAB66899.1\| (AF013487) |
| | | | | | | | ribosomal protein S4 type I [Zea mays] |
| 2663 | LIB3602-061-Q6-K1-C10 | 266944 | BLASTX | 633 | 4.00E−66 | 70 | 60S RIBOSOMAL PROTEIN L2 (L8) |
| | | | | | | | (RIBOSOMAL PROTEIN TL2) |
| | | | | | | | >gi\|71078\|pir\|\|R5TOL8 ribosomal protein L8, |
| | | | | | | | cytosolic - tomato >gi\|19343\|emb\|CAA45863.1\| |
| | | | | | | | (X64562) ribosomal protein L2 [Lycopersicon |
| | | | | | | | esculentum] |
| 2664 | LIB3602-071-Q1-K1-B9 | 463856 | BLASTN | 59 | 3.00E−24 | 97 | Chlamydomonas reinhardtii 21gr ribosomal protein |
| | | | | | | | S14 (CRY1) gene, complete cds |
| 2665 | LIB3602-080-Q6-K6-G8 | 2500129 | BLASTX | 366 | 1.00E−34 | 72 | THIOREDOXIN REDUCTASE I (NADPH- |
| | | | | | | | DEPENDENT THIOREDOXIN REDUCTASE 1) |
| | | | | | | | (NTR 1) >gi\|468526\|emb\|CAA80656.1\| (Z23109) |
| | | | | | | | Thioredoxin reductase [Arabidopsis thaliana] |
| 2666 | LIB3602-068-Q1-K1-G1 | 7416846 | BLASTX | 190 | 5.00E−14 | 51 | (AB025969) NAD-dependent sorbitol |
| | | | | | | | dehydrogenase [Prunus persica] |
| 2667 | LIB3602-086-Q6-K1-E2 | 6633812 | BLASTX | 163 | 6.00E−11 | 36 | (AC009519) F1N19.9 [Arabidopsis thaliana] |
| 2668 | LIB3602-045-Q6-K1-H8 | 7023297 | BLASTX | 153 | 8.00E−10 | 37 | (AK001798) unnamed protein product [Homo |
| | | | | | | | sapiens] |
| 2669 | LIB3602-028-Q6-K1-F2 | 7076802 | BLASTX | 563 | 7.00E−58 | 64 | (AL132975) mannose-1-phosphate |
| | | | | | | | guanylyltransferase-like protein [Arabidopsis |
| | | | | | | | thaliana] |
| 2670 | LIB3602-022-Q6-K1-D6 | 5823571 | BLASTX | 265 | 6.00E−23 | 72 | (AL049730) Ribosomal protein L7Ae-like |
| | | | | | | | [Arabidopsis thaliana] |
| | | | | | | | >gi\|7267962\|emb\|CAB78303.1\| (AL161534) |
| | | | | | | | Ribosomal protein L7Ae-like [Arabidopsis thaliana] |
| 2671 | LIB3602-020-Q6-K1-B5 | 6093872 | BLASTX | 268 | 8.00E−24 | 73 | 60S RIBOSOMAL PROTEIN L15-2 |
| | | | | | | | >gi\|2982318\|gb\|AAC32144.1\| (AF051244) probable |
| | | | | | | | 60S ribosomal protein L15 [Picea mariana] |
| 2672 | LIB3602-073-Q1-K1-B6 | 6277254 | BLASTX | 148 | 4.00E−09 | 59 | (AB034249) geranylgeranyl pyrophosphate |
| | | | | | | | synthase [Croton sublyratus] |
| 2673 | LIB3602-035-Q1-K1-H10 | 6434960 | BLASTX | 324 | 9.00E−30 | 41 | (AF145311) 26S proteasome regulatory complex |
| | | | | | | | subunit p39A [Drosophila melanogaster] |
| | | | | | | | >gi\|7301037\|gb\|AAF56173.1\| (AE003744) Rpn4 |
| | | | | | | | gene product [alt 1] [Drosophila melanogaster] |
| | | | | | | | >gi\|7301038\|gb\|AAF56174.1\| (AE003744) Rpn4 |
| | | | | | | | gene product [alt 2] [Drosophila melan |
| 2674 | LIB3602-008-Q6-K1-D2 | 6633814 | BLASTX | 174 | 2.00E−12 | 63 | (AC009519) F1N19.11 [Arabidopsis thaliana] |
| 2675 | LIB3602-046-Q6-K1-H4 | 7486788 | BLASTX | 279 | 1.00E−24 | 59 | hypothetical protein M3E9.70 - Arabidopsis |
| | | | | | | | thaliana >gi\|2982456\|emb\|CAA18220.1\| |
| | | | | | | | (AL022223) putative protein [Arabidopsis thaliana] |
| | | | | | | | >gi\|726950\|emb\|CAB79505.1\| (AL161565) |
| | | | | | | | putative protein [Arabidopsis thaliana] |
| 2676 | LIB3602-026-Q6-K1-C5 | 4808539 | BLASTX | 185 | 2.00E−13 | 66 | (AF075700) putative glutathione synthetase; |
| | | | | | | | GSHS2 [Medicago truncatula] |
| 2677 | LIB3602-048-Q6-K1QA- | 6714389 | BLASTX | 324 | 5.00E−30 | 61 | (AC012393) hypothetical protein [Arabidopsis |
| | E12 | | | | | | thaliana] |
| 2678 | LIB3602-054-Q6-K1-H1 | 3024001 | BLASTX | 404 | 3.00E−39 | 52 | H(+)/HEXOSE COTRANSPORTER 2 |
| | | | | | | | (GALACTOSE-H+ SYMPORTER) |
| | | | | | | | >gi\|18043\|emb\|CAA47323.1\| (X66855) HUP2 |
| | | | | | | | [Chlorella kessleri] |
| 2679 | LIB3602-105-Q1-K1-E4 | 2655889 | BLASTX | 251 | 3.00E−21 | 31 | (AL009171) 62D9.b [Drosophila melanogaster] |
| 2680 | LIB3602-053-Q6-K1-B3 | 7494794 | BLASTX | 175 | 3.00E−12 | 50 | hypothetical protein B0261.4 - Caenorhabditis |
| | | | | | | | elegans >gi\|1938549\|gb\|AAB52351.1\| (U97016) |
| | | | | | | | similar to drosophila Rlc1 gene product |
| | | | | | | | (NID: g563361) and S. cerevisiae mitochondrial 60S |
| | | | | | | | ribosomal protein L4 (YML4) (NID: g459259) |
| | | | | | | | [Caenorhabditis elegans] |
| 2681 | LIB3602-032-Q6-K1-C11 | 7484997 | BLASTX | 214 | 5.00E−17 | 50 | H+-transporting ATPase (EC 3.6.1.35) 14K chain, |
| | | | | | | | vacuolar - Arabidopsis thaliana |
| | | | | | | | >gi\|3892056\|gb\|AAC78269.1\|AAC78269 |
| | | | | | | | (AC002330) putative vacuolar ATPase [Arabidopsis |
| | | | | | | | thaliana] >gi\|7269022\|emb\|CAB80755.1\| |
| | | | | | | | (AL161494) putative vacuolar ATPase [Arabidopsis |
| | | | | | | | thal |
| 2682 | LIB3602-072-Q1-K1-A4 | 2982311 | BLASTX | 561 | 2.00E−57 | 60 | (AF051240) probable ubiquitin-conjugating enzyme |
| | | | | | | | E2 [Picea mariana] |
| 2683 | LIB3602-021-Q6-K1-E2 | 7229709 | BLASTX | 300 | 2.00E−27 | 65 | (AF237624) 80S ribosomal protein L31 [Perilla |
| | | | | | | | frutescens] |
| 2684 | LIB3602-070-Q1-K1-C7 | 7239500 | BLASTX | 231 | 6.00E−19 | 54 | (AC012654) Contains similarity to the late |
| | | | | | | | embryogenesis abundant protein from Picea glauca |
| | | | | | | | gb\|L47115. ESTs gb\|AI992795 and gb\|T45309 |
| | | | | | | | come from this gene. [Arabidopsis thaliana] |
| 2685 | LIB3602-106-Q1-K1-E10 | 3776023 | BLASTX | 230 | 6.00E−31 | 42 | (AJ010473) RNA helicase [Arabidopsis thaliana] |
| 2686 | LIB3602-022-Q6-K1-F2 | 5924062 | BLASTX | 359 | 5.00E−34 | 51 | (AF158699) unknown [Burkholderia cepacia] |
| 2687 | LIB3602-102-Q1-K1-H11 | 4680713 | BLASTX | 398 | 2.00E−51 | 71 | (AF132971) CGI-37 protein [Homo sapiens] |
| | | | | | | | >gi\|5114055\|gb\|AAD40195.1\| (AF085360) |
| | | | | | | | HSPC031 [Homo sapiens] |
| 2688 | LIB3602-059-Q6-K1-H4 | 7480237 | BLASTX | 145 | 8.00E−09 | 42 | hypothetical protein SCJ4.42c - Streptomyces |
| | | | | | | | coelicolor >gi\|5738802\|emb\|CAB52976.1\| |
| | | | | | | | (AL109950) hypothetical protein [Streptomyces |
| | | | | | | | coelicolor A3(2)] |
| 2689 | LIB3602-084-Q6-K1-F11 | 7248415 | BLASTX | 157 | 4.00E−10 | 34 | (AP001389) ESTs |
| | | | | | | | AU077873(S1878), D40121(S1878) correspond to a |
| | | | | | | | region of the predicted gene. ˜Similar to Arabidopsis |
| | | | | | | | thaliana 60S ribosomal protein L13 (P41127) |
| | | | | | | | [Oryza sativa] |
| 2690 | LIB3602-020-Q6-K1-A1 | 1174745 | BLASTX | 571 | 6.00E−59 | 80 | TRIOSEPHOSPHATE ISOMERASE, |
| | | | | | | | CHLOROPLAST PRECURSOR (TIM) |
| | | | | | | | >gi\|1363523\|pir\|\|S53761 triose-phosphate isomerase |
| | | | | | | | (EC 5.3.1.1) precursor, chloroplast - rye |
| | | | | | | | >gi\|609262\|emb\|CAA83533.1\| (Z32521) |
| | | | | | | | triosephosphate isomerase [Secale cereale] |
| | | | | | | | >gi\|1095494\|prf\|\|2109226B tr |
| 2691 | LIB3602-050-Q6-K1-C9 | 2982305 | BLASTX | 339 | 1.00E−31 | 73 | (AF051237) 60S ribosomal protein L3 [Picea |
| | | | | | | | mariana] |
| 2692 | LIB3602-039-Q6-K1-G9 | 3334374 | BLASTX | 171 | 9.00E−12 | 85 | TRANSCRIPTION INITIATION FACTOR TFIID |
| | | | | | | | (TATA-BOX FACTOR) (TATA SEQUENCE- |
| | | | | | | | BINDING PROTEIN) (TBP) |
| | | | | | | | >gi\|2708495\|gb\|AAC49985.1\| (U95549) TATA- |
| | | | | | | | binding protein [Candida albicans] |
| | | | | | | | >gi\|2708497\|gb\|AAC49986.1\| (U95550) TATA- |
| | | | | | | | binding protein [Candida albicans] |
| 2693 | LIB3602-045-Q6-K1-G11 | 4567249 | BLASTX | 251 | 3.00E−21 | 45 | (AC007070) hypothetical protein [Arabidopsis |
| | | | | | | | thaliana] |
| 2694 | LIB3602-002-P1-K6-E4 | 6174939 | BLASTX | 191 | 6.00E−15 | 81 | 60S RIBOSOMAL PROTEIN L37-B (YL27) |
| | | | | | | | >gi\|2275274\|gb\|AAB63862.1\| (U97370) 60S |
| | | | | | | | ribosomal protein homolog [Schizosaccharomyces |
| | | | | | | | pombe] |
| 2695 | LIB3602-101-Q1-K1-C6 | 121966 | BLASTX | 265 | 7.00E−23 | 69 | HISTONE H2A.1 >gi\|70689\|pir\|\|HSXLA1 histone |
| | | | | | | | H2A.1 - African clawed frog |
| | | | | | | | >gi\|64777\|emb\|CAA26817.1\| (X03018) histone |
| | | | | | | | H2A (aa 1-130) [Xenopus laevis] |
| | | | | | | | >gi\|214284\|gb\|AAA49769.1\| (M21287) histone |
| | | | | | | | H2A [Xenopus lsevis] |
| 2696 | LIB3602-013-Q6-K1-E3 | 6919944 | BLASTX | 477 | 1.00E−47 | 61 | PROBABLE 26S PROTEASOME REGULATORY |
| | | | | | | | SUBUNIT S12 (MOV34 PROTEIN) |
| | | | | | | | >gi\|2351374\|gb\|AAD03464.1\| (U54560) putative |
| | | | | | | | 26S proteasome subunit athMOV34 [Arabidopsis |
| | | | | | | | thaliana] |
| 2697 | LIB3602-073-Q1-K1-F12 | 7469855 | BLASTX | 258 | 5.00E−22 | 37 | hypothetical protein - Synechocystis sp. (strain PCC |
| | | | | | | | 6803) >gi\|1652591\|dbj\|BAA17512.1\| (D90906) |
| | | | | | | | chloroplast import-associated channel IAP75 |
| | | | | | | | [Synechocystis sp.] |
| 2698 | LIB3602-005-Q1-K1-A3 | 7486947 | BLASTX | 140 | 8.00E−09 | 64 | hypothetical protein T13E15.7 - Arabidopsis |
| | | | | | | | thaliana >gi\|2344892\|gb\|AAC31832.1\| (AC002388) |
| | | | | | | | unknown protein [Arabidopsis thaliana] |
| 2699 | LIB3602-062-Q6-K1-E2 | 7487839 | BLASTX | 573 | 5.00E−59 | 63 | hypothetical protein T9A14.170 - Arabidopsis |
| | | | | | | | thaliana >gi\|4490341\|emb\|CAB38623.1\| |
| | | | | | | | (AL035656) putative protein [Arabidopsis thaliana] |
| | | | | | | | >gi\|7270872\|emb\|CAB80552.1\| (AL161594) |
| | | | | | | | putative protein [Arabidopsis thaliana] |
| 2700 | LIB3602-081-Q6-K6-A5 | 118236 | BLASTX | 164 | 5.00E−11 | 45 | DIHYDRODIPICOLINATE SYNTHASE 1 |
| | | | | | | | PRECURSOR (DHDPS) >gi\|68224\|pir\|\|WZWTH7 |
| | | | | | | | dihydrodipicolinate synthase (EC 4.2.1.52) |
| | | | | | | | precursor (clone pDA17) - wheat |
| | | | | | | | >gi\|170680\|gb\|AAA34263.1\| (M60598) |
| | | | | | | | dihydrodipicolinate synthase [Triticum aestivum] |
| 2701 | LIB3602-120-Q1-K1-D10 | 7437314 | BLASTX | 283 | 4.00E−25 | 50 | peptidylprolyl isomerase (EC 5.2.1.8) - |
| | | | | | | | Synechocystis sp. (PCC 6803) |
| | | | | | | | >gi\|1652923\|dbj\|BAA17841.1\| (D90909) |
| | | | | | | | peptidylprolyl cis-trans isomerase [Synechocystis sp.] |
| 2702 | LIB3602-107-Q1-K1-C2 | 1174592 | BLASTX | 606 | 5.00E−63 | 94 | TUBULIN ALPHA-1 CHAIN |
| | | | | | | | >gi\|2119270\|pir\|\|S60233 tubulin alpha-1 chain - |
| | | | | | | | garden pea >gi\|525332\|gb\|AAA79910.1\| (U12589) |
| | | | | | | | alpha-tubulin [Pisum sativum] |
| 2703 | LIB3602-025-Q6-K1-A7 | 3046907 | BLASTX | 300 | 4.00E−27 | 90 | (AF019886) beta-tubulin [Onchocerca volvulus] |
| 2704 | LIB3602-086-Q6-K1-B12 | 4567243 | BLASTX | 285 | 4.00E−25 | 37 | (AC007070) putative synaptobrevin [Arabidopsis |
| | | | | | | | thaliana] |
| 2705 | LIB3602-095-Q6-K6-C1 | 7509168 | BLASTX | 159 | 8.00E−11 | 65 | hypothetical protein W09C5.1 - Caenorhabditis |
| | | | | | | | elegans >gi\|3880592\|emb\|CAB04941.1\| (Z82077) |
| | | | | | | | cDNA EST EMBL: D72613 comes from this gene; |
| | | | | | | | cDNA EST EMBL: D75538 comes from this gene; |
| | | | | | | | cDNA EST EMBL: D74123 comes from this gene; |
| | | | | | | | cDNA EST yk289c10.5 comes from this |
| 2706 | LIB3602-115-Q1-K1-E4 | 3288823 | BLASTX | 236 | 2.00E−19 | 37 | (AF063852) FUS5 [Arabidopsis thaliana] |
| 2707 | LIB3602-005-Q1-K1-D1 | 3288821 | BLASTX | 168 | 3.00E−12 | 76 | (AF063901) alanine: glyoxylate aminotransferase; |
| | | | | | | | transaminase [Arabidopsis thaliana] |
| | | | | | | | >gi\|4733989\|gb\|AAD28669.1\|AC007209_5 |
| | | | | | | | (AC007209) alanine-glyoxylate aminotransferase |
| | | | | | | | [Arabidopsis thaliana] |
| 2708 | LIB3602-054-Q6-K1-C2 | 6382535 | BLASTX | 196 | 6.00E−15 | 54 | (AC011020) putative protein kinase [Arabidopsis |
| | | | | | | | thaliana] |
| 2709 | LIB3602-005-Q1-K1-H1 | 4506221 | BLASTX | 242 | 3.00E−21 | 45 | proteasome (prosome, macropain) 26S subunit, non- |
| | | | | | | | ATPase, 12 >gi\|7451897\|pir\|\|JC6523 26s proteasom |
| | | | | | | | p55 protein - human >gi\|1945611\|dbj\|BAA19749.1\| |
| | | | | | | | (AB003103) 26S proteasome subunit p55 [Homo |
| | | | | | | | sapiens] |
| 2710 | LIB3602-025-Q6-K1-C9 | 6831664 | BLASTX | 697 | 1.00E−73 | 87 | 40S RIBOSOMAL PROTEIN S5 |
| | | | | | | | >gi\|7440226\|pir\|\|T16965 ribosomal protein S5 - |
| | | | | | | | curled-leaved tobacco |
| | | | | | | | >gi\|1620982\|emb\|CAA70084.1\| (Y08860) 40S |
| | | | | | | | ribosomal protein S5 [Nicotiana plumbaginifolia] |
| 2711 | LIB3602-020-Q6-K1-H7 | 6729038 | BLASTX | 314 | 8.00E−29 | 44 | (AC009177) unknown protein [Arabidopsis |
| | | | | | | | thaliana] |
| 2712 | LIB3602-077-Q6-K6-E6 | 6006879 | BLASTX | 306 | 1.00E−27 | 60 | (AC008153) putative eukaryotic translation |
| | | | | | | | initiation factor 3 subunit [Arabidopsis thaliana] |
| 2713 | LIB3602-029-Q6-K1-G10 | 7543738 | BLASTX | 241 | 4.00E−20 | 46 | (AC020580) hypothetical protein [Arabidopsis |
| | | | | | | | thaliana] |
| 2714 | LIB3602-101-Q1-K1-G4 | 115791 | BLASTX | 210 | 1.00E−16 | 72 | CHLOROPHYLL A-B BINDING PROTEIN 2 |
| | | | | | | | PRECURSOR (LHCII TYPE I CAB-2) (LHCP) |
| | | | | | | | >gi\|81770\|pir\|\|S01961 chlorophyll a/b-binding |
| | | | | | | | protein 2 precursor - soybean |
| | | | | | | | >gi\|18548\|emb\|CAA31418.1\| (X12980) chlorophyll |
| | | | | | | | a/b binding preprotein (AA-33 to 223) [Glycine |
| | | | | | | | max] |
| 2715 | LIB3602-039-Q6-K1-D2 | 6598844 | BLASTX | 327 | 4.00E−30 | 44 | (AC010795) hypothetical protein [Arabidopsis |
| | | | | | | | thaliana] |
| 2716 | LIB3602-116-Q1-K1-F1 | 115796 | BLASTX | 183 | 5.00E−14 | 79 | CHLOROPHYLL A-B BINDING PROTEIN |
| | | | | | | | PRECURSOR (LHCII TYPE I CAB) (LHCP) |
| | | | | | | | >gi\|218174\|dbj\|BAA00537.1\| (D00642) type II |
| | | | | | | | light-harvesting chlorophyll a/b-binding protein |
| | | | | | | | [Oryza sativa] |
| 2717 | LIB3602-095-Q6-K6-D3 | 4759036 | BLASTX | 167 | 3.00E−13 | 35 | regucalcin (senescence marker protein-30) |
| | | | | | | | >gi\|3334328\|sp\|Q15493\|SM30_HUMAN |
| | | | | | | | SENESCENCE MARKER PROTEIN-30 (SMP-30) |
| | | | | | | | (REGUCALCIN) (RC) >gi\|2136176\|pir\|\|I52491 |
| | | | | | | | SMP-30 - human >gi\|7429379\|pir\|\|S60035 |
| | | | | | | | senescence marker protein 30 - human |
| | | | | | | | >gi\|1072312\|dbj\|BAA06602 |
| 2718 | LIB3602-046-Q6-K1-B1 | 7488941 | BLASTX | 668 | 3.00E−70 | 82 | adenosylhomocysteinase (EC 3.3.1.1) - parsley |
| | | | | | | | >gi\|169661\|gb\|AAA33855.1\| (M62756) S- |
| | | | | | | | adenosylhomocysteine hydrolase [Petroselinum |
| | | | | | | | crispum] |
| 2719 | LIB3602-045-Q6-K1-G7 | 6598834 | BLASTX | 618 | 2.00E−64 | 78 | (AC010795) putative replication factor C |
| | | | | | | | [Arabidopsis thaliana] |
| 2720 | LIB3602-049-Q6-K1-F12 | 3023500 | BLASTX | 177 | 1.00E−12 | 63 | ATP-DEPENDENT CLP PROTEASE |
| | | | | | | | PROTEOLYTIC SUBUNIT 2 (ENDOPEPTIDASE |
| | | | | | | | CLP 2) >gi\|2351823\|gb\|AAB68677.1\| (U92039) |
| | | | | | | | ATP-dependent Clp protease, proteolytic subunit |
| | | | | | | | [Synechococcus PCC7942] |
| 2721 | LIB3602-014-Q6-K1-C12 | 6598677 | BLASTX | 192 | 2.00E−14 | 36 | (AC007135) hypothetical protein [Arabidopsis |
| | | | | | | | thaliana] |
| 2722 | LIB3602-007-Q1-K1-F7 | 1710008 | BLASTX | 255 | 1.00E−21 | 53 | GTP-BINDING NUCLEAR PROTEIN RAN1B |
| | | | | | | | >gi\|1370205\|emb\|CAA98188.1\| (Z73960) RAN1B |
| | | | | | | | [Lotus japonicus] |
| 2723 | LIB3602-111-Q1-K1-D12 | 2501056 | BLASTX | 323 | 1.00E−29 | 48 | SERYL-TRNA SYNTHETASE (SERINE--TRNA |
| | | | | | | | LIGASE) (SERRS) >gi\|2129737\|pir\|\|S71293 serine- |
| | | | | | | | tRNA ligase (EC 6.1.1.11) - Arabidopsis thaliana |
| | | | | | | | >gi\|1359497\|emb\|CAA94388.1\| (Z70313) seryl- |
| | | | | | | | tRNA Synthetase [Arabidopsis thaliana] |
| 2724 | LIB3602-109-Q1-K1-E8 | 7491321 | BLASTX | 164 | 5.00E−11 | 32 | hypothetical protein SPBC119.09c - fission yeast |
| | | | | | | | (Schizosaccharomyces pombe) |
| | | | | | | | >gi\|2959370\|emb\|CAA17924.1\| (AL022117) |
| | | | | | | | hypothetical protein. [Schizosaccharomyces pombe] |
| 2725 | LIB3602-014-Q6-K1-E3 | 2501062 | BLASTX | 147 | 3.00E−09 | 43 | THREONYL-TRNA SYNTHETASE |
| | | | | | | | (THREONINE--TRNA LIGASE) (THRRS) |
| | | | | | | | >gi\|7437520\|pir\|\|S76615 hypothetical protein - |
| | | | | | | | Synechocystis sp. (strain PCC 6803) |
| | | | | | | | >gi\|1001722\|dbj\|BAA10559.1\| (D64004) threonyl- |
| | | | | | | | tRNA synthetase [Synechocystis sp.] |
| 2726 | LIB3602-117-Q1-K1-H3 | 4210330 | BLASTX | 354 | 2.00E−33 | 55 | (AJ223802) 2-oxoglutarate dehydrogenase, E1 |
| | | | | | | | subunit [Arabidopsis thaliana] |
| 2727 | LIB3602-018-Q6-K1-F1 | 4098989 | BLASTX | 194 | 2.00E−14 | 36 | (U81498) phenylalkylamine binding protein |
| | | | | | | | homolog [Arabidopsis thaliana] |
| 2728 | LIB3602-061-Q6-K1-H2 | 4210334 | BLASTX | 314 | 9.00E−29 | 68 | (AJ223804) 2-oxoglutarate dehydrogenase, E3 |
| | | | | | | | subunit [Arabidopsis thaliana] |
| 2729 | LIB3602-014-Q6-K1-B1 | 4432812 | BLASTX | 204 | 1.00E−15 | 34 | (AC006593) putative cysteinyl-tRNA synthetase |
| | | | | | | | [Arabidopsis thaliana] |
| 2730 | LIB3602-023-Q6-K1-H7 | 5531416 | BLASTX | 355 | 2.00E−33 | 48 | (AJ243758) translocon Tic40 [Pisum sativum] |
| 2731 | LIB3602-028-Q6-K1-C10 | 4049522 | BLASTX | 414 | 2.00E−40 | 75 | (AJ011516) fructose-bisphosphate aldolase |
| | | | | | | | [Scherffelia dubia] |
| 2732 | LIB3602-073-Q1-K1-D5 | 2564066 | BLASTX | 143 | 8.00E−09 | 65 | (D45900) LEDI-3 protein [Lithospermum |
| | | | | | | | erythrorhizon] |
| 2733 | LIB3602-081-Q6-K6-C9 | 2497858 | BLASTX | 209 | 3.00E−16 | 45 | MALATE DEHYDROGENASE, |
| | | | | | | | MITOCHONDRIAL PRECURSOR |
| | | | | | | | >gi\|7431169\|pir\|\|T08077 malate dehydrogenase (EC |
| | | | | | | | 1.1.1.37) precursor, mitochondrial - |
| | | | | | | | Chlamydomonas reinhardtii |
| | | | | | | | >gi\|1145722\|gb\|AAA84971.1\| (U40212) malate |
| | | | | | | | dehydrogenase [Chlamydomonas reinhardtii] |
| 2734 | LIB3602-100-Q6-K1-B11 | 6056206 | BLASTX | 211 | 6.00E−20 | 53 | (AC009400) putative kinesin-like centromere |
| | | | | | | | protein [Arabidopsis thaliana] |
| 2735 | LIB3602-118-Q1-K1-H10 | 2149901 | BLASTX | 186 | 1.00E−13 | 51 | (U94707) unknown [Enterococcus faecalis] |
| 2736 | LIB3602-018-Q6-K1-D2 | 6729045 | BLASTX | 163 | 6.00E−11 | 43 | (AC009177) putative aminopeptidase [Arabidopsis |
| | | | | | | | thaliana] |
| 2737 | LIB3602-062-Q6-K1-C9 | 7447193 | BLASTX | 357 | 1.00E−33 | 43 | conserved hypothetical protein aq_1660 - Aquifex |
| | | | | | | | aeolicus >gi\|2983997\|gb\|AAC07543.1\| (AE000749) |
| | | | | | | | hypothetical protein [Aquifex aeolicus] |
| 2738 | LIB3602-111-Q1-K1-B6 | 132894 | BLASTX | 182 | 3.00E−13 | 58 | CYANELLE 50S RIBOSOMAL PROTEIN L33 |
| | | | | | | | >gi\|71357\|pir\|\|R5KT33 ribosomal protein L33 - |
| | | | | | | | Cyanophora paradoxa cyanelle |
| | | | | | | | >gi\|11401\|emb\|CAA35534.1\| (X17498) L33 |
| | | | | | | | ribosomal protein (AA 1-64) [Cyanophora |
| | | | | | | | paradoxa] >gi\|1016146\|gb\|AAA81233.1\| (U30821) |
| | | | | | | | ribosomal protein L3 |
| 2739 | LIB3602-036-Q6-K1-H9 | 6978417 | BLASTX | 162 | 1.00E−10 | 30 | (AC005941) L5204.2 [Leishmania major] |
| 2740 | LIB3602-010-Q6-K1-A11 | 963025 | BLASTN | 34 | 3.00E−09 | 93 | D. hydei gene for histone H3.3B |
| 2741 | LIB3602-057-Q6-K1-E6 | 3929364 | BLASTX | 551 | 3.00E−56 | 84 | NADH-UBIQUINONE OXIDOREDUCTASE 23 KD |
| | | | | | | | SUBUNIT PRECURSOR (COMPLEX I- |
| | | | | | | | 23 KD) (CI-23 KD) (COMPLEX I-28.5 KD) (CI- |
| | | | | | | | 28.5 KD) >gi\|1076356\|pir\|\|S52380 NADH |
| | | | | | | | dehydrogenase (ubiquinone) (EC 1.6.5.3) chain |
| | | | | | | | TYKY precursor - Arabidopsis thaliana |
| | | | | | | | >gi\|666977\|emb\|CAA59061.1\| (X |
| 2742 | LIB3602-086-Q6-K1-B6 | 226263 | BLASTX | 154 | 8.00E−10 | 35 | chlorophyll a/b binding protein [Glycine max] |
| 2743 | LIB3602-040-Q6-K1-C5 | 2500139 | BLASTX | 162 | 2.00E−11 | 56 | PEPTIDE CHAIN RELEASE FACTOR 1 (RF-1) |
| | | | | | | | >gi\|7428981\|pir\|\|S76914 translation releasing factor |
| | | | | | | | RF-1 - Synechocystis sp. (strain PCC 6803) |
| | | | | | | | >gi\|1653916\|dbj\|BAA18826.1\| (D90917) peptide |
| | | | | | | | chain release factor [Synechocystis sp.] |
| 2744 | LIB3602-042-Q6-K1-G3 | 3283057 | BLASTX | 163 | 5.00E−11 | 50 | (AF054617) one helix protein [Arabidopsis |
| | | | | | | | thaliana] >gi\|7340686\|emb\|CAB82985.1\| |
| | | | | | | | (AL162508) one helix protein (OHP) [Arabidopsis |
| | | | | | | | thaliana] |
| 2745 | LIB3602-016-Q6-K1-H7 | 5107826 | BLASTX | 219 | 1.00E−17 | 38 | (AF149413) similar to malate dehydrogenases; |
| | | | | | | | Pfam PF00390, Score = 1290.5. E = 0, N = 1 |
| | | | | | | | [Arabidopsis thaliana] |
| 2746 | LIB3602-114-Q1-K1-B6 | 6831634 | BLASTX | 206 | 4.00E−16 | 59 | 50S RIBOSOMAL PROTEIN L6 |
| | | | | | | | >gi\|7440700\|pir\|\|C72054 L6 ribosomal protein - |
| | | | | | | | Chlamydia pneumoniae (strain CWL029) |
| | | | | | | | >gi\|4376931\|gb\|AAD18772.1\| (AE001647) L6 |
| | | | | | | | Ribosomal Protein [Chlamydophila pneumoniae] |
| | | | | | | | >gi\|7189048\|gb\|AAF37997.1\| (AE002173) |
| | | | | | | | ribosomal protein L6 [ |
| 2747 | LIB3602-067-Q1-K1-B10 | 6715645 | BLASTX | 248 | 5.00E−21 | 66 | (AC007323) T25K16.8 [Arabidopsis thaliana] |
| 2748 | LIB3602-051-Q6-K1-H12 | 7445539 | BLASTX | 276 | 2.00E−24 | 48 | aldose 1-epimerase - Thermotoga maritima (strain |
| | | | | | | | MSB8) >gi\|4980780\|gb\|AAD35370.1\|AE001710_5 |
| | | | | | | | (AE001710) aldose 1-epimerase [Thermotoga |
| | | | | | | | maritima] |
| 2749 | LIB3602-057-Q6-K1-A12 | 4325370 | BLASTX | 673 | 1.00E−70 | 63 | (AF128396) similar to human phosphotyrosyl |
| | | | | | | | phosphatase activator PTPA (GB: X73478) |
| | | | | | | | [Arabidopsis thaliana] |
| | | | | | | | >gi\|7267538\|emb\|CAB78020.1\| (AL161513) |
| | | | | | | | putative phosphotyrosyl phosphatase activator |
| | | | | | | | protein [Arabidopsis thaliana] |
| 2750 | LIB3602-017-Q6-K1-A11 | 5869803 | BLASTX | 257 | 6.00E−22 | 31 | (X64418) kurz protein [Drosophila melanogaster] |
| 2751 | LIB3602-085-Q6-K1-B5 | 7301290 | BLASTX | 199 | 4.00E−15 | 42 | (AE003751) CG11851 gene product [Drosophila |
| | | | | | | | melanogaster] |
| 2752 | LIB3602-051-Q6-K1-B11 | 7447302 | BLASTX | 165 | 3.00E−11 | 38 | probable glutathione transferase (EC 2.5.1.18), 2,4- |
| | | | | | | | D inducible - soybean |
| | | | | | | | >gi\|2920666\|gb\|AAC18566.1\| (AF048978) 2,4-D |
| | | | | | | | inducible glutathione S-transferase [Glycine max] |
| 2753 | LIB3602-109-Q1-K1-H7 | 1354764 | BLASTX | 145 | 4.00E−09 | 58 | (U56935) beta-1,3-glucanase IIa [Oerskovia |
| | | | | | | | xanthineolytica] |
| 2754 | LIB3602-043-Q6-K1-F5 | 5734642 | BLASTX | 153 | 6.00E−10 | 33 | (AP000391) ESTs C22657(S0014), C22656(S0014) |
| | | | | | | | correspond to a region of the predicted gene.; |
| | | | | | | | Similar to receptor protein kinase, ERECTA |
| | | | | | | | (AC004484) [Oryza sativa] |
| | | | | | | | >gi\|6006357\|dbj\|BAA84787.1\| (AP000559) ESTs |
| | | | | | | | C22657(S0014), C22656(S0014) correspond to a |
| | | | | | | | region |
| 2755 | LIB3602-012-Q6-K1-G7 | 3763918 | BLASTX | 573 | 6.00E−59 | 66 | (AC004450) 3-isopropylmalate dehydratase, small |
| | | | | | | | subunit [Arabidopsis thaliana] |
| 2756 | LIB3602-040-Q6-K1-F6 | 6642738 | BLASTX | 191 | 3.00E−14 | 38 | (AF113007) PRO0066 [Homo sapiens] |
| 2757 | LIB3602-064-Q1-K6-D6 | 4567273 | BLASTX | 383 | 1.00E−36 | 50 | (AC006841) putative vacuolar proton-ATPase |
| | | | | | | | subunit 1 [Arabidopsis thaliana] |
| 2758 | LIB3602-117-Q1-K1-H10 | 3757515 | BLASTX | 204 | 8.00E−16 | 64 | (AC005167) hypothetical protein [Arabidopsis |
| | | | | | | | thaliana] |
| 2759 | LIB3602-034-Q6-K1-B8 | 7385113 | BLASTX | 196 | 8.00E−15 | 43 | (AF222766) ankyrin 1 [Bos taurus] |
| 2760 | LIB3602-047-Q6-K1-A4 | 7487883 | BLASTX | 218 | 2.00E−17 | 36 | hypothetical protein T9J22.21 - Arabidopsis |
| | | | | | | | thaliana >gi\|2739379\|gb\|AAC14502.1\| (AC002505) |
| | | | | | | | hypothetical protein [Arabidopsis thaliana] |
| 2761 | LIB3602-071-Q1-K1-C11 | 2500318 | BLASTX | 258 | 6.00E−22 | 63 | 50S RIBOSOMAL PROTEIN L28 |
| | | | | | | | >gi\|7441051\|pir\|\|S74715 ribosomal protein L28 - |
| | | | | | | | Synechocystis sp. (strain PCC 6803) |
| | | | | | | | >gi\|1651940\|dbj\|BAA16866.1\| (D90901) 50S |
| | | | | | | | ribosomal protein L28 [Synechocystis sp.] |
| 2762 | LIB3602-068-Q1-K1-A10 | 7303420 | BLASTX | 435 | 1.00E−42 | 48 | (AE003821) CG8778 gene product [Drosophila |
| | | | | | | | melanogaster] |
| 2763 | LIB3602-041-Q6-K1-B6 | 7510133 | BLASTX | 231 | 7.00E−19 | 59 | hypothetical protein Y52B11A.3 - Caenorhabditis |
| | | | | | | | elegans >gi\|3881161\|emb\|CAA21721.1\| |
| | | | | | | | (AL032654) similar to Heme-binding domain in |
| | | | | | | | cytochrome b5 and oxidoreductases [Caenorhabditis |
| | | | | | | | elegans] |
| 2764 | LIB3602-078-Q6-K6-E9 | 5281018 | BLASTX | 245 | 3.00E−21 | 63 | (Z97339) OBP33pep like protein [Arabidopsis |
| | | | | | | | thaliana] >gi\|7268299\|emb\|CAB78594.1\| |
| | | | | | | | (AL161541) OBP33pep like protein [Arabidopsis |
| | | | | | | | thaliana] |
| 2765 | LIB3602-077-Q6-K6-A10 | 1709243 | BLASTX | 254 | 7.00E−22 | 70 | NUCLEOSIDE DIPHOSPHATE KINASE NBR-B |
| | | | | | | | (NDK NBR-B) (NDP KINASE NBR-B) |
| | | | | | | | >gi\|4389319\|pdb\|1BE4\|C Chain C, Nucleoside |
| | | | | | | | Diphosphate Kinase Isoform B From Bovine Retina |
| | | | | | | | >gi\|1064897\|emb\|CAA63533.1\| (X92957) |
| | | | | | | | nucleoside-diphosphate kinase NBR-B [Bos taurus] |
| 2766 | LIB3602-032-Q6-K1-H11 | 3970652 | BLASTX | 148 | 2.00E−09 | 48 | (X77499) amino acid permease [Arabidopsis |
| | | | | | | | thaliana] |
| 2767 | LIB3602-072-Q1-K1-E12 | 7489826 | BLASTX | 457 | 2.00E−45 | 51 | starch synthase DULL1 - maize |
| | | | | | | | >gi\|3057120\|gb\|AAC14014.1\| (AF023159) starch |
| | | | | | | | synthase DULL1 [Zea mays] |
| 2768 | LIB3602-066-Q1-K6-F5 | 7295126 | BLASTX | 436 | 7.00E−43 | 54 | (AE003556) CG7197 gene product [Drosophila |
| | | | | | | | melanogaster] |
| 2769 | LIB3602-025-Q6-K1-D1 | 6729017 | BLASTX | 187 | 9.00E−14 | 48 | (AC009177) unknown protein [Arabidopsis |
| | | | | | | | thaliana] |
| 2770 | LIB3602-017-Q6-K1-C4 | 4774163 | BLASTX | 305 | 1.00E−27 | 36 | (AB026909) F1-ATP synthase delta subunit |
| | | | | | | | [Ipomoea batatas] |
| 2771 | LIB3602-100-Q1-K1-D2 | 2498712 | BLASTX | 344 | 4.00E−32 | 47 | ORIGIN RECOGNITION COMPLEX SUBUNIT 2 |
| | | | | | | | (XORC2) >gi\|7512175\|pir\|\|S68447 origin |
| | | | | | | | recognition complex chain orc2 - African clawed |
| | | | | | | | frog >gi\|1177822\|gb\|AAA96391.1\| (U31984) |
| | | | | | | | XORC2 [Xenopus laevis] |
| | | | | | | | >gi\|1586824\|prf\|\|2204391A orc-2-related protein |
| | | | | | | | [Xenopus laevis] |
| 2772 | LIB3602-069-Q1-K1-E1 | 125577 | BLASTX | 318 | 5.00E−29 | 87 | PHOSPHORIBULOKINASE PRECURSOR |
| | | | | | | | (PHOSPHOPENTOKINASE) (PRKASE) (PRK) |
| | | | | | | | >gi\|7434254\|pir\|\|T08167 phosphoribulokinase (EC |
| | | | | | | | 2.7.1.19) precursor - Chlamydomonas reinhardtii |
| | | | | | | | >gi\|167432\|gb\|AAA33090.1\| (M36123) |
| | | | | | | | phosphoribulokinase [Chlamydomonas reinhardtii] |
| | | | | | | | >gi\|710740 |
| 2773 | LIB3602-076-Q6-K6-B1 | 6002102 | BLASTX | 172 | 6.00E−12 | 45 | (AJ249833) Acyl-CoA binding protein (ACBP) |
| | | | | | | | [Digitalis lanata] |
| 2774 | LIB3602-049-Q6-K1-C9 | 3676298 | BLASTX | 218 | 2.00E−17 | 35 | (U97104) membrane transporter [Bactrocera tryoni] |
| 2775 | LIB3602-059-Q6-K1-G6 | 6688812 | BLASTX | 684 | 5.00E−72 | 71 | (AJ248327) L3 Ribosomal protein [Medicago sativa |
| | | | | | | | subsp. x varia] |
| 2776 | LIB3602-119-Q1-K1-E3 | 7447939 | BLASTX | 171 | 9.00E−16 | 53 | hypothetical protein - Synechocystis sp. (strain PCC |
| | | | | | | | 6803) >gi\|1001355\|dbj\|BAA10842.1\| (D64006) |
| | | | | | | | auxin-induced protein [Synechocystis sp.] |
| 2777 | LIB3602-007-Q1-K1-H9 | 320553 | BLASTX | 402 | 8.00E−39 | 62 | anthranilate synthase (EC 4.1.3.27) alpha-2 chain - |
| | | | | | | | Arabidopsis thaliana |
| 2778 | LIB3602-015-Q6-K1-H4 | 2598039 | BLASTX | 255 | 1.00E−21 | 37 | (AJ001273) manganese resistance 1 protein |
| | | | | | | | [Saccharomyces cerevisiae] |
| 2779 | LIB3602-078-Q6-K6-B3 | 124374 | BLASTX | 237 | 2.00E−19 | 34 | ACETOLACTATE SYNTHASE |
| | | | | | | | (ACETOHYDROXY-ACID SYNTHASE) (ALS) |
| | | | | | | | >gi\|96560\|pir\|\|JC1218 acetolactate synthase (EC |
| | | | | | | | 4.1.3.18), FAD-independent - Klebsiella |
| | | | | | | | pneumoniae >gi\|149211\|gb\|AAA25079.1\| (M73842) |
| | | | | | | | acetolactate synthase [Klebsiella pneumoniae] |
| 2780 | LIB3602-071-Q1-K1-G7 | 7487731 | BLASTX | 277 | 3.00E−24 | 47 | hypothetical protein T5L19.160 - Arabidopsis |
| | | | | | | | thaliana >gi\|4539006\|emb\|CAB39627.1\| |
| | | | | | | | (AL049481) putative protein [Arabidopsis thaliana] |
| | | | | | | | >gi\|7267699\|emb\|CAB78126.1\| (AL161516) |
| | | | | | | | putative protein [Arabidopsis thaliana] |
| 2781 | LIB3602-057-Q6-K1-C8 | 7298683 | BLASTX | 160 | 2.00E−14 | 73 | (AE003666) CG2493 gene product [Drosophila |
| | | | | | | | melanogaster] |
| 2782 | LIB3602-023-Q6-K1-D3 | 2130089 | BLASTX | 159 | 2.00E−10 | 55 | 2-oxoglutarate/malate translocator (clone OMT103), |
| | | | | | | | mitochondrial membrane - proso millet |
| | | | | | | | >gi\|1100743\|dbj\|BAA08105.1\| (D45075) 2- |
| | | | | | | | oxoglutarate/malate translocator [Panicum |
| | | | | | | | miliaceum] |
| 2783 | LIB3602-071-Q1-K1-D11 | 6562261 | BLASTX | 154 | 7.00E−10 | 55 | (AL132980) putative protein [Arabidopsis thaliana] |
| 2784 | LIB3602-012-Q6-K1-E7 | 6969002 | BLASTX | 155 | 7.00E−10 | 32 | (AL139079) putative oxidoreductase |
| | | | | | | | [Campylobacter jejuni] |
| 2785 | LIB3602-011-Q6-K1-E10 | 7488455 | BLASTX | 341 | 8.00E−32 | 49 | hydroxymethylpyrimidine kinase (EC 2.7.1.49)/ |
| | | | | | | | thiamin-phosphate pyrophosphorylase (EC 2.5.1.3) - |
| | | | | | | | rape >gi\|2746079\|gb\|AAC31298.1\| (AF015310) |
| | | | | | | | BTH1 [Brassica napus] |
| 2786 | LIB3602-010-Q6-K1-D7 | 7484895 | BLASTX | 172 | 6.00E−12 | 49 | cytochrome P450 homolog F13P17.33 - |
| | | | | | | | Arabidopsis thaliana >gi\|3128210\|gb\|AAC26690.1\| |
| | | | | | | | (AC004077) putative cytochrome P450 |
| | | | | | | | [Arabidopsis thaliana] |
| 2787 | LIB3602-009-Q6-K1-C8 | 6016183 | BLASTX | 478 | 7.00E−48 | 55 | PHOTOSYSTEM II STABILITY/ASSEMBLY |
| | | | | | | | FACTOR HCF136 >gi\|3559807\|emb\|CAA75723.1\| |
| | | | | | | | (Y15628) HCF136 protein [Arabidopsis thaliana] |
| 2788 | LIB3602-114-Q1-K1-B5 | 2190717 | BLASTN | 38 | 1.00E−11 | 82 | Cloning vector pBI-GL, complete sequence |
| 2789 | LIB3602-067-Q1-K1-C10 | 5107528 | BLASTX | 167 | 2.00E−11 | 36 | Probing The Substrate Specificity Of The |
| | | | | | | | Intracellular Brain Platelet-Activating Factor |
| | | | | | | | Acetylhydrolase |
| 2790 | LIB3602-041-Q6-K1-D8 | 6572215 | BLASTX | 247 | 1.00E−20 | 44 | (Z83844) dJ37E16.5 (novel protein similar to |
| | | | | | | | nitrophenylphosphatases from various organisms) |
| | | | | | | | [Homo sapiens] |
| 2791 | LIB3602-050-Q6-K1-C6 | 2829532 | BLASTX | 268 | 3.00E−23 | 43 | HYPOTHETICAL 48.5 KD PROTEIN RV1407 |
| | | | | | | | >gi\|7445108\|pir\|\|D70901 probable fmu protein - |
| | | | | | | | Mycobacterium tuberculosis (strain H37RV) |
| | | | | | | | >gi\|1542915\|emb\|CAB02186.1\| (Z80108) fmu |
| | | | | | | | [Mycobacterium tuberculosis] |
| 2792 | LIB3602-090-Q6-K6-C4 | 127210 | BLASTX | 353 | 3.00E−33 | 69 | METHYLMALONATE-SEMIALDEHYDE |
| | | | | | | | DEHYDROGENASE [ACYLATING] (MMSDH) |
| | | | | | | | >gi\|281523\|pir\|\|B42902 methylmalonate- |
| | | | | | | | semialdehyde dehydrogenase (acylating) (EC |
| | | | | | | | 1.2.1.27) - Pseudomonas aeruginosa (ATCC 15692) |
| | | | | | | | >gi\|151362\|gb\|AAA25891.1\| (M84911) |
| | | | | | | | methylmalonate semialdehyde d |
| 2793 | LIB3602-102-Q1-K1-C5 | 7433831 | BLASTX | 187 | 4.00E−28 | 63 | sucrose synthase (EC 2.4.1.13) T2H3.8 - |
| | | | | | | | Arabidopsis thaliana >gi\|3377802\|gb\|AAC28175.1\| |
| | | | | | | | (AF075597) Similar to sucrose synthase; T2H3.8 |
| | | | | | | | [Arabidopsis thaliana] |
| 2794 | LIB3602-027-Q6-K1-F2 | 6572072 | BLASTX | 154 | 7.00E−10 | 49 | (AL133452) putative protein [Arabidopsis thaliana] |
| 2795 | LIB3602-107-Q1-K1-F6 | 2129826 | BLASTX | 194 | 2.00E−14 | 30 | phragmoplastin 5 - soybean |
| | | | | | | | >gi\|1218004\|gb\|AAC49183.1\| (U36430) SDL5A |
| | | | | | | | [Glycine max] |
| 2796 | LIB3602-100-Q1-K1-D8 | 1708059 | BLASTX | 309 | 8.00E−35 | 51 | GLUTATHIONE REDUCTASE, CHLOROPLAST |
| | | | | | | | PRECURSOR (GR) (GRASE) |
| | | | | | | | >gi\|481593\|pir\|\|S38908 glutathione reductase |
| | | | | | | | (NADPH) (EC 1.6.4.2) - common tobacco |
| | | | | | | | (fragment) >gi\|431955\|emb\|CAA53925.1\| (X76293) |
| | | | | | | | glutathione reductase (NADPH) [Nicotiana |
| | | | | | | | tabacum] |
| 2797 | LIB3602-006-Q1-K1-E11 | 7291436 | BLASTX | 151 | 1.00E−23 | 90 | (AE003458) CG4046 gene product [Drosophila |
| | | | | | | | melanogaster] |
| 2798 | LIB3602-011-Q6-K1-E11 | 4028549 | BLASTX | 170 | 1.00E−11 | 27 | (AF093690) ubiquitin hydrolase B [Dictyostelium |
| | | | | | | | discoideum] |
| 2799 | LIB3602-037-Q6-K1-G10 | 7434563 | BLASTX | 407 | 1.00E−39 | 56 | aspartate kinase (EC 2.7.2.4)/homoserine |
| | | | | | | | dehydrogenase (EC 1.1.1.3) precursor - soybean |
| | | | | | | | (fragment) >gi\|2970556\|gb\|AAC05983.1\| |
| | | | | | | | (AF049708) aspartokinase-homoserine |
| | | | | | | | dehydrogenase [Glycine max] |
| 2800 | LIB3602-071-Q1-K1-E6 | 7021737 | BLASTX | 166 | 3.00E−11 | 60 | (AC024081) hypothetical protein [Arabidopsis |
| | | | | | | | thaliana] |
| 2801 | LIB3602-077-Q6-K6-H11 | 4204793 | BLASTX | 474 | 2.00E−47 | 48 | (U52079) P-glycoprotein [Solanum tuberosum] |
| 2802 | LIB3602-081-Q6-K6-A7 | 6006398 | BLASTN | 41 | 1.00E−13 | 86 | Aspergillus niger mRNA for ribosomal protein S28 |
| | | | | | | | (rps28 gene) |
| 2803 | LIB3602-088-Q6-K6-D9 | 7508349 | BLASTX | 186 | 2.00E−20 | 54 | hypothetical protein T23H2.6 - Caenorhabditis |
| | | | | | | | elegans >gi\|2731374\|gb\|AAC48203.1\| (U80033) |
| | | | | | | | T23H2.6 gene product [Caenorhabditis elegans] |
| 2804 | LIB3602-010-Q6-K1-D12 | 6319917 | BLASTX | 151 | 7.00E−10 | 36 | protein kinase; Ssk22p |
| | | | | | | | >gi\|140530\|sp\|P25390\|SS22_YEAST |
| | | | | | | | SERINE/THREONINE PROTEIN KINASE SSK22 |
| | | | | | | | >gi\|83250\|pir\|\|S19488 probable membrane protein |
| | | | | | | | YCR073c - yeast (Saccharomyces cerevisiae) |
| | | | | | | | >gi\|1907212\|emb\|CAA42271.1\| (X59720) |
| | | | | | | | YCR073c, len: 1314 [Saccharomyces c |
| 2805 | LIB3602-120-Q1-K1-A2 | 1076820 | BLASTX | 149 | 1.00E−09 | 96 | phosphoglycerate mutase (EC 5.4.2.1) - maize |
| 2806 | LIB3602-087-Q6-K1-A5 | 7387793 | BLASTX | 206 | 6.00E−16 | 34 | TRANSLATION INITIATION FACTOR IF-3 |
| 2807 | LIB3602-043-Q6-K1-A10 | 99898 | BLASTX | 210 | 1.00E−16 | 48 | DNA-directed RNA polymerase (EC 2.7.7.6) largest |
| | | | | | | | chain (isoform B1) - soybean (fragment) |
| 2808 | LIB3602-049-Q6-K1-F2 | 4733939 | BLASTX | 492 | 1.00E−49 | 71 | (AF068686) geranylgeranyl hydrogenase [Glycine |
| | | | | | | | max] |
| 2809 | LIB3602-053-Q6-K1-B2 | 337930 | BLASTX | 402 | 4.00E−39 | 67 | (M22146) scar protein [Homo sapiens] |
| 2810 | LIB3602-001-P1-K6-D8 | 7446109 | BLASTX | 265 | 9.00E−23 | 48 | RNA helicase RH16 - Arabidopsis thaliana |
| | | | | | | | >gi\|5123708\|emb\|CAB45452.1\| (AL079347) RNA |
| | | | | | | | helicase (RH16) [Arabidopsis thaliana] |
| | | | | | | | >gi\|7270442\|emb\|CAB80208.1\| (AL161586) RNA |
| | | | | | | | helicase (RH16) [Arabidopsis thaliana] |
| 2811 | LIB3602-091-Q6-K6-F3 | 1262849 | BLASTX | 268 | 3.00E−23 | 76 | (U51633) type 1 light-harvesting chlorophyll a/b- |
| | | | | | | | binding polypeptide [Pinus palustris] |
| 2812 | LIB3602-037-Q6-K1-B9 | 3914594 | BLASTX | 167 | 2.00E−11 | 65 | RIBULOSE BISPHOSPHATE CARBOXYLASE |
| | | | | | | | SMALL CHAIN 6 PRECURSOR (RUBISCO |
| | | | | | | | SMALL SUBUNIT 6) |
| | | | | | | | >gi\|2654375\|emb\|CAA82266.1\| (Z28640) |
| | | | | | | | ribulosebiphosphate carboxylase, small subunit |
| | | | | | | | [Acetabularia cliftonii] |
| 2813 | LIB3602-012-Q6-K1-B2 | 7434369 | BLASTX | 194 | 2.00E−14 | 44 | calcium-dependent protein kinase (EC 2.7.1.—) - |
| | | | | | | | sweet potato >gi\|1552214\|dbj\|BAA13440.1\| |
| | | | | | | | (D87707) calcium dependent protein kinase |
| | | | | | | | [Ipomoea batatas] |
| 2814 | LIB3602-013-Q6-K1-B11 | 7520797 | BLASTX | 228 | 1.00E−18 | 43 | phosphate permease PAB0927 - Pyrococcus abyssi |
| | | | | | | | (strain Orsay) >gi\|5458819\|emb\|CAB50306.1\| |
| | | | | | | | (AJ248287) phosphate permease [Pyrococcus |
| | | | | | | | abyssi] |
| 2815 | LIB3602-001-P1-K6-D7 | 7522579 | BLASTX | 188 | 5.00E−14 | 36 | similar to S. cerevisiae sur1 protein - fission yeast |
| | | | | | | | (Schizosaccharomyces pombe) (fragment) |
| | | | | | | | >gi\|2408057\|emb\|CAB16259.1\| (Z99165) similar to |
| | | | | | | | S. cerevisiae sur1 protein [Schizosaccharomyces |
| | | | | | | | pombe] |
| 2816 | LIB3602-111-Q1-K1-E5 | 6630689 | BLASTX | 453 | 5.00E−54 | 63 | (AP000969) ESTs D39011(R0609), |
| | | | | | | | AU032023(R3215) correspond to a region of the |
| | | | | | | | predicted gene.; Similar to 26S proteasome, non- |
| | | | | | | | ATPase subunit. (Y13071) [Oryza sativa] |
| 2817 | LIB3602-070-Q1-K1-G5 | 6912238 | BLASTX | 334 | 7.00E−31 | 46 | antioxidant enzyme B166 |
| | | | | | | | >gi\|6103724\|gb\|AAF03750.1\|AF110731_1 |
| | | | | | | | (AF110731) antioxidant enzyme B166 [Homo |
| | | | | | | | sapiens] |
| 2818 | LIB3602-078-Q6-K6-D5 | 7489167 | BLASTX | 157 | 2.00E−10 | 94 | nascent polypeptide associated complex alpha chain - |
| | | | | | | | common tobacco (fragment) |
| | | | | | | | >gi\|1658271\|gb\|AAB18266.1\| (U74622) nascent |
| | | | | | | | polypeptide associated complex alpha chain |
| | | | | | | | [Nicotiana tabacum] |
| 2819 | LIB3602-077-Q6-K6-D10 | 628056 | BLASTX | 245 | 1.00E−20 | 70 | FK506-binding protein - Botryllus schlosseri |
| | | | | | | | >gi\|435471\|emb\|CAA53594.1\| (X76006) FK506- |
| | | | | | | | binding protein [Botryllus schlosseri] |
| 2820 | LIB3602-066-Q1-K6-F2 | 6679088 | BLASTX | 505 | 6.00E−51 | 72 | nicotinamide nucleotide transhydrogenase |
| | | | | | | | >gi\|6225774\|sp\|Q61941\|NNTM_MOUSE NAD(P) |
| | | | | | | | TRANSHYDROGENASE, MITOCHONDRIAL |
| | | | | | | | PRECURSOR (PYRIDINE NUCLEOTIDE |
| | | | | | | | TRANSHYDROGENASE) (NICOTINAMIDE |
| | | | | | | | NUCLEOTIDE TRANSHYDROGENASE) |
| | | | | | | | >gi\|1083428\|pir\|\|S54876 NAD(P)+ |
| | | | | | | | transhydrogenase ( |
| 2821 | LIB3602-028-Q6-K1-H1 | 4325041 | BLASTX | 219 | 2.00E−17 | 66 | (AF117339) FtsH-like protein Pftf precursor |
| | | | | | | | [Nicotiana tabacum] |
| 2822 | LIB3602-120-Q1-K1-H2 | 6273391 | BLASTX | 221 | 8.00E−18 | 59 | (AF196333) nonhistone protein 6 [Candida |
| | | | | | | | albicans] |
| 2823 | LIB3602-046-Q6-K1-E7 | 1175367 | BLASTX | 255 | 9.00E−22 | 63 | HYPOTHETICAL 36.7 KD PROTEIN C2F7.02C |
| | | | | | | | IN CHROMOSOME I >gi\|2130371\|pir\|\|S58146 |
| | | | | | | | hypothetical protein SPAC2F7.02c - fission yeast |
| | | | | | | | (Schizosaccharomyces pombe) |
| | | | | | | | >gi\|7491051\|pir\|\|T38550 hypothetical protein |
| | | | | | | | SPAC2F7.02c - fission yeast (Schizosaccharomyces |
| | | | | | | | pombe) |
| 2824 | LIB3602-022-Q6-K1-A4 | 119002 | BLASTX | 247 | 7.00E−21 | 41 | GLUCAN ENDO-1,3-BETA-GLUCOSIDASE A1 |
| | | | | | | | PRECURSOR ((1->3)-BETA-GLUCAN |
| | | | | | | | ENDOHYDROLASE) ((1->3)-BETA- |
| | | | | | | | GLUCANASE A1) >gi\|80085\|pir\|\|JQ0420 beta-1,3- |
| | | | | | | | glucanase A1 precursor - Bacillus circulans |
| | | | | | | | >gi\|142973\|gb\|AAA22474.1\| (M34503) beta-1,3- |
| | | | | | | | glucanase A1 (glcA) [Bacillu |
| 2825 | LIB3602-007-Q1-K1-D8 | 1169128 | BLASTX | 160 | 1.00E−10 | 38 | SERINE/THREONINE-PROTEIN KINASE CTR1 |
| | | | | | | | >gi\|166680\|gb\|AAA32779.1\| (L08789) protein |
| | | | | | | | kinase [Arabidopsis thaliana] |
| | | | | | | | >gi\|166682\|gb\|AAA32780.1\| (L08790) protein |
| | | | | | | | kinase [Arabidopsis thaliana] |
| | | | | | | | >gi\|7340658\|emb\|CAB82938.1\| (AL162506) |
| | | | | | | | SERINE/THREONINE-PROTEIN KINASE C |
| 2826 | LIB3602-103-Q1-KI-E11 | 7298660 | BLASTX | 213 | 8.00E−17 | 45 | (AE003665) CG10756 gene product [Drosophila |
| | | | | | | | melanogaster] |
| 2827 | LIB3602-092-Q6-K6-B7 | 7436158 | BLASTX | 246 | 2.00E−20 | 38 | probable H+-transporting ATP synthase (EC |
| | | | | | | | 3.6.1.34) gamma chain, mitochondrial - Arabidopsis |
| | | | | | | | thaliana |
| 2828 | LIB3602-007-Q1-K1-F5 | 7433647 | BLASTX | 567 | 2.00E−58 | 69 | acetyl-CoA C-acyltransferase (EC 2.3.1.16) |
| | | | | | | | precursor - cucurbit >gi\|1694621\|dbj\|BAA11117.1\| |
| | | | | | | | (D70895) 3-ketoacyl-CoA thiolase [Cucurbita sp.] |
| 2829 | LIB3602-111-Q1-K1-B1 | 6433784 | BLASTX | 257 | 6.00E−22 | 36 | (Y09633) hypothetical protein [Bradyrhizobium |
| | | | | | | | japonicum] |
| 2830 | LIB3602-032-Q6-K1-B10 | 5902586 | BLASTX | 167 | 2.00E−11 | 49 | (AF110781) photosystem I reaction center subunit |
| | | | | | | | PSAN precursor [Volvox carteri f. nagariensis] |
| 2831 | LIB3602-059-Q6-K1-C2 | 2498077 | BLASTX | 167 | 9.00E−12 | 54 | NUCLEOSIDE DIPHOSPHATE KINASE I (NDKI) |
| | | | | | | | (NDP KINASE I) (PP18) |
| | | | | | | | >gi\|1777930\|gb\|AAB40609.1\| (U55019) nucleoside |
| | | | | | | | diphosphate kinase [Saccharum officinarum] |
| 2832 | LIB3602-014-Q6-K1-F11 | 7488451 | BLASTX | 216 | 5.00E−17 | 52 | G box-binding protein homolog GBF1 - rape |
| | | | | | | | >gi\|1399007\|gb\|AAB03379.1\| (U27108) |
| | | | | | | | transcription factor [Brassica napus] |
| 2833 | LIB3602-055-Q6-K1-F1 | 400578 | BLASTX | 216 | 3.00E−17 | 45 | NADH-UBIQUINONE OXIDOREDUCTASE 18 KD |
| | | | | | | | SUBUNIT PRECURSOR (COMPLEX I-18 KD) |
| | | | | | | | (CI-18 KD) (COMPLEX I-AQDQ) (CI- |
| | | | | | | | AQDQ) >gi\|346531\|pir\|\|S28240 NADH |
| | | | | | | | dehydrogenase (ubiquinone) (EC 1.6.5.3) chain CI- |
| | | | | | | | 18(IP) precursor - bovine |
| | | | | | | | >gi\|226\|emb\|CAA44900.1\|(X63215) NADH deh |
| 2834 | LIB3602-057-Q6-K1-F6 | 7226932 | BLASTX | 266 | 5.00E−23 | 50 | (AE002518) tRNA (uracil-5-)-methyltransferase |
| | | | | | | | [Neisseria meningitidis] |
| 2835 | LIB3602-077-Q6-K6-F7 | 5326994 | BLASTX | 310 | 4.00E−28 | 67 | (AJ223326) DNA topoisomerase I [Daucus carota] |
| 2836 | LIB3602-055-Q6-K1-G10 | 6862961 | BLASTX | 357 | 1.00E−33 | 70 | (AC019018) putative deoxyoctulonosic acid |
| | | | | | | | synthetase [Arabidopsis thaliana] |
| 2837 | LIB3602-045-Q6-K1-C6 | 114718 | BLASTX | 179 | 7.00E−13 | 61 | PROBABLE COPPER-TRANSPORTING |
| | | | | | | | ATPASE SYNA >gi\|79650\|pir\|\|S10839 hypothetical |
| | | | | | | | protein 5 - Synechococcus sp. (PCC 6301) |
| | | | | | | | (fragment) >gi\|48026\|emb\|CAA29364.1\| (X05925) |
| | | | | | | | VRF 5 (293 AA) [Synechococcus PCC6301] |
| 2838 | LIB3602-050-Q6-K1-G1 | 6598335 | BLASTX | 234 | 2.00E−19 | 46 | (AC002329) putative glucanase [Arabidopsis |
| | | | | | | | thaliana] |
| 2839 | LIB3602-092-Q6-K6-H11 | 4662633 | BLASTX | 236 | 2.00E−19 | 35 | (AC007267) hypothetical protein [Arabidopsis |
| | | | | | | | thaliana] |
| 2840 | LIB3602-062-Q6-K1-B6 | 4510386 | BLASTX | 262 | 1.00E−22 | 53 | (AC007017) unknown protein [Arabidopsis |
| | | | | | | | thaliana] |
| 2841 | LIB3602-029-Q6-K1-F1 | 6706420 | BLASTX | 710 | 4.00E−75 | 80 | (AL133248) 40S ribosomal protein S2 homolog |
| | | | | | | | [Arabidopsis thaliana] |
| 2842 | LIB3602-044-Q6-K1-B8 | 6587806 | BLASTX | 187 | 8.00E−14 | 40 | (AC010924) Contains similarity to gb\|M82916 |
| | | | | | | | MRS2 protein from Saccharomyces cerivisae. ESTs |
| | | | | | | | gb\|N96043, gb\|AI998651, gb\|AA585850, |
| | | | | | | | gb\|T42027 come from this gene. [Arabidopsis |
| | | | | | | | thaliana] |
| 2843 | LIB3602-037-Q6-K1-A6 | 1076668 | BLASTX | 418 | 5.00E−41 | 75 | NADH dehydrogenase (ubiquinone) (EC 1.6.5.3) |
| | | | | | | | flavoprotein 1 precursor - potato |
| | | | | | | | >gi\|639834\|emb\|CAA58823.1\| (X83999) NADH |
| | | | | | | | dehydrogenase [Solanum tuberosum] |
| 2844 | LIB3602-080-Q6-K6-F2 | 3024121 | BLASTX | 147 | 2.00E−09 | 60 | S-ADENOSYLMETHIONINE SYNTHETASE |
| | | | | | | | (METHIONINE ADENOSYLTRANSFERASE) |
| | | | | | | | (ADOMET SYNTHETASE) |
| | | | | | | | >gi\|1724104\|gb\|AAB38500.1\| (U79767) methionine |
| | | | | | | | adenosyltransferase [Mesembryanthemum |
| | | | | | | | crystallinum] |
| 2845 | LIB3602-058-Q6-K1-D12 | 7300654 | BLASTN | 33 | 6.00E−09 | 90 | Drosophila melanogaster genomic scaffold |
| | | | | | | | 142000013386035 section 57 of 105, complete |
| | | | | | | | sequence |
| 2846 | LIB3602-077-Q6-K6-D3 | 3334490 | BLASTX | 173 | 2.00E−12 | 66 | DNA-DIRECTED RNA POLYMERASES I, II, |
| | | | | | | | AND III 7.3 KD POLYPEPTIDE (ABC10-ALPHA) |
| | | | | | | | >gi\|7490493\|pir\|\|T39794 DNA-directed RNA |
| | | | | | | | polymerases i, ii, and iii 7.3 kd polypeptide(abc10- |
| | | | | | | | alpha) - fission yeast (Schizosaccharomyces pombe) |
| | | | | | | | >gi\|2529253\|dbj\|BAA22807.1\| (D8963 |
| 2847 | LIB3602-111-Q1-K1-A6 | 7447234 | BLASTX | 181 | 5.00E−13 | 77 | probable iron-sulfur cofactor synthesis protein |
| | | | | | | | F6H11.150 - Arabidopsis thaliana |
| | | | | | | | >gi\|2827713\|emb\|CAA16686.1\| (AL021684) |
| | | | | | | | pyridoxal-phosphate-dependent aminotransferase - |
| | | | | | | | like protein [Arabidopsis thaliana] |
| | | | | | | | >gi\|6686815\|emb\|CAB64727.1\| (AJ243393) nifS- |
| | | | | | | | like p |
| 2848 | LIB3602-057-Q6-K1-E3 | 7437271 | BLASTX | 396 | 4.00E−38 | 64 | UDPglucose 4-epimerase (EC 5.1.3.2) (clone |
| | | | | | | | GEPI42) - guar >gi\|3021355\|emb\|CAA06338.1\| |
| | | | | | | | (AJ005081) UDP-galactose 4-epimerase |
| | | | | | | | [Cyamopsis tetragonoloba] |
| 2849 | LIB3602-030-Q6-K1-A10 | 2982272 | BLASTX | 256 | 6.00E−22 | 44 | (AF051220) hypothetical protein [Picea mariana] |
| 2850 | LIB3602-054-Q6-K1-G10 | 6735326 | BLASTX | 377 | 4.00E−36 | 70 | (AL137081) phenylalanine-tRNA synthetase-like |
| | | | | | | | protein [Arabidopsis thaliana] |
| 2851 | LIB3602-108-Q1-K1-C11 | 322386 | BLASTX | 158 | 1.00E−10 | 69 | chlorophyll a/b-binding protein - green alga |
| | | | | | | | (Pyrobotrys stellata) >gi\|18254\|emb\|CAA49209.1\| |
| | | | | | | | (X69434) a/b binding protein [Pyrobotrys stellata] |
| 2852 | LIB3602-065-Q1-K6-A2 | 2661048 | BLASTX | 147 | 5.00E−09 | 36 | (AF035293) similar to lysophospholipase [Homo |
| | | | | | | | sapiens] |
| 2853 | LIB3602-114-Q1-K1-E11 | 1345933 | BLASTX | 350 | 2.00E−34 | 69 | CITRATE SYNTHASE, GLYOXYSOMAL |
| | | | | | | | PRECURSOR (GCS) >gi\|1084323\|pir\|\|S53007 |
| | | | | | | | citrate synthase - cucurbit |
| | | | | | | | >gi\|975633\|dbj\|BAA07328.1\| (D38132) |
| | | | | | | | glyoxysomal citrate synthase [Cucurbita sp.] |
| 2854 | LIB3602-021-Q6-K1-G6 | 4139218 | BLASTX | 319 | 1.00E−29 | 68 | (AF104631) light harvesting complex II protein |
| | | | | | | | precursor [Chlamydomonas reinhardtii] |
| 2855 | LIB3602-114-Q1-K1-D5 | 2499503 | BLASTX | 478 | 1.00E−48 | 63 | PHOSPHOGLYCERATE KINASE |
| 2856 | LIB3602-103-Q1-K1-A5 | 7506763 | BLASTX | 350 | 2.00E−45 | 72 | hypothetical protein R166.2 - Caenorhabditis |
| | | | | | | | elegans >gi\|3879192\|emb\|CAA90663.1\| (Z50795) |
| | | | | | | | weak similarity with yeast cat8 regulatory protein |
| | | | | | | | (Swiss Prot accession number P39113); cDNA EST |
| | | | | | | | EMBL: Z14554 comes from this gene; cDNA EST |
| | | | | | | | EMBL: T02057 comes from t |
| 2857 | LIB3602-103-Q1-K1-A10 | 4389317 | BLASTX | 226 | 1.00E−18 | 66 | Chain A, Nucleoside Diphosphate Kinase Isoform B |
| | | | | | | | From Bovine Retina >gi\|4389318\|pdb\|1BE4\|B |
| | | | | | | | Chain B, Nucleoside Diphosphate Kinase Isoform B |
| | | | | | | | From Bovine Retina |
| 2858 | LIB3602-027-Q6-K1-A5 | 4914683 | BLASTX | 239 | 8.00E−20 | 33 | (AF067728) transactivating protein BRIDGE |
| | | | | | | | [Rattus norvegicus] |
| 2859 | LIB3602-046-Q6-K1-A7 | 7473075 | BLASTX | 305 | 4.00E−28 | 62 | isocitrate lyase - Deinococcus radiodurans (strain |
| | | | | | | | R1) >gi\|6458545\|gb\|AAF10407.1\|AE001937_3 |
| | | | | | | | (AE001937) isocitrate lyase [Deinococcus |
| | | | | | | | radiodurans] |
| 2860 | LIB3602-057-Q6-K1-D3 | 7436714 | BLASTX | 524 | 3.00E−53 | 69 | acetolactate synthase (EC 4.1.3.18) - |
| | | | | | | | Chlamydomonas reinhardtii |
| | | | | | | | >gi\|2906139\|gb\|AAC03784.1\| (AF047459) |
| | | | | | | | acetolactate synthase [Chlamydomonas reinhardtii] |
| 2861 | LIB3602-101-Q1-K1-H11 | 3882355 | BLASTX | 159 | 1.00E−10 | 72 | (U92460) 12-oxophytodienoate reductase OPR1 |
| | | | | | | | [Arabidopsis thaliana] |
| | | | | | | | >gi\|6143902\|gb\|AAF04448.1\|AC010718_17 |
| | | | | | | | (AC010718) 12-oxophytodienoate reductase |
| | | | | | | | (OPR1) [Arabidopsis thaliana] |
| 2862 | LIB3602-011-Q6-K1-H11 | 6648019 | BLASTX | 301 | 4.00E−27 | 39 | HYPOTHETICAL 45.2 KD PROTEIN RV2685 |
| | | | | | | | >gi\|7477890\|pir\|\|H70528 probable arsB protein - |
| | | | | | | | Mycobacterium tuberculosis (strain H37RV) |
| | | | | | | | >gi\|2181976\|emb\|CAB09476.1\| (Z96072) arsB |
| | | | | | | | [Mycobacterium tuberculosis] |
| 2863 | LIB3602-055-Q6-K1-E4 | 7362763 | BLASTX | 401 | 7.00E−39 | 57 | (AL162651) dTDP-glucose 4-6-dehydratase |
| | | | | | | | homolog D18 [Arabidopsis thaliana] |
| 2864 | LIB3602-115-Q1-K1-F6 | 7488693 | BLASTX | 545 | 1.00E−55 | 65 | phosphate transport protein G7, mitochondrial - |
| | | | | | | | soybean >gi\|3318611\|dbj\|BAA31582.1\| |
| | | | | | | | (AB016063) mitochondrial phosphate transporter |
| | | | | | | | [Glycine max] |
| 2865 | LIB3602-047-Q6-K1-E11 | 2500074 | BLASTX | 757 | 1.00E−80 | 89 | GTP-BINDING PROTEIN YPTC4 |
| | | | | | | | >gi\|1363474\|pir\|\|JC4106 GTP-binding protein |
| | | | | | | | yptC4 - Chlamydomonas reinhardtii |
| | | | | | | | >gi\|806722\|gb\|AAA82726.1\| (U13167) YptC4 |
| | | | | | | | [Chlamydomonas reinhardtii] |
| 2866 | LIB3602-077-Q6-K6-E11 | 6686798 | BLASTX | 242 | 4.00E−20 | 43 | (AJ242481) FKBP like protein [Arabidopsis |
| | | | | | | | thaliana] |
| 2867 | LIB3602-028-Q6-K1-D2 | 281003 | BLASTX | 148 | 3.00E−09 | 38 | T-complex protein 10c (C3H allele) - mouse |
| 2868 | LIB3602-055-Q6-K1-E9 | 3962377 | BLASTX | 480 | 4.00E−48 | 57 | (AJ002551) heat shock protein 70 [Arabidopsis |
| | | | | | | | thaliana] |
| 2869 | LIB3602-064-Q1-K6-E5 | 2829916 | BLASTX | 160 | 2.00E−10 | 51 | (AC002291) Unknown protein [Arabidopsis |
| | | | | | | | thaliana] |
| 2870 | LIB3602-004-Q1-K1-G11 | 7441896 | BLASTX | 415 | 2.00E−40 | 54 | heat shock protein 90 homolog T22A6.20 - |
| | | | | | | | Arabidopsis thaliana |
| | | | | | | | >gi\|5051761\|emb\|CAB45054.1\| (AL078637) |
| | | | | | | | HSP90-like protein [Arabidopsis thaliana] |
| | | | | | | | >gi\|7269269\|emb\|CAB79329.1\| (AL161561) |
| | | | | | | | HSP90-like protein [Arabidopsis thaliana] |
| 2871 | LIB3602-063-Q1-K6-B1 | 7487954 | BLASTX | 155 | 4.00E−10 | 65 | microfibril-associated protein homolog T15F16.8 - |
| | | | | | | | Arabidopsis thaliana |
| | | | | | | | >gi\|2565010\|gb\|AAB81880.1\|AAB81880 |
| | | | | | | | (AC002983) putative microfibril-associated protein |
| | | | | | | | [Arabidopsis thaliana] |
| | | | | | | | >gi\|3377811\|gb\|AAC28184.1\| (AF076275) contains |
| | | | | | | | similarity to ATP synthase B |
| 2872 | LIB3602-019-Q6-K1-C6 | 2267084 | BLASTX | 149 | 3.00E−15 | 72 | (AF007889) calmodulin [Symbiodinium |
| | | | | | | | microadriaticum] |
| 2873 | LIB3602-068-Q1-K1-A2 | 7471620 | BLASTX | 185 | 2.00E−13 | 41 | conserved hypothetical protein - Deinococcus |
| | | | | | | | radiodurans (strain R1) |
| | | | | | | | >gi\|6458247\|gb\|AAF10133.1\|AE001913_7 |
| | | | | | | | (AE001913) conserved hypothetical protein |
| | | | | | | | [Deinococcus radiodurans] |
| 2874 | LIB3602-088-Q6-K6-H1 | 4416330 | BLASTX | 305 | 1.00E−27 | 70 | (AF105295) S-adenosyl-homocysteine hydrolase |
| | | | | | | | like protein; SAHH-like protein [Alexandrium |
| | | | | | | | fundyense] |
| 2875 | LIB3602-003-Q1-K1-A10 | 464849 | BLASTX | 872 | 5.00E−94 | 93 | TUBULIN ALPHA CHAIN >gi\|486847\|pir\|\|S36232 |
| | | | | | | | tubulin alpha chain - almond |
| | | | | | | | >gi\|20413\|emb\|CAA47635.1\| (X67162) alpha- |
| | | | | | | | tubulin [Prunus dulcis] |
| 2876 | LIB3602-108-Q1-K1-F2 | 461999 | BLASTX | 587 | 8.00E−61 | 81 | ELONGATION FACTOR G, CHLOROPLAST |
| | | | | | | | PRECURSOR (EF-G) |
| 2877 | LIB3602-076-Q6-K6-H11 | 2982245 | BLASTX | 276 | 4.00E−24 | 49 | (AF051205) hypothetical protein [Picea mariana] |
| 2878 | LIB3602-029-Q6-K1-C6 | 322525 | BLASTX | 610 | 2.00E−63 | 69 | omnipotent suppressor protein SUP1 homolog |
| | | | | | | | (clone A18) - Arabidopsis thaliana (fragment) |
| | | | | | | | >gi\|16512\|emb\|CAA49171.1\| (X69374) similar to |
| | | | | | | | yeast omnipotent suppressor protein SUP1 |
| | | | | | | | (SUP45); ORF [Arabidopsis thaliana] |
| 2879 | LIB3602-068-Q1-K1-G12 | 7327817 | BLASTX | 171 | 8.00E−12 | 32 | (AL161946) putative protein [Arabidopsis thaliana] |
| 2880 | LIB3602-007-Q1-K1-G3 | 6651387 | BLASTN | 41 | 7.00E−14 | 84 | Cloning vector pDDB57 complete sequence |
| 2881 | LIB3602-104-Q1-K1-B10 | 7488813 | BLASTX | 278 | 2.00E−24 | 33 | import intermediate-associated 100K protein |
| | | | | | | | precursor - garden pea |
| | | | | | | | >gi\|1495768\|emb\|CAA92823.1\| (Z68506) |
| | | | | | | | chloroplast inner envelope protein, 110 kD |
| | | | | | | | (IEP110) [Pisum sativum] |
| 2882 | LIB3602-050-Q6-K1-C11 | 4375938 | BLASTX | 178 | 9.00E−13 | 44 | (AL031055) dH28H20.1 (similar to membrane |
| | | | | | | | transport protein) [Homo sapiens] |
| 2883 | LIB3602-081-Q6-K6-F7 | 6677681 | BLASTX | 280 | 2.00E−47 | 52 | retinoblastoma binding protein 4 |
| | | | | | | | >gi\|2494893\|sp\|Q60972\|RB48_MOUSE |
| | | | | | | | CHROMATIN ASSEMBLY FACTOR 1 P48 |
| | | | | | | | SUBUNIT (CAF-1 P48 SUBUNIT) |
| | | | | | | | (RETINOBLASTOMA BINDING PROTEIN P48) |
| | | | | | | | (RETINOBLASTOMA-BINDING PROTEIN 4) |
| | | | | | | | >gi\|2137734\|pir\|\|I49366 G1/S transition control |
| | | | | | | | protein-b |
| 2884 | LIB3602-120-Q1-K1-D4 | 3915851 | BLASTX | 202 | 1.00E−15 | 61 | CHLOROPLAST 30S RIBOSOMAL PROTEIN |
| | | | | | | | S10 >gi\|3603070\|gb\|AAC35731.1\| (AF041468) |
| | | | | | | | ribosomal protein S10 [Guillardia theta] |
| 2885 | LIB3602-020-Q6-K1-F3 | 6911549 | BLASTX | 517 | 1.00E−52 | 87 | (AJ249329) heat shock protein 70 [Cucumis |
| | | | | | | | sativus] |
| 2886 | LIB3602-054-Q6-K1-A4 | 4741966 | BLASTX | 206 | 5.00E−16 | 54 | (AF134133) Li13 protein [Arabidopsis thaliana] |
| 2887 | LIB3602-007-Q1-K1-G5 | 7302240 | BLASTX | 344 | 5.00E−32 | 49 | (AE003787) CG10417 gene product [Drosophila |
| | | | | | | | melanogaster] |
| 2888 | LIB3602-051-Q6-K1-G12 | 7304024 | BLASTX | 178 | 1.00E−12 | 41 | (AE003836) CG14750 gene product [Drosophila |
| | | | | | | | melanogaster] |
| 2889 | LIB3602-011-Q6-K1-H1 | 1174844 | BLASTX | 278 | 2.00E−24 | 53 | UBIQUITIN-CONJUGATING ENZYME E2-17 |
| | | | | | | | KD 2 (UBIQUITIN-PROTEIN LIGASE 2) |
| | | | | | | | (UBIQUITIN CARRIER PROTEIN 2) |
| | | | | | | | >gi\|1076426\|pir\|\|S43783 ubiquitin-conjugating |
| | | | | | | | enzyme UBC2 - Arabidopsis thaliana |
| | | | | | | | >gi\|431264\|gb\|AAA32899.1\| (L19353) ubiquitin |
| | | | | | | | conjugating enzyme [Arabidopsi |
| 2890 | LIB3602-079-Q6-K6-H2 | 7542542 | BLASTX | 221 | 1.00E−17 | 91 | (AF238866) LNR42 [Mus musculus] |
| 2891 | LIB3602-035-Q1-K1-B8 | 7301359 | BLASTX | 145 | 7.00E−09 | 41 | (AE003752) BcDNA: LD22548 gene product |
| | | | | | | | [Drosophila melanogaster] |
| 2892 | LIB3602-107-Q1-K1-E10 | 1346802 | BLASTX | 444 | 8.00E−44 | 60 | PROFILIN 1 >gi\|1076516\|pir\|\|S49351 profilin 1 - |
| | | | | | | | kidney bean >gi\|556836\|emb\|CAA57508.1\| |
| | | | | | | | (X81982) profilin [Phaseolus vulgaris] |
| 2893 | LIB3602-102-Q1-K1-D6 | 135099 | BLASTX | 447 | 2.00E−51 | 65 | ASPARTYL-TRNA SYNTHETASE |
| | | | | | | | (ASPARTATE--TRNA LIGASE) (ASPRS) |
| | | | | | | | >gi\|68531\|pir\|\|SYRTDT aspartate-tRNA ligase (EC |
| | | | | | | | 6.1.1.12) - rat >gi\|203066\|gb\|AAA40789.1\| |
| | | | | | | | (J04487) aspartyl-tRNA synthetase [Rattus |
| | | | | | | | norvegicus] >gi\|1773257\|gb\|AAC52981.1\| |
| | | | | | | | (U30812) aspartyl-tRNA sy |
| 2894 | LIB3602-039-Q6-K1-A2 | 6437556 | BLASTX | 343 | 6.00E−32 | 38 | (AC011623) unknown protein [Arabidopsis |
| | | | | | | | thaliana] |
| 2895 | LIB3602-027-Q6-K1-E11 | 3915866 | BLASTX | 404 | 3.00E−39 | 54 | GLUTAMINYL-TRNA SYNTHETASE |
| | | | | | | | (GLUTAMINE- TRNA LIGASE) (GLNRS) |
| | | | | | | | >gi\|7437754\|pir\|\|T09643 glutamine- tRNA ligase |
| | | | | | | | (EC 6.1.1.18) - yellow lupine |
| | | | | | | | >gi\|2995455\|emb\|CAA62901.1\| (X91787) tRNA- |
| | | | | | | | glutamine synthetase [Lupinus luteus] |
| 2896 | LIB3602-085-Q6-K1-B11 | 132917 | BLASTX | 189 | 2.00E−16 | 52 | 60S RIBOSOMAL PROTEIN L35 |
| | | | | | | | >gi\|71362\|pir\|\|R5RT35 ribosomal protein L35 - rat |
| | | | | | | | >gi\|57702\|emb\|CAA36001.1\| (X51705) ribosomal |
| | | | | | | | protein L35 (AA 1-123) [Rattus rattus] |
| 2897 | LIB3602-036-Q6-K1-E6 | 3287875 | BLASTX | 170 | 1.00E−11 | 40 | PROBABLE TETRAACYLDISACCHARIDE 4′- |
| | | | | | | | KINASE (LIPID A 4′-KINASE) |
| | | | | | | | >gi\|290802\|gb\|AAD15238.1\| (L17003) valB gene |
| | | | | | | | product [Francisella tularensis var. novicida] |
| 2898 | LIB3602-038-Q6-K1-E10 | 115827 | BLASTX | 336 | 3.00E−31 | 80 | CHLOROPHYLL A-B BINDING PROTEIN OF |
| | | | | | | | LHCII TYPE I PRECURSOR (CAB) (LHCP) |
| | | | | | | | >gi\|99383\|pir\|\|A31392 chlorophyll a/b-binding |
| | | | | | | | protein - Chlamydomonas reinhardtii |
| | | | | | | | >gi\|167409\|gb\|AAA33082.1\| (M24072) chlorophyll |
| | | | | | | | a/b-binding protein [Chlamydomonas reinhardtii] |
| 2899 | LIB3602-065-Q1-K6-B10 | 7441879 | BLASTX | 627 | 2.00E−65 | 79 | dnaK-type molecular chaperone HSC70-11, |
| | | | | | | | mitochondrial - spinach |
| | | | | | | | >gi\|2654212\|gb\|AAB91473.1\| (AF035458) heat |
| | | | | | | | shock 70 protein [Spinacia oleracea] |
| | | | | | | | >gi\|2773052\|gb\|AAB96660.1\| (AF039084) heat |
| | | | | | | | shock 70 protein [Spinacia oleracea] |
| 2900 | LIB3602-016-Q6-K1-B10 | 7489392 | BLASTX | 216 | 3.00E−17 | 45 | N-carbamyl-L-amino acid amidohydrolase homolog - |
| | | | | | | | barley (fragment) >gi\|2695925\|emb\|CAA10981.1\| |
| | | | | | | | (AJ222776) hypothetical protein [Hordeum vulgare] |
| 2901 | LIB3602-036-Q6-K1-F2 | 1177368 | BLASTN | 33 | 5.00E−09 | 87 | Z. mays mRNA for ribosomal protein L39 |
| 2902 | LIB3602-102-Q1-K1-G6 | 4056502 | BLASTX | 183 | 2.00E−13 | 55 | (AC005896) 40S ribosomal protein S5 [Arabidopsis |
| | | | | | | | thaliana] |
| 2903 | LIB3602-077-Q6-K6-C9 | 7301524 | BLASTX | 631 | 1.00E−65 | 61 | (AE003758) CG6309 gene product [Drosophila |
| | | | | | | | melanogaster] |
| 2904 | LIB3602-017-Q6-K1-E5 | 6681113 | BLASTX | 259 | 3.00E−22 | 36 | cytochrome P450, steroid inducible 3a11 |
| | | | | | | | >gi\|5921911\|sp\|Q64459\|CP3B_MOUSE |
| | | | | | | | CYTOCHROME P450 3A11 (CYPIIIA11) (P- |
| | | | | | | | 450IIIAM1) (P-450UT) >gi\|2117381\|pir\|\|A60564 |
| | | | | | | | cytochrome P450 3A11 - mouse |
| | | | | | | | >gi\|50535\|emb\|CAA42981.1\| (X60452) cytochrome |
| | | | | | | | P-450IIIA [Mus musculus] |
| 2905 | LIB3602-118-Q1-K1-A10 | 6016708 | BLASTX | 216 | 5.00E−17 | 37 | (AC009325) putative protein kinase [Arabidopsis |
| | | | | | | | thaliana] |
| 2906 | LIB3602-078-Q6-K6-H1 | 5852164 | BLASTX | 192 | 2.00E−18 | 43 | (AJ249389) vacuolar ATPase subunit H [Manduca |
| | | | | | | | sexta] |
| 2907 | LIB3602-105-Q1-K1-G11 | 1174853 | BLASTX | 335 | 5.00E−31 | 48 | UBIQUITIN-CONJUGATING ENZYME E2-18 |
| | | | | | | | KD (UBIQUITIN-PROTEIN LIGASE) |
| | | | | | | | (UBIQUITIN CARRIER PROTEIN) (PM42) |
| | | | | | | | >gi\|481811\|pir\|\|S39483 ubiquitin-conjugating |
| | | | | | | | enzyme UBC2-1 - Arabidopsis thaliana |
| | | | | | | | >gi\|22658\|emb\|CAA48378.1\| (X68306) ubiquitin- |
| | | | | | | | conjugating enzyme [Arabidop |
| 2908 | LIB3602-107-Q1-K1-H4 | 3478700 | BLASTX | 236 | 2.00E−19 | 39 | (AF034387) AFT protein [Arabidopsis thaliana] |
| 2909 | LIB3602-061-Q6-K1-B9 | 2791900 | BLASTX | 213 | 8.00E−17 | 47 | (AJ000057) PP7 [Arabidopsis thaliana] |
| 2910 | LIB3602-032-Q6-K1-F2 | 1945479 | BLASTX | 174 | 2.00E−12 | 65 | (U96178) fructose-bisphosphate aldolase |
| | | | | | | | [Onchocerca volvulus] |
| 2911 | LIB3602-102-Q1-K1-H2 | 7513277 | BLASTX | 550 | 3.00E−56 | 63 | probable transmembrane protein TMC - human |
| 2912 | LIB3602-105-Q1-K1-G4 | 6137575 | BLASTX | 185 | 2.00E−13 | 47 | Chain A, Structure And Characterization Of |
| | | | | | | | Ectothiorhodospira Vacuolata Cytochrome B558, A |
| | | | | | | | Prokaryotic Homologue Of Cytochrome B5 |
| | | | | | | | >gi\|5919159\|gb\|AAD56233.1\| (AF183259) |
| | | | | | | | cytochrome b558 [Ectothiorhodospira vacuolata] |
| 2913 | LIB3602-001-P1-K6-E3 | 7449902 | BLASTX | 172 | 2.00E−12 | 58 | probable 12-oxophytodienoate reductase (EC |
| | | | | | | | 1.3.1.42) CPRD8, drought-inducible - cowpea |
| | | | | | | | >gi\|1854443\|dbj\|BAA12160.1\| (D83970) CPRD8 |
| | | | | | | | protein [Vigna unguiculata] |
| 2914 | LIB3602-025-Q6-K1-E7 | 7019666 | BLASTX | 507 | 3.00E−51 | 58 | (AL132954) putative protein [Arabidopsis thaliana] |
| 2915 | LIB3602-062-Q6-K1-G9 | 7485705 | BLASTX | 421 | 4.00E−41 | 50 | hypothetical protein F18B3.240 - Arabidopsis |
| | | | | | | | thaliana >gi\|4835247\|emb\|CAB42925.1\| |
| | | | | | | | (AL049862) putative tRNA synthetase [Arabidopsis |
| | | | | | | | thaliana] |
| 2916 | LIB3602-047-Q6-K1-G10 | 7486272 | BLASTX | 532 | 3.00E−54 | 62 | hypothetical protein F28A21.220 - Arabidopsis |
| | | | | | | | thaliana >gi\|4539400\|emb\|CAB37466.1\| |
| | | | | | | | (AL035526) putative protein [Arabidopsis thaliana] |
| | | | | | | | >gi\|7268675\|emb\|CAB78883.1\| (AL161549) |
| | | | | | | | putative protein [Arabidopsis thaliana] |
| 2917 | LIB3602-018-Q6-K1-B10 | 7486436 | BLASTX | 174 | 3.00E−12 | 28 | hypothetical protein F4I1.34 - Arabidopsis thaliana |
| 2918 | LIB3602-058-Q6-K1-H8 | 6630456 | BLASTX | 298 | 8.00E−27 | 45 | (AC007190) F23N19.15 [Arabidopsis thaliana] |
| 2919 | LIB3602-064-Q1-K6-D1 | 730456 | BLASTX | 218 | 2.00E−17 | 35 | 40S RIBOSOMAL PROTEIN S19 |
| 2920 | LIB3602-049-Q6-K1-G3 | 7259797 | BLASTX | 152 | 1.00E−09 | 29 | (AF216743) epsilon tubulin [Trypanosoma brucei] |
| 2921 | LIB3602-090-Q6-K6-C2 | 683699 | BLASTX | 151 | 2.00E−09 | 58 | (Z48229) orf2 [Saccharomyces cerevisiae] |
| 2922 | LIB3602-015-Q6-K1-B7 | 5453603 | BLASTX | 735 | 6.00E−78 | 70 | chaperonin containing TCP1, subunit 2 (beta) |
| | | | | | | | >gi\|6094436\|sp\|P78371\|TCPB_HUMAN T- |
| | | | | | | | COMPLEX PROTEIN 1, BETA SUBUNIT (TCP- |
| | | | | | | | 1-BETA) (CCT-BETA) |
| | | | | | | | >gi\|2559012\|gb\|AAC96012.1\| (AF026293) |
| | | | | | | | chaperonin containing t-complex polypeptide 1, |
| | | | | | | | beta subunit; CCT-beta [Homo sapie |
| 2923 | LIB3602-015-Q6-K1-B3 | 4105639 | BLASTX | 367 | 8.00E−35 | 74 | (AF049356) phytoene desaturase precursor [Oryza |
| | | | | | | | sativa] |
| 2924 | LIB3602-019-Q6-K1-G1 | 7433407 | BLASTX | 481 | 3.00E−48 | 79 | nifU protein homolog T24H24.11 - Arabidopsis |
| | | | | | | | thaliana >gi\|3377840\|gb\|AAC28213.1\| (AF075598) |
| | | | | | | | contains similarity to E. coli nitrogen fixation NIFU |
| | | | | | | | protein (GB: AE000339) [Arabidopsis thaliana] |
| | | | | | | | >gi\|7267164\|emb\|CAB77876.1\| (AL161499) |
| | | | | | | | putative NifU-like metall |
| 2925 | LIB3602-043-Q6-K1-C1 | 140161 | BLASTX | 172 | 4.00E−12 | 36 | HYPOTHETICAL 20.1 KD PROTEIN IN MOG- |
| | | | | | | | HTGA INTERGENIC REGION (ORF5) |
| | | | | | | | >gi\|1073400\|pir\|\|E56688 protein yaaH - Escherichia |
| | | | | | | | coli >gi\|41756\|emb\|CAA47931.1\| (X67700) ORF5 |
| | | | | | | | [Escherichia coli] >gi\|1786191\|gb\|AAC73121.1\| |
| | | | | | | | (AE000111) orf, hypothetical protein [Escherich |
| 2926 | -LIB3602-045-Q6-K1-F1 | 7491946 | BLASTX | 165 | 3.00E−11 | 41 | hypothetical protein SPCC622.19 - fission yeast |
| | | | | | | | (Schizosaccharomyces pombe) |
| | | | | | | | >gi\|4539271\|emb\|CAA21875.2\| (AL033127) |
| | | | | | | | hypothetical protein [Schizosaccharomyces pombe] |
| 2927 | LIB3602-039-Q6-K1-D4 | 7387549 | BLASTX | 600 | 3.00E−62 | 67 | ACETYLGLUTAMATE KINASE (NAG KINASE) |
| | | | | | | | (AGK) (N-ACETYL-L-GLUTAMATE 5- |
| | | | | | | | PHOSPHOTRANSFERASE) |
| | | | | | | | >gi\|7434572\|pir\|\|S77509 acetylglutamate kinase (EC |
| | | | | | | | 2.7.2.8) - Synechocystis sp. (strain PCC 6803) |
| | | | | | | | >gi\|1652434\|dbj\|BAA17356.1\| (D90905) N- |
| | | | | | | | acetylglutamate kinase [Synechoc |
| 2928 | LIB3602-113-Q1-K1-G12 | 3334201 | BLASTX | 223 | 7.00E−18 | 60 | GLYCINE CLEAVAGE SYSTEM H PROTEIN |
| | | | | | | | PRECURSOR >gi\|744170\|pir\|\|T12561 glycine |
| | | | | | | | cleavage system protein H precursor - common ice |
| | | | | | | | plant >gi\|1724106\|gb\|AAB38501.1\| (U79768) |
| | | | | | | | glycine cleavage system protein H precursor |
| | | | | | | | [Mesembryanthemum crystallinum] |
| 2929 | LIB3602-011-Q6-K1-B10 | 4006910 | BLASTX | 189 | 6.00E−14 | 44 | (Z99708) putative protein [Arabidopsis thaliana] |
| | | | | | | | >gi\|7270601\|emb\|CAB80319.1\| (AL161589) |
| | | | | | | | putative protein [Arabidopsis thaliana] |
| 2930 | LIB3602-111-Q1-K1-A11 | 7433421 | BLASTX | 254 | 1.00E−26 | 62 | 5-methyltetrahydrofolate--homocysteine S- |
| | | | | | | | methyltransferase (EC 2.1.1.13) - rat |
| | | | | | | | >gi\|3978143\|gb\|AAD05384.1\| (AF034214) |
| | | | | | | | methionine synthase; MS [Rattus norvegicus] |
| 2931 | LIB3602-071-Q1-K1-B6 | 6525170 | BLASTX | 515 | 2.00E−52 | 63 | (AF189278) ASF1 [Drosophila melanogaster] |
| | | | | | | | >gi\|7293763\|gb\|AAF49131.1\| (AE003516) asf1 |
| | | | | | | | gene product [Drosophila melanogaster] |
| 2932 | LIB3602-023-Q6-K1-G2 | 4104764 | BLASTX | 147 | 5.00E−09 | 50 | (AF039534) salicylate hydroxylase [Pseudomonas |
| | | | | | | | stutzeri] |
| 2933 | LIB3602-059-Q6-K1-G5 | 7434315 | BLASTX | 278 | 2.00E−24 | 44 | mitogen-activated protein kinase I (EC 2.7.1.—) - |
| | | | | | | | parsley >gi\|2231034\|emb\|CAA73323.1\| (Y12785) |
| | | | | | | | MAP kinase I [Petroselinum crispum] |
| 2934 | LIB3602-079-Q6-K6-F4 | 6692729 | BLASTX | 223 | 7.00E−18 | 46 | (AC012679) unknown protein [Arabidopsis |
| | | | | | | | thaliana] |
| 2935 | LIB3602-028-Q6-K1-H7 | 267147 | BLASTX | 336 | 3.00E−31 | 57 | DNA TOPOISOMERASE I >gi\|479841\|pir\|\|S35521 |
| | | | | | | | DNA topoisomerase (EC 5.99.1.2) I - fruit fly |
| | | | | | | | (Drosophila melanogaster) |
| | | | | | | | >gi\|158643\|gb\|AAA28951.1\| (M74557) |
| | | | | | | | topoisomerase I [Drosophila melanogaster] |
| | | | | | | | >gi\|1772834\|gb\|AAC24158.1\| (U80064) DNA |
| | | | | | | | topoisomerase I [Drosop |
| 2936 | LIB3602-056-Q6-K1-H3 | 7022048 | BLASTX | 182 | 3.00E−13 | 43 | (AK001028) unnamed protein product [Homo |
| | | | | | | | sapiens] |
| 2937 | LIB3602-103-Q1-K1-E8 | 7433412 | BLASTX | 462 | 5.00E−46 | 88 | nifU protein homolog TI0I14.50 - Arabidopsis |
| | | | | | | | thaliana >gi\|2832672\|emb\|CAA16772.1\| |
| | | | | | | | (AL021712) nifU-like protein [Arabidopsis |
| | | | | | | | thaliana] >gi\|7269067\|emb\|CAB79177.1\| |
| | | | | | | | (AL161556) nifU-like protein [Arabidopsis |
| | | | | | | | thaliana] |
| 2938 | LIB3602-027-Q6-K1-E1 | 1352458 | BLASTX | 471 | 5.00E−47 | 54 | INOSINE-5′-MONOPHOSPHATE |
| | | | | | | | DEHYDROGENASE (IMP DEHYDROGENASE) |
| | | | | | | | (IMPDH) (IMPD) >gi\|2117507\|pir\|\|JC4999 IMP |
| | | | | | | | dehydrogenase (EC 1.1.1.205) - Arabidopsis |
| | | | | | | | thaliana >gi\|1100063\|gb\|AAB41940.1\| (L34684) |
| | | | | | | | IMP dehydrogenase [Arabidopsis thaliana] |
| | | | | | | | >gi\|4835762\|gb\|AAD30229. |
| 2939 | LIB3602-095-Q6-K6-A4 | 7484827 | BLASTX | 228 | 2.00E−18 | 46 | brefeldin A-sensitive Golgi protein LDLC homolog |
| | | | | | | | F6I7.50 - Arabidopsis thaliana |
| | | | | | | | >gi\|4678263\|emb\|CAB41124.1\| (AL049657) |
| | | | | | | | brefeldin A-sensitive Golgi protein-like |
| | | | | | | | [Arabidopsis thaliana] |
| | | | | | | | >gi\|7269335\|emb\|CAB79394.1\| (AL161562) |
| | | | | | | | brefeldin A-sensitive Golgi prote |
| 2940 | LIB3602-057-Q6-K1-E8 | 7431479 | BLASTX | 287 | 4.00E−38 | 65 | methylmalonate-semialdehyde dehydrogenase |
| | | | | | | | (acylating) (EC 1.2.1.27) - fruit fly (Drosophila |
| | | | | | | | melanogaster) >gi\|2653397\|emb\|CAA15632.1\| |
| | | | | | | | (AL009147) /prediction = (method: ““genefinder””, |
| | | | | | | | version: ““084””, score: ““86.60””); |
| | | | | | | | /prediction = (method: ““genscan””, versio |
| 2941 | LIB3602-068-Q1-K1-H5 | 6175169 | BLASTX | 150 | 2.00E−09 | 42 | (AC011437) unknown protein [Arabidopsis |
| | | | | | | | thaliana] |
| 2942 | LIB3602-056-Q6-K1-D9 | 5902359 | BLASTX | 183 | 2.00E−13 | 40 | (AC009322) Heat-shock protein [Arabidopsis |
| | | | | | | | thaliana] |
| | | | | | | | >gi\|6453873\|gb\|AAF09057.1\|AC011717_24 |
| | | | | | | | (AC011717) putative heat-shock protein |
| | | | | | | | [Arabidopsis thaliana] |
| 2943 | LIB3602-071-Q1-K1-H11 | 7484809 | BLASTX | 264 | 1.00E−22 | 32 | ankyrin repeat-containing protein 2 - Arabidopsis |
| | | | | | | | thaliana >gi\|5830787\|emb\|CAB54873.1\| |
| | | | | | | | (AL117188) ankyrin repeat-containing protein 2 |
| | | | | | | | [Arabidopsis thaliana] |
| | | | | | | | >gi\|7270496\|emb\|CAB80261.1\| (AL161587) |
| | | | | | | | ankyrin repeat-containing protein 2 [Arabidopsis |
| | | | | | | | thaliana] |
| 2944 | LIB3602-004-Q1-K1-D10 | 4138880 | BLASTN | 38 | 1.00E−11 | 88 | Scenedesmus obliquus plastocyanin (Pcy) gene, |
| | | | | | | | Pcy-1 allele, complete cds |
| 2945 | LIB3602-049-Q6-K1-C1 | 4138881 | BLASTX | 309 | 5.00E−28 | 46 | (AF114235) plastocyanin [Scenedesmus obliquus] |
| 2946 | LIB3602-007-Q1-K1-G8 | 3461884 | BLASTX | 145 | 4.00E−09 | 61 | (AB006082) phosphoribosyl-ATP |
| | | | | | | | pyrophosphohydrolase [Arabidopsis thaliana] |
| | | | | | | | >gi\|3461886\|dbj\|BAA32529.1\| (AB006083) |
| | | | | | | | phosphoribosyl-ATP pyrophosphohydrolase |
| | | | | | | | [Arabidopsis thaliana] |
| 2947 | LIB3602-048-Q6-K1QA-A8 | 4966344 | BLASTX | 157 | 3.00E−10 | 44 | (AC006341) ESTs gb\|F15498, gb\|H37515, |
| | | | | | | | gb\|T41906, gb\|T22448, gb\|W43356 and gb\|T20739 |
| | | | | | | | come from this gene. [Arabidopsis thaliana] |
| 2948 | LIB3602-018-Q6-K1-F3 | 417540 | BLASTX | 449 | 2.00E−44 | 61 | PYRROLINE-5-CARBOXYLATE REDUCTASE |
| | | | | | | | (P5CR) (P5C REDUCTASE) |
| | | | | | | | >gi\|7431797\|pir\|\|T06477 probable pyrroline-5- |
| | | | | | | | carboxylate reductase (EC 1.5.1.2) - garden pea |
| | | | | | | | >gi\|20851\|emb\|CAA44646.1\| (X62842) pyrroline |
| | | | | | | | carboxylate reductase [Pisum sativum] |
| | | | | | | | >gi\|445614\|prf\|\|190936 |
| 2949 | LIB3602-046-Q6-K1-C5 | 7635782 | BLASTX | 280 | 1.00E−24 | 51 | (AL353819) 2,5-diketo-D-gluconic acid reductase |
| | | | | | | | related protein [Neurospora crassa] |
| 2950 | LIB3602-107-Q1-K1-F8 | 7487148 | BLASTX | 484 | 2.00E−48 | 59 | hypothetical protein T18E12.21 - Arabidopsis |
| | | | | | | | thaliana >gi\|3548818\|gb\|AAC34490.1\| (AC005313) |
| | | | | | | | unknown protein [Arabidopsis thaliana] |
| 2951 | LIB3602-102-Q1-K1-H4 | 7206593 | BLASTX | 280 | 6.00E−34 | 59 | (AC006608) similar to synaptic glycoprotein SC2 |
| | | | | | | | [Caenorhabditis elegans] |
| 2952 | LIB3602-117-Q1-K1-B12 | 70640 | BLASTX | 223 | 1.00E−18 | 100 | ubiquitin precursor - Trypanosoma cruzi (fragment) |
| | | | | | | | >gi\|10674\|emb\|CAA30334.1\| (X07451) ubiquitin |
| | | | | | | | fusion protein (78 AA) [Trypanosoma cruzi] |
| 2953 | LIB3602-120-Q1-K1-G10 | 1362064 | BLASTX | 369 | 6.00E−52 | 79 | GTP-binding protein - garden pea |
| | | | | | | | >gi\|871514\|emb\|CAA90079.1\| (Z49899) small G |
| | | | | | | | protein [Pisum sativum] |
| 2954 | LIB3602-095-Q6-K6-E12 | 6094211 | BLASTX | 248 | 7.00E−21 | 73 | PROBABLE SMALL NUCLEAR |
| | | | | | | | RIBONUCLEOPROTEIN G (SNRNP-G) (SM |
| | | | | | | | PROTEIN G) >gi\|3738322\|gb\|AAC63663.1\| |
| | | | | | | | (AC005170) putative small nuclear |
| | | | | | | | ribonucleoprotein G [Arabidopsis thaliana] |
| 2955 | LIB3602-112-Q1-K1-E10 | 3122684 | BLASTX | 368 | 7.00E−35 | 61 | 50S RIBOSOMAL PROTEIN L18 |
| | | | | | | | >gi\|2446905\|dbj\|BAA22464.1\| (AB000111) 50S |
| | | | | | | | ribosomal protein L18 [Synechococcus sp.] |
| 2956 | LIB3602-028-Q6-K1-B2 | 4544445 | BLASTX | 154 | 6.00E−10 | 57 | (AC006592) putative pyrophosphate--fructose-6- |
| | | | | | | | phosphate 1-phosphotransferase [Arabidopsis |
| | | | | | | | thaliana] |
| 2957 | LIB3602-067-Q1-K1-C1 | 5803265 | BLASTX | 227 | 2.00E−18 | 48 | (AP000399) similar to protein arginine N-methyl |
| | | | | | | | transferase 1 (Q63009) [Oryza sativa] |
| 2958 | LIB3602-047-Q6-K1-F6 | 3915072 | BLASTX | 266 | 4.00E−23 | 68 | PROBABLE METHIONYL-TRNA |
| | | | | | | | SYNTHETASE (METHIONINE--TRNA LIGASE) |
| | | | | | | | (METRS) >gi\|7504593\|pir\|\|T22898 hypothetical |
| | | | | | | | protein F58B3.5 - Caenorhabditis elegans |
| | | | | | | | >gi\|3877884\|emb\|CAA97803.1\| (Z73427) Similarity |
| | | | | | | | to Yeast methionyl-tRNA synthetase |
| | | | | | | | (SW: SYMC_YEAST); cDNA EST |
| 2959 | LIB3602-028-Q6-K1-A3 | 2109293 | BLASTX | 322 | 1.00E−29 | 58 | (U97568) serine/threonine protein kinase |
| | | | | | | | [Arabidopsis thaliana] |
| 2960 | LIB3602-065-Q1-K6-D3 | 7488039 | BLASTX | 325 | 4.00E−30 | 55 | probable ABC-type transport protein T23J7.100 - |
| | | | | | | | Arabidopsis thaliana |
| | | | | | | | >gi\|4741194\|emb\|CAB41860.1\| (AL049746) ABC |
| | | | | | | | transporter-like protein [Arabidopsis thaliana] |
| 2961 | LIB3602-080-Q6-K6-F3 | 120715 | BLASTX | 341 | 9.00E−32 | 72 | GLYCERALDEHYDE 3-PHOSPHATE |
| | | | | | | | DEHYDROGENASE (GAPDH) |
| | | | | | | | >gi\|66006\|pir\|\|DEKZGR glyceraldehyde-3- |
| | | | | | | | phosphate dehydrogenase (EC 1.2.1.12) - yeast |
| | | | | | | | (Zygosaccharomyces rouxii) |
| | | | | | | | >gi\|218529\|dbj\|BAA00081.1\| (D00134) |
| | | | | | | | glyceraldehyde-3-phosphate dehydrogenase |
| | | | | | | | [Zygosaccharomyce |
| 2962 | LIB3602-094-Q6-K6-C6 | 3913467 | BLASTX | 158 | 2.00E−10 | 57 | DFRA PROTEIN >gi\|2736191\|gb\|AAB97678.1\| |
| | | | | | | | (AF025847) DfrA [Myxococcus xanthus] |
| 2963 | LIB3602-009-Q6-K1-C3 | 2494266 | BLASTX | 513 | 5.00E−52 | 68 | GTP-BINDING PROTEIN LEPA |
| | | | | | | | >gi\|7443608\|pir\|\|S76959 GTP-binding membrane |
| | | | | | | | protein lepA - Synechocystis sp. (strain PCC 6803) |
| | | | | | | | >gi\|1653961\|dbj\|BAA18871.1\| (D90917) LepA |
| | | | | | | | [Synechocystis sp.] |
| 2964 | LIB3602-037-Q6-K1-H7 | 4966352 | BLASTX | 273 | 6.00E−24 | 42 | (AC006341) >F3O9.11 [Arabidopsis thaliana] |
| 2965 | LIB3602-015-Q6-K1-B10 | 7495172 | BLASTX | 250 | 2.00E−21 | 47 | hypothetical protein C02B10.1 - Caenorhabditis |
| | | | | | | | elegans >gi\|2702376\|gb\|AAB92016.1\| (AF038605) |
| | | | | | | | Similar to acyl-CoA dehydrogenase; coded for by |
| | | | | | | | C. elegans cDNA yk58h2.3; coded for by C. elegans |
| | | | | | | | cDNA yk466c12.3; coded for by C. elegans cDNA |
| | | | | | | | yk258d6.3; coded f |
| 2966 | LIB3602-007-Q1-K1-E1 | 7493715 | BLASTX | 362 | 4.00E−34 | 36 | WD repeat protein - fission yeast |
| | | | | | | | (Schizosaccharomyces pombe) |
| | | | | | | | >gi\|5701965\|emb\|CAB52157.1\| (AL109736) WD |
| | | | | | | | repeat protein [Schizosaccharomyces pombe] |
| 2967 | LIB3602-023-Q6-K1-D11 | 474005 | BLASTN | 37 | 5.00E−11 | 89 | Rice mRNA, partial homologous to ribosomal |
| | | | | | | | protein S5 gene |
| 2968 | LIB3602-041-Q6-K1-G7 | 7019653 | BLASTX | 471 | 4.00E−47 | 57 | (AL132954) spliceosomal-like protein [Arabidopsis |
| | | | | | | | thaliana] >gi\|7019655\|emb\|CAB75756.1\| |
| | | | | | | | (AL132954) spliceosomal-like protein [Arabidopsis |
| | | | | | | | thaliana] |
| 2969 | LIB3602-090-Q6-K6-G1 | 974301 | BLASTN | 67 | 6.00E−29 | 91 | Chlamydomonas reinhardtii ribosomal protein L41 |
| | | | | | | | (RPL41) mRNA, complete cds |
| 2970 | LIB3602-087-Q6-K1-F12 | 7486098 | BLASTX | 189 | 7.00E−14 | 49 | hypothetical protein F24L7.22 - Arabidopsis |
| | | | | | | | thaliana >gi\|2914709\|gb\|AAC04499.1\| (AC003974) |
| | | | | | | | hypothetical protein [Arabidopsis thaliana] |
| 2971 | LIB3602-078-Q6-K6-H8 | 849081 | BLASTX | 565 | 5.00E−58 | 63 | (U17900) cyclophilin B precursor [Orpinomyces sp. |
| | | | | | | | PC-2] |
| 2972 | LIB3602-014-Q6-K1-B4 | 1346031 | BLASTX | 536 | 1.00E−54 | 57 | FARNESYL PYROPHOSPHATE SYNTHETASE |
| | | | | | | | (FPP SYNTHETASE) (FPS) (FARNESYL |
| | | | | | | | DIPHOSPHATE SYNTHETASE) (KIAA0032) |
| | | | | | | | [INCLUDES: |
| | | | | | | | DIMETHYLALLYLTRANSFERASE; |
| | | | | | | | GERANYLTRANSTRANSFERASE] |
| 2973 | LIB3602-104-Q1-K1-C1 | 6094228 | BLASTX | 371 | 2.00E−35 | 71 | ADENOSYLHOMOCYSTEINASE (S- |
| | | | | | | | ADENOSYL-L-HOMOCYSTEINE |
| | | | | | | | HYDROLASE) (ADOHCYASE) |
| | | | | | | | >gi\|1724102\|gb\|AAB38499.1\| (U79766) S- |
| | | | | | | | adenosyl-L-homocystein hydrolase; SAH |
| | | | | | | | [Mesembryanthemum crystallinum] |
| 2974 | LIB3602-058-Q6-K1-F12 | 5803275 | BLASTX | 179 | 7.00E−13 | 42 | (AP000399) EST AU056133(S20320) corresponds |
| | | | | | | | to a region of the predicted gene; similar to |
| | | | | | | | Caenorhabditis elegans cosmid D1054; hypothetical |
| | | | | | | | protein (Z74030) [Oryza sativa] |
| 2975 | LIB3602-005-Q1-K1-G11 | 3834326 | BLASTX | 147 | 6.00E−09 | 53 | (AC005679) Similar to gb\|AF067141 gamma- |
| | | | | | | | glutamyl hydrolase from Arabidopsis thaliana. ESTs |
| | | | | | | | gb\|T46595 and gb\|AI09918 come from this gene |
| 2976 | LIB3602-013-Q6-K1-G4 | 7431450 | BLASTX | 359 | 5.00E−34 | 61 | aldehyde dehydrogenase (NAD+) (EC 1.2.1.3) |
| | | | | | | | T17F15.130 - Arabidopsis thaliana |
| | | | | | | | >gi\|4678328\|emb\|CAB41139.1\| (AL049658) |
| | | | | | | | aldehyde dehydrogenase (NAD+)-like protein |
| | | | | | | | [Arabidopsis thaliana] |
| 2977 | LIB3602-021-Q6-K1-F7 | 1172809 | BLASTX | 355 | 7.00E−34 | 72 | 60S RIBOSOMAL PROTEIN L10 (QM PROTEIN |
| | | | | | | | HOMOLOG) >gi\|7447294\|pir\|\|T02068 probable |
| | | | | | | | transcription factor QM - maize |
| | | | | | | | >gi\|468056\|gb\|AAA17419.1\| (U06108) QM protein |
| | | | | | | | [Zea mays] |
| 2978 | LIB3602-052-Q6-K1-H2 | 3334230 | BLASTX | 342 | 5.00E−32 | 47 | D-HYDANTOINASE |
| | | | | | | | (DIHYDROPYRIMIDINASE) (DHPASE) |
| | | | | | | | >gi\|2828803\|gb\|AAC00209.1\| (U84197) D- |
| | | | | | | | hydantoinase [Pseudomonas putida] |
| 2979 | LIB3602-014-Q6-K1-B7 | 2811057 | BLASTX | 164 | 4.00E−11 | 34 | CHITOSANASE PRECURSOR |
| | | | | | | | >gi\|7474500\|pir\|\|C69608 chitosanase csn - Bacillus |
| | | | | | | | subtilis >gi\|1934630\|gb\|AAB80882.1\| (U93875) |
| | | | | | | | chitosanase precursor [Bacillus subtilis] |
| | | | | | | | >gi\|2108281\|emb\|CAA63455.1\| (X92868) |
| | | | | | | | chitosanase precursor [Bacillus subtilis] |
| | | | | | | | >gi\|2635134\|emb\| |
| 2980 | LIB3602-093-Q6-K6-E2 | 3738312 | BLASTX | 270 | 2.00E−23 | 38 | (AC005309) hypothetical protein [Arabidopsis |
| | | | | | | | thaliana] |
| 2981 | LIB3602-023-Q6-K1-D6 | 1172835 | BLASTX | 338 | 2.00E−31 | 75 | GTP-BINDING NUCLEAR PROTEIN RAN-A1 |
| | | | | | | | >gi\|496268\|gb\|AAA73563.1\| (L16767) GTP- |
| | | | | | | | binding protein [Nicotiana tabacum] |
| 2982 | LIB3602-078-Q6-K6-F11 | 7435073 | BLASTX | 209 | 2.00E−16 | 41 | hypothetical protein T26B15.8 - Arabidopsis |
| | | | | | | | thaliana >gi\|3298540\|gb\|AAC25934.1\| (AC004681) |
| | | | | | | | putative carboxymethylenebutenolidase |
| | | | | | | | [Arabidopsis thaliana] |
| 2983 | LIB3602-080-Q6-K6-D6 | 5902716 | BLASTX | 174 | 1.00E−12 | 47 | ACYL-COA-BINDING PROTEIN HOMOLOG |
| | | | | | | | (ACBP) (DIAZEPAM BINDING INHIBITOR |
| | | | | | | | HOMOLOG) (DBI) >gi\|7497423\|pir\|\|T30954 |
| | | | | | | | hypothetical protein C44E4.6 - Caenorhabditis |
| | | | | | | | elegans >gi\|2088729\|gb\|AAB54171.1\| (AF003140) |
| | | | | | | | Similar to acyl-CoA-binding protein; C44E4.6 |
| | | | | | | | [Caenorhabd |
| 2984 | LIB3602-016-Q6-K1-B5 | 1084468 | BLASTX | 147 | 4.00E−09 | 33 | hydroxymandelonitrile lyase (EC 4.1.2.11) chain A - |
| | | | | | | | sorghum (fragment) |
| 2985 | LIB3602-010-Q6-K1-A6 | 6899925 | BLASTX | 380 | 2.00E−36 | 70 | (AL138651) P-glycoprotein-like proetin |
| | | | | | | | [Arabidopsis thaliana] |
| 2986 | LIB3602-032-Q6-K1-F11 | 7488412 | BLASTX | 229 | 1.00E−18 | 49 | ubiquitin-specific proteinase (EC 3.4.—.—) UBP3 - |
| | | | | | | | Arabidopsis thaliana >gi\|2347098\|gb\|AAB67966.1\| |
| | | | | | | | (U76845) ubiquitin-specific protease [Arabidopsis |
| | | | | | | | thaliana] >gi\|4490742\|emb\|CAB38904.1\| |
| | | | | | | | (AL035708) ubiquitin-specific protease (AtUBP3) |
| | | | | | | | [Arabidopsis thaliana |
| 2987 | LIB3602-102-Q1-K1-E12 | 3482918 | BLASTX | 305 | 1.00E−27 | 71 | (AC003970) Similar to ATP-citrate-lyase |
| | | | | | | | [Arabidopsis thaliana] |
| 2988 | LIB3602-009-Q6-K1-E1 | 7379550 | BLASTX | 160 | 1.00E−10 | 40 | (AL162754) hypothetical protein NMA0833 |
| | | | | | | | [Neisseria meningitidis] |
| 2989 | LIB3602-003-Q1-K1-A5 | 7269961 | BLASTX | 211 | 5.00E−17 | 73 | (AL161577) signal recognition particle receptor-like |
| | | | | | | | protein [Arabidopsis thaliana] |
| 2990 | LIB3602-092-Q6-K6-B1 | 7439981 | BLASTX | 146 | 9.00E−14 | 68 | glycine-rich RNA-binding protein GRP1 wheat |
| | | | | | | | >gi\|974605\|gb\|AAA75104.1\| (U32310) single- |
| | | | | | | | stranded nucleic acid binding protein [Triticum |
| | | | | | | | aestivum] |
| 2991 | LIB3602-026-Q6-K1-G11 | 480616 | BLASTX | 689 | 1.00E−72 | 80 | chlorophyll a/b binding protein - prince's feather |
| | | | | | | | >gi\|398599\|emb\|CAA52750.1\| (X74732) |
| | | | | | | | chlorophyll a/b binding protein [Amaranthus |
| | | | | | | | hypochondriacus] |
| 2992 | LIB3602-092-Q6-K6-G2 | 7486479 | BLASTX | 514 | 6.00E−52 | 73 | hypothetical protein F6E13.19 - Arabidopsis |
| | | | | | | | thaliana >gi\|3212877\|gb\|AAC23428.1\| (AC004005) |
| | | | | | | | putative LEA (late embryogenesis abundant) protein |
| | | | | | | | [Arabidopsis thaliana] |
| 2993 | LIB3602-055-Q6-K1-H10 | 5902394 | BLASTX | 220 | 1.00E−17 | 33 | (AC008148) Putative phosphoglucomutase |
| | | | | | | | [Arabidopsis thaliana] |
| 2994 | LIB3602-093-Q6-K6-G6 | 4574242 | BLASTX | 463 | 2.00E−48 | 78 | (AF108725) ribosomal protein S16 [Tortula ruralis] |
| 2995 | LIB3602-025-Q6-K1-F7 | 6714424 | BLASTX | 554 | 9.00E−57 | 81 | (AC012328) putative ADP-ribosylation factor |
| | | | | | | | [Arabidopsis thaliana] |
| 2996 | LIB3602-025-Q6-K1-B3 | 2129619 | BLASTX | 325 | 6.00E−30 | 73 | ribosome-associated protein p40 homolog - |
| | | | | | | | Arabidopsis thaliana |
| | | | | | | | >gi\|1345503\|emb\|CAA61547.1\| (X89366) 40 kD |
| | | | | | | | protein [Arabidopsis thaliana] |
| | | | | | | | >gi\|2102657\|emb\|CAA71407.1\| (Y10379) unnamed |
| | | | | | | | protein product [Arabidopsis thaliana] |
| 2997 | LIB3602-034-Q6-K1-H11 | 3738327 | BLASTX | 220 | 9.00E−18 | 39 | (AC005170) putative serine carboxypeptidase II |
| | | | | | | | [Arabidopsis thaliana] |
| 2998 | LIB3602-035-Q1-K1-B9 | 3738328 | BLASTX | 397 | 3.00E−38 | 54 | (AC005170) putative serine carboxypeptidase II |
| | | | | | | | [Arabidopsis thaliana] |
| 2999 | LIB3602-022-Q6-K1-F6 | 7489162 | BLASTX | 510 | 1.00E−51 | 68 | kinesin-related protein tck1 - common tobacco |
| | | | | | | | >gi\|1491931\|gb\|AAC49393.1\| (U52078) kinesin- |
| | | | | | | | like protein [Nicotiana tabacum] |
| 3000 | LIB3602-026-Q6-K1-G7 | 7488433 | BLASTX | 245 | 2.00E−20 | 42 | zinc finger protein homolog T10M13.22 - |
| | | | | | | | Arabidopsis thaliana >gi\|3377805\|gb\|AAC28178.1\| |
| | | | | | | | (AF075597) contains similarity to several apoptosis |
| | | | | | | | or programmed cell death proteins such as rat |
| | | | | | | | apoptosis protein RP-8 (GB: M80601) [Arabidopsis |
| | | | | | | | thaliana] >gi\|3912928 |
| 3001 | LIB3602-025-Q6-K1-D9 | 6554202 | BLASTX | 150 | 2.00E−09 | 43 | (AC011661) T23J18.5 [Arabidopsis thaliana] |
| 3002 | LIB3602-082-Q6-K6-E9 | 1170898 | BLASTX | 376 | 1.00E−49 | 77 | MALATE DEHYDROGENASE, |
| | | | | | | | MITOCHONDRIAL PRECURSOR |
| | | | | | | | >gi\|629659\|pir\|\|S44167 malate dehydrogenase (EC |
| | | | | | | | 1.1.1.37), mitochondrial - cider tree |
| | | | | | | | >gi\|473206\|emb\|CAA55383.1\| (X78800) |
| | | | | | | | mitochondrial malate dehydrogenase [Eucalyptus |
| | | | | | | | gunnii] |
| 3003 | LIB3602-052-Q6-K1-B6 | 7190377 | BLASTX | 270 | 1.00E−23 | 38 | (AE002301) ADP, ATP carrier protein [Chlamydia |
| | | | | | | | muridarum] |
| 3004 | LIB3602-062-Q6-K1-C1 | 7297593 | BLASTX | 147 | 4.00E−09 | 32 | (AE003627) CG4747 gene product [Drosophila |
| | | | | | | | melanogaster] |
| 3005 | LIB3602-119-Q1-K1-E11 | 7439992 | BLASTX | 168 | 6.00E−12 | 50 | splicing factor RSZp22 - Arabidopsis thaliana |
| | | | | | | | >gi\|3281869\|emb\|CAA19765.1\| (AL031004) |
| | | | | | | | RSZp22 splicing factor [Arabidopsis thaliana] |
| | | | | | | | >gi\|3435094\|gb\|AAD12769.1\| (AF033586) 9G8- |
| | | | | | | | like SR protein [Arabidopsis thaliana] |
| | | | | | | | >gi\|7270061\|emb\|CAB79876.1\| (AL161579) RSZp |
| 3006 | LIB3602-042-Q6-K1-H2 | 7470311 | BLASTX | 200 | 2.00E−15 | 49 | hypothetical protein slr0919 - Synechocystis sp. |
| | | | | | | | (strain PCC 6803) >gi\|1001227\|dbj\|BAA10467.1\| |
| | | | | | | | (D64003) hypothetical protein [Synechocystis sp.] |
| 3007 | LIB3602-054-Q6-K1-C8 | 3334244 | BLASTX | 378 | 3.00E−36 | 65 | LACTOYLGLUTATHIONE LYASE |
| | | | | | | | (METHYLGLYOXALASE) |
| | | | | | | | (ALDOKETOMUTASE) (GLYOXALASE I) (GLXI) |
| | | | | | | | (KETONE-ALDEHYDE MUTASE) (S-D- |
| | | | | | | | LACTOYLGLUTATHIONE METHYLGLYOXAL |
| | | | | | | | LYASE) >gi\|2113825\|emb\|CAA73691.1\| (Y13239) |
| | | | | | | | Glyoxalase I [Brassica juncea] |
| 3008 | LIB3602-086-Q6-K1-D9 | 6899939 | BLASTX | 269 | 1.00E−23 | 81 | (AL138651) ADP-ribosylation factor-like protein |
| | | | | | | | [Arabidopsis thaliana] |
| 3009 | LIB3602-092-Q6-K6-B5 | 498741 | BLASTN | 325 | 0 | 93 | H. vulgare (pMaW25) mRNA for beta-ketoacyl- |
| | | | | | | | ACP synthase |
| 3010 | LIB3602-048-Q6-K1QA- | 7430935 | BLASTX | 566 | 3.00E−58 | 63 | probable cinnamyl-alcohol dehydrogenase (EC |
| | E10 | | | | | | 1.1.1.195) - tomato |
| 3011 | LIB3602-120-Q1-K1-E6 | 567890 | BLASTX | 187 | 1.00E−13 | 46 | (L37352) beta-galactosidase-complementation |
| | | | | | | | protein [unidentified cloning vector] |
| 3012 | LIB3602-013-Q6-K1-B3 | 228698 | BLASTX | 584 | 3.00E−60 | 58 | CF1 ATP synthase: SUBUNIT = gamma |
| | | | | | | | [Chlamydomonas reinhardtii] |
| 3013 | LIB3602-107-Q1-K1-F10 | 1711381 | BLASTX | 295 | 2.00E−26 | 65 | PHOSPHOSERINE AMINOTRANSFERASE |
| | | | | | | | PRECURSOR (PSAT) >gi\|7434195\|pir\|\|T09156 |
| | | | | | | | phosphoserine aminotransferase - spinach |
| | | | | | | | >gi\|1256204\|dbj\|BAA12206.1\| (D84061) |
| | | | | | | | phosphoserine aminotransferase [Spinacia oleracea] |
| 3014 | LIB3602-119-Q1-K1-E9 | 585876 | BLASTX | 197 | 2.00E−15 | 63 | 60S RIBOSOMAL PROTEIN L23A (L25) |
| | | | | | | | >gi\|1084424\|pir\|\|S48026 ribosomal protein L23a, |
| | | | | | | | cytosolic - common tobacco |
| | | | | | | | >gi\|310935\|gb\|AAA53296.1\| (L18908) 60S |
| | | | | | | | ribosomal protein L25 [Nicotiana tabacum] |
| 3015 | LIB3602-023-Q6-K1-A1 | 1351905 | BLASTX | 203 | 1.00E−15 | 46 | BIFUNCTIONAL |
| | | | | | | | ASPARTOKINASE/HOMOSERINE |
| | | | | | | | DEHYDROGENASE 2, CHLOROPLAST |
| | | | | | | | PRECURSOR (AK-HD 2) (AK-HSDH 2) |
| | | | | | | | [INCLUDES: ASPARTOKINASE; |
| | | | | | | | HOMOSERINE DEHYDROGENASE] |
| | | | | | | | >gi\|7434567\|pir\|\|T02954 aspartate kinase (EC |
| | | | | | | | 2.7.2.4)/homoserine dehydrogenase (EC 1.1.1.3) |
| | | | | | | | precurso |
| 3016 | LIB3602-038-Q6-K1-C6 | 3851612 | BLASTX | 616 | 4.00E−64 | 67 | (AF095937) succinate dehydrogenase Ip subunit |
| | | | | | | | [Gallus gallus] |
| 3017 | LIB3602-111-Q1-K1-D4 | 7450363 | BLASTX | 477 | 5.00E−48 | 76 | hypothetical protein T9E8.170 - Arabidopsis |
| | | | | | | | thaliana >gi\|4584548\|emb\|CAB40778.1\| |
| | | | | | | | (AL049608) putative protein [Arabidopsis thaliana] |
| | | | | | | | >gi\|7268046\|emb\|CAB78385.1\| (AL161536) |
| | | | | | | | putative protein [Arabidopsis thaliana] |
| 3018 | LIB3602-017-Q6-K1-G8 | 7484678 | BLASTX | 524 | 3.00E−53 | 59 | phosphoglucomutase precursor, chloroplast - |
| | | | | | | | spinach >gi\|534982\|emb\|CAA53507.1\| (X75898) |
| | | | | | | | phosphoglucomutase [Spinacia oleracea] |
| 3019 | LIB3602-118-Q1-K1-G5 | 4646217 | BLASTX | 778 | 5.00E−83 | 76 | (AC007290) putative phosphoprotein phosphatase |
| | | | | | | | [Arabidopsis thaliana] |
| 3020 | LIB3602-037-Q6-K1-F2 | 400515 | BLASTX | 225 | 3.00E−18 | 54 | NADH-UBIQUINONE OXIDOREDUCTASE B8 |
| | | | | | | | SUBUNIT (COMPLEX I-B8) (CI-B8) |
| | | | | | | | >gi\|346540\|pir\|\|S28249 NADH dehydrogenase |
| | | | | | | | (ubiquinone) (EC 1.6.5.3) chain CI-B8 - bovine |
| | | | | | | | >gi\|246\|emb\|CAA44904.1\| (X63219) NADH |
| | | | | | | | dehydrogenase [Bos taurus] |
| 3021 | LIB3602-048-Q6-K1QA-B8 | 7019681 | BLASTX | 573 | 5.00E−59 | 75 | (AL 138647) putative protein [Arabidopsis thaliana] |
| 3022 | LIB3602-076-Q6-K6-G9 | 6440857 | BLASTX | 678 | 3.00E−71 | 77 | (AU066528) 40S ribosomal protein S9 |
| | | | | | | | [Chlamydomonas sp.] |
| 3023 | LIB3602-092-Q6-K6-H7 | 904068 | BLASTN | 66 | 3.00E−28 | 92 | Hordeum vulgare (clone ABC167) STS mRNA |
| 3024 | LIB3602-051-Q6-K1-G1 | 2494299 | BLASTX | 411 | 3.00E−40 | 68 | EUKARYOTIC TRANSLATION INITIATION |
| | | | | | | | FACTOR 2 BETA SUBUNIT (EIF-2-BETA) |
| | | | | | | | >gi\|7522212\|pir\|\|T17104 translation initiation factor |
| | | | | | | | eIF-2 beta chain - apple tree (fragment) |
| | | | | | | | >gi\|1732361\|gb\|AAC06384.1\| (U80269) translation |
| | | | | | | | initiation factor 2 beta [Malus domestica] |
| 3025 | LIB3602-017-Q6-K1-D11 | 7492850 | BLASTX | 163 | 5.00E−11 | 62 | probable prohibitin antiproliferative protein - fission |
| | | | | | | | yeast (Schizosaccharomyces pombe) |
| | | | | | | | >gi\|4176556\|emb\|CAA22869.1\| (AL035259) |
| | | | | | | | putative prohibitin [Schizosaccharomyces pombe] |
| 3026 | LIB3602-049-Q6-K1-F5 | 7414558 | BLASTX | 265 | 5.00E−23 | 55 | (AL163003) putative fatty acid synthase |
| | | | | | | | [Streptomyces coelicolor A3(2)] |
| 3027 | LIB3602-004-Q1-K1-B2 | 1172494 | BLASTX | 150 | 3.00E−09 | 50 | PTERIN-4-ALPHA-CARBINOLAMINE |
| | | | | | | | DEHYDRATASE (PHS) (4-ALPHA-HYDROXY- |
| | | | | | | | TETRAHYDROPTERIN DEHYDRATASE) |
| | | | | | | | (PHENYLALANINE HYDROXYLASE- |
| | | | | | | | STIMULATING PROTEIN) (PCD) |
| | | | | | | | >gi\|476742\|gb\|AAA25937.1\| (M88627) |
| | | | | | | | phenylalanine hydroxylase [Pseudomonas |
| | | | | | | | aeruginosa] |
| 3028 | LIB3602-003-Q1-K1-E2 | 6939228 | BLASTX | 452 | 6.00E−45 | 61 | (AC020579) putative |
| | | | | | | | phosphoribosylformylglycinamidine synthase |
| | | | | | | | [Arabidopsis thaliana] |
| 3029 | LIB3602-028-Q6-K1-D4 | 7487199 | BLASTX | 265 | 7.00E−23 | 42 | hypothetical protein T19L18.24 - Arabidopsis |
| | | | | | | | thaliana >gi\|3413717\|gb\|AAC31240.1\| (AC004747) |
| | | | | | | | unknown protein [Arabidopsis thaliana] |
| 3030 | LIB3602-113-Q1-K1-B1 | 7439979 | BLASTX | 371 | 2.00E−35 | 97 | glycine-rich RNA-binding protein, low- |
| | | | | | | | temperature-responsive - barley |
| | | | | | | | >gi\|1229138\|gb\|AAB07749.1\| (U49482) low |
| | | | | | | | temperature-responsive RNA-binding protein |
| | | | | | | | [Hordeum vulgare] |
| 3031 | LIB3602-080-Q6-K6-A7 | 4502327 | BLASTX | 453 | 7.00E−45 | 49 | AU RNA-binding protein/enoyl-Coenzyme A |
| | | | | | | | hydratase precursor >gi\|2135070\|pir\|\|I37195 AU- |
| | | | | | | | specific RNA-binding protein/enoyl-CoA |
| | | | | | | | hydratase (EC 4.2.1.17) homolog - human |
| | | | | | | | >gi\|780241\|emb\|CAA56260.1\| (X79888) AU- |
| | | | | | | | binding protein/Enoyl-CoA hydratase [Homo sapien |
| 3032 | LIB3602-102-Q1-K1-E6 | 6822051 | BLASTX | 328 | 9.00E−46 | 64 | (AL132957) fructose-bisphosphatase precursor |
| | | | | | | | [Arabidopsis thaliana] |
| 3033 | LIB3602-083-Q6-K6-C2 | 3063365 | BLASTX | 452 | 1.00E−44 | 49 | (AB003712) elongation factor-1alpha |
| | | | | | | | [Ampharetidae sp.] |
| 3034 | LIB3602-111-Q1-K1-G12 | 4580461 | BLASTX | 343 | 4.00E−32 | 44 | (AC006081) unknown protein [Arabidopsis |
| | | | | | | | thaliana] |
| 3035 | LIB3602-039-Q6-K1-C5 | 7487355 | BLASTX | 186 | 1.00E−13 | 57 | hypothetical protein T22J18.13 - Arabidopsis |
| | | | | | | | thaliana >gi\|3287688\|gb\|AAC25516.1\| (AC003979) |
| | | | | | | | Contains similarity to ycf37 gene product |
| | | | | | | | gb\|1001425 from Synechocystis sp. genome |
| | | | | | | | gb\|D63999. ESTs gb\|T43026, gb\|R64902, |
| | | | | | | | gb\|Z18169 and gb\|N37374 come from this ge |
| 3036 | LIB3602-060-Q6-K1-C3 | 6513923 | BLASTX | 490 | 3.00E−49 | 67 | (AC011664) putative mitochondrial processing |
| | | | | | | | peptidase [Arabidopsis thaliana] |
| 3037 | LIB3602-091-Q6-K6-A1 | 7503664 | BLASTX | 168 | 2.00E−11 | 32 | hypothetical protein F47C12.1 - Caenorhabditis |
| | | | | | | | elegans >gi\|1397258\|gb\|AAC24388.1\| (U61946) |
| | | | | | | | contains multiple regions of similarity to EGF-type |
| | | | | | | | repeats (PS: PS00022) and sushi (SCR) repeats |
| | | | | | | | [Caenorhabditis elegans] |
| 3038 | LIB3602-077-Q6-K6-F4 | 7019692 | BLASTX | 479 | 7.00E−48 | 61 | (AL 138647) putative protein [Arabidopsis thaliana] |
| 3039 | LIB3602-004-Q1-K1-E6 | 3914557 | BLASTX | 231 | 4.00E−36 | 76 | RAS-RELATED PROTEIN RAB7 (POSSIBLE |
| | | | | | | | APOSPORY-ASSOCIATED PROTEIN) |
| | | | | | | | >gi\|1155265\|gb\|AAA85273.1\| (U40219) possible |
| | | | | | | | apospory-associated protein [Pennisetum ciliare] |
| 3040 | LIB3602-004-Q1-K1-D8 | 6862923 | BLASTX | 258 | 6.00E−22 | 56 | (AC018907) unknown protein [Arabidopsis |
| | | | | | | | thaliana] |
| 3041 | LIB3602-009-Q6-K1-F6 | 2828267 | BLASTX | 262 | 3.00E−23 | 75 | (Y14044) geranylgeranyl reductase [Arabidopsis |
| | | | | | | | thaliana] |
| 3042 | LIB3602-102-Q1-K1-A1 | 7019693 | BLASTX | 304 | 7.00E−28 | 64 | (AL138647) putative protein [Arabidopsis thaliana] |
| 3043 | LIB3602-016-Q6-K1-H4 | 6862921 | BLASTX | 170 | 9.00E−12 | 54 | (AC018907) hypothetical protein [Arabidopsis |
| | | | | | | | thaliana] |

Table 1 Legend
SEQ ID No.: Refers to the sequence identification number of nucleic acids listed in the Sequence Listing.
Clone ID: Refers to an assigned cDNA clone ID number.
NCBI gi: Refers to National Center for Biotechnology Information GenBank Identifier number which is the best match for a given nucleotide sequence.
Method: Refers to the method used in the sequence comparison of the designated nucleotide sequence with the designated GenBank sequence.
BLAST Score: Refers to the BLAST score that is generated by sequence comparison of the designated nucleotide sequence with the designated GenBank sequence using the method referenced in the “Method” column.
E value: The expected number of distinct segment pairs between two sequences with a score above the bit score for BLAST match.
% ident: Refers to the percentage of identically matched nucleotides (or residues) that exist along the length of that portion of the sequences which is aligned by the BLAST comparison to generate the statistical scores presented.
NCBI gi Description: A description of the database entry referenced in the “NCBI gi” column.

The application's sequence listing, which the Patent Office published only in electronic form, follows.

SEQUENCE LISTING (9395 sequences)

SEQ ID NO: 1 - DNA, 670 bp, Chlorella sorokiniana
  Clone ID: LIB3602-001-P1-K6-A1
aaaaaaaaaaaaaaaaaaaaaaataaaaaaaaaaaaaaaaaaaaaaaaaaaaaaataaaaaaaaaaaaaaaaaaaaaaaaaaaaaaaaaaaaaaaaaaaaaaaaaaaaaaaaaaaaaaaaaaaaaaaaaaaaaaaagaaaaaaaaaaaaagggggggcatttttaggggtttttttttttcccgggtttttttgcaaatttttttttttttttaagggaccccaaattaaatttttgggggcgggttttaaaaactcatgaaggggaaaaaccttgtgtttacaaaatttattactttggaaaaaattccttttttcccattttgggtttttaggaaaagggccccaccgtttggctttttaaaaaagtgggtaaccttatttgcgaatggggccccccttttatgggggattttaagggggggggtttgttggtttcctggaagggggccctttaattttgagagtgctatatcgcgggttttttagttttttttcttttttttttgggcacattttggcggtttttccctttaaagttttaaaatgggggttttttttgggtttcttatttatgtgtttttgggcctctttgcctaaaaaatttttttggggggttgggttaactttgtggatactttcttttattaaaatttttgtctttttttttt

SEQ ID NO: 2 - DNA, 598 bp, Chlorella sorokiniana
  unsure (1)..(598): unsure at all n locations; Clone ID: LIB3602-001-P1-K6-A10
gcgctgcctgcagacgcggccaccagcaccacagagacggcggaagcgggatgcgggcgcaagaagctgtttgatgacctgggcggcgcagaaggcatgaagctggcggttgacaccttctacgataaggtgctggctgacccggagctgctgcccttcttcgagtccctggacatgcaagagcagaagatgaagcaggtcaagttcatgagcttcgtgtttggcggagcagaccaatacaagggccgaagcatgtacgacgcacacgcccatctggtcaagggccacggcctggaccaccgccactttgacaagatcaagcagtaccttggagagacgctgcaagagatgggcgtcaagcaggatgtgatccagcacgccgccggagtggtggagtccacccgcgacgaatttgacttncccaacaactgcgcacccaactgattttcattaacccaaccccagcctgagcgctcattccatcgattttgagcggggagcgccagttgccgagcgcgcccagggggcccaggagcctgcaaatcgtttgccagcccttgctgcattgaagagccatcagccattttcgcaccaagcc

SEQ ID NO: 3 - DNA, 548 bp, Chlorella sorokiniana
  Clone ID: LIB3602-001-P1-K6-A11
cccgactcggtcatcgcgggcatgcccgtgatcgaggtgtggcggagcaagcaggtcattgtgatgaagcggactatggcggcggggtatgcaggagccgacaaccccatcttctatcgcgacaacacggccatgctgctgggggatgccaaggacatgtgcgagaagctccgggcccgcgtgtacgagcagtttggcattgtttgagcggccaatgcttccaagccgcatgtcgagctccacccacgcccagccggcagcccccttcacgtgaacgaacgagcgaacatgcatgcgcctgtgcccacatgaccacctgcggtgtggggagtgccggcagtccaaacaacccactccctttccaaacaatcgaacgcatttgaatgagcaggtagcgttagcggatgagactgtcaatgcaacactgtgccccacccccgtcttcttttctctttgctgtgcaatgccatatgcctccgtcatcccccgcctgcacagccgcaacacatacccccgcgtgttttcataccctcgttcttgtggcagcc

SEQ ID NO: 4 - DNA, 346 bp, Chlorella sorokiniana
  Clone ID: LIB3602-001-P1-K6-A2
cccacgcgtctcgaaaaaaaaaaaaaaaaaaaaaaaaaaaaaaaaagggacggcagatctaggggctgccagcttacttgcgcgtgcctgccacgccctagctggcgtcttgagtgatctaatttcagttcacctggccgtcatttaactgcctggggtctggcaacaccctggcgggacagggggtagtgtccctgcaccacatgcccttgctgcccggtggcgtcttagcggagaggctcgcagcgaacgggctggcccccatttgcgcaccctgcatggggaatggcacgcgcgctggggcggcgcaccaagcacgggggctgtggtctgttcgcgcggggtg

SEQ ID NO: 5 - DNA, 81 bp, Chlorella sorokiniana
  Clone ID: LIB3602-001-P1-K6-A4
aaaaaaaaaaaaaaaaaaaaaaaaaaaaaaaaaaaaaaaaaaaaaaaaaaaaaaaaaaaaaaaaaaaaaaaaaaaaaaaaa

SEQ ID NO: 6 - DNA, 167 bp, Chlorella sorokiniana
  unsure (1)..(167): unsure at all n locations; Clone ID: LIB3602-001-P1-K6-A6
aaaaaaaaataaaaaaaaaaaaaaaaaaaaaaaaaaaaaaaaaaaaaaaaaaaaaaaaaaaaaggggggaaagaaaaaaaggaaaaaaggaggaagaaagaaagaaggaaaaagaaaaagaaaaaagaaaagaaaaaaaaaaaaaaaaanaaaaggaagggggggaa

SEQ ID NO: 7 - DNA, 465 bp, Chlorella sorokiniana
  Clone ID: LIB3602-001-P1-K6-A7
ggctgcagccgctgcaggctgagacgccggaggagcggctggatgaggctcgggaggcgggggagtccgcccaggtggtgctgctgcagaagcacttggcgcgggcgctgcacagcagccagctcacggggccggcgcagctgctgtgtggcattgcggagcgtggcgcccatgtgcacttcatgttcgtgtaccgagaccccttcagcgatggcggctatgatgataatgtctcgctgtcatacaagctgccggtgcgtgaggacgcgggggctctatatggcgatggcctgtagtgcctaggagctgcgaaccttacttgacacgggcaccattcctcaaggtgcgctgaacgaggcgtggccagctcctgactgacttctcacaatgcacgtgcacattggggcgcatcaactcgacaagcaaaggcaattttctgcattgaaagcgtgtaaccagagccag

SEQ ID NO: 8 - DNA, 257 bp, Chlorella sorokiniana
  Clone ID: LIB3602-001-P1-K6-A8
ctgctctgcgcgggcgcgcccccgcccgcgtccggcttttccctgtaacttattcgtttgtgcagcgcgcattcgtgcctgccccgctaactgcccccgcggcctccccttgcttttcacaacctgccaaccaatacatcgctcttgcacggtcgattgattgctgtcctcagtagtcgcctccctgtcccccgccttgccgctgtcctgagaagaatgcatcctcgcgcacttgtcgtgtaacccatccaaccgtc

SEQ ID NO: 9 - DNA, 591 bp, Chlorella sorokiniana
  unsure (1)..(591): unsure at all n locations; Clone ID: LIB3602-001-P1-K6-A9
cggacgcgtggngaaaaaaaaaaaaaaaaaaaaaaaaaaaaaaaaaaaaaaaaaaaaaaaaaaaaaaaaaaaaaaaaaaaaaaaaaaaaaaaaaaaaaaaaaaaaaaaaaaaaaaaaaaaaaaaaaaaaaaaaaaaaaaaaagggggggccgtttttaaaattaaaaatttatttccccttgtttggggggtattaattttttttttgggggccaaaaattaaatttattggccgtgtttttaaaacttcgtaattggaaaaaccctggttttaccaaatttaattggtttgaaaaaaattccctttttaaaagttgggttatttgaaaaaaggccggaaccattttttttttcaaaaatttggccacctttattgggaatttgaaccccccttttatgggccatttaaacccgccgttttttttttttttctcaatttttacctttaatttttgaaagcccttagggccgggtcttttgaattttttccttttttttttcgccaagtttgccggttttccccttaaaattttaaattgggggatccttttagggtcccaatttagggttttacgggaccttaacccaaaa

SEQ ID NO: 10 - DNA, 672 bp, Chlorella sorokiniana
  Clone ID: LIB3602-001-P1-K6-B1
agcaagcccagcatccagaacgacctgatcacgctgcccaccaacatggtggatgcccatcttatgaagctgtccatctcctttgccctggcccagtccaccaagctgtcggtgttggaggagcgtgcactgaccatcgcggcggccacgcgcaacctgcccatgcagctggcacaggagggcaaggtggctgtgaagagccgagccgtggccaagctcatgggccgcgtcttcatcgagcaggcggcgcttaacctgctgggatccgtgctggacacgccagactttttctgggagccaggcgtgggcgacaacatgcaaagcgtgtacgacaaggtgtttgattacctggagatgaacgaccggatagagatcctcaactcgcggctgcaggtgctgcacgagctgctggacatgctgcggctgcagggccaggcgcagcacagcgacttcctggagatcatcatcatcctgctcatctgcgtggactgcctaatcttgctcttcacgctggcggcgctgctgggctgggtggggcccggcggtggcagcatacacaaccagctggcgggcacgcgctggggcgcctcgctggcagccctgctgggcggcggtagctgagctttgcggggtgcagggagcaccacatgcccctgcgcccatctggcgttc

SEQ ID NO: 11 - DNA, 289 bp, Chlorella sorokiniana
  Clone ID: LIB3602-001-P1-K6-B10
atttccatcaggcccgccaccgccaccaatgccccctgtgccgcattgttacccttctccccctggatacgcaccagcgccgccgcctggtgcattcccactgtacccgccacatccatacccaagtgctgtccctccaccaccaccttttgcgggctatgcaccacctacacttttgcgtgctgattctgctgcgcccccgctgcctcctgaaggctggagtggtcctccgctgccaccatagtcgccgacttggcacgcacgttgttttgtagattgttggacctgc

SEQ ID NO: 12 - DNA, 309 bp, Chlorella sorokiniana
  Clone ID: LIB3602-001-P1-K6-B12
gggggtgcctgcccgcccccgctgctgcgctttgctagcggagtgcgcggaatggaccgcccgctcgctcccgccttgttttttcccatttggcagccccgcgaccaatcagtaccgcctctgcctcgccctgcgccattcacaactcgaaaaatttcattcgccgcgtaggctgccctttgcttccacactttttttccactccctccttgtgccctgccagttctttcgaggacctctgcaaagcctttcctcgtgcagcgccgcgcgctgcctcttgtttggtactccttgttactaccgctcagc

SEQ ID NO: 13 - DNA, 330 bp, Chlorella sorokiniana
  unsure (1)..(330): unsure at all n locations; Clone ID: LIB3602-001-P1-K6-B2
cggacgcgtgggcggacgcgtgggaaaaaaaaaaaaaaaaaaaaaaaaaaaaaaaaaaaaaaaaaaaaaaaaaaaaaaaaaaaaaaaaaaaaaaaaaaaaaaaaaaaaaaaaaaaaaaaaaaaaaaaaaaaaaaaaaaaaaaaaaaaaaaagggggggnnngnnaaaaaggaaaaaagnnaaggggggggggaaggaaaanaaaaaannnnnnaaaagggaaaaaaaaaaaaaannaagggggggggggnaaaaaaggngggaaagggaaaaaanngggggaaanaaaaaaaaaaggnggggaaaaaaaannnnnnnggagaaggggggg

SEQ ID NO: 14 - DNA, 602 bp, Chlorella sorokiniana
  unsure (1)..(602): unsure at all n locations; Clone ID: LIB3602-001-P1-K6-B3
gagcgagagcgagtttggggacggcgagaagttcgccgccttccagaacatgcgcggcgggcgggtgcagctgatggcgctgcccatgcccgactccgactactacaacgcagagaagggcgacgcgctctatgcctttgagctggcgctggctctgcagaagctgaacatggacaagctcaaggcctgccactcgctggccgacaagtcggatgacttccaggcccaggatttcctggaggacgagatgagcgcccaggccaaggtggtgaaggagctgggagactatgtgtgcgagctcaagcgcgtgggcaagggccacagcgtcttccactttgatgagaggattgaccagggaggcctgactgctgcggcgtgagctgaccaggcagcaagttgcaaagggcgcagctgcagaaatggcctgcaagcccagcggcgccagcagggcggcaggcgtcggcggcggcaggcgtcggcgtggcatacgcactgatgcccacctgccacacaccactagcttgcgttgaatgatggntgatgaaaatggcaacaaaaacagctgttcaatgttccattccttggaaagcagcgagcatttg

SEQ ID NO: 15 - DNA, 391 bp, Chlorella sorokiniana
  unsure (1)..(391): unsure at all n locations; Clone ID: LIB3602-001-P1-K6-B5
cgaccacttaggcggcaacccggggccccgggggccgaaacgacagccggncgccgcccgcgggagagccgaggccgagnaccgcgccgcggccaacagcggggcagaggccgcggggcgcccgcagcacccggccaagccccacagcaccancgccaggagcacgnnggncgacggggggggcgncagcgccgnccaccgcngcaccaacccggngcagcaccagcggaccaagcacggagagaccgaccaacacggcgcccgcgacganggcgccggcggcgccgngaggggaccncacgcgccgaccaccacggcagcacggcnagacaacgaggaccaagggcccgacgagcccgaccaacaccaaggcgcgcnccagccaaaacaa

SEQ ID NO: 16 - DNA, 507 bp, Chlorella sorokiniana
  unsure (1)..(507): unsure at all n locations; Clone ID: LIB3602-001-P1-K6-B6
caagcacgacctgcccagctatctgtccctgctgaagaccgacggcgcgctggtgatggtgggcttgtcgcccgatccgctggagattgcggcattctccctcacctcccgccgccgcatgctggcgggctcgggcatcggcggcatcaaggagactcaggagatgctggactttggcggggagcacaacgtgacgtgtgacattgagttgatccagattgactacgtgaacgaggcgatggaccgcctggagaagaacgacgtgcgctaccgcttcgtgatcgacatccagggcagcctggtggcctgagctctgcggcagcagcgccggcagcagcagagcagccgcagctgccgtgcacgttgtgcaccaagagggagtggcgcctgcgctgcaacgctgttaggcttggtgcggccaagccttcgccggctgggccacccttncaagttgaaatgcttgcttgcgtgaaccagcttaagttgcttgcctgtaattcgcaactg

SEQ ID NO: 17 - DNA, 587 bp, Chlorella sorokiniana
  Clone ID: LIB3602-001-P1-K6-B7
cttctccatccctcacgctggttgtccatttgctgtcactagccgggcacctgtatcccttccgccgccaccaccgccctgcgttgtagattgctctgcttgtgcccggctgtctctttccacctccccacccaaaaaacccaacgagtacgcttgctctacccgtgttgctgtttggctccatctggatttgactggactgcagcaacccccctccggcctgtcttgtcactgctgcatccctccgcgttttcaagtctgttcgcttgtccctcgcgaccgattcacgccgccgctggcacccggcgcctctataccaccagtgtaccaccctgtgctgctgctgtctgcccactcagcacttgtaccaccaatgcccatggagcggctgcccagctggcgccgccccgcttgcccagcagccatgcggctctgtccagctcgctgactctcgtacccctcccaattgctccgcccggcagtttccttttccgaccactgccgcgcccaacaattcgtgtctcccttgcttcgagaggcgtgcctcgcctgcagcactgagcagttcatctcacaacaaacaatgc

SEQ ID NO: 18 - DNA, 561 bp, Chlorella sorokiniana
  Clone ID: LIB3602-001-P1-K6-B9
gtagggcttgggccagatggtgctcaagacccagacctgccgcttcagcggcctcaggatctaccctggcaagggtgtgctgttcatccgcgtggatggccagcaattcctgttcctgaagcagaagtgccgctcgctgttcaaccagcgcaagcggcccgccaagcttgcctggaccaccctgtaccgcaagcagcaccgcaaggacctggaggcgcaggttgcccgcaagaagcggcgcaacgtgaacaaggcggccacccgctccgtggcgggcgccagcctggaggtgatccagaagaagaagagcgagaagcccgaggcgcgcaaggcctcccgcgaggcggcgctgcgtgagatcaaggagcgcgccaagaaggccaaggccgacaaggcggtgcagaaggcgcaggccaaggcctcgggcgccggcaaggctgtcaagaacatgcctaagggcgcgggcaagggcggcgccaagagcaccggccgctaagccagcggcaatgcagcgggcgtagcggcctgcttggccgctgccgttgtaacgcactttctcgg

SEQ ID NO: 19 - DNA, 88 bp, Chlorella sorokiniana
  Clone ID: LIB3602-001-P1-K6-C12
aaaaaattaaaaaaaaaaaaaaaaaaaaaaaaaaaaaaaaaaaaaaaaaaaaaaaaaaaaaaaaaaaaaaaaaaaaaaaaaaaaaaaa

SEQ ID NO: 20 - DNA, 542 bp, Chlorella sorokiniana
  unsure (1)..(542): unsure at all n locations; Clone ID: LIB3602-001-P1-K6-C2
gaggcacacttatggcactgcggttttgagctcagccatctctcgttttccccaccccagccatggcttacccctccttctgacttgccccctgactgcgacgaatccctctgctgctgttggttcctccgcctctgtgccctctgacgctgtttcgatgcgatgctgagaatgctctgatgccctggcgctcattcccctccccgccccgttctcgccgctgatcctcttgctgtgtcgctgatttgagccgatgctcgggagcccgggtggcgggctcccctttgcttcgcccacctgacccccgcactgaccctaggctgggccggccggcattcccgccggcagccagcccccacccacagccatgcattcactcctagagtcttatggtgcctgtgtcgagcgagacacctccctgacgaaccttcaaacttgataatcttaacttgaccctttgagggccgtgccgatcgtctgagcaagagatttcacgtccctgcagacactgtaactaatacgcttcnnaaaaannnnnnnaa

SEQ ID NO: 21 - DNA, 576 bp, Chlorella sorokiniana
  unsure (1)..(576): unsure at all n locations; Clone ID: LIB3602-001-P1-K6-C3
cagggccactgctgggtgctggccgacaacgagcagctggagccgccgcacgtgattgacagccgcagctttggaccgctgccgctctccaacgttgtgggcaggatcctgtatgcggcgcgcagcgagaccgaccacggcccggttgagaacagcgcagagggcatggaggcggacgtaccggtgctcgaagcagagctcgatttggagcgactgtgcagggaatgaagggccgcaaatgaacagcccccggctgtgtttgcgggtttgtgcgttctttgccagcgtttctggctgcgctgttcatgcttgatcatgtgcacgcccacatgttgcatgctagttgctgtgggtgcgagcaaacatcccgctgctcatgctgctctgtccgcttgctaagtttcctgcctgtacccttaatcctctttatcatgttttggttgtacaactattctccaggcccgagggctgcccatgcaaaccaatcttgttggaaaaaaaaaaaaaaaannaaaaaaannnnnnnnnnanaaananaaaaaaaaaaaaaaaaaaaaaaaaaaaaaaaaggggggg

SEQ ID NO: 22 - DNA, 581 bp, Chlorella sorokiniana
  Clone ID: LIB3602-001-P1-K6-C5
tgactttttaccgctggctaggctaccccataacaccactggctggtcactggggctttccaccattcagcaatgcgacacaatgccagccaggagcatgtagtgcggatccagactggcagcttcctatccaggacggcatacgggaggtcattgcaaagctcaagccacacactctggtgctcaacgccgggctgtggcgtcgaaatcggacagactggcccacagaactgtacgacagcatttttgaggcaggaatcaaggctgtggcgccacagggcgggcagtgtgtttggaagacaaccacgcttgcccaggcaggcgacctcaaagtgggccgcgaccgagatgcggcggcagtagcggcggcacagcggcatggctggctcgtcacggacgcatggggagctacacacgccgccaagatgcagctgggcgatggcatttatatagacccggcgcactataagggcttcgtgtacacggagctcaaccagctgctgctgaacacgatctgccccgctcacaactgattgtcaccgtgctgtaccagtacttcaaacctgtaaggacagtgtggc

SEQ ID NO: 23 - DNA, 438 bp, Chlorella sorokiniana
  unsure (1)..(438): unsure at all n locations; Clone ID: LIB3602-001-P1-K6-C7
atgctcctgatcactgggcgatgacatttctgacctggaggatgtagtgaagctgttgctgatggctggcgcggatcccaatggccgtgccggacctaagcaagcattcatgaggccactggcatggtctgtctggagttcaggcgaaagctctgggcagccagggctggtgcacctgctgcttcagtatggtgcagaccccatgctgccaatacaggcgattgtgggaaagcctacaacagtgctggacctggctgtgagggaggactttcgagggcggacagtgcccctactggtgggagtgcccccgcaccgacctgcgcgggagcactgccgagtggctgcagcaagcctaccgccggatgagaagcggnggctattctcctgaaagagcgctgcgcctgctgcgggcgcgcggcgcggaccccgcatgggagc

SEQ ID NO: 24 - DNA, 457 bp, Chlorella sorokiniana
  Clone ID: LIB3602-001-P1-K6-C8
gaggctcccttgcattcaaacttgctgcaaacccggtggcgcgcacccaccaaccccccaaactctgttgtccctggtctgctgttgctgccccaagatgaattttttcccctctggttccccatgtatcccccgcctgtcttggggcgtgccctggcctttccaccccttttccccacgggacgcccgttgctcgggctaacccatggccagtccctgcgtggacctgttcgttttgttcacaccgtttcttcccactcctgccgctcggcgcatgccctgcccttttgtctgcgcaaggcccgcgcgtgaagtggcgctcagcaaagagctttcatgaggcaaattttgcgccgcaagttttccacccctctgcctaatgcggtcactcaactctggtcgatgcaacactacccctgattaatgcccccactgccacctgtaatgccgtaccgtg

SEQ ID NO: 25 - DNA, 405 bp, Chlorella sorokiniana
  unsure (1)..(405): unsure at all n locations; Clone ID: LIB3602-001-P1-K6-C9
aaaaaaaataaaaaaaaaaaaaaaaaaaaaaaaaaaaaaaaaaaaaaaaaaaaaaaaaaaaaaaaaaaaaaaaaaaaaaaaaaaaaaaaaaaaaaaaaaaaaaaaaaaaaaaaaaaaaaaaaaaaaaaaaaaaaaaaaaaaaaaaaaaaaaaaaaaaaaaaaaaaaaaaattttttnataatttgggggggggaaatttttataaaaattaatttttatttatttaattttttttttttaaaataaaaataaatttaattggaatttttttaaaaaatnattaattaaaaaaatttnntataaaaaaaatttttttttttaaaaaaaaatnnttttttnaaaatattnttaaattaaaaaagnntnataaataaaaatttttaaaaaaaaatnaattatttaaat

SEQ ID NO: 26 - DNA, 501 bp, Chlorella sorokiniana
  unsure (1)..(501): unsure at all n locations; Clone ID: LIB3602-001-P1-K6-D1
ggagaagcaccaggcacaccgcatggacctggaggagatgctgcagtacgccagccacgagctggagccgcaggccggcccctccccggcgctccagctggccatgcgacagctgcgcgataggatcggcgacaagcttgagaagcacgctggtggacgcatcagaggagacatgaacgcaatgcgactgagcagccgctctcagcaagcacggcaggagcttggctgcagttgagtttagcacaagctgccaccagatatgtgcgtagcgccatgcccctgagaacgctaacggatgttgcttgcctattgagcaaagctgccacgagcatgttcatattttgtggtaccagctttgttcctctgaaccttctgtggatcatctgcttacagcttcaaacaacatgcatgctccatctgctttctaacacacacacctgtagcgcttgcacacgcaaacatgtaactctactgcacacaaaanaaaaaaaaaaaaanaaa

SEQ ID NO: 27 - DNA, 287 bp, Chlorella sorokiniana
  unsure (1)..(287): unsure at all n locations; Clone ID: LIB3602-001-P1-K6-D11
aaaaaaataaaaaaaaaaaaaaaaaaaaaataaaaaaaaaaaaaaaaaaaaaaaaaataaaaaagaaaaaaaaaaaaaaaaaaaaaaaagaggaaacttatattaaaaggtaaaaaattaaatttacatggtgtctaagttaattttatttttttttgggtttctttattttttttttaattgggggggggggggacttttctttaatttgttacctcttaatttacctttatttaagtcnggtggaactcttttttgggttgcccttgttggcttttgtttgctat

SEQ ID NO: 28 - DNA, 559 bp, Chlorella sorokiniana
  unsure (1)..(559): unsure at all n locations; Clone ID: LIB3602-001-P1-K6-D12
gggcttgggccagatggtgctcaagacccagacctgccgcttcagcggcctcaggatctaccctggcaagggtgtgctgtttatccgcgtggatggccagcaattcctgttcctgaagcagaagtgccgctcgctgttcaaccagcgcaagcggcccgccaagcttgcctggaccaccctgtaccgcaagcagcaccgcaaggacctggaggcgcaggttgcccgcaagaagcggcgcaacgtgaacaaggcggccacccgctccgtggcgggcgccagcctggaggtgatccagaagaagaagagcgagaagcccgaggcgcgcaaggcctcccgcgaggcggcgctgcgtgagatcaaggagcgcgccaagaaggccaaggccgacaaggcggtgcagaaggcgcaggccaaggcctcgggcgccggcaaggctgtcaagaacatgcctaagggcgcgggcaagggcggcgccaagagcaccggccgctaagccagcggcaatgcagcgggcgtagcggcctgctgggccgntgccgttgtaacgcacttnctnggg

SEQ ID NO: 29 - DNA, 543 bp, Chlorella sorokiniana
  Clone ID: LIB3602-001-P1-K6-D2
caacaaggagacgctgattgcgggcggcccctttgtgctgccgctggccaaggagcacggtgtgcacatcctgcccgccgactcggagcacagcgccatcttccagtgcctgcagggcctgcctgagggcggcatgcggcgcatcatcctgaccgcttcgggcggcgccttccgcgacctgccggtggagaagctggcgcacgtgacggtggcggacgctctcaagcaccccaactggtccatgggcaagaagatcaccatcgactcggccacgctgatgaacaagggcctggaggtgatcgaggcgcactacctgtttggcgccgactacgacaacatcgagattgtgatccacccccagtccatcatccactccatggtggagacggccgactcgagcgtgctggcgcagctgggctggcccgacatgcggctgcccatcctgtacaccatgagctggccggcgcgcgtgcagtgcagcgagcagacgtggccgcgcctcgactttgtgaagatgggggacctcaccttcaggcagcccga

SEQ ID NO: 30 - DNA, 329 bp, Chlorella sorokiniana
  Clone ID: LIB3602-001-P1-K6-D4
tccgaaaaaaaataaaaaaaaaaaaaaaaaaaaaaaaaaaaaaaaaaaaaaaaaaaaaaaaaaaaaaaaaaaaaaaaaaaaaaaaaaaaaaaaaaaaaaaaaaaaaaataaaaaatttttaataaaaaaataattaaaaaaaaatacaatataattgaaaaaaaataaaacaaattaaaaaaaaaaaagggggggggcgtttcccctctttttagataatctttttttcatcggaggtagaaggacaaaattttttttttatcatcattaacaacaaaatagcggactggttgcttattaaactgccccttagaacaccttttttttcg

SEQ ID NO: 31 - DNA, 340 bp, Chlorella sorokiniana
  Clone ID: LIB3602-001-P1-K6-D6
cccacgcgtccgcccacgcgtccggccgtggagatctaccgcgccaacggcgagggccccaacggcttcggcgagggccaggacaccctgtaccccggcggcgccttcgaccccctgggcctggctgacgaccccgacaccctggctgagctgaaggtcaaggagatcaagaacggccgcctggccatgctctccatgctgggcttcttcgtgcaggccatcgtgaccggcaagggccccctggacaaccttctgcagcatttggaggagcccggggagttcaacttctacgccctgtacgccaactccctggcgtaagcagcttgtttggagcacctgc

SEQ ID NO: 32 - DNA, 398 bp, Chlorella sorokiniana
  Clone ID: LIB3602-001-P1-K6-D7
agtctacctgccggcggggcccagccacgaggcgctgcggctcgtgcccgcaccctctcaagccgcgcaggccgcgcagcagcaaccacagaagcccacagctgcggcccctgccaatgggataccgcgcatttaccacaccctgtggctgggcgaccagagcatacccgaggcacacgccggctggatggacacctgccgggagcagctgtcgcctcgcttcggctgggagcaccgcctgtggaacttgactcaagtcgaggcgctgctggaggagcaccggcctgagtttgtgcccatgttcaagggcttccccaagctggtgcagcgcatcgatctcgcaaagtatctggtgctcgagatctttggaggggtttatctagacaccgatgtggagt

SEQ ID NO: 33 - DNA, 648 bp, Chlorella sorokiniana
  unsure (1)..(648): unsure at all n locations; Clone ID: LIB3602-001-P1-K6-D8
cggcagcgatgatgaggaggggggcagcgggcgcggcaggggcggcgcggcggcggggctgcagccgcacccccggctgaccaagaagggagtggaaggcttgaggtaccgagctgaggacgtggccaggagcatcaccaagaatgtgattaaagaggcgcgggccaaggagctgaagagcgagctgctcaactcgcagcggctggcggccttctttgaggagcacccgcaggacctgaacctgctgaagcacgacaagccactggcggccacgggcgcagccgcggcggccgcccacctgaagcacatcccagcttacctgcgggaccccaccctgcagggccgcagctttgtgggcaacgcgggccgcggcgtgctgcctgcccgcaagcggcggaagacggaggggctggacccagtcaagggttttgtgcgggcgccgcgcaagggcggcgaagccaacgaggaggaaacagagcttgagaaggcggcagcccagtggggcaagaagcagcgcaagaaggcgggcaaggcggcccgggcggcggagtatgcacccaagcaaaacgtgcggaagaaccgngggcgcaagcgggtgagctgctacgggtgctgagctttagccagctgagttgtagccagctgagc

SEQ ID NO: 34 - DNA, 535 bp, Chlorella sorokiniana
  Clone ID: LIB3602-001-P1-K6-D9
aaaaaaaaaaaaaaaaaaaaaaaaaaaaaaaaaaaaaaggaaaaaaaaaaaaaaaagaaaaaaaaaaaaaaaaaaaaaagggggcggcggattaagaggaaccaaagctgaacagaacgcgtgcatgcgcagggcagaggttttccaacgtggcgcctaaataaaatccagtggcccccaattggggggggggggactggaaaaaccctggggcagccgaactaaaagggatggggggagaaccccttgtcgccagcaggagtagtggcgaaggggcggggaccggtaggcctcccgaacaggtgcacaaaccgaagggggagtgggagccgccctgaaggggaccattaaactcggcgggtggggaggtccccctcagggggaccgttacacttgctagtgccctagcgccgcgtcctttccctgtctagactttaaattgtgggcacgttcgagggtttccactgagaggttttaaatagggggccccctaaagggttccgaataagggttttacgggacgggggccccaaaa

SEQ ID NO: 35 - DNA, 455 bp, Chlorella sorokiniana
  unsure (1)..(455): unsure at all n locations; Clone ID: LIB3602-001-P1-K6-E1
gacacgatcaagacgcgcatgcaggcgttccccgacagcaaggcgcaccccgagtaccgctccttcatgtccaccacacggcacatcctggccacagagggcgcgggcacctttttggcggggctggggccccgtgccttccgcgtctgctgcgcagttttcatcctcaacggcacccgcaacaccatcgtggacgcgctgcaagcgcagcgcacgccgcacgtggtgcccgtctgaggccggcagcgcctcgcctgactggcggcacgccgccgcgcaatgccacaattgatctatacttctgacatttctgcagccatcgatgaatgcacgctctgcagctgtacctgttcagtttactgctccatgtcgccatgcacaaaatacaaagcccccgcgtatgcaacgcccacttgcaaaaaannnnnnnnnnnnnnnnnnnnnnnnnnnnnnna

SEQ ID NO: 36 - DNA, 554 bp, Chlorella sorokiniana
  Clone ID: LIB3602-001-P1-K6-E10
cgccgatggcgtcttctacgctgaactcaacgagctcctcatgcgggagctgggcggggagggctactctggtgttgaggtccgcgtcacccccatgcgcacggaggtcatcattcgtgccacgcgcacgcagaatgtgctgggcgtcaagggccgccgcattcgcgagttgaccagtgtggtgcagaagcgcttcaagttcccggagggctctgtggagctgtacgccgagaaggttgccaaccgtggcttgtgcgccgtggcacaggcggagtccatgcgctacaagctgctgggcggcttggctgtgcgccgtgcctgctatggcgtgctgcgcttcgtgatggagagcggcgccaagggctgcgaggtgattgtgtctggcaagctgcgtgcgcagcgcgccaagagcatgaagttcaaggatgggtacatggtgtcgagcggcaacccggtgcgggagtacatcgactcagccactcgccatgtgctgctgcgtcagggtgtgcttggcatcaaggttcgcatcatgaaggagtgggatccgactggca

SEQ ID NO: 37 - DNA, 271 bp, Chlorella sorokiniana
  unsure (1)..(271): unsure at all n locations; Clone ID: LIB3602-001-P1-K6-E11
aaaaaaataaaaaaaaaaaaaaaaaaaaaaaaaaaaaaaaaaaaaaaaaaaaaaaaaaaaaaaaaaaaaaaaaaaaaaaaaaaaaaaaaaaaaaaaaaaaaaaaaaaaaaaaaaaaaaaaaaaaaaaaaaaaaggaaaaaaaaaaaaaaaaaaaaaaaaaaaaaaaaaaaaatttataaaaaggggggggggggtttttaaaaaaaaaaatttttttattaaanattttttttttaaaanttttttttttaagntaaaaaaaaataaaata

SEQ ID NO: 38 - DNA, 478 bp, Chlorella sorokiniana
  Clone ID: LIB3602-001-P1-K6-E12
ggtttccccgcactttgcccgcccgtgcacccccacgtgtgcctccttgaacccctacccgtcccccggtcggtccccctctccagccctgcgctgcccctcaaaatgaccgaatgccccccatgcgactaacataccaaacccgcccgcaattgtacactgtctgcacgctccttccgttatctgccgtctgaaccgctctaggcagccgccattcgtcctgctggagtagcttcagttttccaactccccagataggcacgagtgtacacccgtaccagactgcattagcctctctccctcgctgtgtgcacgggtcttgatgccgcagccacccgcctggccggctgagcccgacccttttccttcgtctcctgacttggggagtgaccgggatgctcttcatttagcactgacttcctcctgatttgcctgattcctcgccaactcttgccagtgtaaagcctgctgagtggca

SEQ ID NO: 39 - DNA, 586 bp, Chlorella sorokiniana
  Clone ID: LIB3602-001-P1-K6-E2
cggggctgtacaagggagtgacgtcgccgctggcggggcagatgttcttccgcgccaccctgttctccgcgtttggtgcctccaagcgctggctggccaccaaccccgacggctccacgcggcagctcaccagcgcagacttcttcaaggccggcttcatcaccggcgcggcggcggcgtttgcggagagccccatcgacttttacaagagccagatccaggtgcagatcatccgcgccaagtcggaccccgcctacaagccgccctacacaaatgtgctggactgcgtcaagtccacgctgcgcaccagcggcgtccgcggccccttccagggcctgtccgccacgctgctgcgcaatgcgcccgccaactccgtctacctcggctcgtttgaggtgctgaagaaccgggcggcggcacactacggctgcgagatcaaggacctgtctgcccccgtggtcatgggcgcgggcgccaccggcggcattctctactggctggccatcttccctgtggacgtggtgaagagcgcgatgatgaccgacagcatcgaccccgcacatcggaagtacccctccatacctgt

SEQ ID NO: 40 - DNA, 310 bp, Chlorella sorokiniana
  unsure (1)..(310): unsure at all n locations; Clone ID: LIB3602-001-P1-K6-E3
gcaggcggacgccgcagacgcggtggcgttcgggcgccacttcatttccacgcctgacctggtgcgccgcgtcgcgctgggcgcaccatacaaccaatacgaccgcaacacgttctacgcacaggggccggagggctacattgactatccttttctggaggatacgccggagggcaaaggtttcctggccaaggcgtgagggcgcagccnngccgctgtggcagcagtcagcaaagcttggtgccgccgccgtcggcctgctgccctgggtgcacccagagcacttgggggggtttggggggcccccccc

SEQ ID NO: 41 - DNA, 561 bp, Chlorella sorokiniana
  Clone ID: LIB3602-001-P1-K6-E4
gggcgctgtgttgcacggcaaccgcccggatctgccgcctgccgagcggctgccgggcctcaactctacagggcaggcggggctgcctgcttacctggacctaatgcacagctgctgggctcaggaggcagctgagcggccggattttgaggcgatcgttgtggagctgcgggggcagctggaggccgcgggcggcatgcagggcgggcccagcggcctgcacagcatgcccagcgtgtgcagcgcgcccagcggcatgcccagcacgcccagcgccagcattccgtagtgatcatggtgttttgcgctcggctttgcatccgatgcaaaggagtcctcggcagttgttttgagaagacatcaatccctgctgaagacttttcgcgtgcctccgtgtggccgccatctcaagccttgctctctacatgcatcgaggtgccccgcacagcctgttgctcttgcgcgagctgcatctgatgccacattcacactgcacacatgttctgaggcgggaaatgtctcagcccagcgcgagccagggcagtgtaaacaacaactgtg

SEQ ID NO: 42 - DNA, 529 bp, Chlorella sorokiniana
  unsure (1)..(529): unsure at all n locations; Clone ID: LIB3602-001-P1-K6-E5
tgggaacaagtgcaagtcgacgctgtcttacaaccagtactgtgctaaatgtgacgccaccggcctcaagtgcctggcctgcaatggctcgcgctctccgccctacggcgcgcctgacaaccggtgcacgttcccgtgcaaacagctgtatggcattggatgcctcaaatgcaaccagtggaagtgcttggttacggacacaaagtatgccaaaggccgttgatcagcgaacaaggaatgaggagaaagcagctcgagcggcatgccaccgatgcccgttgcatggtgccgtggatgcggccactgctattgagaccacgccgacttccattgtgtatggtgcacgactgtccgaataagaccccattccttcacacgggctgctcaaacttcatgccattccacttaccttttcatgtacctcgtcaagtcaaccttgctcacgattntcatttagagggctggggcacgcctcgcatgccctgccctcttgccatcacatcacactgctccacccctttgccgccat

SEQ ID NO: 43 - DNA, 458 bp, Chlorella sorokiniana
  unsure (1)..(458): unsure at all n locations; Clone ID: LIB3602-001-P1-K6-E7
gccgcttgctcagaaggaatttgattctgccagaacaaatgccagttttctcccaccttttatcctgtcttttcaatagatgatggcttcctgaaatgtcgatgatgtcggatggacggcgcggttgtgcagggccctgagggcccgcccgcctcctgccattttcaccgctccccggggacctgcattttgttggcgcacgcgcgctcacactctcattgcagcacacgtgtaatgcacccgagcggnaaaaaaaaaaaaaaaaaaaaaaaaaaaaaaaaaagggggggccgttatagaggatacgggctgacgcactcgtgcatccaagcttatggcccctttattgcgacaccaaagttcatttcacgggccaccttaatacaacgttgtgaccgggaacaccctgcgttcccacagctaaacccctgtgatacacatccttattgacatagctg

SEQ ID NO: 44 - DNA, 305 bp, Chlorella sorokiniana
  Clone ID: LIB3602-001-P1-K6-E8
cccaacatgcttgctgccacatgtgcagcttgcctactacatgtagtcatttactcgtgccaagcatgcagcagcagacccgcgttcggacctgctgattgctgctgtcaactgatttgtttgcggttgttttgtgcaatctttatttccgcttcgtcattacattagcatgttgcgcggggagcactgatgcatggtgcaagtgttgcttgcaacattattcccaactagctgcagtgaagccctctgtccacattacgcaagggcggaagcttgaacagtgtgtaatgtaactctgtgctgtg

SEQ ID NO: 45 - DNA, 531 bp, Chlorella sorokiniana
  Clone ID: LIB3602-001-P1-K6-E9
aggacctgtccgtgctcaacctggtgatcgtgaagaagggcgagcaggagctgccgggcctgaccgacgaggagaagccccgccagcgcggccccaagcgcgcgtccaagatccgcaagatgttcaacctgaccaaggatgacgacgtgcgccactacgtgaagatctacggcaagaaggtggagaagaacggcaagaccaccatcaagtgccccaagatccagcgcctggtgacgccccaggtgctgcagcgcaagcgccggcgggccgccatcaagaaggagcgcatctcgcgcaagaagaccgaggccgccgagtaccacaagctgctggtgcagcgcctgaaggagcagcgcgagcgccgctccgagtccctggccaagaagcgggccatccgcatggcctctgttgcctccaaggaggcgtaagccgtccctatgccgcctgcatagtggcgcctgccgcctgcttgttgaggcgaggggcgcggcgcggcgcgaggcgcgggcagccctcccctgcctgcttgca

SEQ ID NO: 46 - DNA, 561 bp, Chlorella sorokiniana
  Clone ID: LIB3602-001-P1-K6-F1
gacggtgcaggttgggcccacccggcatgaagtgacggccattctggtgctgtacggcctgccgcgcctgctgactggctgcatcctggcgcacgagtgcacgcacgcctacctgcgcatgtctggttttgcggcgcaccggccgctgccagcccaggtggaggagggtctgtgccagctcatggcgctcctgtggctggaggcgcagcagggcagctacaaggatgcatgggaggagcggctggccgccttcctgggcaaccagatccgcacagaccagagcgagacgtacggagacggcttccgactggcgctggacgcctaccaagcacacgggctggtcaagctgctggcgcacgtcaagcagacgggggccttcccaaccgtggcttgattgtggctgctgcaatttggagcggtggagtgaagtgtagcggcacgatgcgtcaccagctgcctgcgaccagttgccacccatccttccacactcgctgtacatttgactcttcgtctgcgcttgctatacagttgactaaacatgatattgcaaacgaatcagtt

SEQ ID NO: 47 - DNA, 480 bp, Chlorella sorokiniana
  Clone ID: LIB3602-001-P1-K6-F10
aaaaaaataaaaaaaaaaaaaaaaaaaaaaaaaaaaaaaaaaaaaaaaaaaaaatgaaaaaaaaaaataagggaatccaaatttgggtggctccttctttaaggagtcatgggctttgcttcttgtgtgtcctacttttattgtccctgtgtctttgtttcactgcgttgttttttttgaaccccgtgggggggcataccttgttggtttcccaacttgattcccttttttgaagttgcttttatacctaattgtttactccggtgggggcttgcccgcattggcccttccccgattgtccttatggcactctgcccgttgggactcgtcattgggcgccgcttttgtggttccgtttaaggtggcctcttccctgttgctcccctctagtgtgcctttttttttttccacgtccttaccttttcctcccgttgctctttttcccccgtttcgtttttttttggggggttttttttgggg

SEQ ID NO: 48 - DNA, 613 bp, Chlorella sorokiniana
  Clone ID: LIB3602-001-P1-K6-F11
tacaagtcatgtccggcgtgcagcagcgcttctttgagcaggctgatcatggcgcagcggacgtgcggccgctgctgcgggcagcacggcaagctgtgctgtcgggtgtgtgcgtgctgttcagccgcgtggtgcccctggactgcaaggatcccagcgtgcacccgctgtggcagctcgcgctcaagctgggcgcccaatgcaccacgggccaggaggagggggtgacccacgtggtggccacagacatcaccgacaagacgcgctgggcacgcagccagggcaagtttgtggtggcccccagctggctgtggtgcagcgcctacacgtggcggcgggctgacgaagcgcagttccccgtccgccccggcggcagcgcggcagcggcgcaggcggcggcaccacggtcggaggcagaagacgtggcacaggcgcttgcagcggccggcggcggcggaggagagcagcagcagcagcagcagcagcagcagcagcagcagccggcggcagactcagcagcagcagtggagcctgcagcacccggttgatgtgttgatgagttgagcgctgcagtcccccttctttctctcagccatgtgaacacgtgtggcat

SEQ ID NO: 49 - DNA, 462 bp, Chlorella sorokiniana
  Clone ID: LIB3602-001-P1-K6-F12
gggcatcgccgagatggctgagctgaaggagaagccggaggtaaaggagaagctggcgcgccgcatcgccagctgcaacgtcaaggtgcttaaccctccgcgcccgggcaagaagcttgctgtgctggacatcgactataccattttcgatctcaactcatcggcggagcggccggaggagctggcgcggccgttcctgcacgagttcttctcggcagtctacgccgactatgacatagtgatctggagcgccaccagcatgaaatgggtcgaggtgaagatgcgggagctgggcgtgagcacgcaccccgactacaagatcaccttcatgctggatcaccttgcgatgatcacggtgcagcaccccaagtacggcctgttcgactgcaagccggtgcaattcatttggagcaagttccccgagccctatgggccgcacaacaagatcatgcttgacgactt

SEQ ID NO: 50 - DNA, 266 bp, Chlorella sorokiniana
  Clone ID: LIB3602-001-P1-K6-F2
ggcggcgccggaggccaagaagaagagcagctgctgctcaagcgcatgagctggcgctgcgccatgctgtggcggcagcgtgccggggtgcacctgcgtcgctgcccatgtatctgctctccttttctccttttcgccgcctcttgttagccagcgccactattcctttcgtgactgcagcggcggcgcggcccggctgggcatgggctgctgcgcccgtgccgcttgcgcctgcccgctgcgcctgactgtaaccacggcacgtg

SEQ ID NO: 51 - DNA, 523 bp, Chlorella sorokiniana
  Clone ID: LIB3602-001-P1-K6-F3
cgcggtgatggcggccggaaggtatgacctgcaccacgccatcctgcggttcggtggctacacggccgccagcgagatcctggggcgcccctccgcctggccaccgcacaaacacctgcgcagcctggccgccctgcgccacgagctcaagtcgttcctggcggagactgggctgccgggcaacaggctgcccactgccagccagcttgtcaatgcggggcgaggcgacctgtaccaggccattgtgcggcgcggcgggttcagcgccacggcgcaggctctgggctgggagacgcagcggcgggcgcggcaggcgtgggccgacatggccgacgtggcgcgcgagctccggcgcttcatcctggctgcccatggcgcccagcagcccgatgcccagcagcggcgcggcaggggccagtcgcctgggcggcaggcggcggcggcggtggcgccagcagggcatgaggatgggagtcccgtgcctgctggggcgcgcatgcccacgcaccgtgagctggccagc

SEQ ID NO: 52 - DNA, 506 bp, Chlorella sorokiniana
  unsure (1)..(506): unsure at all n locations; Clone ID: LIB3602-001-P1-K6-F4
gccacagccagaccgtggtggtgtgccccagctgcaacaccgtgctgtgcgtgcccaccggtggcaaggcccgcctgaccgagggctgctccttccgccggaagggcgactgagcgcgcccccgctagcggcagtgttggcgctgggcagcggttattgtgatgtccacgggcagcccgtggcagcggcactcgcactcctctcttgttgggatggagcaacaccttgcacgggcgtcggaggagactgatcgcccacagtgaggagcacgcggccgggggcctccgcccctgcagccgcgtgtgaagagccacgagtatagcaccccgcgctgccaggcctcgcggccggcgcgcacaaatgactagcacccgcgcctgcggccggcgctgctggccggtcgcggccgggctggctgtcccaggaagtgacatgcactgatggttttgcccatgcatgcggcactgtaaaaagaggnaaaaaaaaaaaaaaaaaannnnnnnnng

SEQ ID NO: 53 - DNA, 248 bp, Chlorella sorokiniana
  Clone ID: LIB3602-001-P1-K6-F5
ggcgtggacgctgtgttcaagcctgtggtcgcagcactcagccgccgcggcctctgatgcacttcaccgcagctggcctgtcctgaacttgttgttttccttgctgcatagctccctgctttacattgctccccctggaccatccactggttggtgctatccccgctgcccgctggcgggggggcatgcattccttacacgctgacgcaagctcttactcaggcttttgggtaactcactcaacctgg

SEQ ID NO: 54 - DNA, 323 bp, Chlorella sorokiniana
  Clone ID: LIB3602-001-P1-K6-F6
agcacagcgacagcaggcaccccaagaacaccttcgctgactgcttccccaatttcggcaagtgatgagccagcgctcaacagctaggcctcaatgaatacaagagggcccattatgaatgcgcgcccagccagctaaccgtcaccagcccaattcatgcaagatagccagcccaggcggcgtgcctgccgacagatttcatcatcagcccgcccggcacaagcgtggcctcctaacccttcttcgccatgtccttgcttgttctgatttcatcatgattccctttcatccggtaatctttcacccggtaacagcgcctcggc

SEQ ID NO: 55 - DNA, 398 bp, Chlorella sorokiniana
  unsure (1)..(398): unsure at all n locations; Clone ID: LIB3602-001-P1-K6-G1
cgggaggccctggagggcaagggcaacggcgagcacggccccgagggcgccaaccagtgggagcgcatcatctccatgatcgacttcaacctgacacgccccaacggcagcgatctgtcccgcttcaagagcgtgctgttcaccgccaagtccaagggcggcctgccggcggcggcctgatgggcagaacccagcggctcgtgctctgcggccgtgccaaaggttgggcggcgtggctgagccccggctgagccatgcgcgccctgtggagcgcccgtccccgctgcggcatgcataccacccggcctggcctgtcattccaacacactgtattgctagagtatgcgattttgctgaattgtgacaaagccggccaaaaaaaaaaaaaaannnnnnnn

SEQ ID NO: 56 - DNA, 596 bp, Chlorella sorokiniana
  Clone ID: LIB3602-001-P1-K6-G10
gggccgttcggcgccggggcaggaggaggctggagaggcggctttcctcaaggcggcggacaaggcgatgggggatctggggacgagcggggatgcgccgtttggcggcgaggtgcagctggacccggagtcgcaggtgtactggtggcacgacaagtaccggccgcgccgacccaagtacttcaaccgcgtgcacacgggctacgagtggaacaagtacaaccagacgcactacgacggagacaacccaccgcccaagacagtgcagggctacaagttcaacatcttctaccccgagctcatcgacaagacggtggcccccacgcacaaggtggagaaggacccgctggcggaagacggctccacctgcatcctgcgcttctcggcggggccgccctacgaggacatcgccttccgcatcctcaacaaggagtgggagtacaaccacaagcgcggcttcaagtgcgtgtttgagcgcggcatcctgcacctctacttcaacttccgccgccagcgctacaggcggtagattagctgcatccagagcttgcttgcggcagctgcagcgctgcaacaagcggcgggcgggtcgtgca

SEQ ID NO: 57 - DNA, 400 bp, Chlorella sorokiniana
  Clone ID: LIB3602-001-P1-K6-G11
cagcgcactgagcgctgtgccgccggcgcgcctggtttgtgcgctgcgctcgtgtcgattgcactgtgtaccaacacatgcctgcacagccacccccacccgcctttgagctgaatgcctgcacagccgacccgcacccctgacccgccttgcaccgtgaggtgcagcatgccgcagcaatgcggctcaagataccccccacccccgacctaccgcatgccctgttctgccttgtgtgtcaaaccctcttaaccctgatggcatctttacccctcgccaaacccgcttgcaccccagctgcctgccacactgtagcacttgccttgcacccgcatctactgtagcatttgcacgtctctcctgcctgtttctgacgctcctctgtaaggcgcacactgtt

SEQ ID NO: 58 - DNA, 407 bp, Chlorella sorokiniana
  unsure (1)..(407): unsure at all n locations; Clone ID: LIB3602-001-P1-K6-G2
gtgctgccggccggttggggcggcccctgctgccgccccactcatcctgcttgctctgatgcagcttgtcccagcgcctgcaattcttttgaccccattcctttcttttgcccgctagtttgtgctgctcctatcttcgtcgcatcacatgggtgtactgccccacgtttcatggcgggggggggactcacaccttgcctcccgcccgagcgcactaccccccccatccccacccccacattgctcgccgtctgaacgtagtcccaccaccgncactcgccccagccctgccccatattaaataacgctgcgcccaccgngcggattttcctcccnagcattctagtgcctgcgcatttnaaggccccacnttttttttacaatggcacctgncaatcctgactgta

SEQ ID NO: 59 - DNA, 271 bp, Chlorella sorokiniana
  unsure (1)..(271): unsure at all n locations; Clone ID: LIB3602-001-P1-K6-G3
caggcaggtgcagcaagctggatggagcagcagccgacctgctgaaagcagcaatcggctgcatgttctatcaccggcagctgcagctgctggccgcgcaactggatgagatcgcccaccaaccgaacactgctcttctttccacctggccccaccctgcgcttgcagtttttgtgtgtgtgtgaattcttttgtgcctggcaatactatgcaggcgtagcagtaatacatgcatggctaaaaaaaaaaaaaaaaaaaaaaaaaaanaaaa

SEQ ID NO: 60 - DNA, 58 bp, Chlorella sorokiniana
  Clone ID: LIB3602-001-P1-K6-G5
aaaaaaaatttaaaaaaaaaaaaaaaaaaaaaaaaaaaaaaaaaaaaaaaaaaaaaaa

SEQ ID NO: 61 - DNA, 614 bp, Chlorella sorokiniana
  unsure (1)..(614): unsure at all n locations; Clone ID: LIB3602-001-P1-K6-G7
gtttgcgcggcgcgtcatctccctggccgagtaccgccagaagctgttcaactacctgtcggacaagatgcacgcggtggcgcccaacctggcggcgctgatcggcgagctggtgggcgcgcgcctcatctcccacgccggctccctcaccaacctggccaagtaccccgccagcacagtgcagatcctgggcgcggagaaggcgctgttccgcgcgctcaagaccaagggcaacacccccaagtacggcctcatcttccactcctccttcatcggccgcgccaagcagcgcaacaagggccgcatcagccgctacctggccaacaagtgctccatcgcctcgcgcatcgactgcttcctggagaccaacaccgacgcctttggtcagaagctcaaggaccaggtggaggagcggctgcggttctatgaggagggcgtggcgccccgcaagaatctggacgtgatgaaggaggtgatcagcacgctgggcgacgcggcgggcgagggcgagcccgcggaggagggcaagaagaagaagaaggagaagaaggagaagaagcggaaggcggaggcggctgaagaggaggccccggcngcagcggaagagaaggcgg

SEQ ID NO: 62 - DNA, 195 bp, Chlorella sorokiniana
  unsure (1)..(195): unsure at all n locations; Clone ID: LIB3602-001-P1-K6-G8
aaaaaaaaaaaaaaaaaaaaaaaaaaaaaaaaaaaaaaaaaaaaaaaaaaaaaaaaaaaaaaaaaaaaaaaaaaaaaaaaaaaaaaaaaaaaaaaaaaaaaaaaaaaaaaaaaaaaaaaaaaaaaaaaaaaaaaaaaaaaaaaaaaaaaaaaannnnnnaaaaaaaaaaaaaaanaaaannaaaggggggggggg

SEQ ID NO: 63 - DNA, 420 bp, Chlorella sorokiniana
  unsure (1)..(420): unsure at all n locations; Clone ID: LIB3602-001-P1-K6-G9
cccacgcgtccgcctcggccggcggcggcgcggcacgctgcgcctgctgtggagcccgtggtggtgccgcccgagaactttgagctgcctgaggtggtgcggacgctcaaggagaagacgccctcgtcacaggagctgaaggagctggagcgggagcgccagcggtatgcccgcgagtagtcggagcggctcaaggccaagaaggcggctgagaaggagaagaagcgggcacggctgctggctgcggcagcacgtgcgcaagaggcagctgcggcggcgcaagtggctgccgctgcggcggtggcggcggtgggcggcgacaacaccgcattcaacgacagtggcgagggcagcgcggcaggggcggncnctgtcaccggcgctttttccggggcagaagacgctggccctgccgctgct

SEQ ID NO: 64 - DNA, 343 bp, Chlorella sorokiniana
  unsure (1)..(343): unsure at all n locations; Clone ID: LIB3602-001-P1-K6-H10
gcgatctagaactagtcatcaacagggagctggacaaagtggatccgatcgcctgatctctgctcaacacaccagcgcctttgtaccatgcacagcaccagctttgatgctcatgcgagccatgtatcatacgtgttcataagagccacccatctgtatctcgttgcatcaggattaattcctctctgtcgatcagcatccgaggactgcctagcgctgccgatgccgccgtcgcaccccttacgcaccagacatacagatcagcagattgtaaagcagttcaacagggaaaaaaaaaaaaaaaaaaaaaaaaaaaaaaaaaaaaaaaaaaaaaaaaaaanna

SEQ ID NO: 65 - DNA, 159 bp, Chlorella sorokiniana
  unsure (1)..(159): unsure at all n locations; Clone ID: LIB3602-001-P1-K6-H11
actagttttagancgcgagcggccgcgcgnggggggnnnnannnnnnnnnnnnnnnnnngggggacagggnngggggnacacaacccgagccggaaagagcgcaacaccagcaacgggagggggacacgggggggggacagacacaccgaggcaagggg

SEQ ID NO: 66 - DNA, 278 bp, Chlorella sorokiniana
  Clone ID: LIB3602-001-P1-K6-H2
ggcagcgcaaggcgttccggcggaaggacggcacctacatctactttgaggacaacgcgggcgtgattgtcaacaccaagggcgagatgaagggctccgcgatcaccggccccgtggccaaggagtgcgccgacctctggccccgtgtggcggcagcagccaacaccattgtgtagagcggcggccgtccggctgggcgtcgcggcagcgcggaccacactgcagtacccaccgcctgccgcgctcccggcgcagcatgctgtaatgcacatccagcg

SEQ ID NO: 67 - DNA, 300 bp, Chlorella sorokiniana
  unsure (1)..(300): unsure at all n locations; Clone ID: LIB3602-001-P1-K6-H3
cccaacgcgtccgaaaaaaaaaaaaaaaaaaaaaaaaaaaaaaaaaaaaaaaaaaaaaaaaaaaaaaaaaaaaaaaaaaaaaaaaaggaaaaaaaaaaaaaaaaaacaaaaaaaaaaaaaaaaaagaaaaaaaaaaaaaaaaaaaaaaaaaaaaaaaaaaggaaagnaaaaaaaaaaganaggggggggggaaaaaaaggannaaaaaaaaaaaaggggggaaggaaaaaaaanngnngngnagaaagggggagaaaaaaaaaaaagggggggagggaaaaggaaaaaaaagaggggggg

SEQ ID NO: 68 - DNA, 547 bp, Chlorella sorokiniana
  Clone ID: LIB3602-001-P1-K6-H4
agcccatctgcaccgtcaatcggctctgcagctgcgagctttggcacgaaagcctcggaacccacacctcgcagcaaacatgggcattgtcgatgccatgcggcggctgagcggccggccctacagcggggagactgagcccaagtcgccccggtcgccccaggccacgtggagggacacagacccaggctacaaccccaacatggccaagacggggcgcagctactacgacacggtagagaacaagaaggcttcgcccggcatctgggactaccacctgcagtctgagaaggctgagcgggaggcgagccacgacgtggcgcgcgccgccttcaagtccatgggcgcctccaccactccccaaggcgatgtgctggatgcctctgccctgcgcaagatgtttgcctcggaccgcgtggaccagctgatggccatggccgacaagaacaaggacggcaagatcgacttcaaggagttctgcgacctgatccgcaagtacccctgcgactgagcgatacataaggcagatgcacggaccaatccctgc

SEQ ID NO: 69 - DNA, 55 bp, Chlorella sorokiniana
  Clone ID: LIB3602-001-P1-K6-H5
aaaaaaaaaaaaaaaaaaaaaaaaaaaaaaaaaaaaaaggggaaaaaatatggag

SEQ ID NO: 70 - DNA, 439 bp, Chlorella sorokiniana
  Clone ID: LIB3602-001-P1-K6-H7
ggacttggctgcaccgcaggtgtccaacatactgtacgaggcgggagctggggtggtcaacgtggtggcgcgcccagcaaaaggggggcggcgaggaggcgtggtgggcgcgctcaaaggcgcggggcgcggcctgctcgacctcaactaccgcccagtgaaagggctggcgctctccgtggaagccctggagcgcatggtggtgcgggagtgacccagcaggactcggagctgcgacctatctgaggggaactgcagcgcctgttgcaattcattccttgaaggccgaatggagagtattccagacattccattaatgaatgaccaggctggcgccaacggctgcgggggcagccgcatgagcactggtcagcagatggtgcagcagctgcggcatcgctcttgcatttgcagaccatgtaatgtaactcaagtgcct

SEQ ID NO: 71 - DNA, 581 bp, Chlorella sorokiniana
  Clone ID: LIB3602-001-P1-K6-H8
cggacgcgtgggagaagcggctcatcctcatcggcccccccggctccggcaagggcacgcagagccccatgatcaagaacgacaactgcctgtgccacctggccaccggcgacatgctgcgcgcggctgtggcggccaagacgccactgggcctggaggccaagaaggccatggaggcgggcgcgctggtgtcggacgagattgtggtgggcctgattgaggagaacatcaagcgcgccgagtgccgcaccggctttgtgctggacggcttcccgcgcaccgtggtgcaggccgagaagctggagggcatgctgaagaagaagggccagacgatcgacaaggtgctgaactttgcggtgcccgaccagctgctggtggaccgcatcaccggccgctgggtgcaccccgcctcgggccgctcctaccacgagaagtttgcgccccccaaggtggcgggcgtggatgatgtgacgggcgagccgctggtgaagcgcaaggacgacaacgcggagacgctcaagagccggctgttagcgttccatgcgcagaccgcccccgtgattgccttctacaaggacaag

SEQ ID NO: 72 - DNA, 467 bp, Chlorella sorokiniana
  Clone ID: LIB3602-001-P1-K6-H9
ccccacaagacagtttacatgtacaccattcactatcagagtgctttcctatcacgaatcacatgcgcaccttttaaggaacgggcgctacacattagtgcacatgcgggtgcggaaggcggctcgcacataaggctccggaggcagtcataaggctccggaggcagtcgttcaacggcaatgcacacaagtggcggtgcacagcagtacggcagtacgtgaggaggtggtggcaatgaagacagttcaaaatcatatcgacggggcacggatcaaacataggggtggtaaaagcggggcagcaatgggtcttgcttcggcagggggcaagtacagtgcatctcatattaatagcatgacaaccgatcacacaggaatgcgctaactgtggcaacgcaggccaagcacagtttaggataagatttgcggatcaacagcgagccaacaggacagcagcgttggggggc

SEQ ID NO: 73 - DNA, 523 bp, Chlorella sorokiniana
  unsure (1)..(523): unsure at all n locations; Clone ID: LIB3602-002-P1-K6-A10
cctggacctgggggaggcgctgtggctgtcgcactgggcgctacccgaaggggaggcctgggcccagctggtcagcgagcgctcctcggccgcactggacgacttgtggcgccgcggctacttccggcagcctgagccgtaccggcttgcctttcgggagtttggcaccacgctgggggtgcaggtcaacccggcagccggcagccactgggcgggccgagtggatgcgctgcatgagttctgggcgcagcacctcttcactcgtgatgcagacatcacccccgtcatgtttgctgccagcctggtgccaggagcctgggcgcggaactataccccccggctgcgccagctggcgcagcgcttgcgtggcagcgaagagtgaggctgaagcatgcactgcgcactgcagctacagcagccacgcccgtgcatgtgctcggccaataaccctaagccatcctgctttgcttttttgcccatttggttgaaagcaagttgctcagatggcccgcagngcatacta

SEQ ID NO: 74 - DNA, 79 bp, Chlorella sorokiniana
  Clone ID: LIB3602-002-P1-K6-A11
aaaaaaataaaaaaaaaaaaattaaaagggaaaaaaaaaaaaaaaaaaaaaaaattaaaaaaaaaaaaaaaaaaaaaaa

SEQ ID NO: 75 - DNA, 445 bp, Chlorella sorokiniana
  unsure (1)..(445): unsure at all n locations; Clone ID: LIB3602-002-P1-K6-A12
aagncattgaggggtgcaagggtgcgttcggagagggcatgcatgcaggaaaaggcagcattcgtagtgcaccaggcagcagggccacgggtttgtaaatggacacgatggcatgcatctgttttagtatcactcgttttcagcagcagaagaggaacactggagcttattttgctggaaaaagggaagaggtggcgcacagcagtgcactgcaagcggctgacagtcagcaggccagaaaagaacacctgagcggctgccggccggctcagcgcgctggcgggagcagccgcggcgtccccggcagcatcagtgtgatatgccgtgcagcgccgccacccccagtgtaacttgaggcttcgaaaaaaaaaaaaaaaaaaaaaaaaaaaaaaaaaaaaaaaaaaaaaaaaataaaaaaaaaaaaaaaaaaaaaaaaaaananngg

SEQ ID NO: 76 - DNA, 670 bp, Chlorella sorokiniana
  Clone ID: LIB3602-002-P1-K6-A4
aggtcggccatgttgtgatggaggggcctgatgcctttggcctgccgccccgcaagcggcccggctccatcctgcggacccaggtggcggaggtgtgtgtggcggctctggtggagccctcggccagcggcaaggtggtggagatcattgccgaggagaacgcacccgcccgccccctcaccgagctctttgcctcagtgtgaagcaaaaccaatgtggcgccacctgccaccaaggcgccttgtgcagctggagtagttgctagcagctgagtgggcaacatgacccctcacagagctgtttgactcggtgtgaggcggctttcaactgaccaaggcagcagcagcttgcctctgtccatgcttagcagcggagatggacagctgctgcctccatgcgaggggactcaacatccgttacagcagcgttgggcgtgtcccggagcagggcgccattgctgcgatgcagccgcagcagcagagcctatctcgcctcccatccttcattcgcctcgatgaagtttccttccccccaatgcttccccaccacgtgttgataagccccgccattttggggcccatcctctgtctctctaccgccgaacgaacctgtgtgcatagcaaaccagcagatccccttcccaagccccaccatttgattcatttgatcg

SEQ ID NO: 77 - DNA, 428 bp, Chlorella sorokiniana
  Clone ID: LIB3602-002-P1-K6-A6
gcagcacagctcgcgatctctcacctgacaggcctcccttttccagaccgttgctttcattgtaggcaggccctcttcctgcctccagcgcatccgcctcgcgcccgccaaacgaatgcttccctcccctgctttggcttgcttgctgccacggcgtgacgcaccacactgccccgccgccgctgctgttgcttttcgctgcggttttgttgtctactttgaactatcgcctctcaaccacgctgccctgccctcccctctacctctaaatgtgctctctcactcttaccctgccccactgcggctgttttgcctgctgcatgcagtgggctggctagccgcaactctaccagtttctcgggctgctgcctgctgtgctggcaagtcaaaccgattttaggccttgaaatgttgcagcggaatgcggt

SEQ ID NO: 78 - DNA, 537 bp, Chlorella sorokiniana
  Clone ID: LIB3602-002-P1-K6-A7
cgtcatccccgatgaggtgtctatcgaggtcaaggcgcggcgggttcgcgtgaagggccctcgcggcacgctgcagcgcgacttcaagcacctggctgtggacatgttcctgactgaggaggagggcaagaaggtgctcaaggtggactgccactttggcaagctcaagagcctggcgtgcatccgcacctgcacctcgcacgtgcagaacatgatcaccggcgtgaccaagggctacgagtacaagatgcgcctggtgtacgcccatttccccatcaacatcaacatcgagaacaagggcggcaaggtggagatccgcaacttcctgggcgagaagattgtgcgcgtggtggacatgctgccgggcgtgacctgcgagcgcagcgccgccgtcaaggacgagctgatcctgaccggcaacgacatcaagctggtgtcccgcagcagcgcgctgatccaccagaatgcctggtgaagaagaaggacatccgaagtttcttggacggatatacctaagagagcgcggacccaggtgaa

SEQ ID NO: 79 - DNA, 445 bp, Chlorella sorokiniana
  Clone ID: LIB3602-002-P1-K6-A8
ggagattgcctttcgagcaaccgacatcgacggcgcgcccatgactgcccgccgctggctgtcgctggcctgccccggcggagatgacgatatgtttagctccagcctgagcgatgaacagctggcagccatctttgggccgctgcgcggcctgcccagcctcctgctgctcagcggagcagaccaatacgtgccgccgggggtggattatccagctgtggggcgggggcttgcgcaggcgatcggccccagtgcgcagctgcagactgtggagggagcgctgcacgccatggatggcaaggaagaggagggggcagctgccattgccgactttgtggcggcgcttctgccctgacaaaatgcactgctctgcctgtggtgttgcaaattgttgtactttatgttattccatagcaagcagcaagaattgtgaatacatgcgatt

SEQ ID NO: 80 - DNA, 341 bp, Chlorella sorokiniana
  Clone ID: LIB3602-002-P1-K6-A9
cgcgctgtccacgtgctgcgtggcgcgggcggcgccttcgtgctggtgctctacgacgagattaaaaagtatctgaaccccgacgccaagcccagctccgagtaaagagctcgcgcaggctgcccgacccacggcggggtggaacttttttttccaacaaaccagccaacccacgctcctgcgcactgcacagttgcctcctcttacagcgcttgctccctaccctccgctcgcccatgccatgagccgccagtgctgctgacgcacacgggcgctcgggacacgatatatgctgcgcacctccggcccctctgatgggcaaagctgcaacagatccgcag

SEQ ID NO: 81 - DNA, 570 bp, Chlorella sorokiniana
  Clone ID: LIB3602-002-P1-K6-B1
cggaggaggagcctggacgcaatggtgcagggcggctacaagtaccaccagtaccaggtggtgggtcgccatgtgcccaccgagaaggagccggagcccaccatctaccgcatgaagctgtgggccaccgacgccgtgcgcgccaagtccaagttctggtacttcctgcgcaagctgcgcaaggtgaagaaggccaacggccagatcctggccatcaacgagatctttgagcgcaaccccaccaccgtgaagaactacggcatctgggtgcgctaccagtctcgtaccggctaccacaacgcctacaaggagtaccgcaacaccaccctgaacggcgctgtggagcagatgtaccaggagatgggcagccgccaccgcgtgcgctccccctgcatccagatcatcaagaccgccacgctcacggcgtcccagtgcaagcgcgcggccacgcagcagctgcacgacagcaagatcagcttcccgctggcgcgcaaggtgctgcgcccctcgtcccgcaggttccgcaccaccttcaaggcggtgcgccccaacgtggccatttacttgacg

SEQ ID NO: 82 - DNA, 511 bp, Chlorella sorokiniana
  unsure (1)..(511): unsure at all n locations; Clone ID: LIB3602-002-P1-K6-B11
gcaccatcggtctggctgcggccctgggcgccggcatgcgctgcgtggtgacttacaccaactccacccggtcccaggactttgcgggcgctgatgcagtggtggccagcctggatggcgtcagccttgctgacctggcagctggcaagctggctggtcgggacgaccgggtggccgccgtcgccgccgccgcaagccagtaggcaggccgaccaacgagccagcttgcttgcgagcccgctgcgtgtagttgttccatttcctcagccaattcagttcactgcaattttgacaacccatgccgnccgaccgccacccaccaccccgctcccctctgtcccatctgatcaatgaaagcatctgcagctgtagctgccccccagcgggtctttgctggcatgctgagtgcctcctccaactctgctgctgctcctctgtaaacgtgtgtttgttttgcttacaagggattgagcgtgccacccagacgggcgtagaaccagcatggtggagc

SEQ ID NO: 83 - DNA, 459 bp, Chlorella sorokiniana
  Clone ID: LIB3602-002-P1-K6-B12
cgtccgaactcccggtcgcccagcgtccggcgccgcgtggccaccccaggttgacacagcagcgcggcagccatggcgtccaagcgtaagggtggcgtgggcggcaacaagttccgcatgaccctgggtctgcccgtggccgcggtgatgaactgcgccgacaacagcggcgccaagaacctgtacatcatctcggtgcacggctggggcgcgcgcctgaaccgcctgcccgccgccgcccccggcgacatggtcatggcgaccgtgaagaagggcaagcccgacctgcgcaagaaggtcatgcccgcgattgtggtgcggcagcgcaaggcgttccggcggaaggacggcacctacatctactttgaggacaactcgtgcgtgattgtcaacaccaagggcatagatgaagggctccgtgttcactttcctcttgtttaatgagtgtacctacttttt

SEQ ID NO: 84 - DNA, 501 bp, Chlorella sorokiniana
  Clone ID: LIB3602-002-P1-K6-B2
gccggccctgccggcgtcaccagccctggcagcactagcaacgcccctgctggcaccgcccctgctggcaccgcaactgctggcaccgcaactgctgacaccgcccctgctggcaccagcggcaccacctctccttcgggttctacagccagccccaccccctgattcctcaccgcccacccatgaaccctgctgggcctgagcacagcgcccagccctaggccctaacccttttgcatgcccgtgttctttttgaaaataacctcgaaagcaggatgggtaccaggtcctgcaagacctcttcttactggtatcaggaaagccgcacatgcacctccctcattctgattcattgcgctttgcaaagcacatgtgattgcatcgaccgagagttttgtttgcaccccgcccagcttccgctgatgctcgagttgattggagtgatacttgcacagatgttgaatgccacacctgcagcgtgtaagtcacagagctggtgcc

SEQ ID NO: 85 - DNA, 268 bp, Chlorella sorokiniana
  Clone ID: LIB3602-002-P1-K6-B5
ccccaacctaaatcaaccccccaaaccggcggcttgtcaaccgaccgcaaacgttttgctacccaaagccacaacgctcagtctcccattcattcgactcgttgccctgccaatgcgcttgcatgccaactcgttactcttcccgaccgctgcgatcctgcatgatccagaccactccatgccatctttcctacctcgttgtcgttgaccctgccctgacgctctgaaccatcagctatggctgcgctgctgtagactgaacaatgcc

SEQ ID NO: 86 - DNA, 541 bp, Chlorella sorokiniana
  unsure (1)..(541): unsure at all n locations; Clone ID: LIB3602-002-P1-K6-B6
gtggtcgtgtgccgcgcacacttcctcaagaacgcagaggtccgcaccctggcacggctgagctttggggctcccgaccgtgcagccgcagctggtggtgaggcagcggtggcgcctgccggcacagcacgagcggcaggggcacctgcggcggtgcaggtggccctctccagctgcgaggagcggcctcctgtactgcaccgacaccagcagcccgggagccctgctactgctggactacaccacgcaagacattattaagacgctggtggccccactggctgaccgcggcagcgcactcacagccctggccctgagccccgatgagcgcctgctggcggcaggcaccagtgccggcacggttctgctgctgcgcctggagacagaggcctggacggagctggcggcgcatgcggcgggcgcgccagtcaaggggctggctntcagctcctgcgggacacgcctgtggagcgcagcaggcactgccacatatgaatgggaggtgcagcaatgatgatgaatgatgatgaagcatgatgac

SEQ ID NO: 87 - DNA, 499 bp, Chlorella sorokiniana
  Clone ID: LIB3602-002-P1-K6-B7
aacaagagcgacctgcgccacctgcgctcggtgcagacggaggacgccaaggcgttctgcgagcgggagggcctgtcgttcattgagacttcggcgctggaggcgaccaatgtggagcaggcgttccagcgcatcctgaccgagatctaccacatcgtgtccaagaaggcgctggcctgcgaggacggccccgcggcggcacccaccagcggcacggcaatcaaggtgacggaggcggcgccggaggccaagaagaagagcagctgctgctcaagcgcatgagctggcgctgcgccatgctgtggcggcagcgtgccggggtgcacctgcgtcgctgcccatgtatctgctctccttttctccttttcgccgcctcttgttagccagcgccactattcctttcgtgactgcagcggcggcgcggcccggctgggcatgggctgctgcgcccgtgccgcttgcgcctgcccgctgcgcctgactgtaaccacggcacgtg

SEQ ID NO: 88 - DNA, 434 bp, Chlorella sorokiniana
  Clone ID: LIB3602-002-P1-K6-B9
agcagcgctagtttgaggaggcagcggcgccaggagacgggcaagctgcttgcagggaatggcggatgttgcttcagttgaggcgggcaagctgtgctggcgtgctggcagcagagggccggcggcaggcccctcacgagcgccaggatgcggcagcagggctggcggcaacaacacttgtgctagcggctttggcggggcgatctgcagagctgcgtgtgcgcagccagcagccggcagtggcgggcggcagagggagcgcagctggcagccattaaagcaacgcactgtcggtgcagcgtttgcggcggcgtgtgccggatgcagccagtcgcgaggctgccgcagcagtagcagatgagcggcggcgggcctgcccgcctgttgtgccgctgtgctgacgtatgctgctggtcaatagttcgcataacttt

SEQ ID NO: 89 - DNA, 110 bp, Chlorella sorokiniana
  unsure (1)..(110): unsure at all n locations; Clone ID: LIB3602-002-P1-K6-C1
gtccgnattcccggtcgcccagcgtccgatagcggcgccagcttggacgctttagcggtggacgacggtgcggagaacacatgcgcatgtttggggtacggcgggcggcg

SEQ ID NO: 90 - DNA, 187 bp, Chlorella sorokiniana
  Clone ID: LIB3602-002-P1-K6-C10
gtgagcggtgccgccggccccacccctcccacctgccggcgcgtgcaacccgcctcttgcaagtcgcctccatttcttcctggatccagtccttttgagctccctgtgtctgcattcctgtacactagtgcctgtattataagcaagcctctctcctgattgcacgaatgtgtagcgctgctgcccc

SEQ ID NO: 91 - DNA, 69 bp, Chlorella sorokiniana
  Clone ID: LIB3602-002-P1-K6-C11
gcttgtttctgcgtgcgctccgcggctgcacgatttgtaggaccgtttcaatgttgtaacaacagcgag

SEQ ID NO: 92 - DNA, 428 bp, Chlorella sorokiniana
  Clone ID: LIB3602-002-P1-K6-C12
cagcgatgactcccagatgtacatcctgatgcgcctgctgggtggtgccaagaagcgcaagaagaagacctacaccaagccgaagaagcagaagcacaagcacaagaaggtgaagctgcgggtgctcaagttctacaaggtggacgacagcggcaaggtgcagcgcctgcgcaaggtgtgcccccagtgcggccccggcatcttcatggccacccacttcaaccgcgtgtactgcggcaagtgccacctgacgtacgtgtacgacaaggagggccagaccgcctaagcgccccgctcccccctgcggatgcacgcttagcagcagcacacgcggcggttgcgcccggcatgcttgcttcacctgttttttagtggttttttctttctttgctttgttattttttttttttttttatttcttttttttt

SEQ ID NO: 93 - DNA, 517 bp, Chlorella sorokiniana
  Clone ID: LIB3602-002-P1-K6-C2
cccggtcgaccccgcgtccgactgccgccacctggcgtccgcggacacgcacgagcgcctggctgcactgtgccccaccgccgacggccgcctgctgctggctgccggtaccagcggcctcgtcacgctgcgctggctgcactcgctgcaggtgctgctgcggtacgacagtggcaggggcccggtcacagccctggccgtctctccagagggctgcttcctggcaggcacagcggagggcagcgtggtgctgtttgctcccgacccccgccgccgcatcaccacacgcttcaacctggcggcatgaagaggcggctgtgccagcaatgcagcacttgtcaatggaagctgttcccaaacggtgtgttcaaaaagccagctgacgcacggtcaacagaggctgttgcggcagtcgtgttctctcgccatgcagacatgtatactcttctactaaagctcttctgtaccatgtttccctgaagtaaataacatgcttagaggatacatttgcacccat

SEQ ID NO: 94 - DNA, 531 bp, Chlorella sorokiniana
  Clone ID: LIB3602-002-P1-K6-C4
gtgtccgagacgacgcccaccatcttcgaggacctgcctgaggaggcgggcacccgcggccgcatcaccgtctactgtgtggcggagagcatcgaccgcaaggcgctggagctgcggttacgggagcggggcggcgccgcgctgctgcaccagtatcctgatgtgctgtacggcatgtgggagtccagcaaggatggcagcatagtgcggggcgaggtgtactactttgactttggctgcctggccttctggggcctcagcgagcggcaggagcgggaggtgctggggctgctggttgggccggcgctggtggacgcgctgccgacgagcgaatgggaggtggagcagttccagttccactacagccttagcgagaagccgcacatccagaacgacacaataaccatcaactaccggctgcggcacgaccaccttataaagctgtccatctcgcacgccctggcacagtccgccaagctcagcgtgtacgaggagcgggtgattgagattgtggagaacaccaaggacctg

SEQ ID NO: 95 - DNA, 348 bp, Chlorella sorokiniana
  Clone ID: LIB3602-002-P1-K6-C9
cttgccccacgtctcctcccaccctccaccgcccacatctagcgcctctgctgcctctgcccacccgccagacggcgctcgcccgccatccccacccccaccccatcgtgtgtcgtgcagccgcggactcgccgcggcaatccatgcataccatctcatctcattgcgctaccgcatgtggggttccctctggcatgttcccggacacaccacagctaatcaagtgtgggagtgcttttggcagccgtcccaactggctgtcctgtcccacttttgtgttctgcgcaccgactgtgtccttgtctgccacaaccagtgcctcgaaccacccctgtaatccgcagcttg

SEQ ID NO: 96 - DNA, 300 bp, Chlorella sorokiniana
  Clone ID: LIB3602-002-P1-K6-D1
tatctctgtctcggccagttcgccaagcagctatcttatctctgtctcggccagttcgccaagcagtttgtcatgtttgactaggccatggtcacgccggcgcatgacaaggtttgataaggcttggttacgcctcaacaccgtttcttgtgccagtgctggcatgaagttcaaaagcgcatttagcgcatgtgaagtgatgtagtataggagagcattagccatatgtgcagggatcttagattgggatagcatgcacctcttcaagcaggaagcaaatattgtaatatgaacactctc

SEQ ID NO: 97 - DNA, 587 bp, Chlorella sorokiniana
  Clone ID: LIB3602-002-P1-K6-D10
cagacggaggggcggctgctggtggaggccctggtgcccgacttccagggccaacgcgaatgcgtggacctggtggcacgaagcgggctggatgtgtttgcgcacaacgtggagacggtggagcggctgcagggtgtggtgcgggaccgccgcgccaactgggcgcagagcctgggcgttctggtggccgccaaggaagcgggcgtgcgggtcaccaagacctccatcatgctgggctgcggcgagacgcccgacgaggtggtgcaggcgctcaagacgctcagggcgcacggcgtggacgtggtgacgctgggccagtacatgcagcccaccaagcggcacatggcggtgtccgagtacgtgacgccagaggccttcaaggcctacgagcaggtggccaacgacctgggcttcctgtactgcgccagcgggcccatggtgcgcagcagctaccgtgccggcgagtttttcttaaagggcatgctgcagcggcagaaggaggaggaggcagctgcggcagctggtgggggcgtcgtgagcaccccccaaaacgttcaactacccattgccagtatcctttgactcct

SEQ ID NO: 98 - DNA, 359 bp, Chlorella sorokiniana
  unsure (1)..(359): unsure at all n locations; Clone ID: LIB3602-002-P1-K6-D11
aaaaaattgaaaaaagaaaaaaaacgagggagaggagaaaaaaaaaaaaaaaagaaaaaaagaggaaaaacaagaaaaagaaaaaaaagaagaaaaaaaaaaaaaaaggaaagaaaggaaaagaaaaggaaagaaaagaagaagaaaaagnacaagcaaaaaccagaaagaacaacaagcaagagggggggggnacnnnnanaagaanngcaaaaaaaaaaaagcaaccnncagggacgnagggaggaacaagaaaagaaggggcgngccagccccgaagaangcgaacngacaagcgaaagagaacaggagaaaagcngccgacgaggagagggagcngccccaaaggggcggagaag

SEQ ID NO: 99 - DNA, 292 bp, Chlorella sorokiniana
  Clone ID: LIB3602-002-P1-K6-D2
gtggtggtgggcttcggcaagaagcgcggccccaacagccagtaagctgactgcggcgccagcagcagcggcaggcatgtgctgaacgcacggagcgcaagcgcgtcccgcgcacagccgccaccgaagcggcctgccagcgtcgacggcagcgaggcagcaaggcgcggcctggcatgctagcagcgcgtactgcgcgccacggcgctagcagccgcaccctggaacagcatcagcagtaattcagcagcccacctgcatgccgaacgctccgctgtaacaggttctcagg

SEQ ID NO: 100 - DNA, 203 bp, Chlorella sorokiniana
  Clone ID: LIB3602-002-P1-K6-D3
aaaaaaaaaaaaaaaaaaaaaaaaaaaaaaaaaaaaaaaaaaaaaaaaaaaaaaaaaaaaaaaaaaaaaaaaagggcaggcaggggtcggggcgctctagtgtgctccaagcttgcgtgcgcctgcatgcctcttctttagcttttctctaagtgccacctaattggcacttcatttggccgcggttttgcatgggaaaacct

SEQ ID NO: 101 - DNA, 128 bp, Chlorella sorokiniana
  Clone ID: LIB3602-002-P1-K6-D6
gaccgggtgccgccgcacggcgcacagcgccgacaacactcggcggtgccaaatatgtatagcctggtcactgtcacatgctggctccccttccagtaccacttagcgaatgtagcatactagcttgc

SEQ ID NO: 102 - DNA, 514 bp, Chlorella sorokiniana
  unsure (1)..(514): unsure at all n locations; Clone ID: LIB3602-002-P1-K6-D8
ggcgcccatatcttcgctgacggcggcctgaactacctgggcaactccggcctggtgcacgcccagtccatcgtggccaccctggtggtccaggtgctgctgatgggcgccgtggagatctaccgcgccaacggcgagggccccaacggcttcggcgagggccaggacaccctgtacgggggcggcgccttcgaccccctgggcctggctgacgaccccgacaccctggctgagctgaaggtcaaggagatcaagaacggccgcctggccacgctctccatgctgggcttcttcgtgcaggccatcgtgaccggcaagggccccctggacaaccttctgcagcatttggaggagcccggggagttcaacttctacgccctgtacgccaactccctggcgtaagcagcttgtttggagcacctgcggcggccgaggcggcngcgctgagctggcgcanagcgcggttggcgaccggcgncgnctaacgctgttgcccttgaccctcttcccttta

SEQ ID NO: 103 - DNA, 75 bp, Chlorella sorokiniana
  Clone ID: LIB3602-002-P1-K6-E1
aaaaaaaaaaaaaaaaaaaaaaaaaaaaaaaaaaaaaaaaaaaaaaaaaaaaaaaaaaaaaaaaaaaaaaaaaaa

SEQ ID NO: 104 - DNA, 592 bp, Chlorella sorokiniana
  Clone ID: LIB3602-002-P1-K6-E10
gcaaggcgcagtgccccatcgtggagaggctgaccaacagcctgatgatgcacggccgcaacaacggcaagaagctgatggcggccagcattgtcaagcacgcgtttgacattgtcaacctgctgaccgaccagaacccggtccaggtgctcgtggacgccatcatcaacggcggcccgcgtgaggatgccacccgcattggcagcgccggtgtggtgcgccgccaggctgtggatgtgtcgccgctgcgccgcgtgaaccaggccatctggctgatcaccaccggcgcgcgcgagagcgcgttccgcaacatcaagaccattgcggagtgcctggcggacgagctgatcaacgcggccaagggcagctccaacagctacgccatcaagaagaaggacgagatcgagcgcgtggccaaggccaaccggtaaacggctgttgcgcacccaccaaaacagcagcccgccacagccggcacccctgggcaggatgccagaccgccagtgcagcagcacggggtggttcagctgctgttatcgtggcaggcttttcaattaggcgcgggtgttaggattgtgtacacagcgcaccc

SEQ ID NO: 105 - DNA, 75 bp, Chlorella sorokiniana
  Clone ID: LIB3602-002-P1-K6-E11
atttatccgctgcccttgcctttggctggcccttgcctgtgccacacaagcctgcattgtaacaccagcaaggtc

SEQ ID NO: 106 - DNA, 489 bp, Chlorella sorokiniana
  unsure (1)..(489): unsure at all n locations; Clone ID: LIB3602-002-P1-K6-E12
cccgcgcacgcagccgccgcgccgtcacggtgcgcgccgatgtcggcttctgccgcgacaaaatcagcgagcggcaggatctgacggaccagatcgagggcacctcggtggtggtgttnctgggtgcagacggngcggnggngnnngnnggngngnntttgggttttgtttttggtgtggtgtgtttnnttttnttttttttttttttttttttttttgttttttttttttttttttgttttttttttttttttttttttttttgttttttttttttttttttttttttttttttttttttttgttttgtttttttttttttttttttttttttttgttttttttttttttttttttttttgttttttttttttttttttttgttttgttttttttttttttttttttttttttttttttttttttttttttgtttttttttttgttttgttttttttttttttttttttttttttgttttgttttttt

SEQ ID NO: 107 - DNA, 55 bp, Chlorella sorokiniana
  Clone ID: LIB3602-002-P1-K6-E3
aattgatcgtttcacaaccccaacgtgtgctgcagagccctctccgcgccagctt

SEQ ID NO: 108 - DNA, 155 bp, Chlorella sorokiniana
  Clone ID: LIB3602-002-P1-K6-E4
ctgtagtgaaggtaaagtctcaccatgggcaagtgcggcaagggcacgggcagctttggcctgcgccacaccaagacgcacacgctgtgccgccgctgcggccgccgctccttccacatccagaagagcacctgcggctcgtgcggctaccccgc

SEQ ID NO: 109 - DNA, 535 bp, Chlorella sorokiniana
  Clone ID: LIB3602-002-P1-K6-E5
gggccacacgctgcgcctgctggccctgcccgacttcctggacaccagtgtgggcaagatcctgcggctgcgccagaagatcatgtccgtcaaggacagcgtgaccggcttcttttcgggcagcagcgagaaggacgcctcgtccgagaagctggatgccttcaaagactacatgggggaggcgcgcaacgtgttccgcaacccgggcaccaccgagtttgtgattgtgacgatccccaccgccatggcggcggcagagtccatccgcctagccaaggcgctgcagaaggagcaggtgcccatccgcacgctcgtagtcaaccaggtgctgccacacggcctgcaagacaagtatctgcagacgcggcgcgccgaccagcagcgggcgctcgagcggctgcgggccgatccggagctggggcagctgcagctgattgaggcgccgctgttcgatctggaggtgcgcggcgtgccagcgctgacctactttggccagcaagtgtggcggtagctgggcgcatggcatgcctgagtc

SEQ ID NO: 110 - DNA, 592 bp, Chlorella sorokiniana
  Clone ID: LIB3602-002-P1-K6-E7
ggccgctcttgtgatcaattggaatccgatccagaacctccagtgtaccagaagcgcgggagaagccatgctgactgcatcatacacagcaggcctggcgcaaacagctgtggccacgccgcagcgcgcctccctgctgctgccgccgccgcaccgcgcgctgctggcgcctcggcggcgcagcctcctttgcaccttcgctcacgggccttcgcgccccgcccgccgcgccgcgctgcagcccatgtcatcggacgggcctcagggcggccaactggctggcagcagcctgcacggcgttggggaccagaccagcaggcagctgcgccttgctcgcgcgttgctcgttgcgtgcatcgtcatcggccttgtctctttcctcccctttttcgctttctttaagctaccgggcctgatcgtctggcttggtctgtgcctttacacgatcggcacgctgctgcggttctgaatcgggtcctgccctgcccgctgccgctgccctgctgctggtgctgcacttggtgctacgcaaacatgcctgcacaccccatcccacactcaatgcatgcccgcctttcagcaatccccctgt

SEQ ID NO: 111 - DNA, 497 bp, Chlorella sorokiniana
  Clone ID: LIB3602-002-P1-K6-E9
gctgcagacaggcatgcgcggtgcgttcggcaagccatttggtgtgtgcgcgcgcgtgggcatcggtcagatcctgctgtccatccgctgcaaggacacgcacgctgcggtggcggaggaggccctccgtcgtgccaagttcaagttccccgggcgccagaagatcgtggctagcaggagctggggcttcactccctacctgcgcgacgattacttggagtggaagcgtgagggccgccttgtgaacgacggtgtgaatgccaagctgcttggcaaccacggcccgctggacgcacgggagcccggccagattttcgagggtcctgcccgtctgtggcgtgtgccggtgcatgcctaacatgttgcttgggttctaaagatgtaacgaacatctgagcaagacaaagaaaacaacaagagctggattggattgttttctgcatcatcagtttgaggcttttctttccttatacttctctttgtaaaaagcctgccgc

SEQ ID NO: 112 - DNA, 82 bp, Chlorella sorokiniana
  Clone ID: LIB3602-002-P1-K6-F10
cggacgcgtgggttttttttttttttttttttttttttttttttttttttttgttttttttttttttttttgtttttttttt

SEQ ID NO: 113 - DNA, 175 bp, Chlorella sorokiniana
  Clone ID: LIB3602-002-P1-K6-F12
gggcattgccttgatggctttacccggggagcacgccggaggtaaaggagtttctggcgcgccgcatcgccagctgcaacgtcaaggtgcttaactctccgcgccctttcaagaagcttgctgtgctggacatcgactataccattttcgatctcatcttattttttttagcggc

SEQ ID NO: 114 - DNA, 324 bp, Chlorella sorokiniana
  Clone ID: LIB3602-002-P1-K6-F4
ggcattgtgtgcgacaccgaaaagatcggcatcgactacgtcaacactgccatggagcgcctggtcaagaacgatgtgcactaccggttcgtgattgacatccagggcagcctggtggcgtgaggcggcggctggacagcccaggcggcagcagcggcctgcacattggcagcgccagctcgccggctgatgggcatgccccgcccccctgtgaacatgaccccgcctgacagcgcattgcttttgtgaaagccttttgatagctccccaatcttcttcactgcttgccatatccatccatcaatgatgttacagattgcccac

SEQ ID NO: 115 - DNA, 432 bp, Chlorella sorokiniana
  Clone ID: LIB3602-002-P1-K6-F6
gcatcagttcgtggcggcgggaagcttgggtctggacagcctgctgggcgtccgacacgccacaccagcgcgtcaccgtgcctgttgtggacgaggtgggcaagcacgcaggggcggtggactgcacactgcgcttccccagccggccgccctcagcagcagatggagacgcggcaccagagactggctaagcacaagtgcttgactgatctttgaatgcataagtggtgactgtgtgtgcacatgacagtgctcgatttactccgttgctcttgtctcatctcaggctagtttacttacatcggatcagcaactgtgcaccaatccccatacactgttagcagcatgatatcagccgcatttggttcggtctgaaagttgccccattcttggtgatataccgacacaagtcccatggttaccgggtgatca

SEQ ID NO: 116 - DNA, 504 bp, Chlorella sorokiniana
  unsure (1)..(504): unsure at all n locations; Clone ID: LIB3602-002-P1-K6-F7
gtgggcgcagcggtcatggcctacggcttctacaaggtgggccagtccaaccgccagcggcggggggagaaggcggagcactacaactcgcgcgcagcgctggtgcccttcctgcaggctgaggaggaccgccggtgggtgaacgccaaccagaggtttgtggcgcggcaggcggaggtgatgaagaacaaccctgactacaaggcaggcgagtctgtgtacaagacgcgctggatgccgcccgccaagccggtcggcgcctggggcagcgcgtagccgcgcacgcacccattcgctctctgccggttggcaccctcagaccgcctgcaccggcccttgatgggcccggcggtcgtgcccacacatactgtactgtcccgctcgctttcctgcctcctgttgcgcggcactgctgcctgagcctgcgcagcgctgcttgctgtttccgtgctaccttnctgccttgctgcttccctttagccgggcttgtaactgcgctctggc

SEQ ID NO: 117 - DNA, 478 bp, Chlorella sorokiniana
  Clone ID: LIB3602-002-P1-K6-F8
acgtgccttacacgctggaccaggatcccgtggaatacgtcaagaaagttgccgggccctactggggcaagcagtgagggcatgcactgcccctctcatcgctccccaaggcgcaaatgatccttgattgcgtcaccagccgaccgcggagatgcaaacaaccccgagccgcagcagcatcagcagccacacgctgcgaggtgcaggctggagtgcaggctctgcagcgtaatgatgccgcaacacctggctgcccagcttcggcgccacataacgtcagttttctgaacaatgctcctctcctttcaaccatctgtcacttcctccccttccctccatctgtcattacaagttccctccacacggcattgcatgctcccatcaaacagttgcgatcctggggcaacaccgcgcctttcagttcgaaaacgcgtcctgtatttctgaaacttatcgccttggggatttgtgaactagc

SEQ ID NO: 118 - DNA, 104 bp, Chlorella sorokiniana
  Clone ID: LIB3602-002-P1-K6-G1
aaaaaaaaaaaaaaaaaaaaaaaaaaaaaaaaaaaaaaaaaaaaaaaaaaaaaaaaaaaagaagaaaaaaaggggcagtgcaatataaaagctcgtccccttgg

SEQ ID NO: 119 - DNA, 573 bp, Chlorella sorokiniana
  unsure (1)..(573): unsure at all n locations; Clone ID: LIB3602-002-P1-K6-G10
gaggtttctgagcacgaggcgaggcggttgcaagtgccacatcaggagctgatagactgcacggcagcggtgcacatgcaccaccagccatttggcgcaggcggctacctgcagcagggctttgccgctggctacggcgcacccgctggcccagatgtctacggcgcctacggctatgcccctcaccatgcccaaatgctgccgcagcagccctacgcgcccatgtatggccagcagatgagtggcatggagtggccacagccccagcaggcagcctaccacggcctgcctgcggtgcagccaccaatgatgccaccacagaacatgcaaggccgcggccggcagcaatatgggggcaggggccccggtcggcagcatggaggcaggggccgcgggcgcggccggcgctgaccttcaggcctggccagtcgaaggctggccagtcgaaggctctactcagctcactctggcgcggcttatcttgtacctgtacatttgcatgacatcctgggccttacctgtgtaccacctntagcaagccagctcacctttcttttgcaatcctgcagctct

SEQ ID NO: 120 - DNA, 190 bp, Chlorella sorokiniana
  Clone ID: LIB3602-002-P1-K6-G11
aaaaaaaaaaaaaaaaaaaaaaaaaaaaaaaagaaaaaaaaaaaaaaaaaaaaaaaaaaaaaaaaaaaaagaaaaaaaaaaaaaaaaaaaaaagggggggccgcttttgtgggtcctagctttccttccctttccttccacgttattggtttttttttggggtaccttaatttaattcgggggggggggg

SEQ ID NO: 121 - DNA, 643 bp, Chlorella sorokiniana
  Clone ID: LIB3602-002-P1-K6-G12
gcggtggaggcggcaaacgagcggtttgacgccaccatgacaaacgtggtccgctggcgggaagtgcccgatggcagcaccggcaagcagctggttagcgacacactcattcgtgtgcagctgcaagtgcccggctggttcctgctgcccaccgccgccattgagcgcacgggcagcgcggtcatggccaaagtgctggacacggctgtgccccgcttcctgcagcagcttgccgtcgattacgcggcatgggcggcgggcgacgagacgcggcagccggtggccaatggctcaatcctagatgacatttacgaggcgtcccctgacaagggggaggctgagcagggctgggactgagcagcttggttcctggcatgtacctatccttgcgccttcagccagcaagtcggagccgcaatcttgcaagctgcccttgcagcccctgcgccggccctcttgctgccaaggcagcagatatttccgactagtagctttcgttgcccgcatttcattgcatgcatttcctggctgtggtaaacgtgtctcccaaacgggggctgtggccagtgttcacactgttcagcgctgctgttgccactgctgcttccttctcgctgttcccgctctcgcccctacatgtcgt

SEQ ID NO: 122 - DNA, 343 bp, Chlorella sorokiniana
  Clone ID: LIB3602-002-P1-K6-G3
gccaaggtgaagggctggtttgtgcgccgccccgccccgcccaagctgcagccgcccgcggcgccggccgccgctgaggcacaggccgagggggaggccaaggctgacgccccctcctcgtaaacctgccaagtgcagtgcgcactggcgcccccgtacagttatctgttcatgcatgccgccacgcatgccactgcttcctgctacttccctgcttttcgcacacctgcagtctgcactgcctgcaacttgaactcaactcccattgttgcaccgtttccaccaagagcacctctgcttacctgttcatgccctctgcttcagtaattacagctgagctttt

SEQ ID NO: 123 - DNA, 422 bp, Chlorella sorokiniana
  Clone ID: LIB3602-002-P1-K6-G5
gcacagcagcgtggcctgcgactggtggacgctcaaccatagatggcaggcttcccttgctgcacagtgctgccctatgttgctggaccatctgccccacaccctctgcctgtctgggacccttgctgcatgctgctgcggcatgcacatgcagcatggcgctgactgaagctgcaataaccttttcacggttgtttcatttgggcttattgccaatttccttgctgtgcaggtttggcggcaggtgcggtcggggagtgggagttgcggttggttttggctgtgtgcttggtttcctgcgccctgcttcaaccccaactgggtaccccaatccgcctgcccgcctatttggtctgctttgacttgggtaagtctaagcaggctggggatgatgcaagagatgcaatgatggactgctgctc

SEQ ID NO: 124 - DNA, 52 bp, Chlorella sorokiniana
  Clone ID: LIB3602-002-P1-K6-G7
aaaaaaaaaaaaaaaaaaaaaaaaaaaaaaaaaaaaaaaaaaaaaaaaaaaa

SEQ ID NO: 125 - DNA, 519 bp, Chlorella sorokiniana
  unsure (1)..(519): unsure at all n locations; Clone ID: LIB3602-002-P1-K6-G8
gcctggcgtccatccgcacctgcacctcgcacgtgcagaacatgatcaccggcgtgaccaagggctacgagtacaagatgcgcctggtgtacgcccatttccccatcaacatcaacatcgagaacaagggcggcaaggtggagatccgcaacttcctgggcgagaagattgtgcgcgtggtggacatgctgccgggcgtgacctgcgagcgcagcgccgccgtcaaggacgagctgatcctgaccggcaacgacatcgagctggtgtcccgcagcagcgcgctgatccaccagaagtgcctggtgaagaagaaggacatccgcaagttcctggacggcatctacctcagcgagcgcggcaccctggtgaagcccgagtaagcggagcccgcacgttgcagtagaggtggcggcacgagcgcagcagtgcgcagcgctcacgcccgcgccggcggagcatcggcggcggcagccggccccagctggggcgctggacgccatgtaacgcacacgttnggca

SEQ ID NO: 126 - DNA, 206 bp, Chlorella sorokiniana
  Clone ID: LIB3602-002-P1-K6-H10
cggcagcgggccaagtaagcggcctgccccgcagcccagcagcgctgcggcgcctgggcgcagccgcccgctcgcacgcgtgcaacggcgctgcagcggccagccggcgtcacggagtccgggcgcccggcagccgccgatgaaatgtgacggccgagtgtgtaatgctcacgaccggtggaaagaaaataattagcatcaggatt

SEQ ID NO: 127 - DNA, 263 bp, Chlorella sorokiniana
  Clone ID: LIB3602-002-P1-K6-H11
gagcgcgctgctctcacgcccacatttcaagctaacacttgaccctgcactttttgccgcccataatcccctccgtcaatgaaacgaatgttatactgcccttctgcacccttcattttgcgcactggcacagttttgccctgatgctctcaattcgcgagcgcttcgatccgtctgtcctttgttccgtgtgagtgttccttttttccccgctcctcctaccatgtgtattcttgggtcatatgttgtaacatagagttttc

SEQ ID NO: 128 - DNA, 404 bp, Chlorella sorokiniana
  unsure (1)..(404): unsure at all n locations; Clone ID: LIB3602-002-P1-K6-H2
cggacgcgtgggtgctgccgtccgtcgcctgccgtgccccgccagcccgcctcatggggcgctccatgcagctcacatccccctggcaggctggctgagcacttaggctagacagcagctgcccgttggcctccctgcacccggttttgctcccttcttgcttccacaacccgcttgcagcaacgttgctcgtgcactgctcccagcagttggtggtgctcaacgatggggtcacccggacacccgacctccgctgttgttgtttcattccagcattgcatgcccacgttgtgttgtttccagagccagtcagcctgtggaccaggcccagcctctgtaacccaagcaagcnnaaaaaaaaaaaaaaaaaaaaaaaaaaaaaaaaaaaaaaaaaaaaaaaaana

SEQ ID NO: 129 - DNA, 291 bp, Chlorella sorokiniana
  Clone ID: LIB3602-002-P1-K6-H3
accgcggatcttcagcagctcaaccgccccgctgcgctgcgcttcacgctgcaaattgtggcggcggcgctagggaagagtgaagcggacgtggccactgccacccgtgagaatgcacgccgcattttctgcagcattggcagcagcgcggcagcggcaggagagacaggcggatcgtgaattgcaaacgtgtgaacctcgtgtgcatttgtgctgcacccattgcgcacaacctgctgatttcaacacccttcgcgctgcttcttgaaaggcgcattacaaaccaattgg

SEQ ID NO: 130 - DNA, 577 bp, Chlorella sorokiniana
  Clone ID: LIB3602-002-P1-K6-H5
cggcatcctgctgtggccgctgggcggcttggcgtacgtggggcacgactgcggccccaaggccgacctgtggatcgcgctggcgggcccgctgacccacatcccccagttcctggtctggtttgccatcctgttcccggtgtaccacgcggcctacggcagctgggacatcagcctgtcgatcccataccccgacctgcactttggacttgcaattgtggcgggcgcctgccagctcaacattggcctggtgctgttcaacctcttcctgcccgccttcccgctggacggcggccgcatcctggccgacctgctgctgctgcgcggcgtcagcccggaaaccgccgccaagatcaccgccagcctggccacgctgctgggtgctggcgtggtggctgtcggcatctggcgcacgttggtggcgagcgtggccagcgtgctgacgattgcggtcggcgtgtggatgctgtacgtcacggtgcagctgtgggagtgcatccggtcccgcactgtgcgccagcacccgctggtccgagttgcggcggcagacgccggcagcggcggccccggcggcagc

SEQ ID NO: 131 - DNA, 555 bp, Chlorella sorokiniana
  Clone ID: LIB3602-002-P1-K6-H6
ctctaaccaggtccagtattcgctgatctaccgcgccccggagtccaacggcgtgctggaggcctgcagggagaacggcgtcacgctggtggcatactcgcccctctgccagggcctgctgacgggcaagtactctcgggacaaccgccccaccggcccgcgcgcccagctgttcaccgaccagcgctacaaggatgtggaggtcctgcttgactgcatgcgggccgtggctgcggagcagggcggcaagacgctggggcaggtggccatcaactggacgctgtgcaagggcgcggtgcccattcctggcgccaagaatgcaaagcaggtggaggagattgcgggggcgctgagctggcggctgagcgatgctgaggtggcggagctggatgccgtgagcgccaaggtgccgcgcagcaccggagcgccctttgagaactggtgatcgaggcgagcggcgaggggtgtaacgaatttgttctgcatgaaatgctctgacctccatatctggaacattctgatgacactggaatcttttaatagcattgatatctc

SEQ ID NO: 132 - DNA, 196 bp, Chlorella sorokiniana
  Clone ID: LIB3602-002-P1-K6-H7
agcgcatcgtgcgcgccttcctggtggaggagcagaagatcgtgaagaaggtgctgaagctgcaggctgccaagtaggctgcgcaggccaaggccgcggcggcaggcagcaagggcaagaagaagtccaagaagtgagcggcgcacgcgagcggacagttgcgccccatgctcccgctgtggatgcaccctcgatg

SEQ ID NO: 133 - DNA, 311 bp, Chlorella sorokiniana
  unsure (1)..(311): unsure at all n locations; Clone ID: LIB3602-002-P1-K6-H8
gaaggttgaggaggaggaggacgaggacatgggcttctccctgttcgactgagcgcacacggcggctccgggcggcggcggcgcgcccgcggcgtgagcggccctgcaggtcgcgcaggcgcggcggctgnggcggccaagacgccacngggccnggaggccaatttgtcacggaggggggggggctggagtcngacgagattggggaggaaaagattgaggagaacatcaagcgcgccgagtgccggacccgctttgtgctggacggctagccgcgcaccgaggtgcaagccgaggaagaacatggcaag

SEQ ID NO: 134 - DNA, 461 bp, Chlorella sorokiniana
  Clone ID: LIB3602-002-P1-K6-H9
tcgagatttcggcgcagaaccacaactttgcggtggaccccgccacgctgcctgatgaggtcgaggtgagcctgatcaacctgaatgacggcacgtgcgccggcatgctgcaccccggcctgaaggccatgactgtgcagagccaccccgaggcgtcgccgggtccccacgactcggatgtcgcctttgagcagttcattggcttcatggctgaggcccgcaagtgagcgcctccagcccagctgcagccgcgctccagccaccctacccttccacttgagtgacacctgttaccacggcggctcgctgccgtctgccagccgagagcctacccgtgaacctgcggcgccgctgtacactctccttttgacccgctctcccgtcctcccgctgcttctgctgccgctcccctctctctgcaccccctagccatcatccccaccctgtaaacccgtttggtc

SEQ ID NO: 135 - DNA, 117 bp, Chlorella sorokiniana
  Clone ID: LIB3602-004-Q1-K1-A1
aaaggggaccctcctttttgtgggtctttaagccgggggggggggggggttacgggaagggtggacggtttttttttctgctctcttgcccccgttctttttgttgtgccccctccc

SEQ ID NO: 136 - DNA, 601 bp, Chlorella sorokiniana
  unsure (1)..(601): unsure at all n locations; Clone ID: LIB3602-004-Q1-K1-A10
gncgctacgnanattcctnattccgcgcgcctggnnagcagccaggnacnntaccgcctgaataaaccatcagctaaccgtcatgtccagcgggcaggtggcagaggcggccgcccgggccgtcaaggtcctggaggctctggccaacaaggaggaggtgccgctgcagctgcctgagatgggcaccaagcgcctgccgcccagggacctgatgcagtgctccggcctgtgcttcacctttgtgcgcaaggcgggcgtgggcctgacggctgagcacggcaccggcttcctcatcgcccaccaggcgggcgatggcgggtcgtggagcgcgcccctcttcatcgcgctgtctgccggcggcgtgggcatctctctgggcgcggcagagattgacagcatcgtggtgctgagcggcccggaggcggtggccaagtacagccagccgtactgggacaccgccgccgacgtgaccaccgccgcgccgctcgttgtcaactcgagcgacagcctngaagacctggacctggcccaggactccttcacctactcggtgtcctctggcctgatgatggattactncttcagggcatgcgctaccggc

SEQ ID NO: 137 - DNA, 495 bp, Chlorella sorokiniana
  Clone ID: LIB3602-004-Q1-K1-A11
cacggcctgctctgcggcccttcatacctttgtacctttctgtatcatcttgcagcaatggcagccggctgcatctttctaacatcgtcaccggcccactcgtttgtgccatgcccacctgcctccaacgtcacccttcatcaaccctcacccaacccatccacctgccacccatccactcaccttccctccgccacaacctctgccacccactcaccacccatcacccgctcaacgccctccatgcaccatcctccccatccaccaaatctgccaccccaaacgcacgtccgccgctgcaccacctgccgccccctcacccgcacccatcttccacccgccacctttcctgccgctcaccggcgcacatcctacctcccacacctcactccatgtgcacccttcacccgcgcttcacacagcggctgctgccatgcaaagctgctgccaaacccatccatcatgctcgcacacccactcacccacacgtacaac

SEQ ID NO: 138 - DNA, 228 bp, Chlorella sorokiniana
  unsure (1)..(228): unsure at all n locations; Clone ID: LIB3602-004-Q1-K1-A3
naaaaaaaaaaaaaaaaaaaaaaaaaaaaaaaaaaaaaaaaaaaaaaaaaaaaaaaaaaaaaaaaacctggtttttagaatcgcgaagcgggccggttcttagaaggatcccaagctttacgttaccgcgtcgcatgccgaacgtcataagctctttttatagtggtcaccttaaattaaagttaactgggcccgtncgtttttacaaacgttcgggaactggggaaa

SEQ ID NO: 139 - DNA, 375 bp, Chlorella sorokiniana
  unsure (1)..(375): unsure at all n locations; Clone ID: LIB3602-004-Q1-K1-A4
tgactgcgggagcgcatccccagcatcgcagcggtgcagctggtcaactgaagaggcagctgcacaccgaggcagctgctcgcagctgctgccgagcgcatcccggtcattacagctggtcaactgaagcgaaagctgctggcaacagcggcaaacagcaaggcagccgctggtgacacagcaaccgcagccctgcacagcgtggcacagcagcctgcaggataccgtgcagcacaggctgtcacaggtcccggcttccgtccaactaatctgcatagcatcctttcccacgtgccttccctttgattgccttgcgctgatgatagcatttcagtcacattgcagngcaggccccctcactcaaacgactcgggc

SEQ ID NO: 140 - DNA, 610 bp, Chlorella sorokiniana
  unsure (1)..(610): unsure at all n locations; Clone ID: LIB3602-004-Q1-K1-A6
gcatcagnanagctgaggcttaccttctgaactcaaaccgccggcggggcctgcgccccgcacctgctgctgccactggtgacagccaggaggcggcagggcgagcaccggcagcagcagatgtggctgcgggggaggcccaagctcagccgcagcagcaacggcaacagcagcagcagcaaacccagcagcagcagcaagcccagaagcagcagcagcagcagcagcaagcccagaagcagcagcagcagcagcagcagcagcagcggcagcagcaatgccagccgccctgtggcggcgatagcgctggcgatggcagagagggcgcaccagctacagccacacatctgccggcggcgccaacgcagcagcgtcactcctcttcagagcaagagcaggagcagcaagagcagcagcagcagcagcagcttcaagagcaggcgcaagagcagcagggagaggcagcagaggagcggcagaagcgagaggcggcaaattagcagcagctgcctactgctgttgcaggcgcagggttggcggcagcgggcagcgcgagtcaaagctttgccaagtgtgccacctcgtgacgctgtgccaacggttcctgcat

SEQ ID NO: 141 - DNA, 661 bp, Chlorella sorokiniana
  unsure (1)..(661): unsure at all n locations; Clone ID: LIB3602-004-Q1-K1-A7
gtacgcgtgtccactccagctctacgaccatgcagactgccttctgcggtgccaagctccaggtgcgggcccagcccacccagcgccgtgccgcccgcaccgcggtggtcgcgtctgctgaccgcaaggccgccgccggcttcaccgccgctgccctggctgccgccgtgctgctgaacgcgcccgtggcccatgccgacctgaccgaggacctgctggccaagaccgccgccaacaaggccctgaacgacaagaagcgcctggtgtcttcctactccaacttcgcccgcagcacctctgtgtctaacggcagctgcgcactgcccaacaactggttcggctgcgacgtgactgttgtggctcccgacagcatcatcaagcaggacatcaagctggagtgcgagggcaaggagcccggcaagtgcgcctccaacatgaacatccgcaacatcaacaactagatgttaggcagctcgctgcgctgacgtggcgcggcggcagctaggcgtacgccctccggcccgccggctgccgctctgccgctttacgagaagatcaanacccccctgctccctttttgttgctgtgcgctcccccacccccacctacccgaatgctccacaccttttggcatnactgcggcgtgtaacacgtttcacac

SEQ ID NO: 142 - DNA, 579 bp, Chlorella sorokiniana
  Clone ID: LIB3602-004-Q1-K1-A8
aaaaaaaaaaaaaaaaaaaaaaaaaaaaaaaaaaaaaaaaaaaaaaaaaaaaaaaaaaaaaaaaaaaaaaaaaaaaaaaaaaaaaaaaaaaaaaaaaaaaaaaaaaaaaaaaaaaaaaaggggcgggccggttttaaagagaacccaaagtttcacttccccgtgcttggcaaggttataactttttttttggggccccctaaaattaaattcactgggccggggtttaaaaacgtcgggacgggaaaaaccctggctttccccaatttaatcgctttgaaaaaaatccccttttccccagttggggtaatagcaaaaaggccccccccattcgcctttccaaaaatttgcccaccctaaatggcaaagggaaccccccctttaccggccctttaagcccggggggtgggggggttccccccagggtaaccgttaaatttgcaaggcccttagcccccgttcttttcgtttttttcctttcttttttgcccactttcgccggttttccccgtaaagttttaaatggggggctccttttggggttccgtttaagggttttacgggccctccccccaaaaa

SEQ ID NO: 143 - DNA, 496 bp, Chlorella sorokiniana
  Clone ID: LIB3602-004-Q1-K1-A9
aaaaaaaaaaaaaaaaaaaaaaaaaaaaaaaaaaaaaaaaaagaaaaaaaaaaaaaaaaaaaaaaaaaaataaaaaaaaaaaaaaaaaaaaaaaaaataaaataattatatagagataatataaaattcaatttactgggcctgatatattacaacgtattttattgggaaataccgtgggcgttgcctttttttaggttgttttgccttctcttcccctttttgggcggcgtggtttttttttgggttgaggcacccctttgctccgtccttccttgccggctgttctgacttgggtggcggggggggaccccgccgctgtcccggctctttaaggggcggggggtgtggtgcctttgcgcagcgcgaccgatacacttggcgcccccctaccgcccgttttttatcgttttttccttttttttgtcgccccgtctcccctctttctctggcatgtttttaggggggggtttttttttcgcctccatttttttct

SEQ ID NO: 144 - DNA, 276 bp, Chlorella sorokiniana
  Clone ID: LIB3602-004-Q1-K1-B1
cccgggtcgcccagcgtccgaacccccaaaaaacccacgccacagcctttttttctccccgccgcgtgcccatggctgctcgctggcaactcactcggtttgtcacagacctagagcacgtttgttcccattcgcgacccccacagcgagtgctagtttgtccctgattgcccgatcctctgcgccgatcccctttcttccgctttgtatacagccgtgactgcacgccgctatgcgtcggcccctgactctgcttgtgtaatttgttgacctgac

SEQ ID NO: 145 - DNA, 394 bp, Chlorella sorokiniana
  unsure (1)..(394): unsure at all n locations; Clone ID: LIB3602-004-Q1-K1-B10
ttcccgcgggtgactgagcggcgtgggagtacctctttggcctgtcggcacgaccccacgccaccttcgcttcgcttaccgcgcagatgcgaggtcataccatgacccgcnntgggccattgctgcggcgccctgggnctgcnngtcgtgcccgagcttgctggagcggcaccaaccacattgctctggttcaaggccggcgccgagatcttcggcgacgacggcatccagtacctgggcatccccggcctgatcaacgccaagtccatcgtggcgaccctgatcgtgcaggtggtgctcatgtcgtatgttgagggctaccgngtcaacggcgggccggccggcaccggnctggacgctgtctaccccggctggtactttgaccccctgggcc

SEQ ID NO: 146 - DNA, 365 bp, Chlorella sorokiniana
  Clone ID: LIB3602-004-Q1-K1-B11
gttcagccaggtcccttgcgcacctgcccatcccctgttcccacccgcccgcccgtcacctgaacgacttcattcccgcctgctctgctttgtgtgcccgactcccgagcgcgccagtgacctcgcccccccactgttcagatacgcctaccccctttcttggcgcgctccccctgccaacacccaacccctttgttgacatgccaaagctgtgtgcaatgcagtgacgacctgtttttctccgcccagtttgcttctttataaacggcagcaaaagcacttgttggaacgcgctgggataaccatggcggtcctgtaactatattcaacagcaaaaaaaaaaaaaaaaaaaaaaatgaccaacc

SEQ ID NO: 147 - DNA, 591 bp, Chlorella sorokiniana
  unsure (1)..(591): unsure at all n locations; Clone ID: LIB3602-004-Q1-K1-B12
ngactgtttgggcactcgccgcgcccagggcctgctggatcggtggggcggtcgctcgctggtggagcaaatggagcgcggccagctcagcagccacgagttttatgagctggtccgcgataaatcaggcctgcaggtcgactaccaaaccttctcagagctgtatgcagacattttcacgcccatagagccgctgatcgcacaacagcagctgctggcggccgctggctggcccacctacttgctcagcaactgcagcgcgctgcacatagacgactgtcggcggcggcacgcgttcatgggcggcttcacggggctctgcctcagctacgaggtgcgcagcttcaagcccgatcccgagatttacgcagcagcggagcagctggcaggctgcagcggccctgaccttgtgttcattgatgacaaggaggagaacgcagcagcggcagcggcacgtggttggcgcgccatacaccacaccagcgtgcctgacacactgcggcagctgcaagagctggggctgccggtcgttgatgggcggtgactcatgcttagagggttagcccctgcgactgcaaggtaccttgtgtg

SEQ ID NO: 148 - DNA, 651 bp, Chlorella sorokiniana
  unsure (1)..(651): unsure at all n locations; Clone ID: LIB3602-004-Q1-K1-B2
ctcaaccaggtgccgcagccgctggtagcccagnagtgcagcccctgcgagccagccgacccgcttgaattcatgggcttctgcacgtgcctggatcgccgcaccgcggaggcctacatgcagcagctggacagctgggagctgcgcgaggacgagcagggccgcctgcacctgcagcgcacgtgggtcaccaagaacttcctcaagggctggcgctgtgcgacaagattgcagaggtggcggagggcgaggggcaccaccccgacctgcacctgacgggatggaacaagctgacggtcagcctgtggacccacgcccgcaacgggctgaccgagaacgacttcatcctggccgccaagctggatgggatcaacaaggaggggctgctgcgcggcaagaagaaatacttcaaggacgtctgagccagtaattagcagnaaacatgccgcgccgccctgagtggtaggcatgccgcgccaccttgagcggtaggcatgccgcgccacccgccaggctgggtggccatgtgagagcggcacgaatatgtagggtggttgtttccatatattagcgggctgctgaggccagaagcacgctgtcaatgtttcatctgacggaacgctgnacccaactgcccatcttgtttgcaca

SEQ ID NO: 149 - DNA, 412 bp, Chlorella sorokiniana
  Clone ID: LIB3602-004-Q1-K1-B3
acggccgcctggccatgctctcctgctgggcttcttcgtgcaggccatcgtgaccggcaagggccccctggacaaccttctgcagcatttggaggagcccggggagttcaacttctacgccctgtacgccaacttcctggcgtaagcagcttgtttggagcacctgcggcggccgaggcggcggcgctgagctggcgcaaagcgcggttggcgaccgccgccgcctcacgctgttgcccttgaccctcttccctttacgcgcttgcatgcgttcccgactccgctgcatgttgcctgtgtgtgcaattgtgcatcaggcaaaagaaacgagaagaaaactccacccaaacaccattttgcctgttgtaccatcctgtacgaaaaggaggctgtagtggtgtaaaaacatcaa

SEQ ID NO: 150 - DNA, 493 bp, Chlorella sorokiniana
  unsure (1)..(493): unsure at all n locations; Clone ID: LIB3602-004-Q1-K1-B4
ggactgcctgtctgtgtttggcctggntgcggagcaggtggaccgctactacagcgccgtgatgtcgctggagcagtcgctgacgcacgacacggaccctgaagaggaggcttcccaccgcggccaggagcgctgctgagcaccctgcccttgtggtgctgctgccgggcagcctgccctgtgcggccgctgctgctgagcggcccaccatttcagcccctgctggcaagaatcatcgtcccatgcctgtcacaaagccccgctggcgcgatcaacgccctacttacttatggaccgccgcggggcgccccaacgctcaacacccccttgagaagatgccaaagatgagataatgttgacccacccacaatgatgctgtacagttgccctttttgcaaaacgaacctttttcgtcacgctgtctggcccggtcttttgcgcggtatgatgcctgccgagggctcgccccccatttngcatgactccctagctt

SEQ ID NO: 151 - DNA, 511 bp, Chlorella sorokiniana
  unsure (1)..(511): unsure at all n locations; Clone ID: LIB3602-004-Q1-K1-B5
ccgcggagcccgtggngcaaggccggaagaacgagagcggcgcggctgcaaggtgagaagccaagtgaactcgctggcagaactacgaccttcagcagtgcagcaacacgtctgtcagaacagacaaccgtggctggacaagaattagatgagcgctgactaagacctaagctgcgtggaatctaggtcaaggaagacgccttgagtgggtggcatgcgcaaccagctggcccgaggaaggaggagtttagaggccaagcgcataggagcctggtaagaggtgagcctctcccccgtatttgcacaagcgtgtaccaatgaggtgcggccgtgatcgccctggcgcgcatgcaccgactatgggcggcatgccccggtgcgtggaccaccgcgccggcacccaccgtgcgaggaggagcaactaaaactggcactgcctttgtcggccctgctccgcatgggcggtgcccccaccgccttgctctgtttcgtccgggcccggaggccgccg

SEQ ID NO: 152 - DNA, 573 bp, Chlorella sorokiniana
  Clone ID: LIB3602-004-Q1-K1-B6
tccggccagctggcagtcggtgctgcgctcggcctgctgctgcgcagccacactgccgtgtcctggctggcccgccggcgagcctgcctagcggtcgcagcggctgcactgcaggcagcctacttgtacctttacattgcctggagccccaacggcctgccaggagaggctccctggagccccaccgccacccgtgcctatgctgctctggcctactatgggtcaccgttcctgtcaatcctgcttgctgccaccatgctggccctcacgctgggctgcgacccgctgcaccgccgcatcgcctctgccctgtccgccccagcccttctgccccttgccaacctgtctttcagcctgtacttgatccatgaacctgctcgcctatgggccctcagtctgctgcccggtgccctccctgccgccattgccacctccccgctctggggccttgcgttcctgtccacgctcacactgactgcgggctacgctgctgccctgccgctgtactggcttgttgagaagcgcttctgatcatctgaccgcctgtgcacagcttactgtaaagctagctat

SEQ ID NO: 153 - DNA, 259 bp, Chlorella sorokiniana
  Clone ID: LIB3602-004-Q1-K1-B7
ccacccgccacctttcctgccgctcaccgccgcacatcctacctcccacacctcactccatgtccacccttcacccgcgcttcacacagcggctgctgccatgcaaagctgctgccaaacccatccatcatgctcgcacacccactcacccacacgtccaacgtatccagacccattttcaaggcccgactgtacagtgcctttttgcgtccttatgccgatctggtaccaggacttaatgtgtaacaaatggtatgtt

SEQ ID NO: 154 - DNA, 575 bp, Chlorella sorokiniana
  Clone ID: LIB3602-004-Q1-K1-B8
ggccagcaggctcaccgcctttgctcagcaggcagcacgacatctatcgagcacagccgccgctgccgccgccgccacgccgccgccgagcgtgggccgcctgaaccacgtggcaatcgcggtcccaaatgtgcgcgaggcagcggctaaataccgagacgtgctaggcctaaaggtcagggagccgcaggcgctgcctgctcacggcgtgacggttgcgtttgtggacctgggcaacaccaagctggagctgctggagccgctgggcgccgcctcgcccatcgccaagttcctggacaagaacgcggcgggcggcatccaccacatctgcctggaggtggaggacatacaggccagcgcggcgcacgcggcccgtggggcgcggttgctggacccgcagcccaagccgggggcgcacggcacgcccgttgtctttctgcatcccaaggacatgtgcggcgtgctgacggagctagaggaggtgaagcggtgaccctggctggaatcggtagcccttctttgtgccagtagctatgtacttcgaacccgttctgaatgcagcacctgtctcccaa

SEQ ID NO: 155 - DNA, 663 bp, Chlorella sorokiniana
  unsure (1)..(663): unsure at all n locations; Clone ID: LIB3602-004-Q1-K1-B9
cgaggtcaaggcgcggcgggttcgcgtngagggccctcgcggcacgctgcagcgcgacttcaagcacctggctgtggacatgttcctgactgaggaggagggcaagaaggtgctcaaggtggactgccactttggcaagcgcaagagcctggcgtccatccgcacctgcacctcgcacgtgcagaacatgatcaccggcgtgaccaagggctacgagtacaagatgcgcctggtgtacgcccatttccccatcaacatcaacatcgagaacaagggcggcaaggtggagatccgcaacttcctgggcgagaagattgtgcgcgtggtggacatgctgccgggcgtgacctgcgagcgcagcgccgccgtcaaggacgagctgatcctgaccggcaacgacatcgagctggtgtcccgcagcagcgcgctgatccaccagaagtgcctggtgaagaagaaggacatccgcaagttcctggacggcatctacctcagcgagcgcggcaccctggtgaagcccgagtaagcggagcccgcacgttgcagtagaggtggcggcacgagcgcagcagtgcgcagcgctcacgcccgcgccggcggagcatcggcggcggcagccggccccagctgcggcgctgcacgccatgtaacgcacacgttaac

SEQ ID NO: 156 - DNA, 571 bp, Chlorella sorokiniana
  unsure (1)..(571): unsure at all n locations; Clone ID: LIB3602-004-Q1-K1-C1
gcttccgtgtggnagcccgnaaacctgctggacggtgaccacgacatcgaccgcaccctggaggtggctgaggctacctgggccgagacttcaatacctggccgacaacaacgtgctgttcgagggcatcctgctgaagccctccatggtgacccccggcgccgagcacaagaagaagtccacccccgaggaggttgcttcctacaccctgaagatgctgcgccgccgcgtgccccccgccgtgcccggcatcatgttcctgtctggcggccagtctgagctggagtccaccctgaacctgaacgccatgaaccagagccccaacccctggcacgtgtcgttctcgtacgctcgcgcgctgcagaacaccgtgctgaagacctggaagggtgaggagggcaacgtgcaggtggcccaggcggcgctgctgaagcgcgccaaggccaacagcgaagcgcagcagggcaagtacgaccccagcaacgaggacgctgcggctaaggagggcatgttccagggagggnccacttactgancaaatcaacccacagntgagcggngccngcacggt

SEQ ID NO: 157 - DNA, 393 bp, Chlorella sorokiniana
  unsure (1)..(393): unsure at all n locations; Clone ID: LIB3602-004-Q1-K1-C10
gtggccgccaanaanacaanaggctcgaggagacatcaactcccgcctggcgctggtgatgaagtcgggcaagtacacgctgggctacaagaccacgctcaagacgctgcgctccggcaaggccaagctggtgatcatctccaacaactgccccgccgtgcgcaagtcggagatcgagtactacgccatgctgtccaagaccggcgtgcaccactacaccggcaacaacgtggacctgggtaccgcgtgcggcaagctgcaccgcgtgtccgtgctgaccgtcaccgaccccggagactctgacattgtgtccggcatgtaagcggcgcagcatggcatgcgtacccgggcgctgtctgagctgggactgcccctgtataagaaacagaggac

SEQ ID NO: 158 - DNA, 165 bp, Chlorella sorokiniana
  Clone ID: LIB3602-004-Q1-K1-C11
aaaaaaaaaaaaaaaaaaaaaaagaggggaaaaaaaaaaaaaaaaaaaaaaaaaaaaaaaaaaaaaaaaaaaaaaagaaaaaaaaataaaaaaagggggggggcgctttttttaggcgtccttttttcgcctcctgtgtctacgttcatttgttcttcttttttg

SEQ ID NO: 159 - DNA, 170 bp, Chlorella sorokiniana
  Clone ID: LIB3602-004-Q1-K1-C2
aaaaaaaaaacccaaaaaaaaaaaaaaaaaaaaaaaaaaaaaaaaaaaaaaagggcgaacaataataaaggatccaaaataacaaacgcatacttacgacaccaaaaatcttatttagggggcgcctaatttaatttttttttttttttttttccatcgtgggccctggt

SEQ ID NO: 160 - DNA, 51 bp, Chlorella sorokiniana
  Clone ID: LIB3602-004-Q1-K1-C3
aaaaaaaaaaaaaaaaaaaaaaaaaaaaaaaaaaaaaaaaaaaaaaaaaaa

SEQ ID NO: 161 - DNA, 549 bp, Chlorella sorokiniana
  unsure (1)..(549): unsure at all n locations; Clone ID: LIB3602-004-Q1-K1-C4
gcttccggctaaggccgcccccaanaagccgccaagtctgcccccgcccccgccaagaaggtggcgtgagccgctctggcggctggctgggctctgacagccagaacatcaacctggacaagtggtacggccccgaccgcgtgctgtacctgcccggcggcctgctggcccgcgacgagatcaaccccgtgctgaatggcaccctgcccggcgactacggctacgaccccctgggcctggccaaggacgccgagaccctggccaagtaccgcgccaacgagctgctgcacgcccgctgggccatgcttgccgccgccggcgccatcatccctgagggcctggccgccaacggcgccgacgtcaagggcgccacctggtttgagaccggcgccgccatgctcaacggcggcactctcaactggttcgcggtgcccttcgtgaacttcaacaacccgctgcccctgttcgccgtggtggccatcaacgtggccctgatggccgcggccgagaactaccgncgtactcttttttgggccgctggctacgccc

SEQ ID NO: 162 - DNA, 578 bp, Chlorella sorokiniana
  unsure (1)..(578): unsure at all n locations; Clone ID: LIB3602-004-Q1-K1-C5
ggcccggngagccgctacccctcccctgctgtttccctgggccttggcnngaacccaatnnccgcatgcccgnagnaagnnattctcctnnaccgcnatnncctccctttgccgnagnncgcgcnagnncgcatnngctaccnnnctgtcctncnnccctctggcnnccagccgcncnnacgcccnnttttgtccctcgcncnnggccggnncaacccacgnnaggccccgagcgcggggggggcacnngcaggccnnccttgcccnncctcgcttgggttgtttctggcacgccctgctcagnnctcccatctgatnnttgacagcactggcccnnagcgttggcgatctccgccatcgcccttccncgactctttgatttctccttcttcccatnnccccatctcttgcatggcattcacaccatctactcgctgcccgnctctgcactcggcagncaccccgcagcgccctgnctcgcctcattggttgcccctgcanttcttttgtgaaccggagctcgcccgcggcggctttttgaacgcacgcgctcggcccctgtgntcgcacgccgtccc

SEQ ID NO: 163 - DNA, 255 bp, Chlorella sorokiniana
  unsure (1)..(255): unsure at all n locations; Clone ID: LIB3602-004-Q1-K1-C8
caagcgtaccaaaaactgccgcccanactggaatacgagtccgccaccgcctccgcgctggtgcagggctgagcgctcgcctcgcgcgtgagctgacggctgcagccacggctatctccaactggtgtgccagcaggcatcaccacgaagcagccgcagctctccagctggctctgcctgcgtttgcagcccctggcttgatgtgctgctctcttgcatgcatgcgccaagcgcatgtgtaaagctgctgcagac

SEQ ID NO: 164 - DNA, 403 bp, Chlorella sorokiniana
  unsure (1)..(403): unsure at all n locations; Clone ID: LIB3602-004-Q1-K1-C9
cgacggtgatgcgcacggctccctcactgttcctctggtctgccatcgctgtgtccacccacgtggcggttgtgctggcaggcgagcggctgtggcgcttcacacggcgagaaacctgcctggcatccaatgcaaacattgggggccccaccaccgccgctggcatggcagctgccaagggttggcgcagcagcctcattccggcgctgttggtgggcattcttgggtacgcgacagctacatttatcggtgtggccgctgcttcggtgttccagcgcatgcagtttgcttgaggcagtcgcggggcgcagagcagctggacatgcagctcatcgttaagcaaaagatgaaacgtgtaaagacgtctagggaaaaaaaaaaaaaaaaaaaaaaaaaannnaaa

SEQ ID NO: 165 - DNA, 138 bp, Chlorella sorokiniana
  unsure (1)..(138): unsure at all n locations; Clone ID: LIB3602-004-Q1-K1-D1
gggcatgcgaggaaaaggcgcgggggtggtgtttttttaatnaaatncacgggccgtcgtttggggggggggggtttgttaataccttggtgttncccatnttattggggtgggggtatatttcctttttgtcggttg

SEQ ID NO: 166 - DNA, 484 bp, Chlorella sorokiniana
  unsure (1)..(484): unsure at all n locations; Clone ID: LIB3602-004-Q1-K1-D10
ccacaactcgtgttactgtgaggacgaggtgccctctggcgtgaacgccgaggcgatcagccgccaggactaccttgaacgacccccggcgaggagttcaccgtcaagctggacaccgatggcgagtacggcttctactgcgagccccaccagggcgccagcatggtctgccgcatcaccggggactgagcgcatcatgctcagcgccgctgagtgcactgacccatttttgaagcacttgctgtctctcttcggttgactggcctctattcagggtgtaacgcttcacacgcaaccatgaacaatggagactacagcgacaagaagcccgtcaaggatgcactcaaggcatcgggcgccgggtggaccaccgnccttgtaaccacgctctacaacgcgcatgaggggcaccataagaaggagccagtctacgtctcagccgttggcatggctggcatggccgctctttgcctgtggtgcggct

SEQ ID NO: 167 - DNA, 55 bp, Chlorella sorokiniana
  Clone ID: LIB3602-004-Q1-K1-D11
atttttgctgtatgtatcgtttgagtgtgaacaggctttgtaaaacccgttagtc

SEQ ID NO: 168 - DNA, 484 bp, Chlorella sorokiniana
  unsure (1)..(484): unsure at all n locations; Clone ID: LIB3602-004-Q1-K1-D12
ggtgcaggtggcgagtccaatgcagcacaanagcgtggaatgcacgactcgctgcagcgcatgctgtcccgcggcgccggtgccctcaaggcattgacgagcggcttcagcacagctctgctggccctgctgctacttggcatggacagctcgccggccaagatggaggcggagcgagtcctgcgcaagtgtggtggggcggaccttgtagctgaagtgcacaagctggccatggagttgagtaggctcgtggcagttaccgaggcggtggccgccccgtggtatgagaagctgagctccgacctgctgtgacgaagcgagaatgccaatgagcctgctggctccctttcacccctgccgcccgctagcgcatatgatggacacacacagtgatgaatgtgcaatgtgatgcccctgtatagccgactgtaacccattgcctctatttagtgtttttatttgagtagtgtaaaaacgaagatna

SEQ ID NO: 169 - DNA, 403 bp, Chlorella sorokiniana
  unsure (1)..(403): unsure at all n locations; Clone ID: LIB3602-004-Q1-K1-D2
cccggcgactggtcatggcgaccgtgaagaaggcaagcccgacctgcgcaagaaggtcatgcccgcgattgtggtgcggcagcgcaaggcgttccggcggaaggacggcacctacatctactttgaggacaacgcgggcgtgattgtcaacaccaagggcgagatgaagggctccgcgatcaccggccccgtggccaaggagtgcgccgacctctggccccgtgtggcggcagcagccaacaccattgtgtagagcggcggccgtccggctgggcgtcgcggcagcgcggaccacactgcagtacccaccgcctgccgcgctcccggcgcagcatgctgtaatgcacatccagcgnnnaaaaaaaaaaaaaaataatattttttatttaaaaaaaaaataaaa

SEQ ID NO: 170 - DNA, 529 bp, Chlorella sorokiniana
  unsure (1)..(529): unsure at all n locations; Clone ID: LIB3602-004-Q1-K1-D3
ctggccgtcgcggcaacacgcagcaggcggcacccgctgctccccagcagcacaccggcgctgaagcctgcccgcctgcaccctcgcccccggcagcagccagcgccagcccccgaccgccgctcccgccacagctgcgcccgttgttgcggcagatgaagcgggtgctcaccatgggggcggcgctgcaggctgcagcggcgcaaccagcctggcgagcggcagccgcccgccagccggcgacggcagccgngctcatccgcctgaggcagctcgcccgngcacagcagctggagcgctgctcgctgggcaccctgcagcgcctgctggcccagttttggggctgcgcttgaaagcgctgctttgtttagagcgatgttcagctgngtcgactcgntgcgcncccatggagggcaagcccgtggctgttttttttttttttttccacccgcgcactctcgctttttttgccccacncngnngcccaccgctggccccttgtcgccctgagcgggtcaggccacacgtt

SEQ ID NO: 171 - DNA, 444 bp, Chlorella sorokiniana
  Clone ID: LIB3602-004-Q1-K1-D4
ggggcgcatgcgggacgagctgcagtcgctgcgggacaagaccaacgagttggagatcaagatggacaaggaggtgaactccctcaagcagcgatggagcagagcaagaacgacaccgtcaagtacgtgctgggtctgatgctggcgctgatgacggcaggcctgggtgccgcacgcctgctcatgcactaaagagggcaagcgacgcccgcctgctgctgcacccgaaaattgaggctgcccgcccgctcatgccctgaagcagcggctgctcttcatggagtagggttgtggctgcatcatgctggtcatgcactagttctgcggctgctcgtcaatgccgctcagccgctcagccgggcagccgggcagctgggcccataaacccggcaccactattgacggtcaggcagggctatactcgctgtgtaacacaagcattgc

SEQ ID NO: 172 - DNA, 376 bp, Chlorella sorokiniana
  unsure (1)..(376): unsure at all n locations; Clone ID: LIB3602-004-Q1-K1-D5
cccggtcgccccgcgtcggttttctttcgtgccctgccgttgccatgctgtccatcgtttcctatccttctgaagccacctgcattgccacttttccatgctgtggctgtgccgccggcttgtttgactggggcggctggcgctgacctgatactgcttgggccctttgggggggcgagcatgctcccaacgtgtaaggttgtttgataggcgcgacctcctgggctgctctgtctgagacaagagctggagcctgcgcttccttcacctgggccgggcagggagccctgggtgcgccctgcattgcattgcgcgcgagaccttgcggggcttggggctgttgattggntttgtttttgttttttttttttttttt

SEQ ID NO: 173 - DNA, 443 bp, Chlorella sorokiniana
  unsure (1)..(443): unsure at all n locations; Clone ID: LIB3602-004-Q1-K1-D6
tcgcggncgcgtgggcgacgacacgggggtgggcctgtcgggcgtggccaccgccgcggagagggccacgctgctggtggtgccccgcacctcccacgacatcttctacgtagcgcagaatggatccacggccagcgacgagcacatctcaaccgcccgctggtttggtgcagcggtggggggggggggggccaccaccctntctntngngctgtctgagggcagccaggatgccaagcgcaacgcactgcgcgcaaacggcctgtgctgggtggcctgcggnggctttcttctttacaacgccggngctggggggcagaagaaggagggtgnctactngnccgttgcgctggcaggggngctgggggcgctgtgcctgtggcgcggtttttgnnccatcttgtttttgttttttttttgtgagctttatttttttttttttt

SEQ ID NO: 174 - DNA, 502 bp, Chlorella sorokiniana
  unsure (1)..(502): unsure at all n locations; Clone ID: LIB3602-004-Q1-K1-D7
gccgcaccgnatggcaggtgttttgcgccacgtcacggctggcgcgctggctggcggcctggccggcgccatcaccacgccttttgacgtgctgaagacgcgtgcgcagctcagcaccgaccgtgcacacccgctgctgtccagcctgcgcaccattgcctcaaacgagggcctgggtgcgctgttccgcggctggagcgctcgcagcgccaaggcagcgcccgcctgcgccatcgtgctgtccagctacgagtgcatcaagcacttttatgactgaaagttggtgcgcaaaagttggtgcacatgtgcggctggtgattgcccaccggctgccccttgagcttccccacacgcctccatgcgatgctgtatccgcatgcatgcatgcatggccctcatgtcaataactccttgntgttgctgctccttgtttgcttactcgctggccctttcgcgctgcccgaccaacctggttcatgcnactttgttttgttccctgagt

SEQ ID NO: 175 - DNA, 667 bp, Chlorella sorokiniana
  unsure (1)..(667): unsure at all n locations; Clone ID: LIB3602-004-Q1-K1-D8
gccccaactggnggtgacgatggcgcagcacctgctggccgccgccgaccgcttccagctcatccgcctgcgctgcatctgcgagcagcgcctgtgcgaaacggtcgagattgacacggtggccaccacgctggcgttggcggagcagaacaacgcgcgggagctcaagcgcgtgtgccttgagtttgtgagcaagcacctgcaggcggtgatggcctcggagggctaccactacatggtgcagacgtgcccgcagctgcaggcggagctgctgcaggtcatcgccaccgcgccgccggcccgcagccgcgccgtgcacattgtgccgcaccaccagacgggcggccaggcgcgggcggccgacgagagcagcacagatgggcagctgcgccgcgtgcggcagcgcagagagtgagccagcagcgggctgcgtggggcttgtagcggcgcaaacgctgctaccgccccgccgccccgtcgccccttgtgtcaagactgcctcctgtgtgtgatgcgccggacactattgtatgctcccctgttccgggctgcccgctgtacgctgctcgcccaccctgttccctaccccccctcgctccatctgtatccgtcgaccgctccgctgctctgatcccgatccactccagcaggcatttcctgccctcgg

SEQ ID NO: 176 - DNA, 673 bp, Chlorella sorokiniana
  unsure (1)..(673): unsure at all n locations; Clone ID: LIB3602-004-Q1-K1-D9
cctacaccatggactatggagttccccanaactgcgcctacttccagggcgcacggtgcgaggagagcgagcgctacccgggcctgtggcaggtgccgctgctggagatggagcagccgggcggcgagctggtggcggtgatggacccgggccagcaggcggagggtggcctgggctacggcgcaaacgtgaccgaggcaggcctctccgccgacgcgctggaggagctgctgcgcaccaacttcgacttcagctacaacggcaaccgtgctccatttggcctgtatgtgcacacgccttggttcaccaaggacaccattgagggcaccaaccgcttcttggagtacgcgctgcagctggacggcgtgtacgctgtgactgtgcgccaagtgatcgagtggctgcaggacccggtgcccgtcagcgagatggacgcctggcttcagtgcaaggacgtgaacgtgaccatcgtcgagtcgctagctggcaagaagtgccaggtgcacacggtgaagagcggcgagacgggcggcgtcattgccggcatctacggcgtcagcctggctgacctggccgccgccaacaacggcacagacctgaacgtcatcggggttggggagaagctcaacatcccgcctttcgacgactcctgcaagcagcagggcggcagcac

SEQ ID NO: 177 - DNA, 455 bp, Chlorella sorokiniana
  unsure (1)..(455): unsure at all n locations; Clone ID: LIB3602-004-Q1-K1-E1
tagttctagaatcgcgagcgcgccgccctttttnttttttttttttttttttttttttttttttttttttttttttttttttttttttntttttttttntttttttttttttttttggggagggggggttattacaaggggcacaaaaaaaaaaaagaaagggcgttggaggcgcctgccgcccntgccaggggacccccccccccttccggggcggggggggccggcatgccgggccccacccccgcggtgggctggtggcttaacgggcatccccaggggggagcggggggcttaggcggtttggcccttcttggggtacacgtacggaagggggaacttgccgcaatacacccgggggaaggggggggccataaaaaagccggggccccactgggggcacaccttggggaggggctggnccttggtgttgtggtgccccttggggaagttgg

SEQ ID NO: 178 - DNA, 555 bp, Chlorella sorokiniana
  Clone ID: LIB3602-004-Q1-K1-E10
ggacacgtggactgggatgcgggcccctcatccagacatgcccgtcacctcccacatctgcgagccggcacggggagcggtggtcgacgatgatgaggtcacagtcaagggctacgcgtggagcggcggcggccagggcatcattcgggtggatgtgtcggctgatggcggcaagacgtggcacgatgcgcagctgcagaaggtgccgcagaagcgcggccggggctgggcgtgggcgctgtgggaggcgacgctgccggtgcccaaggggcacaagggcccgctggagctggtgtgcaaggccacggacgagagctacaacacgcagcccgaggaggcggcgcccatctggaacctgcggggcgtcaattgcaactcctggcaccgcgtcacggtcaacgtggagtgaggctgccgcatgctgggcttgtgcacaaacgtgccgcaccagcgcgctctgagaggcgcggcggccgccggtgcagagccatgttgagtggcagagtacgccttaatgtatcacgtgaacctctcagtatgtaagcacttccctcg

SEQ ID NO: 179 - DNA, 631 bp, Chlorella sorokiniana
  Clone ID: LIB3602-004-Q1-K1-E11
ccggcaggcagcctacagcgtgccggcgcaacacgcgaccgccggatgcagcgtcaaatcaccgctgcggccaaccctggccgctttcaaatgcacctctgcagcacaagttttccttgcgtgttgccaaccagactaattttgcaccgttttggaggctggggccgccacaccccatctctccctgccgcatcccaaacccaaacccaaccaatggtaccgccgcaactaagtgcgcctcaactgcatgagccatccagtgcccgctctcttccccaagcgcaccaacgtttttccatcaaggcctgatgcccgtcagcgccgcaagggtgcgttgtgctgccgagcttatttccgcgtaacctttttcctacacgactggcatggctgcgcgcgtggccctccaattttttcacgagcatcttttccacagatggctgcactctgctggagttcaccccgcctgttttccgtgttccgcctcccttcaccctcacgtgcccagcactacactctgcccctgcccacccatcttccacacttttgcttccggggtgacatcttggtttgagtatccttcggttcctctcctgcgtttcctttcctggctctctctaccccatcaggccct

SEQ ID NO: 180 - DNA, 392 bp, Chlorella sorokiniana
  unsure (1)..(392): unsure at all n locations; Clone ID: LIB3602-004-Q1-K1-E2
ggggggggggggggggggnggngggggnggggggtttttttttttttnttnngnttttnttttttttttttgttggttggtgttnttttttttttttttttttttttnnttttttttntttttttggttttgttggttttntttgttttttttttttgttttttttntttttgtgttttttttttttttttttttgtttttgttgtttttttttttgttgggtttttttgttgggggngggggggggggggggggggggggtgtgtttttttttttttttgttttggtggttttgttttttttttttttttgttttggttttttttttttttgggggggggggngngngggttttttttttgtttttttgttttttttttttgttttttttt

SEQ ID NO: 181 - DNA, 224 bp, Chlorella sorokiniana
  unsure (1)..(224): unsure at all n locations; Clone ID: LIB3602-004-Q1-K1-E3
gctttcgggncgttgcactgggcggctaccgcagccagnagggcaagcgctaggcagtggcctggcgcaaaccaagtcgggcgggtggaaggcggagggcgcagatgaatgcaactggcgccgccttgcagtgcacgcacatgagacactgtatgtacaacgtctttaaaggatgagcttgtgcatgccttgttgatgatcttccgtctgagctcaatgcntac

SEQ ID NO: 182 - DNA, 156 bp, Chlorella sorokiniana
  Clone ID: LIB3602-004-Q1-K1-E4
aaaaaaaaaaaaaaaaaaaaaaaaaaaaaaaaaaaaaaaaaaaaaaaaaaaaaaaaaaaaaaaaaaaaaaaaaaaaaaaaaaaaaggggcggccgttcttaaaggttcccaagcttcccgtaccgcttgctttgcgacgtctttggtttttttttt

SEQ ID NO: 183 - DNA, 211 bp, Chlorella sorokiniana
  Clone ID: LIB3602-004-Q1-K1-E5
aaaaaaaaaaaaaaaaaaaaaaaaagagaaaaaaaaaaaaaaaaaaaaaaaaaaaaaaaagaaaaaaaaaaaaaaaaaaaaaaaaaaaaaaaaaaaaagaaaaaaaaaaaaaaaaaaaaaaatggggggggcggtttttgagggtacaattttttttttttttttttttggagtggtattatttttttttgggggggggggtattaattta

SEQ ID NO: 184 - DNA, 574 bp, Chlorella sorokiniana
  unsure (1)..(574): unsure at all n locations; Clone ID: LIB3602-004-Q1-K1-E6
tcgctgcgtgctggtgtacgacgctggcagcagcaagacgtttgacaacctggagaactggggggacgagttcctgatccaggcctccccctccgaccccgacaacttcccctttgtggtgctgggcaacaaggtggacgttgagggctgtcgcacgcgtcaggtgtctgaaaagaagggggggggtggtgcancgccaagggcggcatcccgcactttgacacctccgcaaaggaggacctgaacgtggacgacgcgtttgccaccattgcccgcaacgcgctgaagaatgagacggaggaggagctgtacatcccggagacggntgatgtgaatgccgcagccgncccccgccggcagcagcagggctgctgctgagcgcgccgncgtgccgtgctgccccacagtcgcagctattacagtagcagcagcatgatactaggngccattcttcaccccccgctggagcagcaatagctcacgttttgngcgccggcggcatgtagtgcagatggggtgacaggtngcacccgcccatgcttnagcgctccccttttttttgacgcgtgttcag

SEQ ID NO: 185 - DNA, 537 bp, Chlorella sorokiniana
  unsure (1)..(537): unsure at all n locations; Clone ID: LIB3602-004-Q1-K1-E8
ccgtgngcgtctgnacgacagcgcagcgcacgcaggaagctgcgncgagggcggnaaatcaagcacgcggccgcctggccatgnngtctccttcctggggctacnnaccgtgcaggnncctggtacaaaccggcgagggggcgccctgnnggctccctcaacnnaagttcgccaacgtgcttcttaannncagcccggcatgacgacggggctgggcgctnnagcgcccggcccgctttnngcagccacttgcagccccggcccnnctttgcggnnggccaccccnncacccaacaccccnntttcatgagaaagaaattaacacccnntgccatcgcttccctttgctttacgccnntcccccgtcccgnntgcgctctnnctgcatcgnngtcgttcttgtttgccctttgcgggcgcccgcttgctcnnccgggcgccccccgcagaattttgcnnatctgctcgcttcnngtgtgctgtcaggaaagtcagcggttggtatgaatttcctttgttgtaattcgtnnaacgttc

SEQ ID NO: 186 - DNA, 221 bp, Chlorella sorokiniana
  Clone ID: LIB3602-004-Q1-K1-E9
cccggtcgccccgcgtccgctcctagtttcattgccacccgctctgcccccccgaccgtccttcattaagcatgtagctgattgtatcctccccaccatacccgtctggcaaaagccacacacgccttgcccctccgactgcccccacgcgaccttgccttttatggggggggggcggtgcccttccactcatgtaatgctggctgttgcaaaatctaccc

SEQ ID NO: 187 - DNA, 371 bp, Chlorella sorokiniana
  Clone ID: LIB3602-004-Q1-K1-F1
tccggctgtcgcggctgaggcgccagctggccgcatggctgcccgagtttgaggcgcagtacgggcgggtgtcggtggcgcagatggagcgggccaaccccgagatgtacgccaaatacctgcgcttcatgaacctgcgcaatgccatccgtgtgtggggcagctctgggcagatgtgaggcgcgcttttagattttggggcgcacacatcgccacatttttgcaaacagtgcctgctatcttgacgcatttctaggctgcaaattgcgctggttgctatttactgaacgttgcatttcattcatttgacaccgtaagtacactaaatgagggtgggcaacccgggcaaccggcactatgcaaactgctgc

SEQ ID NO: 188 - DNA, 470 bp, Chlorella sorokiniana
  unsure (1)..(470): unsure at all n locations; Clone ID: LIB3602-004-Q1-K1-F10
gtggnccagcccacgtacgagcaggtgtgcagcgggcgcacggggcacaccgaggcggtgcagctgacctacaagccttcggaggtgacgttcgaccagctgtgcgacacgttcctggcaaagatcgaccccaagcagaagaacgggcagggtggcgacattggcacgcagtaccgtaccggcgatctactggcacaccgatgagcagaaggaggtggcgcagcggcggctggcggccatccccggctgtgcggtcgaagcggagccattccgctgcttctggcccgcagaagaataccaccagcactatctcgagaagggcggacggtttgggcgcgggcagtgcgcggccaagggctgcaacgaccccatccgctgctacggctgatgggcggccccagatgcaatgagtttcagcttgactgtccttgtccatgctgtgtcagtccctgtaaagcccccttgctgcc

SEQ ID NO: 189 - DNA, 601 bp, Chlorella sorokiniana
  Clone ID: LIB3602-004-Q1-K1-F11
catttttgcaatctgagcgccaaatacccacaccctaggcaatgccccgctgtgctccatggatgtccctgtgcctgccaatcgactcacatgcccacctgcacgaccctacacaaccagcactagaccccgaattgccagccagccctcgcccatccaagctcaaggcctttcaggtggtgtacactactccatgccttcctgaggcgcactttctttccactaatgtcagcagtgcagcttggcgcttgcggattccagctgcgttgcccctgctcaagaccaccgccctcatcgcccttcatcatgcatgccccacccgtcacagttgctttgccttcacatgcctgctagctgttgctctatcctccccacgcagcgtgcacccaccaactgggctgctcctggcttttcgcaccacttctttcggcccgaatatgcttgcacaactgcctctgaacgtttgtttagcgcatttccaatttacacatggcacgcgtcacgtgcctccgtcctcagctgcacgctgtaaacctctttgggttttgtatttttcagcaaccatattgatgctcgttcagtttgaaataaatcagagggc

SEQ ID NO: 190 - DNA, 672 bp, Chlorella sorokiniana
  unsure (1)..(672): unsure at all n locations; Clone ID: LIB3602-004-Q1-K1-F12
caaaaccatcagcgcggnggtgtacgtgtttgactactccaagcacccctccaagcccgcggcagacggcctgtgcaagccagacatccggctgacgggccacaagaacgagggctacgggctgtcgtggtcggcgcagcgcgagggctacctgctctccggctccgacgatgcacagatctgcgtgtgggacgtcaagggcaccacgcagagcaaccggcaactggcggcgctgcacatcttccaggggcacctgggggtggttgaggacgtggcgtggcacccgcggcacgccgacctgtttggcagcgtgggagacgacaagaagctgattctgtgggacctgcgcaagccggcgggcgcggcgcaggacaaggaggtggaggcgcacacggccgaggtcaactgcctggccttcaaccccttcaacgagtacatcgtggccaccggctccgcagacaagacggtggcgctgtgggacctgcgcaacatgaccagcaagctgcacctgtttgagcggcacgacgaggaggtgttccaggtgggctggagcccgcacaacgagaccatcctggcgtcgtcgggcgcggaccggcggctcatggtgtgggacctgtcgcgcatcggcgaggagcagacacccgaggacgcagaggacgggccccccgagct

SEQ ID NO: 191 - DNA, 453 bp, Chlorella sorokiniana
  unsure (1)..(453): unsure at all n locations; Clone ID: LIB3602-004-Q1-K1-F2
ngagctgcacctgttttccctgtttcctgcccatctgtgtaccccttcagcccccctgccgacccgttttttcctgcccccatcctcacccaacccacaagccacgcggcccacaaacgcatttggttgcaccgccaccctctcagctgcccttcagagtaccatctgaaagctaagcataacgccaagccactgctcgctcctttcggatcgcccatttggttggttgtcggcccctcttccaatcggccccgcctcgacttgatcctcatcacgtccgcttttgtctgcactcctcaggggcgtgccaattgtgcgcgccgccgttgtatcctgccaactgtaacattaatgactacaaaaaaaaaaaaaaaaaaaataaaaaaataaaaaaataataatttataaaaaaaaaaaaaaaaaaaaaaaaaaaaagggggggcttttttagag

SEQ ID NO: 192 - DNA, 454 bp, Chlorella sorokiniana
  unsure (1)..(454): unsure at all n locations; Clone ID: LIB3602-004-Q1-K1-F3
ttcganaagccgcgctgcnganaagcccaactggcactacgacgacaagcccagctggatgcaccccgacgaggaggacgaccacaaggtggaggagaagccccggtgctgcaagtggaacccgcactgcgaccaccgctgcggcgccgactactctgctggcgcacccactggcgcccccaaggatgacaagcccaggtgctgcaagtggaacccgcactgcgacaagcgctgcggtgccgcggacgatggagccgctgcccccgctccttcgaacggcaacgagcagcctgccaacccccctactcctgctgacggcggcgacgacaacaccggcggcgatggcgctgagcagcctgctgatccccccactcccgtcgtctgttgtttctacaccttggtcgacgacaccccggccgacgacaccccggncgacgacttttttgtttttttt

SEQ ID NO: 193 - DNA, 303 bp, Chlorella sorokiniana
  Clone ID: LIB3602-004-Q1-K1-F4
tccgtccgcattcccggtcgccccgcgtccgaaaaaaaaaaaaaaaaaaaaaaaaaaaaaaaaaaaaaaaaaaaaaaaaaaaaaaaaaaaaaaaaaaaaaaaaaaaaaggggacaatttgggtcgggcttcttttccggcctcgttttcttccctttctttggttcttttttttttcgtgcccctattttctccgtgggccctggttatcccctgggttacccggttacctggcttcccccctttccttttctcgctgctttctttttacggcccgccctttccctttgcccccctgtccccc

SEQ ID NO: 194 - DNA, 442 bp, Chlorella sorokiniana
  unsure (1)..(442): unsure at all n locations; Clone ID: LIB3602-004-Q1-K1-F5
aaaaaaaaaaaaaaaaaaaaaaaaaaaaaaaaaaaaaaaaaaaaaaaaaaaaaaaaaaaaaaaaaaaaaaaaaaaaaaaaaaaaaaaaaaaaaaaaaaaaaaaaaaaaaaaaaaaaaaaaaaaaaaaaaaaaaaaaaaaaaaaaaaaaaaaaaaaaaaaatgggttgaattttttaaaaaatcatttttggggggggggggtgtgcccccccttttaaaaattttttaaaaggggaaaaaccggggtaaaacccaactttttttttttatgagggcttccgtgaaaacccttttggcccaatcgggagagggcctgaaaaatatcccccttctcagcnggggggcncnngggggggggggggggggggccccgcccccccccccttnnccccccgccggggtctttgggggtgttttttttttggttttttttttttttttt

SEQ ID NO: 195 - DNA, 604 bp, Chlorella sorokiniana
  Clone ID: LIB3602-004-Q1-K1-F6
cccaagcgccctttgacaagcccttctccgtcgtcctgtgagtggttttggtggcaggaacaatgcgtcctgtgagtggttttggtggcgagagcaatgctgcaagtttggatgggagccagctggggttgtggttgattggcgagcaggggccgcacggccgccaccacaggcatcgccaatgcctgtacccatccaatcctttccgatcagccatgcagcgggtgacaggcggccctgcatagtgcacgccgtgcgccacctgcgcttcagcgacttatgacctcaagcctccaccctgtcattcccacattcgccccatgcagcaacttggcggtggggggcacctggcccggccctcccgatggcaccacccccttcccagcccagatggctgtgcagtatgtgcacgcctgggcggtgccgcagtgaccacagcactcacagcatgtgctggccagcaggcacagcaggcgcagcaggcgcagcgccgctcagggactgtcctgcctgctggcccgactcacactaatacacaacagctgcggctgcatcacatgcatagccagcgaccgaagcacttgccccaggccgttgcgtgagc

SEQ ID NO: 196 - DNA, 545 bp, Chlorella sorokiniana
  unsure (1)..(545): unsure at all n locations; Clone ID: LIB3602-004-Q1-K1-F7
ccatcaccacctccacccccgcccgcgccgagtccgacaactccacctttgtggaccacctgttcagccaggacaaggagctgactgacctgcgccagaagctggaggagaagtaccgcattgccaacaactgagcaggaccatgacgacgtcctgcagtactaggcactgcaccattgttttggcacccccagccgccaaacccaagcctcagcgcgtgccattgcagcagcggcggcggcccgcctgctgaccgctgcgcgcgattgtcttgttcaccgcccgctgagcagccattccttgacgcctgtgtcattttgtcccctcacccataaacatgcccgagaattgaactgccccgccgctatcacagcctgtccctcttctccccgatttcatcgccccacgccgcgccgtgggcgagttttccgatgccctttgcctttcatgctaccacatccgccactggcagccctacctatatgaatgacgccggtccgtnctactgtacaacatgccgcaacatcccgtgtaaccaggcatgc

SEQ ID NO: 197 - DNA, 561 bp, Chlorella sorokiniana
  Clone ID: LIB3602-004-Q1-K1-F8
aaaaaaaaaaaaaaaaaaaaaaaaaaaaaaaaaaaaaaaaaaaaaaaaaaaaaaaaaaaaaaaaaaaaaaaaaaaaaaaaaaaaaaaaaaaaaaaaaaaaaaaaaaaaagggggggcccctttttgggggtccagctttctttcccccgtgcttgcgcaggttttagctcttttttttggggcccctaaatttcatttccttggccgccgttttacaccgtgagggcctgggaaacccctggttttccccactttattcgctttgcggcacatcccctttttgccagttggggtattaccaaagaggccccccccgatcgcctttcccaacatttgcgcaccctgattggggattgggccccccctttttgcggccctttaagcgcggggggtgtgggggttccccccaccgtgcccctttcttttgccagcgccttttcgcccgctctttttttttttttccctccctttttcgcccctttggcgggttttccccgtgaagtttttaatggggggctcctttttgggtgtcgttttagtgctttccggcccctcgccccc

SEQ ID NO: 198 - DNA, 674 bp, Chlorella sorokiniana
  Clone ID: LIB3602-004-Q1-K1-F9
gcggccgagggccgctcactccgagggcctgaggagcagcaggcgcagcaggcacagcaggcgcagcaggctgagcagaggcaggggctcaaccaggactccctgctaggaatcatgggagaggacagctactggcaggcggagcagcagatcatcagtgcggtggtgaaccagcccaagaaggcgcagaagccagaggtggaaatcctgccaccactgttccccccggccccggagatgtcaccagaggaggcagccctgcagcgcaagcggcgggagcaggtggaagaatggcggctgcgcatgcgccgctcctgggacatgagccggcttgaagcagcgctggaggcatcacatgatgaggatgatgcaggcaaggcagcagcggcggccgaggcacccagcgggcaagcccagggcagcgggcaggctcccagcagcctcggcggtggcagcagcgatgcggggggcagtcgccaagggcgccaggatggggcacgttgggaggataacgacgacggcaccaccacctttcactttaagtgatacggctgattgtgttctgcgtctggcagcagtttcggcttcctacccgcctgtacagctactctacctgctcatctcgaagtttgattgcccgctttttgtacgctgattcgagacatgcacgttgc

SEQ ID NO: 199 - DNA, 583 bp, Chlorella sorokiniana
  unsure (1)..(583): unsure at all n locations; Clone ID: LIB3602-004-Q1-K1-G1
gcgaggagttcaagggctacctcttcaagacatgggcggccaggacaagcagggcttccccatgaagcagggcgtgctgaccaacggccgcgtgcaggtgctgatgtcgcccggcgaccagtgcttccgcggctacggccgccgcaacggcgagcgccgccgcaagtcggtgcgcggctgcatcgtgtcccaggacctgtccgtgctcaacctggtgatcgtgaagaagggcgagcaggagctgccgggcctgaccgacgaggagaagccccgccagcgcggccccaagcgcgcgtccaagatccgcaagatgttcaacctgaccaaggatgacgacgtgcgccactacgtgaagatctacggcaagaaggtggagaagaacggcaagaccaccatcaagtgccccaagatccagcgcctggtgacgccccaggtgctgcagcgcaagcgccggcgggccgccatcaagaaggagcgcatctngcgcaagaagaccgaggccgncgagtaccacaagctgctggtgcagcgccctgaagagcagngcgagcgccgntccgagtccctggccaagaaacgggcc

SEQ ID NO: 200 - DNA, 502 bp, Chlorella sorokiniana
  Clone ID: LIB3602-004-Q1-K1-G10
cttgtcctcactttacaggcttaatcgacaggatagcgtctgagtcagcacaaagatggcgaccgctatcaagcctgcccagaagcctggtgtggaggaggccgtaggccgaccccatccaccgtatcctcatcaccctgaccttcaagaacgtcaagagcctcgagaaggtgttcgcggacctggtgcgcggccccaaggacaagcacctcaaggatcaagggccccgtgcgcatgcccacccgcgtgctgaagatcaccacccgcaagtccacttgcggtaacggtaccaacacctgggaccgcttctagatgcgcctgcacaagcgcctgatcaacctgcacttccacctcgagttggtgaagcagatcacctacatcatcatctagccgggagtcgaggttgaggtcaccatcgacgacatgttagcagccatttcagctgtggaagctggtcggacagtgcgcccctgaccgccgctgtcacgccggttggcccttg

SEQ ID NO: 201 - DNA, 628 bp, Chlorella sorokiniana
  Clone ID: LIB3602-004-Q1-K1-G11
gcggccgacaagggcagcaaggaagcgggagaggcgctcaaggaggagttcaagccgctggccaagtggtggaaggaggcgctgggtgcgggcgctgtggagagcgtcaaggtgtcgcgccgcctgtccgccaccccctgcgtggtggtggcctccaagtacggctggtccgcaaccatggagcgcatcgcccgcactcagacgctgggagacgctgagcgcgccaagttcatgcggggccagcggtcgctggagatcaacccgcgccacccgctgatcaaggagctcaaggcgcagcacgaggcgcagcccgagtcggcggcggtgaaggacgccgcgcagctgctgtaccagacctgcctgctggagtcgggcttcctgctggacgacatgaaggacttcaacgcccgcgtcttccgcctgctggccaaggaaatgaaggtggacgacctcaccgtccccaaggaggagcccgcagaagacgaggcggaggaggcggaggaggcagcagcagctgagggggagaagaaggaggagggcgaggagaaagaggtgaagatcaagctggagggtgcgggcagcgacgcgctgaagaattgagaggtgacggagcagctcaaggcgcagc

SEQ ID NO: 202 - DNA, 550 bp, Chlorella sorokiniana
  unsure (1)..(550): unsure at all n locations; Clone ID: LIB3602-004-Q1-K1-G12
ggnagcagcgcagcaaccgccgggggagccggggggccctcgcagccgccaacgacggtggtggtgcaggtgctggttcgcttcactcctgaggagcagcgctgggctcagcggcagggtgcggaccagctgccacagcagatagaggaggaggacactgcacggctgtcacgagaacagggggaggcgctggctgccagtgaggagctgcggtggatgctgcgggatgagcggctgcagaaggtggtgtcggacattgattctgcgcctgaccgcgagcgggcgctgctgcgtgcgctgcaggcgcccaacttcaaggagttcgcagacaaggtgctgaactcggtggtgccagagaccagctgacggagggtgcagatggtcgcaagcctgcggaacgttggtcagtcatgccgcacgaccggcggtggcggcagcggcggctggatgcgcagcgcagcggcgccgcatccagccatgcatgcgctcgctgaccggctatcctccatatttgtgcgcgctgaccttgtctgtaaacacggctcagcgc

SEQ ID NO: 203 - DNA, 483 bp, Chlorella sorokiniana
  unsure (1)..(483): unsure at all n locations; Clone ID: LIB3602-004-Q1-K1-G2
tacaagctgggtgactatgtggacatcaaggtcaacgccgcggtgcacaagggcatgccccacaagttctaccacggcaagactggctgcgtgtggaatgtgaccaagcgcgccgtgggcgtggagctgctcaagcaggtcaacgggcggtacatcaagaagcgcatccacgtgcgcatcgagcacgtgacccccagccgctgccacgaggagttcctgcgccgctgcaaggagaacgacgcggcgcggcacgcggccaaggtggagggcaagccgctgccggtgctcaagcgccagcccaagggcccccgcaccgaggccatcatgctggagaacgtgaagatggagaccatcacggccatcccctacgatatcctcaaggagggcgtgctctgagcgtgatcggcggcgacgttccgttgattgcggctgcagcttagtgagatgtaaccccgcagaaaaaatttttttttattanaanaa

SEQ ID NO: 204 - DNA, 583 bp, Chlorella sorokiniana
  unsure (1)..(583): unsure at all n locations; Clone ID: LIB3602-004-Q1-K1-G3
ggcagctgaggaagtcgcagncggnagggcngnngcgcaggcgagggnagnagccttcagnaccaagctgcnnctgtggtgccagnaagggcgacnnggcgataccnnngccgtgcctnngccggggtaccncnnattggcctgcncnngctggtgccgnntgcctcgacttctgcttgctgcnngccaggcggnnagcgcattcgcgcagcgcggcggccaccaacnnccgcgcacagnnacctgnncgccccatttcagcatttgcgggactttnntgaggagnngcgatcaagggagnngtgggccccnnagcgtggaccccanngagtcatccnnaccatccnnaggagttgaagggagtnngggccaaccagtttggcacccagcagcagcanagcaggggggcagcagagccgccgccttgtcctacttcacctgagctggcagcgcttgttgcatgaacttccgctctgctaccagcaaggagcatgtgagcatgtacattttatgattctgtttaatgaaaataacctgtacagcactagctagctnngaacagcatgtaaatgctctgcctgtg

SEQ ID NO: 205 - DNA, 549 bp, Chlorella sorokiniana
  Clone ID: LIB3602-004-Q1-K1-G6
cgggtggagtgggcaattcgttcgcgatggtgaacgtcccgaagaccaagaaggccttctgcaagggcaaggagtgccgcaagcacaccatgcacaaggtcactcagtacaagaccggcaaggcgtcgctctacgcgcagggcaagcggcgttacgaccgcaagcagtccggctatggtggccagaccaagcccgtgttccacaagaaggccaagaccaccaagaagattgtgctgcgtctggcctgcaccgtgtgcaaggcccagcacatgcacgccatcaagcgctgcaagcacttcgagatcggcggcgacaagaaggtcaaggggctatactagtaaaaaaaagagagcggcaggcggagagcatgaccgagaaatggaggcagcggcgcccgctcaccctgggcggcctgctccccgcccggcgcctcgctttggccgcctctggccactcgtacgcctccttgtccatgcccttgtgcttcctgagctgcccaacctggcatgcaagcagcctggccgtctgtaatgccattggcgtgaaaaa

SEQ ID NO: 206 - DNA, 454 bp, Chlorella sorokiniana
  unsure (1)..(454): unsure at all n locations; Clone ID: LIB3602-004-Q1-K1-G7
gcccggcgccgnccgctttgcgggcatcggctggcgccccgccggcaacggcagcccggtgctggagtctgccattgcgcacatggagtgccgcgtggtgtcgcgcatggagacgcccgaccactggatctgctacgccgaggtggaggagggcgaggtgaccaagcccgaggcgcgtaccgcggtgcaccgccgcaaggtggccagctactactgagcagcctgccgcaggcacagcataagaataacagatgttgccgctgacgtcgatgcatggcgtcgctggcccgcctggcgggccgcgtgccaaccccttgtaatttgcgccctgtatttcatgcccctctgatctgccatctgacgctttcagacccctcacccctcatctgcaatctgaccgctctttgaacgtatggtgattcgaatccaaaaagtgtgttagctcagcaatcgg

SEQ ID NO: 207 - DNA, 439 bp, Chlorella sorokiniana
  unsure (1)..(439): unsure at all n locations; Clone ID: LIB3602-004-Q1-K1-G8
nanaatgccgctcgctgttcaaccagcgcaagcggcccgccaagcttgcctggaccaccctgtaccgcaagcagcaccgcaaggacctggaggcgcaggttgcccgcaagaagcggcgcaacgtgaacaaggcggccacccgctccgtggcgggcgccagcctggaggtgatccagaagaagaagagcgagaagcccgaggcgcgcaaggcctcccgcgaggcggcgctgcgtgagatcaaggagcgcgccaagaaggccaaggccgacaaggcggtgcagaaggcgcaggccaaggcctcgggcgccggcaaggctgtcaagaacatgcctaagggcgcgggcaagggcggcgccaagagcaccggccgctaagccagcggcaatgcagcgggcgtagcggcctgctgggccgctgccgttgtaacgcacttcctcgg

SEQ ID NO: 208 - DNA, 348 bp, Chlorella sorokiniana
  Clone ID: LIB3602-004-Q1-K1-G9
gcagcgcccaggcccttgcagccttgcctcctggcgcaggcaggtggctgctgtgcacagctgccaccctcatgctttgcttctcagaccgctgcacccctccgccactgagcgaacgagcgagaaatgcacacaagaaatgcaccgcccaccgctgcgctgcacctcgttgctaacgcgtgggcttgtcacccgcgcctgcaacatgcctaccacatacccgcacagtgtcctgtctgcccttcgatttcgattttccagccaccttcctgccacattccttattcatgccgttgccccgcctgcggccctccgctcagcggcccggttgtaaagcagcagctccgg

SEQ ID NO: 209 - DNA, 473 bp, Chlorella sorokiniana
  unsure (1)..(473): unsure at all n locations; Clone ID: LIB3602-004-Q1-K1-H1
tccgcatccaccagnntttgtggagnatcctggnacaagtacctttggcaacgtgtggcgagctggacctcatcttcaacttccacaaggcctacttcatcctggacgagctgctgctggcgggggagatgcaggagaccagcaagaaggcggtgagccgagtgattgaagcacaagatgcgctggtggagcaggtcaaggcgggcaacatcagcggcacagacgacatagcagccagcttcaacgcgccgcgcggatgaggccgcactttgagagcagctggcaagatgtccgggcagctgtgatcagcaagccgtctgggcatagcaggaggctgccgcggcttgcggcacgcccgctgaccgcaccacactgagagcgcatagttgacttacctgtctggactggtagtattgattctgtcgtgtaagagagcatgctgaaaaaaaaaaaaaaaaaaaaaaaanaannnn

SEQ ID NO: 210 - DNA, 552 bp, Chlorella sorokiniana
  Clone ID: LIB3602-004-Q1-K1-H11
cggccgcgtgggcggccgagggcggggggaccgaggtgcggcaccggctgtcagtgcggcctagcctggcgcctccccagaagattggtgacatcaccaagaaggtgttcaagaagcaggtggagggcattttggaggacttggctattgagctcgaacggtgaccgcatttgtgatgccaagcgcttgcttggactcctagtcggccgaggcacagcttgcagcggcaacccgtgcattgcagccgggtcgcctgaacagcttcttctgcacccaggcccatgccagcctgttgctgagcccctcaacacacccctgtcccctgtatgctgcgctacccgttgcaccattcccgccgccgcacctgcctgcattgtgcagcggcaggcattgctttgggcgctgctcacttggcagcgcgccccccaattttgtgtgccaacatgcactcgtcttttccatatgattccagcactgcttgatcaatattaaagctgtgtaccctgtcccttcggccgccctctgctgcgcccactgtaataaattctgcat

SEQ ID NO: 211 - DNA, 403 bp, Chlorella sorokiniana
  unsure (1)..(403): unsure at all n locations; Clone ID: LIB3602-004-Q1-K1-H12
gnttagcgatgtggtcagccccgggggggcctggtggacttccccggccagacgcggcgcgtgatcagcttcaagcggctggcactcaccgacttcacggtggacatcccccgcctcgccaagaaggcggtgctgaagaaggcgctggaggaggcggaggttgaggccaagttcgccaaggagcgcgtggggccagaagctggccaagcgcgcggccaaggcggcgacgaccgactttgaccgctacaaggcggcggtgcagaagatgaagcgcagcgcgcaggtgcgccgcgccttcaactcgctgaagaaggccgccaagtgagcggagctcctcgcagccgcagcagccgcccaattcattgcgcccggctcgccccctggtgtaatgtagcacgcccna

SEQ ID NO: 212 - DNA, 419 bp, Chlorella sorokiniana
  unsure (1)..(419): unsure at all n locations; Clone ID: LIB3602-004-Q1-K1-H2
tttttttttttttttttttttttttttttttttttttttttttttttttttttttttttttttttggaattcaaccagccggacgcgggggggggcaccctgaccggggaccttttgagcaaccggccccaaaaaaaaaacctttttgagccccgctaaagagccaacaaaaggtgggtccaaccttggaggggacccgccgaaaccccgctctggacccgcttcgaactccccaaaatggcacgggatggggggccccccgtggcgcaccactcatttgattggaacaaaaagggggggaacccgggcctgcaaacgccccgnaacccaatngcgcgggaagggtccttttttcactggaccgggactggcccaaaagaaggccacaacaaaccgcccaggataattttttttttttg

SEQ ID NO: 213 - DNA, 620 bp, Chlorella sorokiniana
  unsure (1)..(620): unsure at all n locations; Clone ID: LIB3602-004-Q1-K1-H3
gccacttgcaaccgccttgcaggnactaccacctgcagtctgagaaggctgagcgggaggcgagccacgacgtggcgcgcgccgccttcaagtccatgggcgcctccaccactccccaagcgatgtgctggatgcctctgccctgcgcaagatgtttgcctcggaccgcgtggaccagctgatggccatggccgacaagaacaaggacggcaagatcgacttcaaggagttctgcgacctgatccgcaagtacccctgcgactgagcgatacataaggcagatgcacggaccaatccctgcaataaatgcaccgtttcacaccgggccacgggcgcggcgctgattgacgcgtccccaagtaaactcctctcccaagccagtggcgccacggcacagcaccacgtgcggctgaagctgctgctgccctcagccacttcctctgttttccccgtcctcagttttccagttcttctggctttcagactttcagatgattgtgctttcatcctgtccctacgccacagcctgctgcctcgccactgctgctgaggcagtgagcctgctgtgctgcaacggccgacccttttgtaacgaacgacgcaagctaaaaaaaaaaata

SEQ ID NO: 214 - DNA, 533 bp, Chlorella sorokiniana
  Clone ID: LIB3602-004-Q1-K1-H4
ctgtgcaccaccggcaacaacggcaagactaaagtgaccaagtgccccgctggcaccgtctgcgatgacgctgcgctcaagtgcgtccctgaacagcccgccggcccctgcgacaaccgccccgatggctgctatcacttctcccaccacgacggcatgtgcctcaacggccagcagtccctctgccccaacagcggcagctgcaatgccgacggctccgcctgcgaggcgccccagcctgccggcccctgtgacaaccgcccagatggctgctatcacttctcccaccacgacggcatgtgcgtcaacggtcaacagtcgctctgccccaacagcggcagctgcaacgccgacggctccgcctgcgagacgccccagcctgccggcccttgcgacaaccgccccgatggctgctatcacttctcccaccacgacggcatgtgcctcaacggccagcagtcgctctgccccaacagcggcagctgcaacgccgacggcaccgcctgcgagggccaagaggatcccaacgcaaa

SEQ ID NO: 215 - DNA, 569 bp, Chlorella sorokiniana
  unsure (1)..(569): unsure at all n locations; Clone ID: LIB3602-004-Q1-K1-H5
cggcgagtggggtgggaagccatgnagcgcagnactaccaaccgactcagccctgctgttctacttgttcgcatcgtaccttgcagccccgcagtggctgttcccccagggggatgccacctcgattagcggcctgagcggcactctttacttaggcaagctgcccaccaagcctgcggatggctatgtgggcgtgctgccctcacggccgcccgccagccccaaggcacggctgtggtgggcctgcagctgggcacgcagcagccgctgtttgccctcatcgtggcaggcgacaacatatatgcggcatcaggcagcactgcgctgctgcaggtcctgctgctgttcctgcggctgtgccagctggagcttggcggtgccctgggtggccgccacatccagcacttggagctggcgcacgtgctcaaaccatacaggcccaagtttgacctggtcagcagcgcggcacgcttgataggccgctatttctgaccagcacgcattagggggtcccaagcttcgcgatgcaaagcgtatgcactgatttcccacttgtggcgatgtgcgtg

SEQ ID NO: 216 - DNA, 491 bp, Chlorella sorokiniana
  unsure (1)..(491): unsure at all n locations; Clone ID: LIB3602-004-Q1-K1-H6
cggccgcgtgggcggcggccgacagctgtgccagctgtttngaaaaggaggcgacagctggcggctggcgcatgaacatgaccatgctgaaccccaaggagacccggctggtggtcagctgatggacagcgcagagcaacctggctggtggtcagctggtggacagcggggcgtgcagcctggcccacttggcattccttgcggggaaccaaccggccggccggctgtgtgccgtggcagcagcgtccagccttgtatgctgccctctgtgtgttacagcggagcggaacccttcccagttgcagcggcgctcaccaacatgtgtgcttacgtgcgtgcttttgacatcactccctgttgatctcgcatcataactggcgcatccatccgacatttacagcatactttttgccatgactgctatgcattcttccacgagagcttgngtaaagccgnnngctgaaaaaaaaaaananananaaanaannana

SEQ ID NO: 217 - DNA, 451 bp, Chlorella sorokiniana
  unsure (1)..(451): unsure at all n locations; Clone ID: LIB3602-004-Q1-K1-H8
ccgcgggcggtgttacacgggtctcccaatgcaacaccagggtgtgaggtgtgtgccggggcgccggcttgccctgccagcgcagcgccccagcggccactggggtcccaactgtgatctatcctcgcgtcagggcgctgctgttacgctgctgctcctgccgccgcggcgcgcggggcggcgggcatggggaggccgctcagtaggccttgccaaccaccggcttggccaggaagtcggagtactcctgcagcgggctcttggtgaacacggtctcgcgccaaaggtcgggggtgaggaagccgtangtgttggccagggcgtaaaaggtggccttcacaaagttgcccagggtgcgggtggagccgcgggagcaggtgtagcagtcctcaatgccagccatctgcagcaccttcttgggggtgcgggccgccacaatgccgggacccgg

SEQ ID NO: 218 - DNA, 579 bp, Chlorella sorokiniana
  Clone ID: LIB3602-004-Q1-K1-H9
cgcacccccagcagctcctgcaaggtggccgccggccgcaagaacctcccacacccgcaccatgtcctctgctcctctggccaagctgctccccggtgtgggtgctggcttcgtggctgcctttggcatgatgactgccctgcgcacctccggcgaggccaagctgcccaagtccgtgaccaaccccgagtgggccgccgccactgagaagctgctgcagtccacgccccgtgtggccagcacccccattgccctgaaccccggtcgcaactggtgaacgcccacacctggagggccggcccacacgacataagtagcacgtgcgcactagcgagagcggacgctggcggcacgcaaaaactgagcacagaccgcccagccagccgctagctcttgtgtctgcgtgcccctgccatactccaaactctgaactctctggcctctgtgattcgacaccacatcccaccgtgcacgttgaatgatgatgcctcaccgcgccgcacgctacccagtatttgattttcctaacttccttctcctccaaatcagtcggttatgtgccacctttgaacctgccgc

SEQ ID NO: 219 - DNA, 57 bp, Chlorella sorokiniana
  Clone ID: LIB3602-005-Q1-K1-A10
aaaaaaaaaaaaaaaaaaaaaaggaggggaaaaaaaaaaaaaaaaaaaaaaaaaaaa

SEQ ID NO: 220 - DNA, 613 bp, Chlorella sorokiniana
  unsure (1)..(613): unsure at all n locations; Clone ID: LIB3602-005-Q1-K1-A11
gnggcacagccccgtgcgttgggtgcagctggcagatttgggggagtctgcccctgcatgctgcttcacgcctttcagccttgagcttgctcggctgtcagcctgaagcccgcgtgcgcagctgcgtgccccccgagtgtgcaaccgcagcgccctgcagctcccagcctccccgccagtcagtgcaagccgccagcgtgccgccctaggcggctgcatcagtcttgacagcggcagctccctggtcccttttgctttggctgggctcagacccattcccttccccatacaccccagggccaccgcacccggagctgcgtcgcgcaggcgcggctgcggccgggttgcgtgccaggcaagggcggcggggcgcagcgctgcggcgcggctgttttgcgtgacgccccctgtggcgtttgctcacgtgagtttcgccgtattgtgccaccccttgctttgcccctctgcctttcccactcctcccgcccgatctgctctgcctgcccttcccctccttggtggttcccttccccttcccgacttgcacttgtgtcgctgcccctcctgggcgttgcttgatgcagtgcatgaccttcncagccggccttgggta

SEQ ID NO: 221 - DNA, 640 bp, Chlorella sorokiniana
  unsure (1)..(640): unsure at all n locations; Clone ID: LIB3602-005-Q1-K1-A12
ctagttctagatcgcgagcgggncgctggtttttttttttttttttttttttttttttttttttttttttttttttttttttttttttttttttttttttttttttttttttttttttttttttttttttttttttttaaattttttttttttttttttttttttttttttaatggggggggggggggggaaaaaaaaggtgggggggaaaaaaaagaagaaaaagaaaaaagtgggggaacaaaaaaaaatttggagggggaaaaaaaaagggggcttgggggttttaaaaaaaaaaaaaaaaaaatttgggtaaaaaaagggaataaaaaaaaaaaaaaaaactgggcggggggggttttcctttttaaaaaaaaattaaccaaacaaaaaagttccaaaaagtaaaaaaaaactttttttttttttttaaaaggggcaaaacccccaaaaaaaaaaaaaaaaggggggcttttataatccggggaaaaaacttttttttttaaaaaaaaaattgggcgtgtttagttttttcaaaaaaaagccccccccacccttaaaaaccacggaaagtttttttgtcccctcaaccaaacaccggggttatttttttaataaccccaaaatttttggcccccgg

SEQ ID NO: 222 - DNA, 282 bp, Chlorella sorokiniana
  unsure (1)..(282): unsure at all n locations; Clone ID: LIB3602-005-Q1-K1-A2
tcgtgcctgcgcctttccctcaccctatgcacgtccgttcttgccaccgatactcatccgagcccctcatcagacctgcgctacatgtcgtctccactcctgatctgctgtgctcatttgtccacccagccccagacgacttgcctttcttttccaggcgtggttttcgcggcacgcctttccggttccctccgcccttcccatccgatctgtgcagccagcaaacccctggatttctgtacatcaatttgtttgcacacatgtaagtttgagcatgccanc

SEQ ID NO: 223 - DNA, 246 bp, Chlorella sorokiniana
  unsure (1)..(246): unsure at all n locations; Clone ID: LIB3602-005-Q1-K1-A3
cgcgtcagnactcacgggcgctgacttcaccgacgcgctcatgcgcaaggacgtgcagcagatgctctgcaagatcgcagacggcgtcaaccccaccaccggcgttgccacgcgcgacagcctgtactgcccctgagcacggcttgttgcagttgtgtgtgacgagttttgcccgattcattgcactctttaacgtctgtatggggtgcgcagcccaccgatttttgttgtaaggtgaagattttc

SEQ ID NO: 224 - DNA, 615 bp, Chlorella sorokiniana
  Clone ID: LIB3602-005-Q1-K1-A4
gcgcaggtcagaaaccgctgcgttggttctacatgtggcggcccagcacctgacccgtagtgtccgcgctaggctgcccctggctgctgcctgcaggccagccgctgcacttgggccaagacacggcaccgcatgcgctctgtctcgcccccaacgcctccgacggagccgggtcgtgtgctggtgtgccgatgagctgcagcggtcccaagtacgatgctcgctcgccaagccttttggagcgccgcctggatggctctgcgcgtgtacttcgcctcgagtggaagggtgggctggctggcggcgggggctgcagcgtgctgggcagcagctgtgcatgcggaggctgaaacacacgaacgcctgcggctggcgcagctgctccggcccacctcgccgctcccaccgtgccccctccttgcacccccagatggcacgtgctttgttgcaaggtttgacctgctgaggtaccgcgaccaacccgcctcgcgcgcccacaagcgcctcaatgtgcagatgtggcaggcggttgaggctcacgtgcgcctgctggagcggtccggccactgcacatttgttctggagagggggatgtgaacgccccggcgggcgcca

SEQ ID NO: 225 - DNA, 362 bp, Chlorella sorokiniana
  Clone ID: LIB3602-005-Q1-K1-A5
ttccctgttcgaccccgcgtccgaaaaaaaaaaaaaaaaaaccaaaaaaaaaaaaaaaaaaaaaaaaaaaaaaaaaaaaaggggaaaaaaaacaaaaaataaaaaaaaaaaaaaaaaaaaaaaaaaggggcgttctttttaaaggatccaatttttattccccgtgcttgctttttttttccctttttttagcccccctttggggcggggggggggcccccttttaacacctttttttttgggcaacccggggcgttccccacctctcttcctttactccccttcctttttcgccccctgggtttaaaactgaagagccccccccaaagcgcccttccaaacgagtggcgcgtttgagggga

SEQ ID NO: 226 - DNA, 590 bp, Chlorella sorokiniana
  unsure (1)..(590): unsure at all n locations; Clone ID: LIB3602-005-Q1-K1-A6
catcgaccagctgagtgccagccccaccgcgctcgggtccaggaagttggcggcaccatgtcggcgctgcggcgactgatccccctgatggaccgggttctggtggagaagatcgctccccccgccaagtcggtgggcggcgtgctgctgccggagagcgcggtgcagaagatcaacagcgcgaccgtcgtggcggtgggccccggccggagaaacatgaacggcgagctggtgcccgtggccgtgaaggagggggacaaggtgctgctgcccgactacggaggcaccaccgtcaagctggaggacaaggagtaccacatctatcgggacgacgagatcctgggcgtcctcaccgagtgaagccgaggactgcgcaccagctgaaggttccggctgcctcagttcccagggcgaccatctgccagtcagtgtgcgctccacggccagcggcatgcagcatagcggcagccagacccacccagctggtgcagngtgctgtggtgcacgcctgcagaacggtgcttggcagccgctgcagcgttttcctgcccagcaccccaccccttcaaagcagnagctttcccttattt

SEQ ID NO: 227 - DNA, 377 bp, Chlorella sorokiniana
  Clone ID: LIB3602-005-Q1-K1-A7
cccaatgcctaccctggtgttcgatgttgagctgctgggcatcaactgagcatggcatagcaggcacggcacgcgcagcacgcccagtgagagagcagcagcagcaatgattggccattgcactggttcacggtgtgatagcaagtctgtgggacggccatgattgacgctcgctctgtgctgtggcattttttgggttttcctgcactgtgctgcggtttttgcatgcagcactgctgcccccagtttggctgtaagcagcaaatatgcagaaaaaaaaaaagagcagagaagacacaaaatcaacaattgaggacagaccgtatggggcggcaggcacaggggacacagttgcagaaggtcaggctgatagtgca

SEQ ID NO: 228 - DNA, 592 bp, Chlorella sorokiniana
  Clone ID: LIB3602-005-Q1-K1-A8
ggcgcaagctggacaacctggctgtggggccggtgctcagcgtgacgacagaaacatgctgaaccacacgcagcgcctgctgcagataccgggcgcgcggctaatgtttggtgggcagccgctgcaggggcacagcatccccgagcggtacggcgccatcgagccaaccgctgtctttgtgcccctcaacgagctgctgaagccggacaacttccacgtggccaccaccgagatctttgggcccttccaagtggtgacgcagtacggcgaccatgacgtgcctcacgtgctggaggcctgcgagcgcatggaggcccacctcactgccgcagtggtgtccaacgacgtgcgctttgtgcagcacatcctgggcagcacggtcaacggcaccacatacgcaggcatccgcgcccgcaccacaggtgccccgcaaaaccactggtttgggccggcaggcgacccgcgtgccgcaggcatcggcactccagaggccatccgcctggtgtggtccacccacagggaggtcatcctagactacggcccagtgccgcacggcctgcagctgacgcagagctgagcagcaggcagccgc

SEQ ID NO: 229 - DNA, 601 bp, Chlorella sorokiniana
  Clone ID: LIB3602-005-Q1-K1-A9
cgatgcgatacgtaaaccatatccagtttgagggctacgatgtggacatggagaagagtgctatggcgcctccatcgaggttgtaaaaggccatggacccgcatggcgacgtgctgctggcctttgagatgaatggcgcgccgctgccggcagaccacggcttccctgtgcgcgtggtggtgccgggtgtggcgggctgccgctccgtcaagtggctgggcaagattgtggcgagcgacgaggagagccacagcttctggcagcggcgcgactacaaggccttctcaccttctaccgactgggacaacgtggactgggatgcggccccctcaatccagaacatgcccgtcacctcccacatctgcgagccggcacggggagcggtggtcgacgatgatgaggtcacagtcaagggctacgcgtggagcggcggcggccagggcatcattcgggtggatgtgtcggctgatggcggcaagacgtggcacgatgcgcagctgcagaaggtgccgcagaagcgcggccggggctgggcgtgggcgctgtgggaggcgaccctgccggtgcccaagggcacaagggcccgctggagctggtgtgc

SEQ ID NO: 230 - DNA, 114 bp, Chlorella sorokiniana
  Clone ID: LIB3602-005-Q1-K1-B1
aaaaaaaaaaaaaaaaaagagggagaaaaaaaaaaaaaaaaaaaaaaaaaaaaaaaaaaaaaaaaaagggggcggccgctttggggacccagctgacgcttttttttttttttt

SEQ ID NO: 231 - DNA, 346 bp, Chlorella sorokiniana
  unsure (1)..(346): unsure at all n locations; Clone ID: LIB3602-005-Q1-K1-B10
tctccaanaacagcgaantgcgcgctaagtggagaagaacggatgcggcgcctgaagcgcaagcggcggcggcagcgggccaagtaagcggcctgccccgcagcccagcagcgctgcggcgcctgggcgcagccgcccgctcgcacgcgtgcaacggcgctgcagcggccagccggcgtcacggagtccgggcgcccggcagccgccgatgaaatgtgacggccgagtgtgtaatgctcacgaccgtgaaaaaaaaaaaaaaaaaaaaaaaaaaaaaaaaaaaaaaaaaaaaaaaaaaaaaaaaaaaaaaaaaaaaaaaaaaaaaaaaggggcggcgcgttttaaa

SEQ ID NO: 232 - DNA, 646 bp, Chlorella sorokiniana
  Clone ID: LIB3602-005-Q1-K1-B11
ggagtgtggcttcggcgcattgcctccccatctatgcagcctcacgcgccatgcacttcgcaacttcccagagtgctgttggatgctggtcctgctgattgggtgcagaaaatgcgactgtgaacaacaagatcgagacgaaaagtttctccagctcctccgacatcattgtgctcggtgacgtgaaagccaacacattgacagcccccacctgttcctgccgcctcgcccggacctgacccacacaacgcgatttgagccaccagccgccagtggaactgagtacaacttgccgcagagcagcccctgcgacggcttcttcagcaaagaaccccgatgtggcaacggcatagtgcggctgttggtaactgttcatgcgcggcatgcacctgatgccctgcctcaggcttttgccgggccgcgatctgcaaggcacgtgctgccctcgtaggcttcagctgcactgcctgcgcgattgccgccattcttccttcgctggatttgatgcgtgcatggactgctgcacgagagtaaaattgttaccagattgtactggcgtgcagcagctttcatttatttcccctttcaccaacgattagatactttgagtaaacccaacgttgcttgccacctgctttgtatgctc

SEQ ID NO: 233 - DNA, 486 bp, Chlorella sorokiniana
  Clone ID: LIB3602-005-Q1-K1-B12
tgagcgatgtgccactgactgggggtgttgtggctccccagccagcatgtgtaagccaagcacacgcaaaaaaaaaaaaaaaaaaaaaaaaaaaaaaaaaaaaaaaaaaaaaaaaaaaaaaaaaaaaaaaaaaaaaaaaaaaaaaaaaaaaaaaaaaaaaaaaaaaaaaaaaaaaaaaaaaaaaagaggggggggggggggggcgggttttaaaagaaaaaaattttacaaaaccgtggaagggaaaaataaaaaatttttttttggggaaacccaaaattaaatcaatggggggggttttaaaaaggccggaacggaaaaaactttggaataacaaaataaaatgaattggaaaaaaaaccccttttgtaaaggggggtaaaaaacaaaaaggcgcggacgatacgcccttccaaacagttgcacatccaaaagggaaaagggaacccccctttagttggtttttaaagcgggggggtggggggg

SEQ ID NO: 234 - DNA, 468 bp, Chlorella sorokiniana
  unsure (1)..(468): unsure at all n locations; Clone ID: LIB3602-005-Q1-K1-B2
gggcgcgtggngaggctctctgcctgcacccctctttgcaccctcgcctgccctgggcacaccccctcctttcctgggccttttggccttgctttgcacccctctgccagggcctcggccctgtctgctacccacctgctccctgcctttctcgttgctttgcacccccgcctgtttttttgtgcaccctcccttcctgggccctggcccagtcgcacaaccccccacctgggcccttggccttgtttgctttgaccccgctcgctgccgcactgcggcgcaccatgctccttccccacaccgaccctgcaccttggcccncgnanggcngccgnccgncgccgggcgggccccgccagcccgcctcanggggcgctttttgctgtttttttttttgtgtttggttggnngggttctnncgccttactttattttttttttttttttttttccccccccctccccccc

SEQ ID NO: 235 - DNA, 279 bp, Chlorella sorokiniana
  Clone ID: LIB3602-005-Q1-K1-B3
gcgttcgcaacatttgcgagcagccggtgcccgacgcgccggtccccatcgctcctccccccctccgtcattccgttgcactctactctgttcatcatgccgcgctgccagtggccagttttgtgccccctcgtactgtggaagtggatgtgcatacgcctcaacgctgctccctcattgcattcagttcctgctgccccctccccttccctcccaattgtttttctgccgctcgccaccctccactgatcaatgcgcctgctgtaaagctattcctcg

SEQ ID NO: 236 - DNA, 449 bp, Chlorella sorokiniana
  unsure (1)..(449): unsure at all n locations; Clone ID: LIB3602-005-Q1-K1-B5
gggtggccaacacggcgagagacgactcacagcaggcctgactcctccagaagagaccggaagctacctgtgggcaagtccagaccaggangcaggacgggtggcccccaggccgcagggcaagggctacggcgtgtaccgcttcgcggggggggggggccacgtggacggtacagcccgatctcacccccgacacctggtccgagtctggcgactcttacaagctgggcaccaagggccttattgcttgggccggcctgattgtggtgctgctgggcgtgggcatcaacctggtgatctncacctttgccctgggccagtaaatggcgacgccccccgcgtcggcagcagcagcagcagccagcagcattnccttgcttgttctcttctgtgagacaaaccctcaccctaccctaactggcggngncaccatgcgccgntcccttgct

SEQ ID NO: 237 - DNA, 483 bp, Chlorella sorokiniana
  unsure (1)..(483): unsure at all n locations; Clone ID: LIB3602-005-Q1-K1-B6
catgcccacctgcctccaacgtcacgccttcatcaaccctcacccaacccatccacctgccacccatccactcaccttccctccgccacaacctctgccacccactcaccacccatcacccgctcaacgccctccatgcaccatcctccccatccaccaaatctgccaccccaaacgcacggccgccgctgcaccacctgccgccccctcacccgcacccatcttccacccgccacctttcctgccgctcaccgccgcacatcctacctcccacacctcactccatgtccacccttcacccgcgcttcacacagcggctgctgccatgcaaagctgctgccaaacccatccatcatgctcgcacacccactcacccacacgtccaacgtatccagacccattttcaaggcccgactgtacagtgcctttttgcgttcttatgccgcncnggtaccaggacttaatgtgtaacaaatggtatgt

SEQ ID NO: 238 - DNA, 108 bp, Chlorella sorokiniana
  Clone ID: LIB3602-005-Q1-K1-B7
gctgctccacgctgtcacaggcctcggtggacgccttcacctttgggctggatgtgaagcccgactccagcatggtcatccgctccacgctgggcaatgtccggccct

SEQ ID NO: 239 - DNA, 331 bp, Chlorella sorokiniana
  unsure (1)..(331): unsure at all n locations; Clone ID: LIB3602-005-Q1-K1-B9
ggccaacagcgaggcgaccctgggcaagggcgnacctggagccaagggcgagagcctgtacgtggccaactacgcctactgagcgggtggttgcgccagcacccacctgggcgattccgggcggttgcgcccagcgcccagcacccacgtgccgattcagtgtcgttgaatgaaagccgcggccggcgtggcgggcgggcctgccctgctcgccgccaccgccgcgtaaatgaacgaatgcctggtgccacgcgcgcgtggccgcacatgtcagcctcccgaccgttcttttgcagcctgcattgcgtttccttgtaatgaattatgggtt

SEQ ID NO: 240 - DNA, 468 bp, Chlorella sorokiniana
  unsure (1)..(468): unsure at all n locations; Clone ID: LIB3602-005-Q1-K1-C10
cgcgngcggccgccctttttgggggggggggtttttttttttttttttttttttttgttgttttttttttttttattatagttgcctgttaaaaacaggcgagtaggggggcatagcaagctagatgagcaaggggaggggaagaacaaacagggggaaaaaaaggccccccaagaaggggggggggggggggggaaaaaggggaagcaggccacaaaaaggggggggggggcgggggggccaaagggggggggggaagagcctgaaaaccaaaacgaccaccaaaagaaaaaaaggggggggggcccccaaagggggaaagggccagatcccccccgccaacaccaaaagacggagaggggggggcaaccgccagaaatacacaagcacccgaaaagagccaagcgttgcaaaaaaaaaaacaaaacctaaaaacggctgaaaagaaaaagctaaccccgaggaggg

SEQ ID NO: 241 - DNA, 471 bp, Chlorella sorokiniana
  Clone ID: LIB3602-005-Q1-K1-C11
gttatgccggtgctgctgcaagggggcgtgcccttcgaggggccctttggagatgccatggcggaggggatgaaggggctggcggaatccatcgctgctgagcccggcctgatctggaaggtgtggaccgagaatgcggagaccaaggaggcgggcggcatctacttgtttgacaggcgggggagtgcgcaaaagtacatcaccatgcacgaggcgcggctcaagggctttggcgtccctgtggtgaacgtcaagttctttgatgtgaatgtggctctttctgaaatcgacaaggccaagctgcagtaacagccgcaggcgagaggagtgccaattgagttgtgtggccgcgatgcgtgagtttcaagtgcggtttcggctttagattgtccaatatttcacttcatgcgttacaatagtattgtccacgaatccacaacgtggctcacgggattaaatggaactgccgtg

SEQ ID NO: 242 - DNA, 301 bp, Chlorella sorokiniana
  Clone ID: LIB3602-005-Q1-K1-C12
gcgcaccagcggtgctgcttgggggggggctgcttccccgccgaaccgaccagtacgtggaagtccttgcttgcagtttttggggcgccgcctcctgcgtcgcatccttatgccccctccttcgtccctggactccatgcattgcatttccggctgctgctggagggtgcaaagcaaaggcggcagaccttgctgccgcatgccgttccttgtcgtgccgaccccaacaaggcccccgggcatccttgcatcgcttggcgtcactacccgagtgccatgctgatgtagcaagacaatgtac

SEQ ID NO: 243 - DNA, 226 bp, Chlorella sorokiniana
  Clone ID: LIB3602-005-Q1-K1-C2
ttaacggcggccagccggttttggacaagcacacacaacatatgagattcccaacctccctgcgcactgcttgtaacaatcctggctccctcttgtacccttgacccgcactcgggcgtggatatgtaacgttccgcgggtcataaaaaaaaaaaaaaaaaaaaaattttttgtggggggggaaaaaaaaaaaaaaaaaaaaaaaacccccataaatggggggggg

SEQ ID NO: 244 - DNA, 301 bp, Chlorella sorokiniana
  unsure (1)..(301): unsure at all n locations; Clone ID: LIB3602-005-Q1-K1-C3
gggcgctccgcnggccngggctgcnggnngcgnccgngccgggcgcngnnccggcgcggggccgcccggnngcngggtttttttttttgctccccncngtntggcctgtgttggtggggggcgggcgctgtnccgcgccttcctgcgctgcgcccgccgctggggggcctcctnccccggnnnggggtntgtgcggnggttggcgcggnngggcggngccgnggctgggggcgngngcgccgcgtnngngctgttgnggnngngggngccggggcgcctgccgctggnggtggcgcgccgc

SEQ ID NO: 245 - DNA, 493 bp, Chlorella sorokiniana
  unsure (1)..(493): unsure at all n locations; Clone ID: LIB3602-005-Q1-K1-C4
tttcggggcaagnacatcaccctcgcagtggagtcttcggacaccatcgagaatgtgaaggccaagatccaggacaaggagggcatcccccctgaccagcagcgcctgatcttcgccggcaagcagctggaggacggccgcaccctggcagactacaacatccagaaggagtcgacgctgcacctggtgcggcgcctgcgcggcggcatcattgagccgtccctgcagatcctggcccgcaagtacaaccaggacaagatgatctgccgcaagtgctacgcccgcctgcacccccgcgctgtgaactgccgcaagaagaagtgcggccacacctcgcagctgcgccccaagaagaaactcaagtaaactactcgcttcggcacgagcggaagcggcatgagcggcagcaaccgctgccccccccccgccccgccagccgggatgccatgacagcaccggctgctcagctgctgatgtgctgcatgtnaattgc

SEQ ID NO: 246 - DNA, 311 bp, Chlorella sorokiniana
  unsure (1)..(311): unsure at all n locations; Clone ID: LIB3602-005-Q1-K1-C5
accagctttcgccgccaccctcaaaaaaacacgcgccccctggnacgcgagggcgcgcgcccgccccgccgcgacggccccccccgccgcttcggcgaccgcgagggctaccgctccgagaaggcgggcgcccccggcgagtaccgccccgagttccgcggcggcttcggccgtggcgccgccccgggggggcgtgcgcttcctggagcagcgccccctgggctcggcaggcggcggcgggtgcggcggccgcgaggagtggcagagtgtgcgtgccagctgcatgcaggctactgtaacctccgccgncg

SEQ ID NO: 247 - DNA, 432 bp, Chlorella sorokiniana
  unsure (1)..(432): unsure at all n locations; Clone ID: LIB3602-005-Q1-K1-C7
cgccctcagcagcatctgctgcgcccttttcacagttttgatggctgtggcattgcctgcccgcctggcgagagcacgattgtcacttcttcattttccagtggcgccccagcgactgagcatgcccgctgccgcctcgctgcacatggcatgtgcacatgacatagattggcagcttgccctgccactggcctgtagccccgctctacctgtacatattctttgctgcatgagatttcgttgcccaagccgctcagccaattttgttgtttcaccgccctggcacttgcgccactcctcctctaccacctgtctgcaacgcttgtacagttgtcgttctgacgcctgttcactgcttcactgccacttacaactgtacagtgtcatgatgtgagtgtaattcggtgcaccnaanaaaaaaaaaannnaaaa

SEQ ID NO: 248 - DNA, 256 bp, Chlorella sorokiniana
  Clone ID: LIB3602-005-Q1-K1-C8
ggctgaagcgcagttacaggtgggggcgcggctgcaattcgcaggcaagtgcgcagtacagacaagggggcgatatcaggggcagaagaagctcatgccttaatatggagcgagctagggggcgctcgggagcgagcagcatggagcaaacagcaaaactgacggaagcgaaaggacgttagcaatgaaagccgaggggttcggtgagggtgcgtgggtgaggtgggtggggaggggtggggtacacagcagggcc

SEQ ID NO: 249 - DNA, 591 bp, Chlorella sorokiniana
  Clone ID: LIB3602-005-Q1-K1-C9
tcccccccccttttttttttttttttttttttttttttttttttttttttttttttttttttcagtcggggccgtttcatatcggggaactgccaaaacgcaacagcaacatatgcaggcaacaccacgaatgcttcacatgcacagtaacatgagcaatgcggcgaacgaaagcgcgagtgcagggctagtcaggctgcaccaccgagctgcggtgcccgagggcagcccagcactggcgttggcggccgcgttggccgccttgttcaacacaaaaatagcaggttcagctgttggcttgggcccaaagcaggcggggtacccccgctgtttttgctgcacaactgctttcatagccgtcaccaccccctccggtttgttgccccaagggtggttgaggcccaccgtcatggcaatgttcttgataaatcctggtccaatttcgtcgcagtagcccatgatggggcctgcgccgccgccaaaggcagtaaccggcgcagtgcacctgggcagcacgcccacccagggttgcacgcaattgttgtcggtctcaatgcagtagtctatcgggttggggtcaccccatgcctt

SEQ ID NO: 250 - DNA, 190 bp, Chlorella sorokiniana
  unsure (1)..(190): unsure at all n locations; Clone ID: LIB3602-005-Q1-K1-D1
gcccacaaaaccccgcgctgctgctggtggatggcgtcagttccatgggggcgctggacttccagtttgacaagtggcgggtggacgtggcggtgacgggcagccagaaggcgctgtccatccccaccggtctttttttttttgttcctcggacanggcgctggtggggggggggggggccaccatccgg

SEQ ID NO: 251 - DNA, 623 bp, Chlorella sorokiniana
  unsure (1)..(623): unsure at all n locations; Clone ID: LIB3602-005-Q1-K1-D10
ccctggnagaggacggcaccattgggggcggcggcacgcgctaccgagccatctccaagtttgcgctggtggtgctgcgggagcgcaacccccagcgccagagctgcgatggctggaaggaggtggcgtggaatggagagaagctggatgtgctgcgggcgcgcttccagagcgcgcagcgggagggccgcggcgcgcaaggcggcagcctctccgattccgccagcatacgcctgatgcgcctgcggtgtgcgcaccgccggcctgccacagcttgccacccttccacttccgattccgcccacctcacaagtgggtgcgctggctgtggtttgtagtttcagccgccatctaccacccaggacgcctgacttcccaagcctgcttttcgtgttgcagtctcttgctagtgttcatgctcaggttgcttgctctttttctcaagggtaaccggccgcccctgtccctgcgtcctcatgccctcgtttcattgcacagtgccagtttcgtttgttgcccttcgtttgttgcccctgaatctnctgcactcctccctgcattctcttnctccacgttgcctgaacatcngtgctgacctccttccttttgtttgactagcgatc

SEQ ID NO: 252 - DNA, 519 bp, Chlorella sorokiniana
  Clone ID: LIB3602-005-Q1-K1-D11
aaaaaaaaaaaaaaaaaaaaaaaaaaaaaaaaaaaaaaaaaaaaaaaaaaaaaaaaaaaaaaaaaaaaaaaaaaaaaaaaaaaaaaaaaaaaaaaaaaaaaaaaaaaaataaaaaaaaaaaaaaaaaaaaaaaggggggcccctttttaagggtcccaagtttacttcccctgtcttgcccccctttttatctttttttttggggccccctaaatttaatttcctgggcccggtttttcaaacaggctggtgggaaaacccctgccttcccccaatttattccctttggggaatttccccttttccccggttgggtattaagcaaaaaggcccgcccgtttcccctttccaaacatttgtcacttttaattggcaaagggccccccccttttaccgcccttttaaccccgtgggttgggggggttcccccccccttacccttttcatttgctaggtcctttgccccgtttcttttgatttttttcctttcctttttccccaatttcccgggttttcccc

SEQ ID NO: 253 - DNA, 485 bp, Chlorella sorokiniana
  unsure (1)..(485): unsure at all n locations; Clone ID: LIB3602-005-Q1-K1-D2
aaaaaaaaaccccagggaggaaaaaaaaaaaaaaaaaaaaaaaaaaaagagggaaaaaaaaaaaaaaaaaaaaaaaaaaaaaaaaaaaaaaaaaaaaaaaaaaaaaaaaaaaaaaaaaaaaaaaaaaaaaaaaaaaaaaaaaatttttttttttttggggggcngnnnnnnntatctttttttgggggggggncnccccccccccnaaccccccctctgggggccctgggggaaacccccccccccccggngnacccccccgggggcggggaaacccctgtccctcccccccttaaggcccgggggncacgcccccccggcccccggcggngnnnnnnnggcggcgccccccggggggccgtcccctctggtttcttttttttttttttttggtttttttcttttcggcccctttctccccccccctcttttttttttttttttttttttcccccccccccccccccgggggggcccccccgcgg

SEQ ID NO: 254 - DNA, 393 bp, Chlorella sorokiniana
  unsure (1)..(393): unsure at all n locations; Clone ID: LIB3602-005-Q1-K1-D3
gcaccacccccaacccaagcacctgcccgggcaaccgggcggcgcctgtcccaccacaccctgcccgtntgcgtttttttttttttttttccccctngncctcccntctgtggggggggggggncgnaccccctnccttcccttcccccncnaccccagggtggggcacactgcacaccncgcnccgcaacgccccccccnccccngnggggcccctnngaaagacggcctgctngngcccngnngggcgnnggggnccgnggtccttttttttttttgttttgggntgcttgtttttttttttttttttttggcctcttttttttttttttggggggtgnncngctttttttttttttttttttttctccccccacaccccccccggttttt

SEQ ID NO: 255 - DNA, 508 bp, Chlorella sorokiniana
  unsure (1)..(508): unsure at all n locations; Clone ID: LIB3602-005-Q1-K1-D5
cgaccagctttcgtgtcaattgcctgtgcttgcaggtggtgctggagccgctagatggccataacgagggcatgttcttcctcagcctctcccgccccgaggcccgcaacagcatcggccggcagttcctgcgggagctcaaagagtgcctgtataccgtctcccaggagcgcacaacgcgctgcgtggggggggggggcacantnccnnncgtgttctgcgcgggagcagacctcaaggagcgcgcggtgatgagccaggcggagacagcccagtttgtgcgggagttgcgggaggccttcaaccagctggacgcgctgcccatgcccacagnggccgttgtagacggatttgcgttggggggcggcgctgagctggcgctcgcctgcaacgngcgggnggcggggcgggacgcgcagtttgtttttttgtttcacggntgggcattatcccgggggcggttggcccgcancggctgcctcgcntngtgggcncctnacgccgccag

SEQ ID NO: 256 - DNA, 488 bp, Chlorella sorokiniana
  unsure (1)..(488): unsure at all n locations; Clone ID: LIB3602-005-Q1-K1-D6
aacgctgactgcaaaacggcggggggcgatgcttggcgtggccggcatccgggtgcccgcggagctgacccgcgtgggcgtgctgaacgtgcccgactgggccgaggccggcaaggtgtacgccgagagcgagaacgccattcttttctcctccctgctcatggtgcaggggggggggggggggtttnttnanatcaancnctnntaggacatcaagcgcccggggagacaggccgagcccggcagcttcctgggctttgagncgnccttcaagggcaccggcntcagcggctaccccggnggncccttcaaccccttnggcctgggcancagcngcnaggaggccatggatgaactgatttggtgcgagatcctgtacggncgncttgccatggtgggcttnctgggttttctgtnccattttgccggccccggcnagggcccccnngacaaccngaaggaccacgtgttggacccgtggggcgggg

SEQ ID NO: 257 - DNA, 631 bp, Chlorella sorokiniana
  unsure (1)..(631): unsure at all n locations; Clone ID: LIB3602-005-Q1-K1-D7
ggccagggcagcggcgtgagcaccttcacacaagtgctcaacgtagcgggcagcatgttcgtgtcatctgtgttcctgggcgtcatcgtgtgctttgctgtccaggatgtggtcagtcagaggcgcacggtgctgtacagggagcacggcgccggcatttacagcatgacaccatactgggcggcggagatgattgctgaagttccgtggatcattctgttggccaccatctatgccctgattgtctactggggcatgggcttcatcgcggatgccggcaagttcttcctcttctggctcttcctcatcctggccctcctccagttcctcttcctgggcatggccacggtgcacctgacacccaacctggaggcgtccaacgccatggccggcttcttcttcgcgctggtcaacgtcttctgcggcttcctgcgcacctacccgaccatgggcaacggctaccagtgggtctactggatcacgcccacctcctaccccatctacggcctggtggcctcccagctgggaaacgtggacacgcccacagtgctgncggatggggtcagcaccgcgccggtcaacgtgttcatcgaggattatttcggctacaagcacttcgttgtgggctggg

SEQ ID NO: 258 - DNA, 539 bp, Chlorella sorokiniana
  unsure (1)..(539): unsure at all n locations; Clone ID: LIB3602-005-Q1-K1-D9
nganaacgcggcagnaaccgtttgcggccacctacggcgtgcaggaccaggccaccacgctgagctggaccaacaagccgctcaaggttgtgctgcgtggcaaggctgaccgcgagggcctgaagggcctgcaggccaccgtgcttgtgaccaaggagtttgagctgtgatggggcgcatcgcggccagggttgtgacagccctttggagaggcgcgggggccaccgagcacgcgccattcgcgtgccggtgcctgcgggcgcgctgccagccaacggctggcttggccacatactgaccagcactgccctgcatgctattctttgctgcttgccacccaagcgagcgccgtgcttagtctaggcaggagcaccggttgtacccatcatgtctactcgtcattggcacttgccctgctttgcgtccccatcttggggtctccttcgtaccgcgggcgcccgcgatccattttgacccctgaattccaccaaagttttgcttggatagcgtgtttgttttgcgtaattgttgcaccagcc

SEQ ID NO: 259 - DNA, 650 bp, Chlorella sorokiniana
  unsure (1)..(650): unsure at all n locations; Clone ID: LIB3602-005-Q1-K1-E10
catccaatcccttcaaaaggcctggaccagcgccgccgtcgcgcccgtggccgtgcgccccgtggctgccacccccctgaagcaggcccgcaacaccttcgcggcccgcaccgtgagcaatgccaccatcaagaagaccaccgccatgcaggtgtggaccccccctgaacaacaagttgttcgagaccttctcgtacctgccccccatgaccgacgcggagatctcccgccaggtggactacatcgtgtccaacggctggaccccctgcctcgagttcgcgggcgctgagtctgcctacaccagcaacgagaactgcgtgcgcatgcagaacaccacctgcctgtactacgacaaccgctactggaccatgtggaagctgcccatgttcggctgcaccgatggcggccaggtgctgcgcgaggtgcaggcgtgccgccgcgccttccctgacgcctacatccgcgtggtgggctttgaccccgtgcgccaggtgcaggtgtctggcttnctggtgaaccgccccgcctctgtgcgcgactaccagggcccctccacccgctccgtgtnagcggtctgcggcatgatggccagactgtgcgcctgacgccccttcaccagggttgatggcgcactgcagcatacatttttt

SEQ ID NO: 260 - DNA, 594 bp, Chlorella sorokiniana
  Clone ID: LIB3602-005-Q1-K1-E11
ccagcggcaagaaaaacgacatcagcaagcagggcctgaactccatccagaatgagaccgtgaagctcaacctgatgggcaagtccaagaccatggagagcaaggactgggtggacccccagggccgcaagggcaagggctacggcgtgtaccgcttcgccaacaagtacggcgccaacgtggacggctacagcccgatctacacccccgacacctggtccgagtctggcgactcttacaagctgggcaccaagggccttattgcttgggccggcctgattgtggtgctgctgggcgtgggcatcaacctggtgatctccacctctgccctgggccagtaaatggcgacgccccccgcgtcggcagcagcagcagcagccagcagcattcccttgcagctaccccccgagaagacaaaccctcaccctaccctagctggcggcgtcaccatgcgccgctcccttgctttccgtttcactgtccctttcgttcctgcgttcgtttagtggaggaggcccgcctgtgtacctgacctggtggccgcgtttttggttgagcggcttgtagccgcacatctgtattatcagctacgtc

SEQ ID NO: 261 - DNA, 656 bp, Chlorella sorokiniana
  unsure (1)..(656): unsure at all n locations; Clone ID: LIB3602-005-Q1-K1-E12
gttccngacggccgccctttgggtgtgggttttttttatttgaccgttgttatgtagacgcaactcgcacagcacaacaggacgagttggttcgtcaatatggtggatatgtgcatgatgcatgggtggaatgaaacagctggggctggagggtgcgtcagggcaaggccgtggcctcgtgcgcgtgttacagcatgctgtgttggctcggatcccagttgagttccatacacccctgaggtttgccagtgcttgaaagcagcagggcaaaccgccgaagtgcatctaatagctgatttggcactggtcgaagaacgccttgatgcccactccaaatttggcgcgcgcggccacttctgccgccttgtctgctcccagctgggactgcagagttgcaatctgctctggcgtgaagttggtgcactgaacctcggtcaatgccttgcggcactcctgtgtcagcgtgctttcgtacagcgttttggtgcactcctggcacacagtaccgccggcgtcgactgccgccttctctgttttcacacagtcgcatgcagcagcccagtcgtcaactttccactggcacacgctgccgactccaaggctgtccagccacttttgagagccggccagcgccttgtcagcatccagttgctcgc

SEQ ID NO: 262 - DNA, 536 bp, Chlorella sorokiniana
  unsure (1)..(536): unsure at all n locations; Clone ID: LIB3602-005-Q1-K1-E2
gctttcgccccacttgcctcgcctcacccacctccctttcttcactcccagtagcatctgccgacttgtctggccctcattgcctcccctctgatccaggccccctgtagcttctttgcgccaatgatacctttgcatattatgcttcgcctgcagccgtccccgctccctattttcccgcctctctgcgccccgtgcctgcctcagccggcaccctgcccatgggatcccattgtttccttgctttctgcctcgagcctctgacgcatgccgatacgatctggcgcggcccgccctgtactgccctgccgccccctctcccacctgtgcccaacccaacccgtctgactacgcgcccattgccagtaggtagcgatagcagcgcactcctccctccctgngcggcgcggcccggctcgtgcgtttttttctcggcccggccgccgcccctgtgtacactagcgatcaaattngcaccactgntcgacgcgccacccgttttttttgacgcgacccgtgcaagcgcctgttccaac

SEQ ID NO: 263 - DNA, 449 bp, Chlorella sorokiniana
  unsure (1)..(449): unsure at all n locations; Clone ID: LIB3602-005-Q1-K1-E3
ccgccagcagccaacggcagctattatgaaacanggagggaggggcggaggttgagcagcatgtgccgcagccagcagcagggagaaacccagcagaatggtggtgcttgggagcggagcccggctgcggagggaggtttgtttttttttttcaatgcggtctgccgccttctgggggggggggactagggacctgcttttttgccgcctatttgctgggggtgggggggctctcgnnngattctctgcctcgccnaggcacaaaangnnnngcnnncgnngnngnnccataaggcgnnccctgccnggcctttttctttnncnntnnggnnngctgggacccgggcngntnnntggngggcagngcgtnctcggcatgttgttttttttttttttttttggcgcccccctttttgccgngggngtttttttttttttttttttttttt

SEQ ID NO: 264 - DNA, 478 bp, Chlorella sorokiniana
  unsure (1)..(478): unsure at all n locations; Clone ID: LIB3602-005-Q1-K1-E4
ctctcacgccctcccatccagcttgcaacgccggcagcagtagcagcagccatggtgtcctcgactcatgagcaccacgagtacctcaggaagaaaagtttggcacgcctgtcaaaagagaagacgtcgagcgggactggcggccacggggatactcagtagacctgtttgtcgacccggcgggcaaggagtggaccgactttgtgcaccgcgaggacgagctggtgacggttgcaagatggagtttacaatcggcggcgaccggtgtgtggtggagcctggggatgaggtgttcatccctgcaggcgtcaaacacagcaccaagaacattggggactgcgaggcgcagtggctgtatggctatgcttgattggccttggctggtcaggctgagcctggcccttgttgtgggagaatttggtttaggacagngattgaaagtggtccttcccttttgtttatttctctttgngctcag

SEQ ID NO: 265 - DNA, 350 bp, Chlorella sorokiniana
  unsure (1)..(350): unsure at all n locations; Clone ID: LIB3602-005-Q1-K1-E5
tgacactctccactgctattgttgccgcaacgcgcagtctggagccgctgccgccacccacccccatggtcttttcccttgtcgcgcgcctgcctggccgcagccccgcaccggctccctcttttgaaggggcgccctcgccccaccccgcccttgcctaagcgtgtttggatgggggcctttttcccctgtatgaagcgccgccgcgcgcccctccccttttaatggcgcctcggtcccgttttatgtccgctgcttgcttcctgcccttgtctggctgactccccgcctcgcgctgagagcgcaccaccccccacccacctcgcttgtnccnnccccccnccnncgcc

SEQ ID NO: 266 - DNA, 627 bp, Chlorella sorokiniana
  unsure (1)..(627): unsure at all n locations; Clone ID: LIB3602-005-Q1-K1-E6
tcagcgtggacaagccccaaggcaactttgcgcgagcagagtagccatgccactgagcaaccacttgggtcagccactgcccacatcaaggcgtggcatactgcgtggcgctgctgcagcgccgctgctgttgctgccgcatgcgccccgggtgcacgcctcggcacttaccgcgaagggggggctggaccagcccatgcgcaggctgcgcctgcccaaaggcaccgtgggccgtgactatgtgctgctgcagctcaagctgggtggacagggcccctttgatttcgtagtagacacggggctgaccgcggagctcatcacaccgcatctcaagcaggtgctgagcctgcggtccgacaagctgcatgagacggggctaggggcgggcggaggtgtgggcaacatggagcttgtgaccctcaaggatgcggngctggtgggcgctgagggngncgacctgccgccgctgaatgcggtggtcacagactttgtgcaggagcacatggacccggagcacgacccggtggaaggcatgctgggcatggagctgctgcaacaatttgatgtcgactttgacttntttggcggccgcattcgcttctttccgcctggggagggagtggctgc

SEQ ID NO: 267 - DNA, 583 bp, Chlorella sorokiniana
  unsure (1)..(583): unsure at all n locations; Clone ID: LIB3602-005-Q1-K1-E7
cagtgccccgcctnggccttgcnntccgcagnncccctgnannntcaagctcagnaagnncgtttgggnaagaagcagnagnancnngtcacactttttgccggtcgggtagggaacccaggcttgtgnannagcagcagcgggcggggggtggggcggaggcnnatcatcctgnacccctgatnnaatgtgnnccgcaaggcagnnccgggcnnattgcagnntgggaccgggctatttgcgagnnaagtgnncgacggcanagntnngccccatncnntgcgactncnngtatgtgcccggcccnngccacgctnnggtgcgcgnntctgcgacnngagtgcaannntacggcagctacccgcggggcgcctttgcgtggtttgggcggcggcatttcggcgtgaggccgacgcctacttactgcaaggnagtgcannccatctgcgagaagggatcgagaacggctgnncccaaagatcatcaacctgggcagcgncccaagacggacttgnttcttacgagcgggaaaaagtattggcttnaagaaagagagtgttgaggccaccggtgcagcagcggc

SEQ ID NO: 268 - DNA, 337 bp, Chlorella sorokiniana
  unsure (1)..(337): unsure at all n locations; Clone ID: LIB3602-005-Q1-K1-E8
gtggntggcacaatctttggggaaggacggcctcagcctgggcacatccccgatgattaggagctatgacatgggctatatcagcacgcgcatgatggagtgtgaagacgcattcagcgacatggggagcttaaaacagaatctggagctgccccctgagtatgcatatgatgatgatgatgacagcgagctggaggacgcgatgatactgggaagcacacccactttctcaaattcatttagaagttgatcgatgtctgtcatgttccttcgatgctccgtctgcccttgaagttcttcttgcttggtgacttgcacagtgtaagctgaaccccac

SEQ ID NO: 269 - DNA, 145 bp, Chlorella sorokiniana
  Clone ID: LIB3602-005-Q1-K1-E9
atacgatgcaattgttccgcagaaccgcaatgaagcgagccggccgctgccatgccagcccacccgccattctttcccgctgccgtcccgtgccccctgctgcaatgcccttctgaggtggccaatcctttgtaagtgcacattc

SEQ ID NO: 270 - DNA, 551 bp, Chlorella sorokiniana
  unsure (1)..(551): unsure at all n locations; Clone ID: LIB3602-005-Q1-K1-F1
gtctttcggcccggcatactgtgcctccaatgcctcgcgaatgagaagtgcctcttctggtcctggtgccccaactcagtgtcggcgggctgcgccgtggccggcgccaacggcaccacctcacagaccctgccggcgcagacgtgcgttctcagctgggacagctccaaggacacacttgctgtgtttgccatgtatggcgaggacaacactaccgtgccctggatggggggcatatacgtgccacctggcgacagcaccacgagcgaggaggagggcatcccggtcaagatccccggcctgagccgccgccgccttctggccaccgctcccagcagctccgccgtttggaaggagttttcgtttgagcccaagctggcctacctggccgtcgaccagttgggcagcaccaatgtcaagacggttgacgactgctcctccttttgccaaaagaacagtgcgtgcgagtacttcctgtactgccccgtcagngattcggccggctgtccgctgccggcgcagggcagcaacctgcccttcttctttccttc

SEQ ID NO: 271 - DNA, 643 bp, Chlorella sorokiniana
  unsure (1)..(643): unsure at all n locations; Clone ID: LIB3602-005-Q1-K1-F10
cgcgctggncgatgcccagnaacagatgtgcagtgctgcgcggccagctggaggcggcacgggcgctggcgccgcagctggaggcagcgaagcaggcggcggcagacacgcaggcgctgctggaggccacccgcagccgcagcgctctgttggagcgcgcctggacgagcgcgcagcaggacgcgcacgccgaggcggcggcacgtgccgaggcgcagcggcagcttgaactggcggagcggcgggtgcatggtatggccgcagacctggaggataccgaggcctctgtgtccaccagcgctgccggtgttgaggccctggttgccaagctcagccaggccatggctgcagcagaggcagcagaggcaccactggcagccgcgggcgccgggcacaacggcagcggcgggtatgagcacgccaacggccacgctcgcgtggcgggacagcactcctactggtgaagaaaacgagggaatgtacagctatatggtaagcagcagaaatgcagtttgatttgaatgcagttttcccctccgcgagaagatacaggcccatcaggttcccttgctgttgactagtgactatcgccgttttcctttgcccggcgagcgtaccgcgcttgctgcatggcctgaccccc

SEQ ID NO: 272 - DNA, 174 bp, Chlorella sorokiniana
  Clone ID: LIB3602-005-Q1-K1-F11
ctcctttcattccagtaccggtgcctagctatcaaccgtctccccagcagggctgtcaagaatttttgttcagttaccggctctcgtgagctgtggctgctgcagcagctgctgcttttcccccatccggcttgcgctgcgcatgcgccgccgatcctactaacctcccctttc

SEQ ID NO: 273 - DNA, 677 bp, Chlorella sorokiniana
  unsure (1)..(677): unsure at all n locations; Clone ID: LIB3602-005-Q1-K1-F12
cccgnanagccgccctttgggtgggggggtggngcgaaatcccgcacaccctggacgccatcctggtgtcgcagcacctggccaaccagtttgtggagaatgcgcgcaagtcctcccaccgcccagagtcgcctgagcaggagcttgaaatgatgatctacaacttcaagccctacttcacgcttaaggactcagtgatggacccttcttacgacggtccagacatgacctacttctttgaccgcccagacgatgaggcccctgacaaccgcctgcagaacggcccgggctctgccgcagctgcccgccgcgccgccgcctccaagtcgttcgccggccagctggcgccggctggcgcggcgcagcagcagcacaagggcgagcccgctgtgcagctggcgtacgcgtgagcgagccgggctgtagtgctagcagacggagagcacttgcaacatgcccgccagccaaccgtgctgagctcccgctgtggcctgccttgcacccaccattatcaatcagactgcctcgcttcctatggctgtccccttatgccgtccccatgccgctgagcgcccccgtaacctttctgcatccgttgcatatctggtggcctgcctgcaacgtcgtccccaagctgcagcaagagcagctntcctacggcgatgcacggctgctcg

SEQ ID NO: 274 - DNA, 630 bp, Chlorella sorokiniana
  unsure (1)..(630): unsure at all n locations; Clone ID: LIB3602-005-Q1-K1-F2
tttcgggnacagnaaccctcggtgcagctggtggctgttgagcctacggagagcgctgtgctcagcggcggcaagccgggataccaccagatccagggcatcggcgcgggctttgtgcccaaggtgctgaagcgcgagctgattgacgaggttctttgcgtgacgagccaggaggttttttccatggcgcggcggctggccacggaggagggcctgctgtgcggcatcagcagcggtgcggcggtgcaggcggccatccgcgtggcgcagcggccggagaacaagggcaagatggtggtggtggngctgccgncctttggcgagcggnacctgncgacagtgctgntcaaccacatctggggccgggacgctgacgtggactacgcgctgcccaacagctggaaggagcgcagcggacaggagaagcctgccacgcatgatgtctagctctagctgcggatgagacgcatgagcaatttcaggacgacgcactagctggctaccctcttttcggcgccgcacctgcggggatgccaaccgccgtccccttcctctcttgcctctgccccgctgcatgcgctgcgctgcccagcgcgtgctcgattactctgtatctgttccgcggggctg

SEQ ID NO: 275 - DNA, 598 bp, Chlorella sorokiniana
  unsure (1)..(598): unsure at all n locations; Clone ID: LIB3602-005-Q1-K1-F3
gctttcgccaagtgtgcaacatgctgaccatgcgccactgcccagcgcttccagattccaccggcgtccctttgcgtccctgtaccccggctgcatcgcggagacgggcctgttccgcaaccacatcggcctgttccgcacgctgttctttcccttccagaagttcatcaccaagggctatgtcagcgaggctgaggctggccgccgcctggcgcaggtggtgagcgaccctgcgctgaacaagagcggcgtgtactggagctgggacaacgacaagtcctctctctggtttgactcggtggacggcgcgctggagaaccgcgtgtctgaggaggtcagcgacgacaagaagggtgccaagctgtgggacgtctccgccaagctggttggcctggcgcagtagacgactggccgcagcatttcatgttgatatttaatgcacccgacatccgcccgcaccagcaatgattacgccacatgctgtccatcgccagccattgcagcgccacagccacgcccccaacctgacccttctgtttgatcttttgcttgagcgcccgtgcgccaatcagnttctttcgttttcctgagctcttag

SEQ ID NO: 276 - DNA, 270 bp, Chlorella sorokiniana
  Clone ID: LIB3602-005-Q1-K1-F4
aaataaaaaaaaaaaaacaaagagagagagaaaaaaaaaaaaaaaaaaaaaaaaaaaaaaaaaaaaaaaaaaaaaaaaaaaaaaaaaaaaaaaaaaagggagaaaaatttaaaaaaaataaaatttattttacatttatttgaaaaatttttttttttttttttgtgggaaaaataaaattaattttgggggggggggggtttaaagctcttctttttctatctctttgtttttcccttgcgtgtttttttttttggttctttttttttt

SEQ ID NO: 277 - DNA, 608 bp, Chlorella sorokiniana
  unsure (1)..(608): unsure at all n locations; Clone ID: LIB3602-005-Q1-K1-F5
cctggtcgacccagctttcgcggncgcgtgggtgagacacgcctttggccgagagttcccggagctggacgcccctngaggcggcggcctgggcagctacgcgctggccatccactgcggcggctgcatgatcgaccagcagaagatcgggcgcgcatccttgacctgcaggaggcgggcgtccccgtcaccaattacgggctgctgctgtcgtatgcgcactcgccagcggctgtggagcgggcgctcaagccttggggccttgacctttaggcgtctcaggctggcaaccgaaggggctgctgcggtccctcagcagccttgcatgcttctccccacgcatgatagataagcttgttgcagcaccctgcgctgcacgtaccacaacttgacgcaacgaatcgcatcctgcaccagcaagaggcctgcggccacatgcactggcgtcattcacccccttccaanngnnngcagntccctgtaccctgcctgtctcagtatctgccgtttcgaatgaactctttgcttgacactgctagttagctgtacagncgnnttggcatgcttatgaagttgnggtacgagccctgggttgtaagcaaaccatt

SEQ ID NO: 278 - DNA, 310 bp, Chlorella sorokiniana
  Clone ID: LIB3602-005-Q1-K1-F6
ccccaaacgtgatgctgatgccaattcgctgctgacgtcccctttgctgcgccgaacgtaggcgccttgcatgcccccccttctgtaagcccagttttgctgccctgcaaccgcagcctgccgcagctttgcagccgtgctggctgctcgctcgctttgtattgactcctgtatgccttgccttctcctgtactcattgccacacccgctcagcttctcttacctcccagctctcgctcgatacgggcgcacgtgctccctgtcagctagaccatggcaatgtaccatacgcctgtaaacgttttttacc

SEQ ID NO: 279 - DNA, 337 bp, Chlorella sorokiniana
  Clone ID: LIB3602-005-Q1-K1-F7
ttatgtttttatttttttttttttttttatttttttgtttcttttttgtttttgactagtatttggtttatctgtcttctttgtgaaggggctgggggccacgacaaggtgccggggagggggggggccctaggcaacaacgtggggggggggggggggaagaggaaaacccggggcctatttagatcctctgagcaagcgggctgttggttcggggggggggatttcctggtggagggcaaacaaggcgattggttttggggtttccccctccaaaacgggcccctccgggtccaggctcggttcttttaccctggggggcccttttggggggggg

SEQ ID NO: 280 - DNA, 557 bp, Chlorella sorokiniana
  Clone ID: LIB3602-005-Q1-K1-F8
gggcaaggtggtccaggtgtaccgcaagagtgggtgatccacatcgagcgcatcacccgcgagaaggtcaacggcgccaccgtgaacgtgggcgtggacccctccaagtggtggtcaccaagctgaagctggacaaggaccggcgccagctgctggagcgcaagcgcgcgggcaagggcctggccgacaagggcaagttcacggaggcggaggtggcggccatggagaacgtggactaagcgccacgcccaccccgcagcagccagcagcagcagcagtgttgaggccgcgggcgggccaccgacgccagtgcggctcgggtggcggcggcccgacggccccggtgggggcagcctctccgtgtggctgtgcgctccaccggcagcggcgcagcctcggcagcgcttggaagcatggaggctcgagaggcccttgctccggcgcggcccagcggcgcttgctttcatgcagcggttctgccgcagcgcgtcacacggcgggcgctggcgcgcagtttgcacccttcttagtttgtgcccagctgcccctggcgctgc

SEQ ID NO: 281 - DNA, 198 bp, Chlorella sorokiniana
  Clone ID: LIB3602-005-Q1-K1-F9
aaaaaaaaaaaaaaaaaaaaaaaaaaaaaaaaaaaaaaaaaaaaaaaaaaaaaaaaaaaaaaaaaaaaaaaaaaaaaaaaaaaaaaaaaaaaaaaaaaaaaaaaaaaaaaaaaaaaaaaaaaaggggggggccgttttaagaggacccaagtttacttccccgtccttgcaactttttagtttttttttggggccccc

SEQ ID NO: 282 - DNA, 516 bp, Chlorella sorokiniana
  Clone ID: LIB3602-005-Q1-K1-G1
tttcggcggcccccacaacccctgccgccccggccgctccgactacgctcccgagcagtttgtggcgctgcccgacggccgcctgcccgacggagacaaggacgccaagcacatccgagacatcttctaccggatgggcttcaacgaccaggagattacggcactgatgggcgcgcacacgctgggccgctgccactccgaccgctccgggttcctggggccctggaccaacgcccccaccaccttctccaacctgtactttgtggagctgaccgagaacaagtggcacaagaagaagtggaaggggcccctgcagtacgaggacaagagtggccagctgatgatgctcaacacggacatgtggatgctctgggacaagaagttcaagccctacacgctggagtacgccaagaacgaggacatgtttttttttctttttttctttgcatttgccaagctgctggagctgggcgtgcccttccccgagggcgcacaggccgtgttaggcagccttgg

SEQ ID NO: 283 - DNA, 656 bp, Chlorella sorokiniana
  unsure (1)..(656): unsure at all n locations; Clone ID: LIB3602-005-Q1-K1-G10
cggncgcgtgggcgcggccagggtgaggtgagggggcagagtggagcacgccacaagatgcgtacctcacggtgggcctgtcccactgctacgccaagaacgaggacggcaagctggtggaccagtacgtgatcgagcccatcaccgccaactcgctggagtgcatggccaacggcgccggggagtgcttcatgcacgtgttcagcctgcggctgggcgaggcgctggcgcgcgacaagtcggcattccccgaggagtttgcgcagggcatgttttgcgaggactacgagacacgctgcgacgcctgcgcccgcacctggatgcggccccacgcgctggacaacctgctcgacattgtgccgctgggccagctgaagagcagcttcaactacagcaccgtggacaagcgggtgctcaacctggagaacgtggtgaacgacgacgacaacatcaagcaggacctgagcatcgatgtgtacgggcgcaaggccaaggaggaggcggcggccaaggtggcgggcagcaaggcgcccgcgcccgctgccaagggcagagaggtggaggaggaggacgacatggatgcgctgctcagtgtgtgatgaccccacccagtacctgcgcctgagccaccctggaacgcatgcacaactggccca

SEQ ID NO: 284 - DNA, 646 bp, Chlorella sorokiniana
  unsure (1)..(646): unsure at all n locations; Clone ID: LIB3602-005-Q1-K1-G11
gcgttcgcccgtanagccgccctttgggtggtggatggccgaaatcccgcacaccctggacgccatcctggtgtcgcagcacctggccaaccagtttgtggagaatgcgcgcaagtcctcccaccgcccagagtcgcctgagcaggagcttgaaatgatgatctacaacttcaagccctactggggggggggggactcagtgatggacccttcttacgacggtccagacatgacctacttctttgaccgcccagacgatgaggcccctgacaaccgcctgcagaacggcccgggctctgccgcagctgcccgccgcgccgccgcctccaagtcgttcgccggccagctggcgccggctggcgcggcgcagcagcagcacaagggcgagcccgctgtgcagctggcgtacgcgtgagcgagccgggctgtagtgctagcagacggagagcacttgcaacatgcccgccagccaaccgtgctgagctcccgctgtggcctgccttgcacccaccattatcaatcagactgcctcgcttcctatggctgtccccttatgccgtccccatgccgctgagcgcccncgtaacctttctgcatccgttgcatatctggtggcctgcctgcaacgtcgtccccaagctgcagc

SEQ ID NO: 285 - DNA, 505 bp, Chlorella sorokiniana
  Clone ID: LIB3602-005-Q1-K1-G12
gactctctacacatttacagggggttggatacatcaaaggtacagggctggctggggccactgccgctggccagtggggttaaaccggtatctttttgtacctaaaaaaggagaaggggggggccaggcccaaccccaggggcaggccaatcatggggagggaaaggggcacccccttggccccccccgactcgtggatgggcttgcccaggctgaacataaaaaaagtgccccaggggaggggggccacccccaccacaatccaacgcattagctcgatggggaaaatgcacacaaaggaaatggggatgaaggcccccagcccctaaccctaaatgcaccaaacggatgcgagtgaaatgcctgccttgaaccaacgcaacaccaagtaaatggccagcccgatgacccccacctagccgtaaaaaatgccaaaggagccccccaccttgtccacgtggtagtaccaggccgggtgctcctcgcccgccggggcgtgccgttt

SEQ ID NO: 286 - DNA, 490 bp, Chlorella sorokiniana
  unsure (1)..(490): unsure at all n locations; Clone ID: LIB3602-005-Q1-K1-G2
cccgctgcaggcactggaggctcgctgagcgagnaagaatggctctggnagaatgctggcgggcgcgtgcctgaaactgagttcctgctggncctccgccacccggtaatcctccgggtttctgcttgatgcacgacaactgccctggcgcgtgcagcagcacagcacggcgcggcgcagtgcttttttctgtgagcagtgaggcgcagcaaacagcgaacggcagcctagcgctgccgcgcccagccctgctggtctggcacattgcggtgaccagtgcggggtgtacctccaacactatctgatatggtccagtcaatcagccccttctgcgcactacaannctngcaaaccaaaaccaaagagcgacgattntgaactcaatgctcggtcgtgcgtcttattgctcctgttccttctccccctcctgctgctacccagtctatttgtttgtttgccagccntcaggccctgtaaacaagnngnnggc

SEQ ID NO: 287 - DNA, 539 bp, Chlorella sorokiniana
  Clone ID: LIB3602-005-Q1-K1-G3
gcccctccagagttacataacaatacaggcgtgctgtacagcgagtgtcaggtcaaataagggctgtacgcagggaagagggggcagggctcgctgggcaagcgagcagtcaaaggcgagcgtcagagaatgagccgagtcaacagtcaacgcggcagcgcagcgcggcagaaatggtcagtgtggagtcaaggtgagaagtacaggggcagcaggtatggctgcccatcagctgcctagaagggtaacagggtcagaatcagggtgggcgttgctgcgctgccgcactaattcgcagcgggaacagggggattatgaaggggcagcacaactggcggccggcaggtcgtgccgcccgctgcgccgcacccggctgttgcaacttggggccatagccggcgtgcgcctgcgctacgcaggcacatggcacacagcctcgggccggcggctcggctttagctggcgcgcggctggttgtacgtcttcgtcaccagcgcgcggtactctgcgtcgttcacgccccacagcttggcggcgtg

SEQ ID NO: 288 - DNA, 419 bp, Chlorella sorokiniana
  unsure (1)..(419): unsure at all n locations; Clone ID: LIB3602-005-Q1-K1-G4
aggcggtggatggagcgcgcgaggnacagnncgacacctgnacggcagcaatcaacattggtgtcgcggnacgacagcagnaggtccggcttgggtggnctgggccacccattgctgctggcgctgccaaactgcgccctttgcatcaagttgcagtgggcggtgagggcagcaacagctgacaaagaaaggatttcacgagctacctgcaagacagccttgacttaaacctgacacagcttacttgcccatgtgcttgccttccccgcacctgggacttctgaccaatcgacatctgcctgccctgctcttgctgccttgctttgcctcttcgcacgtccatagctacgcactcctgtcctgaatccccctgctctgcccaccacaccgtcaggcatttacacgggggcnnnanaaaa

SEQ ID NO: 289 - DNA, 84 bp, Chlorella sorokiniana
  Clone ID: LIB3602-005-Q1-K1-G5
aaaaaaaaaaaaaaaaaaaaaaaaaaaaaaaaaaaaaaaaaaaaaaaaaaaaaaaaaaaaaaaaaaaaaaaaaaaaaaaaaaaa

SEQ ID NO: 290 - DNA, 498 bp, Chlorella sorokiniana
  unsure (1)..(498): unsure at all n locations; Clone ID: LIB3602-005-Q1-K1-G6
ttcgcgctgctgnagnacagcgccgctcaggacagtgctgccgaagcgcgcgcttggattgcagcctggcgcgccaagcagggcggcagcagcgccgcggcaggcggcgaggaggctgttgccgccggggctgcggaggatgtgcctcccaatgtgtctgaggcgcgggagtggattcgctcctggcgcgcggcacagcttgagaagcggctgccggcagatagcgtgagcaagcagtgagcggggctggcggcctggtgtttcgtgtttctctcggcccccttctccacctcgcttgcggagggtggcagctgatttgatgcccacactgcaagtagatgctggttttgatgatgatttgatacactgggcgaggctgttttgatcactttgtgcgcccctctgttttggccccattttattccctcagaccgattacactctgttcgctatgaaaactgngagcacactggcaagcaaaanaaaaaaaaaanaaaa

SEQ ID NO: 291 - DNA, 203 bp, Chlorella sorokiniana
  unsure (1)..(203): unsure at all n locations; Clone ID: LIB3602-005-Q1-K1-G7
aaaaaaaaaataaaaaaagcggggggggggggggggaaaaaaaaaaaaaatnaaataaatgtgagagaaaaaaaataaaaagaatataaaggataaatagatcgtgaaatgcgtggttgttattttttttgtttgtgttatcttgggttctttttttttttttttttggtccccccctttcttgtggtggggggggggggggg

SEQ ID NO: 292 - DNA, 556 bp, Chlorella sorokiniana
  Clone ID: LIB3602-005-Q1-K1-G9
actctgtggtggaccgcacccgcggagtggtgcccggcatggtcatctgcggtatggaggtggctgagctggacggctgcccccgcatgggccccacctttggcgctatgtacatgtccggcctcaaggctgcccaggtcgcgctcaactccctgcgccggcagcaggaggaggaggcggccgctgaggcaggccaggagggcaaggagatggtggccgcctaagccagctggactcgccacagctcctcgcctttcaagcctttcaggctggcgtagcgctgtccgcagcagccgccagtcagctgcaagtgtacttcagcctttgttgaactcgctgccgcctctgattgcgccagtcagcagctactttgcccaacacacgccggggggttccctgggcgggcttccatcccgagcaataatgccatgcagcgctgaacgccacacgacacacccctttcagagaactgcctttcatctcgccctcagctgccatcccctgcctagcgcgatagcgtgcatgcaggcatggcacatgtaaatacactgctgag

SEQ ID NO: 293 - DNA, 514 bp, Chlorella sorokiniana
  unsure (1)..(514): unsure at all n locations; Clone ID: LIB3602-005-Q1-K1-H1
cgctgatgaccgcttttccagcacgagccactggctggagtctgccgtgctacagggcggtgtacgacaccccctcctccaggagaggcggcccgctggcaggacgtgctgaagaagactgctggtacgtggtccttgctcccaaggcgtggagcaggccaccctgctggccaccaccgccgccgacaagaagctgggagacctgcccgcctaccaggcgctgctgaagaagttcaccggcaaggaggtgctgtggtggaagcacgtggagcaggagtatgccgaggagatgggcgcccaggaggacgtgttcggtggggaggagggcgccaagcggcgagcagacttccggctgcgggtgattgagcacaacctgcagatcatcggcggctactactcgcgcatcaccctggtgctcctgttccagatgctggacctgaccgccgatgaggcggagaagcacctgtctgacctggtggngggcggctcgctggcagccaagatcgaccggccc

SEQ ID NO: 294 - DNA, 639 bp, Chlorella sorokiniana
  unsure (1)..(639): unsure at all n locations; Clone ID: LIB3602-005-Q1-K1-H10
gtgcctcaaggcctcngcggcggggcgcgaggagtggcgggcgggcccatcgagcaccggggccaccggctggtggacgcggctgtgtttgaggccattcccttccgctcagccatcgctgacggctgcacccacgtgctggttctgaacaacctgccaaagccagtggcgcgcgagacgtacagcggctggctggcggggcgggccgaggatgctctgattgcggctgtcaagcggctggtgctgagccccgaatggatgcggcccgcctgggaggcggaagtggagtacgccgcaaaggcggggctgcgggaggattacatgctgctgcgagcgctggagccgggctacagcgacctgccggtcttccggggctcacacgtgctgccgctctaccctggcgcagctgccggctactcgccgctgtgcacggatgccggcaccatccgtaccggcatcgaggagggccggcgcatgatgctctccctggtgcccgccctgttccctggcttcccgcccgcactcacagacagcaccaacaacatcctgctggcgccgcccggccctggggccaatgcagaggcgcgccagaccgcttgagaggctgctggctgcctgtgtttttgcagccggcggctg

SEQ ID NO: 295 - DNA, 670 bp, Chlorella sorokiniana
  Clone ID: LIB3602-005-Q1-K1-H11
gtacccctggttgcacaactggggggggctgaactccatctacaacaacaccggcctggtgggcgtgtttgccagcgccgagagcagccaggcgggggagatggtggacgtgctgtgcaaggagatgcaggctgtggccaaggaggtgagctccgctgagctggagcgcgccaaggcggggggggtgtccagcgtgctgatgaacctggagtcgcgcgccgtggtggccgaggacattggccgccaggtcctcacctacgggcacaggaagccggtggcggagtttgtgaaggagatccagggcctgaccgccaaggacatgagcgccgccgtgaacaagctgctcaagtcggcgccctccgtggcggtgctgggcgacattgcccacgtgccccgctacgaccaggtggccaagcgctttgcgtgagcaggccggctgataggcagggaatggcctgccagaacggcacccagccgtggcggccttgcatagacacgcctcgctcagcggcgtggaactcctttcacagcctgccgcttgcctgccctcctgcacgccggcgcatgacagcgcacgtggcagcctgacggccgccctccgcgcacccggaggctgcatgcttcatgccccccacgctgctgtgtttgctcatactcactccccactgca

SEQ ID NO: 296 - DNA, 632 bp, Chlorella sorokiniana
  unsure (1)..(632): unsure at all n locations; Clone ID: LIB3602-005-Q1-K1-H12
tctgnagcacgacaaggcanaacgcgtcgctgggcgtgcggttcatgaagaagcggttgagaagggcgaggagtacattgccaaggagctggcgcggctcgagaagatggccgccaagcccatgtccgccgccaagctggacgaggtgtcgcgcaaggtgtcggtgctgcaaagcttgctggagcgcgcccgctgcggcagctgaggaggccgcaaaggaggaggagaagaagggcggcgagcactccgagggcgaggagtacgagctggacgacgatgaggaggaggcgggtgcgggcagcgcctctgccggcggcgacgatgatgacgaggtgtatgccgatggcctggacgaggaggaggacgcccatgctggccacgaccacgatcacgaccacgatcatgatcacgaccatgagcacgaccatgatgcgccggagcaggcctcggatgacgacccgtatgacgactccgagctttgatgattagcagaggagctctggtcgagacggggtgatgggtcantggcggagaggcgcggctgctctgcggcggccggctgcttcagcgggcctgtgggcttggtacagcagctgcagcggcacattntgatggcatgcgtgcactggcag

SEQ ID NO: 297 - DNA, 356 bp, Chlorella sorokiniana
  unsure (1)..(356): unsure at all n locations; Clone ID: LIB3602-005-Q1-K1-H2
tgccaggaggccagacggaggtcggcgggtgctatcagtgccagaacaagaacacttgcaagatctgctggtcgcccgtcggcgagcgtggctatggcgtgaacaacagcaacaagggcggcaacaagggtggttgttttttttgcccccagaactgcnagaagtgtttggggggggggcaggtttgcacgcgctgcctgcccggctttggcaggggggacggcaccaacaacccctgcgtgctgngcgaccccgacacccaaatcgnggaccccaacagcaagaagngcgngngcaacaaggccgccgggnnngngaagnanggnaagggcngngngcnggacgcggnnccctaa

SEQ ID NO: 298 - DNA, 453 bp, Chlorella sorokiniana
  unsure (1)..(453): unsure at all n locations; Clone ID: LIB3602-005-Q1-K1-H3
aaaaaaaaaaaaaaaaaacccgggggggagaaaaaaaaaaaaaaaaaaaaaaaaaaaaaaggaaaaaaaaaaaaaaaaaggggggacagatatagggggggccaaggtttaggggcagcgagcaatgcgaaggggcgggccnccacaaagggggccccttttttttttatgccccctggccgacattttttggggggggggggggtggggaaaaccctgacttttacccaccttaatttgccggggggggggaggggctttccccggggggcgnaaaaccgaaggggcccgnaccggagggcccccccccggggggcgcccccccaggggggccggggccgcccccggngggggccccccaggcccggggggggggggtggggggggggngggggctctttttttttttttgctctggggcccgttttctgggntnttccctttttttttttt

SEQ ID NO: 299 - DNA, 339 bp, Chlorella sorokiniana
  Clone ID: LIB3602-005-Q1-K1-H4
ggccgctcgcgatctagaactactagatcgctactgcttgcacttttttttagagtacgcctaggacgcttcagggaaggaggacggggactggctggcgtacaagctacatgtatacagagtactgtcgcccacccgctgcccgctagccggcgcgctgctgcctgtgggggctgtctgttgtcgtttctgtttgcttcggctggctggattgtgttctgtttggtgtgttttcttcttttggtttttccttctttttttttctttgttctttttttttttttctttttttttttttttcttgttgtttttctgtttttttttttttttttttttttt

SEQ ID NO: 300 - DNA, 531 bp, Chlorella sorokiniana
  unsure (1)..(531): unsure at all n locations; Clone ID: LIB3602-005-Q1-K1-H5
tgttccacccttaacgtgcagccgcgtcaaggggccgcaagcgctgnngatcctttcggtgnccggtgncgcggagaggtgtggnctggacagcggcgcgcaggcggcggtgcaggaccgcaagaagagcctgttctcagcgggcatcatgagaggggggcggcgagtttgaggcgcaggacgcggtgcggctgtgcgacgagcagggcagcgagtttgcgcgcgcgctcatcaactactcctcccacgaggtggacaaagtcaagggcatgagcagcaaggagtttgcggctgggctggggtacatggggcaggaggaagtgtgccaccgcgccaacatctgcctgctgctgncgccccatgacgactcggaccacgaccacacgtctgtattgtacagcccctacgatggcccctcccgcacccccaccccgcccttgggcctggcggggcagcatgccgccgccattgccgcggcggtcgccgaggtggaggcggctcgggcggttgggcaggaagcgtgggtgctct

SEQ ID NO: 301 - DNA, 620 bp, Chlorella sorokiniana
  unsure (1)..(620): unsure at all n locations; Clone ID: LIB3602-005-Q1-K1-H6
tcgcaccctccctttcccttaaatactaaaaaaacaaaaaggtgggggtctaaaataaaaaataaaaaaaaaaaaaaaaaaaaaaaaaaaaaaaaaaaaaaaaaaaaaaaaacaaaaaaaaaaaggggccgggccccttccctaatttacatctttttccaattcctccacctccccttttttttttttctcccaacctttacctcctccttttcttgtcgtgcgttttgtgcttctttttttagcttccccttaccttcctttcacttgtcccttgttttcaaccctcttacctgtaaaaaccctgccgngccccaaaaaaaaagnngggggggaaaacggggggaacccaatttttcctttctttttttttctctctttcaacccccttccgccttttttttttttctttttttttttttttttttttttttttttttttntttttgttgcccacgcttttttttttttttttttttttttttccacctctctcctttttcccaaccttcccccccccctttttttttcccactttttgttttcccttttctttgttttttctgtctttttttttttcttttttttttttttttttctttttatctttcttttttttt

SEQ ID NO: 302 - DNA, 634 bp, Chlorella sorokiniana
  unsure (1)..(634): unsure at all n locations; Clone ID: LIB3602-005-Q1-K1-H8
tgctgcccctgcctgccctccgatgctgcaggacaacaacggcttcaaggtcaaggtgagggctagtgcaggcttgtagtgaagcagtggcggtgaagcttgcatgctcactggcagggcggtttgttgcattgcccgcaggcgtgcacttgtgcgcacgtatgcccgacctgtgcttcacacccgcctgtgctgctcccccctctgcagtacgagaccaagggcacgatcacctctgaggagtctgacaagctggaggacccgaacacacgctttgtctgcgtcttcgacagcaccttcgtctaggcgaacagccccccccatctgcccccggggcaacaaccggcaaccgcaaccctccctcgccaaaccgcatgccccgcaagccacggccgcgccctgctgcgccagcctttgcacacaacccctagccgtcagttcatgcaaccccaaccatcagccgtcgcaccgtgatacccccgttgcaccaatcctccccgccagagagcgcgctgctctcacgcccacatttcaagctaacacttgaccctgcactttntgccgcccataatcccctccgncaatgaaacgaatgttatacttgcccttctgcacccttcattttgcgcactgg

SEQ ID NO: 303 - DNA, 472 bp, Chlorella sorokiniana
  unsure (1)..(472): unsure at all n locations; Clone ID: LIB3602-005-Q1-K1-H9
gcacagctggcnctganacctgtggcgccagccggcctcgcaacactccgcactgctatgctagcaaccaggcagccagggcgcacctgtcccagctcgctgcgcactcgagcgtgacgccaaccttgggcgccgctgccccgcataacaaatggctttgcctctctccctgcttcgatccgcagcacgttttggctgctcgctcgccattcctctttcccttcggttaatgcgcccctctgactgctatgctctggtgaatttcgttgagatgcaatgcacccgccccaaccaacacacacacacacacacatntnccgtcagctccatctgcaccgccggcacgccctgtgtgcaatttcatcctccgcttccgaacactgtgtgggccctgttgtttgcatacccttacgtgccccgccccgctgctcactgttgtacaacaaagctccgctgtaacctgagatgaatt

SEQ ID NO: 304 - DNA, 372 bp, Chlorella sorokiniana
  Clone ID: LIB3602-006-Q1-K1-A1
ggcaaggccatcggacattgacgagttcggctcctctcgcccccggccccctgctgtaccactaagaacagtatcaccgcggaccccttggaggacccccgctagcagacgatgcgacgcctaagtcaggcatcaggctgaccaagaagctgctgactgcccggccgcaccaccgtgtgagtaagtgtcgaaggcggccagcattcgccaagcacgcgtttgacattgcctacctgatgatttattagaacattgctacgttcctccggccctccatagctatcgtggtcccctttaggtatgtcagttgcttaggcatcgccgctcatttgggccgatgagcctgcccatgtttcaccgcatttcatcttg

SEQ ID NO: 305 - DNA, 455 bp, Chlorella sorokiniana
  Clone ID: LIB3602-006-Q1-K1-A10
ccccgcgtccgcagccagcagcggcgccacctctggcacgcgtgccgtcagctgtgcaggtggcacggcgcggcgcgctgctgcactgccgcctggccacccactttgtaccctctactctcaacttcctgttcgtttgaggtcagcgagtgccctgcccgggcccccaacaattgattcatgttcatgcaccacctcttttgacctggccgcggccccttctttgcagcgccgcccggctgtcgagcagccccgcgtgccgctgctgcattcatccatccaacatccaacaaatgatccctttggcagagccccgacagctgctcctgcatcccatcgttttgatccacctcctcttcagcgggtgctagtcactacacttgttttgtgccaacatctgactgactttgtacctggcctgtaaatgcacacatggtaaaaaaaaaaaaaagaag

SEQ ID NO: 306 - DNA, 485 bp, Chlorella sorokiniana
  unsure (1)..(485): unsure at all n locations; Clone ID: LIB3602-006-Q1-K1-A12
ggnagacgcgcgcttcaggtgggaccgacgtggggccagctcacagtagactcaggcaatgtgctgcctgcggtgttcaggcgccagggcgtgctgaagctttcggacggcctggcggcggcggtggacgcaggcaccgacctgcaaggcgacgagcgagagcgcgcacttcgtgccgcaggtggggtggcgggcgcccgcatttgcgaggcggcagcagcagcagctcctgccgaagggcccacagtcgagccctggcagctgtccatgttcctgctgcagcgcgaggagcaggcggcccggcagcggcagggagaggggcagcgcggcacggcggcggcagcaggggcgggcgacggcccgcagcggcatgtggccaagggcacagttgcttactgatgaagttgcaatgattcatttgcttgccatgtgtaacggcatgatngaaaaaaaaaaaaaaaaaaaaaaaaaaaaaaaaaaanaag

SEQ ID NO: 307 - DNA, 537 bp, Chlorella sorokiniana
  unsure (1)..(537): unsure at all n locations; Clone ID: LIB3602-006-Q1-K1-A2
naaagctgctcagcgcggttacgggcctgagcggcagcgggccggcgtacgtgtttgtcatgatcgaggccctggccgacggaggcgtgcgtgcgggcctgccccgcgatattgcgcagcagctggcggctcagacggtgctcggcagcgccaagatggtgctcgaaaccggcaagcaccccggagcgctcaaggacatggtcacttcacccgcaggtaccaccatcgccggcgtgcacgagcttgaaaaggcgggcgtgcgggcggcctttattaatgcagtttactcggccacacagcgggctgatgagctggccaagctgggcgcttgagccaattttttggacgtttcagcagacacctgcagttgcagcgcttgagcagnttnctttgccgcctggagcgtttctttggtgcagcacctttgcttgcggttcatcatttttacggaagagcagcggtgcgtttgttttagctgaatatgtgagcagtcgtggttggtgagatgagttgtttgcttggcacatgtgcagcact

SEQ ID NO: 308 - DNA, 263 bp, Chlorella sorokiniana
  Clone ID: LIB3602-006-Q1-K1-A3
tcgcacgatttgtcgtgacgcctcccctctgctcccccctcccatgcccacccgccccgccgccatttcacggcaggaacctgtgcgccattcctcaccaccctctgcacacccgatctgtcctccctcagccatggcccacccctccctgactctcgctgcattttgcatcagcttcacctgcacattgcaacatgaggcatacaaaaaaaaaaaaaaaaaaaaaaaaaaaagaaaaaaaaaaaaaaaaaaaaaaaggaggg

SEQ ID NO: 309 - DNA, 175 bp, Chlorella sorokiniana
  Clone ID: LIB3602-006-Q1-K1-A4
gcgctgcggccgctccgcctgccgcatcaccggcatcaactggaaggtgggcaaggagaccggcggcaagaagctggaggccccccacagcctcaaggccaacgagatggctgaggtggtgttcgagccctgccagccgctggtggtggactccttcaagaactgcgagggcctg

SEQ ID NO: 310 - DNA, 541 bp, Chlorella sorokiniana
  Clone ID: LIB3602-006-Q1-K1-A5
gcgttcgaaaaaaaaaaaaaaaaaaaaagggggggggaaaaaaaaaaaaaaaaaaaaaaaaaaaaaaaaaaaaaaaaaaaaaaaaaaaaaaaaaaaaaaaaaaaaaaaaaaaaaaaaaaaaaaagggggggccgttttaagaggaccaaactttacttccccttccttgcaactttttattttttttttgggggggggtgaaattaaattcatgggccggctttttacaacgttgggattggaaaaaccttgggtttcccaaatttattcgctttgaaacaaatccccttttccccagttgggttattagcaaaagggccctcccctttcccctttccaaaaatttgcccaccctgattgggaattggacccccccttttaccggccctttaagcccgggggttgtggggtttccccccagtgtgcccgttactttggccggtttcttatccccctttttttggggttttttcctttcttttttggtctctttcgccggttttccccgtaaggctttaaatgggggccttcttttggggtt

SEQ ID NO: 311 - DNA, 394 bp, Chlorella sorokiniana
  unsure (1)..(394): unsure at all n locations; Clone ID: LIB3602-006-Q1-K1-A6
cgccgcagcggcctcgtcctgccgctagggcggtgcgcgaccagcggcattgccgtcgacgtgcccaacggcaacgtggacaaggcgtggcggcagctgacgcgcaagctgcgggaggagcggtacatggaagcggcgcaggggcgcgtccactttgtgaagcccagcgagcggggcgggggggaggccagcatggccgccaagcggttcaagcagcaggagttcaagcaaatgctggggtggatcatgcggcggcgggccggcggcttctgagcagccagctcccggcggcagcgttttcttctttcattgctttgttgcttgttcaatgcttctgctccgctgcttctgcttcgctcttccctgctgactccctgctcccattgcttgntgc

SEQ ID NO: 312 - DNA, 206 bp, Chlorella sorokiniana
  Clone ID: LIB3602-006-Q1-K1-A7
gcaaaaaaaaaaaaaaaacaagacaaacgtaaggggaaaaaaaaaaaaaaaaaaaaaaaaaaaaaaaaaaaaaaaaaaaaaaaaaaaaaaaaaaaaaaaaaaaaaaaaaaaaaaaaaaaaaaaaaaaaaaaaggggtttgccgctttaaaaattttaatttttattcccccggacttcacaatttttaggggggggggggggaacc

SEQ ID NO: 313 - DNA, 214 bp, Chlorella sorokiniana
  Clone ID: LIB3602-006-Q1-K1-A8
cgccgctgccgccgccgtgggaggaggagggaggagaggttgaggaggaggaggacgaggacatgggcttctccctgttcgactgagcgcacacggcggctccgggcggcggcggcgcgcccgcggcgtgagcggccctgcagctcgcgcagggtggcgcaccgccccgcccgcctgtggggtgggtggccttcgatgtaacgcgccgcgttgc

SEQ ID NO: 314 - DNA, 205 bp, Chlorella sorokiniana
  Clone ID: LIB3602-006-Q1-K1-A9
cgccaagcgacagctgtgcagctgagcagcggttgatacggcaagaaccgcgctgagtttatactaccctcaacagatatgaatctgcatcagtgagagacgagagctgtctgtgcctggccgagttttgagtttctgctgccacgaacgtgcctttatctgagcggccaggagattgtgtcagacttttgtgtaacgatccaac

SEQ ID NO: 315 - DNA, 161 bp, Chlorella sorokiniana
  unsure (1)..(161): unsure at all n locations; Clone ID: LIB3602-006-Q1-K1-B1
cgcaccgcatgccctgtgctgctattnnctctcccccccccctgtatagtgtcccttttccctccctcgctctttcccccggcgcgccagccgatcatagtgccgnntgngcccgcttccctgccctttacttgattcgcttggctagcacaagccgatgc

SEQ ID NO: 316 - DNA, 478 bp, Chlorella sorokiniana
  unsure (1)..(478): unsure at all n locations; Clone ID: LIB3602-006-Q1-K1-B10
cgaggctggaacanagctgggcgcgggggccttctacaaggagaacgcggccatcctgcgcaagacgttccaggacatgggcttcaccgtgtacggcggcgagaacgcgccctacgtctgggtcggcttcccgggccagaagagctgggacgtgtttgctgagatcctggagaagtgcgagatcgtgaccacgcccggcagcggctttggccccgccggcgagggctttgtgcgcgcctccgcttttggccaccgggagaacgtgctggaggcggtggagcgcttcaaggcggtgtacggcaacaagtgaagtgacgggccccccggcgctgaacacaaccaattgaaacgactcggcgcgacatgacgtgaccgccgccctgcttgcttgctccttgctcccttgctctctgcggcttcttcagctatattctcccgngcatttgatctacctgagcactgtaacagacctgagtgt

SEQ ID NO: 317 - DNA, 66 bp, Chlorella sorokiniana
  Clone ID: LIB3602-006-Q1-K1-B11
aaaaaaaaaaaaaaaaaaaaaaaaaggggaaaaaaaaaaaaaaaaaaaaaaaaaaaaaaaaaaaaa

SEQ ID NO: 318 - DNA, 199 bp, Chlorella sorokiniana
  unsure (1)..(199): unsure at all n locations; Clone ID: LIB3602-006-Q1-K1-B2
cggtgtttgttttttcccnggcgctttttttttaggcggggggggggggannccccnctcccccgcnggcgctttgggggagaggcggggggcggacgcccttcccaccgggggttctttctgtttgtcttttgggtcgcgccctgtttcggtccttttagcgcggtgggtgtggggggnncgcgctggggggccgttt

SEQ ID NO: 319 - DNA, 470 bp, Chlorella sorokiniana
  unsure (1)..(470): unsure at all n locations; Clone ID: LIB3602-006-Q1-K1-B3
cgtgtgaaaatccatccgaagcactgctggtgtctgatgtgtggtgagcgacgcaccacagcactgatgtgtggtgagcgaagcaccacagcacagtccgcccaccacgccgtttgccgcccacataacgccgtttatcctttgttcttttacttgcgaagcagcgcctttggctggcgagcacgccgtttgcccattgacttgcgaagcagcgcgcttggcttgcgctgccacaagtttgcatttttgctttttgctccaatttgttgtctgtcgtccggcccacacccttttgtttgaacatgctacttcccttgcacccgtactagctacccaaacttgatccaaacccccttgtgtatgccgcatgccgnataacccccttgctttacgcncncacagnccccctggccttaacaacgcttttttttttttttttttgccacaaggaaaaagacagtctatttttt

SEQ ID NO: 320 - DNA, 453 bp, Chlorella sorokiniana
  unsure (1)..(453): unsure at all n locations; Clone ID: LIB3602-006-Q1-K1-B5
tgttaggagcgcactgcaagaaggctnngtggcgccaatggccgtcccgctgcccctgttgcccagccagcctgcagccatgnncagcgcctgcagcagcgacctggagtcgcctacgggcgagcccgattgagcgccccgacttgcagcagctcagactcgccaacggcgcaaccccgggggggggggggcgatggcggcggcgctgctccaggcctgagccgcatgcagctggtcaggggcggcctgcttgctgccggtggcatgctgatcggagcagctgcaccagcatcaacagcccaggcagcggcggcagtagcagcagccagtgagccggcgctggcngcgggggcagccaccgagattgctgctgctgcatcgcagcactttagcaaggtcctgctgagcaccctggcggactgtgagctttttttttttttgggccccaccttc

SEQ ID NO: 321 - DNA, 613 bp, Chlorella sorokiniana
  unsure (1)..(613): unsure at all n locations; Clone ID: LIB3602-006-Q1-K1-B6
ttcggcaaagcggacgagcaaatggggcggcggccggcgcggtgctaccgccagnacaagggcaagccctaccccaagtcgcgcttctgccgcggcgtgcccgaccccaanatccgcatttatgatgtgggcgccaagaaggcgggcgtggacttcttccctcactgcgtccacctggtcaggtgggagaaggagaacatctcgtccgaggcgctggaggcggcccgcatcgcggccaacaagtacatggtgaagaacgcgggcaaggacgccttccacctgcgcgtccgtgtgcaccccttccacgtgctgcgcatcaacaagatgctttcgtgcgccggcgcagacaggctgcagacaggcatgcgcggtgcgttcggcaagccatttggtgtgtgcgcgcgcgtgggcatcggtcagatcctgctgtccatccgctgcaaggacacgcacgctgcggtggctgatgatgcccttcgtcgtgccaagttcaagttccccgggcgccagaagatcgtggctagcaggaactggggcttcactccctacctgcgcgacgattacttggagtggaagcgtgagggccgtcttgtgaacgacggtgtgaatgcca

SEQ ID NO: 322 - DNA, 316 bp, Chlorella sorokiniana
  Clone ID: LIB3602-006-Q1-K1-B7
acggtttgagggcctgctgcgccgctttgagcggcaggagaagcaggagaagaaggcttcctgggcctcttctgagtggctgtggcaagtgaaggtgcagccccagcacaatgcaccactgctggcgatgtaagcctttcgagcaaccaacggatggagatagcacaaggcaccatgcgctttacccagcgcccggccttctgttccgagcattcagcctgacatgaccgctttctgatcactgcaacagccccagcctctgcctgtttgtatagtgcactggcgattctgtagcctcctggcgaatatgtaacag

SEQ ID NO: 323 - DNA, 499 bp, Chlorella sorokiniana
  Clone ID: LIB3602-006-Q1-K1-B8
ctcaggtgaagcgtatcacgccgcgccacttgcagctggccatccgcggtgacgaggagctggacacgctgatcaaggccaccatcgcgggcggcggcgtgatcccccacatccacaagtcgctcatcaacaagcagggcaagaaggagggcttcccgctgctgccccccctgtaagcagcgcgcccatgactgcggcagcagcctgacggactggaggatagttgcggccgggggcacgggatcagccctgccgccctgccgccgccaacccctgacgcggccggccgcgccggccgcctgacatgactcgccttaacccaccgcgccacagcaaatgtgtctcgaccccaaatgtgtatcctctgcgatgcctgtatcaccccgccagccccaaactccttctcctctctttcggcaacaccgctttttcgccaccgccttgccttggcccagcctatgctactcagcccttagcaggactgcaacaaagatgcttg

SEQ ID NO: 324 - DNA, 507 bp, Chlorella sorokiniana
  unsure (1)..(507): unsure at all n locations; Clone ID: LIB3602-006-Q1-K1-B9
ggctgacgaccccgncaccttcgctgagctgaagttaaggagctgaagacggccgcctggccatggtgtccatgctcggcttcggcgtgcagggcctgatcacccgcaagggccccattgagaacctggctgaccacctggcggcccccgacgccaccaacttctgggtggactacgcccccaagtccgccggcatcggctactaagctgtttccgtcgcttgactggcgccgcccgctcgcccgcccgctgagtttacggccactcgcggcaacaggcagcagcggcgtctgtactttctgactcctccggcgattgctggtggcgcaccttgcttgctttgatgcttgcttcgggggcctaggcaccctcccatgcaacacatgaacccccaccacccctgccaacccaagtcttagcctgtgtttgcgcgcggtgaaggcaatgagaagaacagacccttgtaccctgcctcgctgctgcgtttttgctgcaagacatgagcct

SEQ ID NO: 325 - DNA, 544 bp, Chlorella sorokiniana
  unsure (1)..(544): unsure at all n locations; Clone ID: LIB3602-006-Q1-K1-C1
cggcttgaacgcgaggccaaggccaagagcggcttctatgtcgagcccgaggccaagctggtgttcgtgatccgcatccgcggtgtgaacgacatcgaccccaanaccaagaagatcctgcaggtgctgcgcctgcgccagatcaacatgggcgtnttcctcaaggtgaacaaggcgaccatgaacatgctgcagcgggtggagccctacgtggcgtacggctaccccaacctgaagaccgtcaaggagctgatctacaagcgcggctttggcaaggtcaacaagcagcgcatcccgctcaccgacaactcggtgatcgagcaggtgctgggcgacaaggacatcatctgcgtggaggacctggtgcacgagatcttcaccgtgggccccaactttaagcaggccaacaactttctgtggccctttaagctgttcttcctcttattcggcatcaacaagaagctcttgttttttattgagggcggccaggccggctaccgtcaggagtacattaacaacttgttgcgcgccatgaactgagcgc

SEQ ID NO: 326 - DNA, 567 bp, Chlorella sorokiniana
  Clone ID: LIB3602-006-Q1-K1-C10
gctgtgccgcccagcacctgtatcagcgctgtgcctggccgctgcgcacctgccgccaatggcccacctgccctctgcgtttgaaactgcaaattgaacccaccgatgcgccgcatgtgtgtactgctttcttcaacgccaccatcacccaccccctcattcgcaccatccctgcactacccacctcctcgccggctgcatgcgctgcactcagcaccatttcatcaaccaatcgcctccctttcatgcgagacttgctctccctgcactctccctttgccctgcccccccaagccaaactcaagcacctgctcaagccaacccacatccgccctttaccaagcaaacccaaacttctcatgcaacagttttctcccccttttcattccagtaccagtgtttgactaccaatcgtcctcccaagcggggctgccaagcctttttgtccagctgccggctgtcatgagctgttgccgctgctttcccccatccggcttgcgctgcaccggcgatcctctctactcccttctctgtacagctggctcagcagatgtaacatgcgagctt

SEQ ID NO: 327 - DNA, 289 bp, Chlorella sorokiniana
  Clone ID: LIB3602-006-Q1-K1-C11
atggctgccatggccgccctctgcctgtggcgcggcttcagggaggacgaatgaggagcagccaactatcgcgcacccagcaatgagcagggctggtcaacatgccaataagaacacacaaaactttgccatccggcctccccaagcgtggagttttggtccgtctttcagtttcggttttcttgcaaaaggcagtagcagtgcttttgctacaggtggatattttgggcaatgtgccggctcaagctgagcacggggcaaagcatcaaactgtgacacgcaacacgtc

SEQ ID NO: 328 - DNA, 174 bp, Chlorella sorokiniana
  Clone ID: LIB3602-006-Q1-K1-C12
aaaaaaaaaaaaaaaaaaaaaaggggggggagaaaaaaaaaaaaaaaaaaaaaaaaaaaaaaaaaaaaaaaaaaaaaaaaaaaaaaaaaaaaaaaaaaaaaaaggggcgggccggttttaaaaggatccaaagtttacgttcccgcgggcttgcgaaggtaataactttttttt

SEQ ID NO: 329 - DNA, 499 bp, Chlorella sorokiniana
  unsure (1)..(499): unsure at all n locations; Clone ID: LIB3602-006-Q1-K1-C3
cggcagccaacaggcggctgccagcccaaggcgagaagaagcccaaggccaaggccacgcccaaggtgaagaagacggccaccaaggtgaaggccgccgccaagcccaagaaggccgcccccaaggccgccaaggcagctctccaagaagaaggccacccccaagaaggccggcgggaaggcgaccaagaaggcgtaagctcggcctccggagcacggccctgagcacggttgtggtgcggtgcagaccgacttgtttacccttcccgaacgacagactgcccaactgcgccactctctcgccgccctggggcctgctgcccgccgnacctctgcctgctctgctgccgagtggncaatcccaatgcatgactcgcttgccgcgcgcgacgcccgaagagcgcaccctgcacccacaatcggtctctttgaccctccgtttttttctcacttatgacctcttttttttgtctatgacagccgntctagtgcgcgcagcc

SEQ ID NO: 330 - DNA, 282 bp, Chlorella sorokiniana
  unsure (1)..(282): unsure at all n locations; Clone ID: LIB3602-006-Q1-K1-C4
aaaaaaaaaaaaaactcccgaggttaataaatataaaaaaaaaaaaaaaaaaggggggcgcaacaaaaaaaaaaaaccataactaaaaaacacaaagnaaacaaaaaaaaaaaggggtcccccctttttaaaggggcccccccttttttggggtttcaagcaccctntcccgttttggagggggggggggttttttttttttgtgccccacctattttaactgtcttcggggggaaaccctttggtttgggagatttttttttttttctcccctcccctttt

SEQ ID NO: 331 - DNA, 463 bp, Chlorella sorokiniana
  Clone ID: LIB3602-006-Q1-K1-C5
aaaaaaaaaaaaaaaaaaaccaaaaaaaaaaaaaaaaaaaaaaaaaaaaaaaaaaaaaaaagaaaaagggaaacaaatataaaagttcaaaaattcgggcgcttgtttggggggctctatattattttatgggtccttgcgactccattgcttttttttaggttcccttactttccccctggggggggcgtgttgtcccccactttactggccttaaccctggtgtcccctttcggctcctcctttaataactttccggtttctcccgttttttttttgcggatgtggccccccctgttcggcctttgtaacccttgctgaacctgtgtgtaaactgggtcggccctggtagctgcccttaaagcgagcgggagattgggcagctccgtagcgtcccttccttacgttccttgccctttcttcctgtttttttttcttttttttttttttttaaccccacatc

SEQ ID NO: 332 - DNA, 472 bp, Chlorella sorokiniana
  unsure (1)..(472): unsure at all n locations; Clone ID: LIB3602-006-Q1-K1-C6
aaaaaaaaaaaaaaaaccgggggggggggaaaaaaaaaaaaaaaaaaaaaaaaaaagggggggaaggaaaaatatagaggaaccaaaaattaaataaaagggggtggggattttttgagagcttatttttgtgtcaccggggtttgcatttcattttttctttttttttgcaccgccctttttggggggggggggggggggggacctaaaatcaatctccttaataaaaaatcctggtgttggccagcctggtttttcttttgtggaaggcctccccttttttgcccctttctgtcatgttgggcagggttgttttgttaaatgggacccccaaatggggcggcgcattaaggcgcggcggggggggngnaaacttgcagggtttctgagacacgggccagggcctttatncccgnnntttacgctnncttccttggctttttttcnncgttttttttttttttttggcggc

SEQ ID NO: 333 - DNA, 606 bp, Chlorella sorokiniana
  Clone ID: LIB3602-006-Q1-K1-C7
gccaccgtggcagccctggctgacctgcagggcagcagcattgaggcaggcagcaggtccagcagcgcatgcagcgccccgccgctgatggctgagtcgtggctgagcgctggcggcagcatgtctgcggcggaggcggcggctgcctacgcctgtgcagcgcagcatgtggagggagcagaggcgctgcttgctgcgctgagggcagaagcagctggcactccagagggtgcagaggaggaggatggcggtgaggcagccatggaagcagctgaagtggcggtgcaggaggacgcagaatcgccgcttgaggccagcccgcgtgcggcggcaggcacggcggacagtgtggcagagggtcaggcagatggtgcagaggaggaggcagcggcagacagcgaggcagagtggaccgtggtcagcggtgctgaaattgaggacgatgaagaggaggaggaggaggcaaccgagtcggccaaggcagagggaggggcagaggcagaggcaggaagcggcagcgacgctgagcccatggccgcgtgagcgccttgctaccaccagcactggccaacagcccgctgagcagatgaggagggctgcatgctt

SEQ ID NO: 334 - DNA, 346 bp, Chlorella sorokiniana
  Clone ID: LIB3602-006-Q1-K1-C8
gcaagcgcgcgtggcagggcagcagggggggcctgggggaggaggtgcagacctaccactaccgcatccagccttagacgcgctgaggcgtggccagcgcgttgaggcgtagccagcggtgcatgggcaagcagtggctgcttgctgaccgacttgtgtgcgagcagcgacggctccggaggggggggcaacacacgaactgcagttgaatcgagtactggagtgctgcattctgctcttggcctcgtaggttgtagtttgaactgattcacccaaactgactccaattgcggccttcactgcgcatgctgtctggttacattttgagactgaaacagcaggggct

SEQ ID NO: 335 - DNA, 533 bp, Chlorella sorokiniana
  Clone ID: LIB3602-006-Q1-K1-C9
ccctctccttctgccccagcagccacacccatcccaacctcccctcccgctaattttgccttcaggacctctcccgccaccgctcccccgctcccccctttttgcataccatgccagctcccgcctttttgcataccatgccacgctttttccctcgccacctttttcccacgcccgctttttgatcgcccccggccagcctgatttgatttatttcgtccttcctcctccccagcgcccgtagcgcgcaccaccctttttctggcccctcttttgtgacgtacccccatctccttgacccccctgccaccttgagtgctttcgcatcgctcgccgcccggcctgactttcattcccggctgctcggcgcaggctggccagcacgccagcccggccgcccaacttgccctagcatggctgccgcccgtgcccttgctaccctgcctgccactgcgtgcgcaccgctgtattatacccctcgttaattggattgcatcgctttgcgtgtattgctccacccctgctagcacgcc

SEQ ID NO: 336 - DNA, 183 bp, Chlorella sorokiniana
  unsure (1)..(183): unsure at all n locations; Clone ID: LIB3602-006-Q1-K1-D1
cggcggccggaaaaatcccccaactgtccgctgccgtgtcactagtagctgctctaccacccgcttcgatcaccctctccaccccttcngtaagcaccngtttctaccctagcgcaccgacccaatgcttttttttttatttatgaatccctagcggggggggggcgggcttntctnatgtct

SEQ ID NO: 337 - DNA, 151 bp, Chlorella sorokiniana
  unsure (1)..(151): unsure at all n locations; Clone ID: LIB3602-006-Q1-K1-D10
cgcgaatggggtcacccggnacaccgcgagctggcggtgttgttgtttcatttccagcatgtgcatgcgcgcacgttgtnggttgtttccagaagcnncagtcagcctgtggnaccaaaggcccagcctctgtnaacnnccaagcaagcag

SEQ ID NO: 338 - DNA, 594 bp, Chlorella sorokiniana
  unsure (1)..(594): unsure at all n locations; Clone ID: LIB3602-006-Q1-K1-D11
gtgcttgctggcagtgggagcgagtgtaggggtttcagggtgtggcagtgtgcagctgcttggccgatggagggcggcggtggtgagggaagaacacactgcaccagccaggcgcccagcagcacaaccttgccacctcacctcccagccgctgccttctgcctcattgtcaggcctgggggagggccaagggcnaacgatccccgcccctcaccccacccctctccgcccgctccccgcccctgcctcgccccatgcaggcatcatcagcgccaccgggcgaaccatccccgcctccaacaaccagcccatccccggcgcgctgcaaacagacgctgatgtcaactcccagtccctgggaggcgcactgctggactcgagcggccgcctcatcggcatgcctgtggtcagctatgccaagccgggggtggcacgcagcagcggcgtcaactttgcgctgccggcagacctgcttcgagatgtggtgccccgcctgattgtgtacggctcggcagccacgcggcggtagtgtgggcgcctgtttggctggctggccggctggcgcagattctctgagagcaggatgtttgttga

SEQ ID NO: 339 - DNA, 488 bp, Chlorella sorokiniana
  unsure (1)..(488): unsure at all n locations; Clone ID: LIB3602-006-Q1-K1-D12
ctccgaaaaaaaaaaaaaaaaaaaaaggggaagaagggggggaaaaaaaaaaaaaaaaaaaaaaaaaaggaagaacaaataataaaaaaaaaaaaggttacctcgctcttacatacccaatcttacctccttctttcgtgccacctcaatttcttttctttggcgctccctaaacacatttcactctccgggggggggggggggcccactttaaaacccttacctttccccccctttttcccctttggggtcatccccttttggccctctcccgttttccttaaaagcccctgcccgacctcctttcccaactgtacccccccctttttggcaaattaaacgccccctgtgtcgtgctttcacccccgcggccgttgggtttacccgcaccctaaccccttctctttccacttccttacctccctttcttttcactttcttcccttttttccnttcaactttaaacgggtggcccctttaacgtttaa

SEQ ID NO: 340 - DNA, 69 bp, Chlorella sorokiniana
  Clone ID: LIB3602-006-Q1-K1-D2
aaaaaaaaaaaaaaaagcggcccaaaaaaaaaaaaaaaaaaaaaaaaaaaaaaaaaaaaagaaaaaaaa

SEQ ID NO: 341 - DNA, 220 bp, Chlorella sorokiniana
  unsure (1)..(220): unsure at all n locations; Clone ID: LIB3602-006-Q1-K1-D3
aaaaaacccccggggggggggggaaaaaaaaaaaaaaaaaaacacaaaccggggggaaaaaaaaaaaaaaaaaagcgggggacgaaaaaaaaaaaaaaaaaagggaagaacgaggggaaacaaaagaggggggcccgncgcagggttttttttttttttcaancccccnnccccctctttgtgggggggggggggtnnnnaacccccnnnnnnncccccc

SEQ ID NO: 342 - DNA, 546 bp, Chlorella sorokiniana
  unsure (1)..(546): unsure at all n locations; Clone ID: LIB3602-006-Q1-K1-D4
cccctgggcctgggcgccacgaggagcgcctggcctggttcgcggagagcgagcgcgtgcactgccgctgggccatgctcggcgtggccggcatcctggtgcaggagattgtgaagccggacgtgttctggtacaccagcggcgccaccgtggagctgccctttgacatcaccgggctggtcgcctttgagctgttcgtgatgcactgggttgagtcccgccgcggctacgacatcaagaagccgggcagcatggaccaggaccccatcttcagcaacttcaagctgcccgcccatgagcccggctaccccggcggcatctttgcgccctttgtgcccggcagcctggaggagctgaaggtcaaggagatcaagaacggccgcctggccatgcttgccttcatcggcttcaccatggctgcccaggtgacgggcaagaacccgctggcggcgctgcgcgagcacctggacaaccccctgggcaccaccatcttttccaaggccgtggtcgtgcccggccaggcngtcgttgccccctgcgccatcc

SEQ ID NO: 343 - DNA, 448 bp, Chlorella sorokiniana
  unsure (1)..(448): unsure at all n locations; Clone ID: LIB3602-006-Q1-K1-D5
tcggtgtgcgcctatatctgccaccgccgcggcacccccaccgcttgcgccctggaagtgatggccgccatcggcatcttgttcggtccctaggcgccctccttgctttgagcctggcaatccgttcccttgagcagtggcggacatgagcgtgcacagggcaaccctggccacccacgcgtggggcacgcctccccacagcaggcgcacagacagccctaagttgggcagcaaccgtgctctgcgccggtacaagctgcggatgctgccgcctgccccgcccatgacagcgagctcagccagccacgctgtgtggcagctcatacatttacgctgcttcctgctctgcagcctgtacaatccctgtattctagtgtcagctggtgcgctgtaatgctgctgtttggaaaaaaaaaaaaaaaaaaanataaaataatattattttttt

SEQ ID NO: 344 - DNA, 580 bp, Chlorella sorokiniana
  unsure (1)..(580): unsure at all n locations; Clone ID: LIB3602-006-Q1-K1-D6
ctgcttccccaccgccgcactgtggtcgcctgcaagcgccgcgccgcgaccgacccagagcgtcgagcagcgtcgctgcttgatcgtccgtctggcacctttgcttgctgtgtcagacaggtcaagcaggtagcgtaattgacagccaggtggcaacggcagcagagcaggcgcgggggggggggaccccaacctcgcggccatgcagaacctgccgcaggcgcagcagcagcagctgatgcaggccatagagcagatgcaagtgcgggacagcctgcgcatgtacaactccctggtggagcgctgcttccgcgactgcgtctccgagttccggtcaaaggacctgaacgcgggggaggagaagtgcgtgcagncgngcgcgaccaagttcatgaagcacagngcgcgtgnnggcattcgttttggtgagctgtccagcgaggctgngncgcanatgcacgccatgatgctttatcagcaggggggcaagtgagggctgccttgggcacagtcaccgtgctgtacgggagntcggcagtgctgttccgatggccctgggcgctgtngcgctgttgtggtg

SEQ ID NO: 345 - DNA, 239 bp, Chlorella sorokiniana
  Clone ID: LIB3602-006-Q1-K1-D7
ctcacgtcccctctcctgtccggtggggaagccttctgccgacccgctcacagcaccgacaatgccctctcgcactgcgctgcgcggcccagcggcccgcgcctcctcactttttgtgcccagcccgcattggggtggtctgcctatttcattctgggctccctctcgtcccggccgggcgggcgctctgcttcttggccagggcaatgcctagcatcacctgtaagaggaagatttgc

SEQ ID NO: 346 - DNA, 395 bp, Chlorella sorokiniana
  unsure (1)..(395): unsure at all n locations; Clone ID: LIB3602-006-Q1-K1-D8
acataccatttgttacacattaagtcctggtaccagatcggcataaggacgcaaaaaggcactgtacagtcgggccttgaaaatgggtctggatacgttggacgtgtgggtgagtgggggggggagcatgatggatgggtttggcagcagctttgcatggcagcagccgctgtgtgaagcgcgggtgaagggtggacatggagtgaggtgtgggaggtaggatgtgcggcggtgagcggcaggaaaggtggcgggtggaaaatgggtgcgggtgagggggcggcaggtggtgcagcggcggacgtgcgtttggggtggcagatttggtggatggggaggatggtgcatggagggcgttnagcgggtgatgggtggtgagtgggtggcataggttg

SEQ ID NO: 347 - DNA, 655 bp, Chlorella sorokiniana
  Clone ID: LIB3602-006-Q1-K1-D9
cggaccgcattccgggtcgacccagcgttcgcccacgcgtccgcccccaactggggtacctgctgggcgccgacgacttcagcgaggcggacgtgcccaaggatgcgtttgtcatctaccagggccaccacggcgaccgcggcgctgcacgcgccaacgtggtgctgcccgccaccgcctacactgagaagtttgccacgtacgtgaacggggagggccggccgcagtccaccaagacggcagttgccagcgtaggcgacgcgcgggacgactggaaggttgtgcgcgcgctgtccgaggtgctgggcacgccgctgccctacaacagcctggacgacgtgcggcggcggctggcggacgtggcgccgcactttgggcggcgggacgccgtggaggcgccgctctggctcaatggcgagtacttcaaggcgtttgcggagcgcgccaaggcggccaaggcgggcgcagagccgctggccacctccatcccgcagttctaccagacggacgccatctcccgcgcctccaaggtcatggccaagtgcatcaaggcgcggcaaacccccgtgcccggcctgcaccaggcgcccacgggcaactgagtgcccgacactgttggcgtcccgtgttactacttgctttggctgatgggggc

SEQ ID NO: 348 - DNA, 380 bp, Chlorella sorokiniana
  unsure (1)..(380): unsure at all n locations; Clone ID: LIB3602-006-Q1-K1-E1
tactgtcgctgttcccaagctcccgcagcgcgccgcagtgcaaggactgcggcaagcgcctgactgacgcaggcgtcaacggcaacacacgctcgccgccgtgcgagcagtgcggcaagcgccatgcggccaagggcgccaacatgggcagctgagcaggcgcatcggcgctgtgcgactgcctgccgatttgagcaggtgtggcgggaagcccgccatgccaccctcagccgtgctgtgccggcgaccgtcctccttggttgatgtgcaccatgatctgtacttgctgctgcggcggctccctatcctataacgccgncttctctcctnccctgtttgtttctnccttcctacggcctttggtgttcatnggcaccctt

SEQ ID NO: 349 - DNA, 436 bp, Chlorella sorokiniana
  Clone ID: LIB3602-006-Q1-K1-E11
tgctgctgctgggcaagcaggggtggggcaagtggacatccgcatccgcgtcaagggcggcggccaggtgtcccagatctacgccatccgccaggccatctccaaggcattgtggccttctaccagaagtacgtggatgagcagagcaagaacgagatcaaggacatcctgctgacgctgacgaccgcacgctgctggtggccgaccctcgccgctgcgagcccaagaagttcggtggccacggtgcccgcgcgcggtttcagaaatcttacaggtgaaggctgccccgtgggacggttgggcgcctctggaggcttcttctgcgccgctggcgtggcggcagcggcgtctgcggcctaggcagctgccctggagcagcatgccctcagcgaaagcaccatgagtacaccttgcgtgtgtaacaaaacgccacaca

SEQ ID NO: 350 - DNA, 584 bp, Chlorella sorokiniana
  Clone ID: LIB3602-006-Q1-K1-E12
ggtagctgttggagcagccgggtccgcttggggggcgcggttccgcagcctgacacagctgcagattaactgcagcgacgagatgtccagctgcctgctagccgcgctgctcagcctgccccggctgctgcggctggagcttctatgctttgtcggcctcccaacggggctgcccacaggggggggggagctgactcagctgacgtccctcgcctgtagcagctatgccactctgccgcagctgagtgcactgctcccactcacccagctgcgcgagcttgattggcaggatagagggcgcaccagtgtgttgcaagtggacctgcagccgctgctggcacggctgccgtacctggagagctgggacattttgggcatcctgcgcgggcaagggggtatgcaggttggcggagctgtgctgttaggctgcgccgccaagggctgcaaccgggctgagacctggcacaccactctggcggctgcgcagcctatccatcttccacagccgggtgccgctgccagcggtgctcagctgccccttgctggggcacctcacccgcctggtgctgagcatctgccgcttc

SEQ ID NO: 351 - DNA, 415 bp, Chlorella sorokiniana
  unsure (1)..(415): unsure at all n locations; Clone ID: LIB3602-006-Q1-K1-E2
gccttgccaaaccaaccgtctccaacacctgccggcacccgaccaggcatccctcgtgcttcacacgcgtccagacaccaaggatggggtttgagatcgacgacagcaagttgctgctgctgtccggcctggcaactacaacttatgccatgcactttatttttgggcgggggagcctcaatgaaacctacatgaacccggctctgccagtcaatgtgccgatgacccgctggtttggcctggccctgggcacctgcggctccgtcaacctggtgctatccacacgggaccatgacaaaaaggcggtgaaagactctcttatagtggtttttgctggttgggcggnttcctccgtgttttggttttcncgtccncgngggtgtctgttttattttgtttttttgttttttttttt

SEQ ID NO: 352 - DNA, 346 bp, Chlorella sorokiniana
  Clone ID: LIB3602-006-Q1-K1-E3
gtgggcaacctggccattgccaccggcggccacaacaacggccgtgtgggcaccattgtgcacaagggagaagcacaagggctccttcgacattgtgcacatcaaggacgcggccggccacacctttgccaccctcgtgaacaacgtgtttgtgattggcaagggcgacaagcccatgatctcgctgcccaagggcaagggcatccggcagagcatcctgcaggagcaggccaagctgtacggcaagtctgcctaagcgcaggcgacgccacatgagctgagccgacgccggcgagggccgcccgccggcggcccccacggcagacgcgcagcagcagacggggcg

SEQ ID NO: 353 - DNA, 436 bp, Chlorella sorokiniana
  unsure (1)..(436): unsure at all n locations; Clone ID: LIB3602-006-Q1-K1-E4
gngcgcgtggnncgctcgtccagtacccggnaggcggaggccggcaagctggtggntgattagcgatgtggtcagccccaacgcggccctggtggacttccccggccagacgcggcgcgtgatcagcttcaagcggctggcactcaccgacttcacggtggacatcccccgcctcgccaagaaggcggtgctgaagaaggcgctggaggaggcggaggttgaggccaagttcgccaagagcgcgtggggccagaagctggccaagcgcgcggtcaaggcggcgactaccgactttgaccgctacaaggcggcggtgcagaagatgaagcgcagcgcgcaggtgcgccgcgccttcaactctctgaagaaggtcgncaagtgagcggagcttctcgcatccgtttctgcctcccaattcattgttcccggctcgccc

SEQ ID NO: 354 - DNA, 449 bp, Chlorella sorokiniana
  unsure (1)..(449): unsure at all n locations; Clone ID: LIB3602-006-Q1-K1-E5
ggcccgnagctgcgggcagtccattggggaaggggcatcgccttcgccaaggganagctcctggaaccagctgcctaagccgcctgccctgcccgctgagccggcacataacttaacgagctggctcagcacgggcggccgtgggcgcgggcagcagccgcttgcaagctgcagaagcggcgcgctgggcgacttgcgtgatgtgcagcgctgcgctgggatgacagctaggcccggctgagcccggctgagccgggcacagcgcagcgccgcatggcgcagcgcggattttgcagctgcctgctgtctgcccatgttctttctctgctggttgcttaaggcccacgtggccgctctgctcagtctgctgtcagcctgtctgtaaccatccccttctaaaaaaaaaaaaaaaaagaagaagaaaaaagaaaaaaaaaaatttttttttt

SEQ ID NO: 355 - DNA, 560 bp, Chlorella sorokiniana
  unsure (1)..(560): unsure at all n locations; Clone ID: LIB3602-006-Q1-K1-E6
cagctttcgctctgctgctccctcagaccaccaggcagcacaccatgcagaccgccctgtgccaggccctgcgcgcccctgtggcctccaaggcccagacccgcagcaacgccggccgcaccgtcgtggtgtgccgcgcgcagcagcagaacctggccgctaaggccgcggctgcgggcgtgtctgtgcggggcctgctggcggcgcaccccgctctggcgctggtggacgaccgccttgcgggcgagggcaccggcaagatcctgggcatcaacgacccctccctgttctgggccatcaccattgtgttcaccatcgtgtggggcgtgttctacgtgtccacccgcgagattgacgctgcgtctgaccgcgagaacgacgatgactttggcctgaccctctgagcgggcgcccagcatcaggcggcccgcgcggngtaggcccacgggcctgccgggcaaattttcgtccttctgttgcagcttgtccgccatgtgtacgctaaatccaaatttcaccccgagaagagaactcgctatgtagcacccttgngtgaacac

SEQ ID NO: 356 - DNA, 437 bp, Chlorella sorokiniana
  Clone ID: LIB3602-006-Q1-K1-E8
agtgcgcggtccttttctaagtaatccatttttttttggggtcccttaatttcatttaactggtcctttgttttcccccgggggggttgggaagcccctggttttccccactttaatcgggtaaaaccccttccccctttccctaattggctttatagcaaataagccctttcccgtttgcctttcctaccatttggcccccctcattggcccttggccccccccttgtaacgcttatttaagcgcggggcgccccttgtttccccccattaagcccgttacttttgccggtcccctacccccggctcttttctttttcttccttttttttttcccctctttccccgtttttcccttcctttttttaaatgggggcctccttttcgggtcccgttttattgctttgcgggcctttggccccacaatcttgttttggg

SEQ ID NO: 357 - DNA, 356 bp, Chlorella sorokiniana
  unsure (1)..(356): unsure at all n locations; Clone ID: LIB3602-006-Q1-K1-E9
cggncgcgtgggcgngaagtgatcaagcggtcgtccctcaagacccaggcgcgccgctccagcctgaagaccttcatcaaggtggtcaactaccagcacatgatgcccacccgctacacgctggaggtggacctcaagggcgtggtgaccgccgagtgcgtggacaacagcaccaagaaggtggaggccaacaaggaggccaaggcgctgctggaggagaagttcaagagcggcaagaaccggtggttcttcaccaagctccgcttctgagggagtttcttggagagcctaggttgcagcagccgtgacgtgacgtgctccttgccccgagacgccatgtaacgtcacaccccgca

SEQ ID NO: 358 - DNA, 480 bp, Chlorella sorokiniana
  unsure (1)..(480): unsure at all n locations; Clone ID: LIB3602-006-Q1-K1-F1
aaaaaaaaaaaaaaaaaaaaaaaaaaaaaaaaaaaaaaaaaaaaaaaaaaaaaaaaaaaaaaaaaaaaaaaaaaaaaaaaaaaaaaaaaaaaaaaaaaaaaaaaaaaaaaaaaaaaaaaaaaaaaaaaaaaaaaaaaaaaaaaagggggtggttttttttttttaaaaaaaataaaattacatttggttggtgggggggagagctttttttaaaggggctcctaaatttaaattaatgtggggggggttgaaaaattctttttggggggaaaaatttgtgggtttttcattttattttttttttctaaaaatttcttttttttttattgtgtttttatttgtatatttctttatctttttttttttcttaatctttgcttctcccggaggggcaatgggggcggtttttcttgttttttttttngttttttttgtttttttttttttntttttaaaaacaaaaaaaaaataatttttttt

SEQ ID NO: 359 - DNA, 80 bp, Chlorella sorokiniana
  Clone ID: LIB3602-006-Q1-K1-F10
cggtccgtccgcatcccggtcgccccgcgtccgaaaaaaaaaaaaaaaaaaaaaaaaagggggggaaaaaagaaataaaa

SEQ ID NO: 360 - DNA, 585 bp, Chlorella sorokiniana
  unsure (1)..(585): unsure at all n locations; Clone ID: LIB3602-006-Q1-K1-F11
gtggactgtcactttggcaagcgcaaggacctggcgtgcatccgaacctgcacctggcacgtgcagaacatgatcaccggtgtgaccaagggctacgagtacaagagcgcctggtgtacgcccatttcccctatcaacatgaacataaacaacaagggcagctaggtggagatccgcaacttgctgggcaagaagatgtgcgcgtggtggacatgctgccgggcgtgacctgcgagcgcagcggcaccgttaaggacgagctgatcctgaccggcaacgacatccatctggtgtcccgcagcaacgctctgatccaccagaagtgcctggtagaagaagaaggacatccgcaagttgctggacgggatctacctaagagagcgcggcaccctgatgaagtccgagtaagcggagcccgcacgttgcactagaggtggtggcacgagcgcatcattgcgcagtgctcacgcccgcgcctgcggagcatcggcgtgagcagccgtacccagtctgcggagctgcacgccatgtaacgcacacgttngtccaatatactatgatacactccctctgctgcccaggtct

SEQ ID NO: 361 - DNA, 560 bp, Chlorella sorokiniana
  Clone ID: LIB3602-006-Q1-K1-F12
tccgtaaaaaaaaaaaaaaaaaaaaaaggggggggggggaaaaaaaaaaaaaaaaaaaaaaatataaaaaataaaaaaattaaaaaaacaaaaaataaaaaaaaaaaaaataattaaaaaaagaggggggggctctttttagagtggcccaagcttttttacaccttttttttcctggggaaaatcctttttttttggggggggggggggtaatttcatttccccctttttaaaaactggcgtaattgggaaaaaccttgggttcccccaatttattccctttgtgcccaatccctttttccaatggggcgttatctgtaaaaaggcccttaaccgttgccctttccaaaggtttcccccacttaaatggctaatgttcccccccttttagcggcccttaattccctgggtttggttggtttccccccacgttacccgtttttttccaaaagctttaaacccggttctttttttttttttccttttttttgcgcccacggacctggttttccaaaaaatgttttaagtgggggttccttttgggtcccttttaatggttt

SEQ ID NO: 362 - DNA, 447 bp, Chlorella sorokiniana
  unsure (1)..(447): unsure at all n locations; Clone ID: LIB3602-006-Q1-K1-F2
ctgacgggggacacacccggggcgatggcgctgacagcctgtgtccccccatcccgccgcggggtgacgacccccggccgtgacaccccggccgtgaccttttgacgaccccggccgcgacctttttggagacaccggccgcgacaccccggccgcgacaccccggccgacgacaccccggccgacgacaccccggccgacacacccgccgacacccccggcgtgatctccggccgcgacaccccggccgacgacacccggcgcgacaccccgtttcacacccggggacacacccggggcgacacccggtgacgacacccggcgacgaccccggttgtgactattgtttttttgccagccaacattttttcttttttttttgnagcagtacctcgacgctgttttttttttttttttttgaaggctgggcctcggtggttgttcttc

SEQ ID NO: 363 - DNA, 345 bp, Chlorella sorokiniana
  unsure (1)..(345): unsure at all n locations; Clone ID: LIB3602-006-Q1-K1-F3
gccttgcgggcgagggcaccggcaagatcctgggcatcaacgacccctccctgttctgggccatcaccattgtgttcaccatcgtgtggggcgtgttctacgtgtccacccgcgagattgacgctgcgtctgaccgcgagatctttttgactttggcctgaccctctgagcgggggcgcagcatcaggcggcccgcgcggcgtaggcccacgggcctgccgggcaaattttcgtccttctgttgcagcttgtccgccatgtgtacgctaaatccaaatttcaccccgagaagagaactcgctatgtagcacccttgngtgaacaccgcccctctggggcncccga

SEQ ID NO: 364 - DNA, 424 bp, Chlorella sorokiniana
  unsure (1)..(424): unsure at all n locations; Clone ID: LIB3602-006-Q1-K1-F4
cccatttccccnatcaacatcaacatcganaacagggcggcaaggtggagatccgcaacttcctgggcgagaagattgtgcgcgtggtggacatgctgccgggcgtgacctgcgagcgcagcgccgccgtcaaggacgagctgatcctgaccggcaacgacatcgagctggtgtcccgcagcagcgcgctgatccaccagaagtgcctggtgaagaagaaggacatccgcaagttcctggacggcatctacctcagcgagcgcggcaccctggtgaagcccgagtaagcggagcccgcacgttgcagtagaggtggcggcacgagcgcagcagtgcgcagcgctcacgcccgcgccggcggagcatcggcggcggcagccggccccagctgcggcgctgcacgccatgtaacgcacacgttagc

SEQ ID NO: 365 - DNA, 528 bp, Chlorella sorokiniana
  unsure (1)..(528): unsure at all n locations; Clone ID: LIB3602-006-Q1-K1-F5
gagcggccgctcgcgaactagagctagtggaaaaaaaaaaaaaaaaaaaaaaaagggggggaaaaaaaaaaaaaaaaaaaaaaaaaaaaaaaaaaaaaaaaaaaaaaaaaaaaaaaaaaaaaaaaaaaaaaggggggcccaaatttaaggtatcgggtttttcgtccaccaaaaatccaaacttgtggggggggggggggggatacctaaatccatttttttgccccntatttaaaagggaagggctggggtaacccatgttgttccctaggaaaaccgtctggtttccaaaccccttttcctcgggggggggccccgtgaaggggcccgttgcattcgcctttgcccctcgttgggttttttgtttgttttttgggcccccctttttggcgggtggtttaggccggggnnggggttttttnnngggnngggngggggggttttttttttttttttttttttccaccccaccctcccttcttttttttttttttttgnttntttggtggggtttttccgngtgggggg

SEQ ID NO: 366 - DNA, 501 bp, Chlorella sorokiniana
  unsure (1)..(501): unsure at all n locations; Clone ID: LIB3602-006-Q1-K1-F6
tgtcacgccgctgcgctgcgcacgccaaggnatgcccagnngccagcagcgagccgctctggnaggggctaagcgcgtggnncggactgcgagaccgacccctncgcagccccgagnntgccgggtgtacccgatgaccctgagcgtagtcccgcgtgtggcttgtagcctagnngcagcagctggcccaacgcctggtgggtgggcggcccctcgagnnccgacgaagnncttcatcgcagccccgccggcgtggggataagcccnngccgggcttgccagnngccgccgnnccccgccccaaatnnccgcttggcnnncaaacatccgnnnatcctccttnnngaattcaagcnngcaatgggagcccagnnnttcagcanngcagtgcttccttcnnccccgtctggtccattgagnggccttttnntcggcgccctggctgnnnctgnnctggtattcccttcctttctcttggtgccnntcgcccccttcttcccc

SEQ ID NO: 367 - DNA, 686 bp, Chlorella sorokiniana
  Clone ID: LIB3602-006-Q1-K1-F8
tgggcttcttcacagagaggattcaggcggggctgagcgagctgggcgcgaccacggtggcgcagctgcgcaaggtgctgcccaccctagccgccgaggtggcggatgacttgtacgcagaggagtcgctgtatcgctggagcttccgcttctgcctcacggagccgggccagaagatcattgatgtggacacggcggcgcagatgctgcagctggtgctgccgcaggccaggtttgtggaggagttctgcacattcctcacagcccaggcagagtacaagaagatcaacgcggaccagtggctgaacttcctcaagttttcgcgcgaggtgcgggacgacctctcaaactacgaggacaatcccgcgtggccgctgctgctggacaactttgtggagcacctgcgcaagcagcgcagctgagtgccaggagggagtggggcgaggccgcaacgcactgcgggcgccatcagctgcggcaaagcatgccccaccgccctgcccaacctgtgccaaatgccaaactccctgcacatgcgtccacgcggccacgcctgtacaaacatcacagcttgaaactgctccctacagctagccatctgagtgtgttcatccctgccaattccacgccatttcgttccccctgcctgctcagtctccctgctagctcgccgtcattcgctcctg

SEQ ID NO: 368 - DNA, 460 bp, Chlorella sorokiniana
  Clone ID: LIB3602-006-Q1-K1-F9
aaaaagggcaccgccgggcggggcagttttgaaatgggcaaaggacacacaacctctgaaaggcaacaagagcggggaaaaacacaactggagcaaactaaacatgtgtaaaaaatgcaagcaaagcgaggcattgacggttgatttgcaaggaggaaaaaaaacagtcaactgcaagggcccaccctggggcaggggctggggggtatttaaaagtaaggggggcactgccccatggctcaaccataaaacaaggcacggggggtcaaaaaaggcgccttggtccacccctgtgcaaaaaccaaccaaccagcgagccggggcctcaacccttcttttgtttgccggcgtgcaaggggctaaaatggcccaacgtgcccttaaacgctttgtccatgggcacctttggcacgtaaccaaagtctcggtaggcaacgccccaagcaaaaagcgggtgggg

SEQ ID NO: 369 - DNA, 481 bp, Chlorella sorokiniana
  unsure (1)..(481): unsure at all n locations; Clone ID: LIB3602-006-Q1-K1-G1
cgtggntgggttttgttgacgcagacgaatacatcatcctgcgcgccgacatcccaagcttgcctgcactgcttgagcggtatgagcaccgtggcggccttgcgctcttctcaaaaacgtttggcaccagcgggcacaagacgcggtcggtagtgggcacccggcaaggcttcacagggtgtgcaccccctggaaaggtctgtgctgtttcgatccatgctttggctgttgggaggcaggggctgacaccttgtgataaatccatgcagctggttgtctgtcgccagctgcactgtttgctgtatgtggctgcatgcggcttcagctggtctgttttggccagccaacgatgttgntggcagtgctccttgttgcactgttactcctgccaattcttggcagttttttctgaattttttctttttcatatttgnatttttttttagcccacccactcacatcgtgttttatgttgcgcggt

SEQ ID NO: 370 - DNA, 487 bp, Chlorella sorokiniana
  unsure (1)..(487): unsure at all n locations; Clone ID: LIB3602-006-Q1-K1-G11
aaaaaaaaaaaaaaaaacggcgggctgtagggggtgcaaactaaaaaacacaatacagtgggagaaaataaaaaaaaatatggggggcccttttaaaagttccaagtttacttacccacacctgcaacactataactattctatagtgtcccctaaataaaatccactgccccatttttggggtgtggggggtgtaaaaaccctnacgtccccaactttaatccttttcaacaaaatccccttttcacaggctggtgtaacacccaataggcccgcacattaagcccttcccaactgttgcccaccctcaatgggaaatgtaaacttccctgtgccctagcattaactcctttgggtgtgttggtttccttcatggtaacctttaccttttccacccccctagcgcccaatccttggctttttttccgttcctttttggccgctttacggggctttccccccaaagcttttatttggggggtccctt

SEQ ID NO: 371 - DNA, 140 bp, Chlorella sorokiniana
  unsure (1)..(140): unsure at all n locations; Clone ID: LIB3602-006-Q1-K1-G12
gcgttcgctcaacgactcctgtacacccgttncggcttggccttgcacctgacttgctgtgccatcctgtttctttctctctccctctgacaccgctctgcatttgatgcatgctcgcccaactgcaactcctctgcgtg

SEQ ID NO: 372 - DNA, 571 bp, Chlorella sorokiniana
  unsure (1)..(571): unsure at all n locations; Clone ID: LIB3602-006-Q1-K1-G3
ctgctgagcacgctgtggggggcgtgaagctgcgcctgcacctcagcggcggcggcggcggcggcggcacagccgaggagcgcnacgggagagagcatgcacatggccaaggctgcagaggggcgcaatgtggccgaggtacaaccccatcgatcacgccctgcacgatgctctgaagctggagcgcggagagaagcctgagacgagcgccttccctgagaccctggacgacgcgctgtctgctgcacagatgcgagacctgccagatagcccaatcgccgccgcaaccaccgcgctgggcggaagcggcggaagcggcggcggcggcggcaaccccggcccgggcggcaaccctgggccagaaggggaagngccgccggntgagggcttctcagccaaccccttccacacccagcagacccgcgccaagctgtaaaggggcncnggggcaaaggacagccaatgattgatctggagcctctggcgagagtgtgcgctccaacagcagagcgagctttacctgtccagagcgcatcgagttgcagttgcagcagtttggtgttttctgccg

SEQ ID NO: 373 - DNA, 351 bp, Chlorella sorokiniana
  unsure (1)..(351): unsure at all n locations; Clone ID: LIB3602-006-Q1-K1-G5
cgggcaagatacacgncgntggggctacaagnannncacgctcaagnacgnnctgcgcgtgccggcaagggccannagctggtgatnncatctccaacaactgccccgnccgtgccgccaagtcggagatcgagtactacgnnccatgctgtccaagaccggcgtgcaccactacaccggcaacaacgtggacctgggtaccgcgtgcggcaagctgcaccgcgtgtccgtgctgaccgtcaccgaccccggagactctgacattgtgtccggcatgtaagcggcgcagcatggcatgcgtacccgggcgctgtctgagctgggactgcccctgtataagaaacagaggac

SEQ ID NO: 374 - DNA, 278 bp, Chlorella sorokiniana
  Clone ID: LIB3602-006-Q1-K1-G6
ccttctgaagctgaaatcttctgagtctgagatggactgggctgaactgggctccatctgttggacagcagttggccagtctctgcggcagtgcgtagtcccaagcggcgctgaggggcccctgaggcaccggctgcactgcacgctgcgctgctgagtggcccacttgctggggggcggcgttgaaacctgggcacacgtgcttgctccttgctgagttgcttgtgttgcagagcaagatggtgagtgggttgtagcatctgtaaatacagtagcgg

SEQ ID NO: 375 - DNA, 538 bp, Chlorella sorokiniana
  Clone ID: LIB3602-006-Q1-K1-G7
ggcgggcctgctggatatgttcaaccagggcaaggtgcaggcggcggtggcggcggccgggcagtacgacgaagcggccaccaaggcggcgattgacaagtacattgctgacaacccggtggtggtgttcagctggagcggctgccccttctgcaagcgcgccaaggcggtcctggatgccacgggcgccaagtacaccgcccttgagctggaccagatggccgacggcaaggcgctgcgggctgagctggccaagaagaccggtcggtccagcgtgcccaacatctggattgccggcaagaatgtgggcggctgcaacgacggccccggcgtggccacgctgcaggacaagggcgagctggtgccgatgctgaaggccgccggcgcgctctgatgcagcagcaggctgaaacgcaagctgttgcctggtgccctgccggctgctgtttgtcatgcacgagctatcagattgaacttgacgactgctggtccactggtcgttgtttgatgtgcactttgcaaccaagcggtcaacctg

SEQ ID NO: 376 - DNA, 597 bp, Chlorella sorokiniana
  Clone ID: LIB3602-006-Q1-K1-G8
ttgacgtgttgaagaaccatggcttggccgcccaagaggggccgcagccgacacgcgaggagtggttccttcagcatctgtgcgtggggcggggctttgacacggcatggagccggatgaagggcggcggcccctggagcatagacgactttgctctgtacagcgacgacacgggcgcggagcagtatgcattggacttgaaggcacagacgtcaaaggaccttggcatctgctgggtggcgccactggatgagacgcaagccttcctgcactcagacaagatatcggcattcggcaacggcagcctgtggtacatgaactacacgtcaggggcatgcctggtggtgaccgtgccgccagcggggcagggcgtgcgcgccgtggctccggcaccggcgccgcccgaagccagcgcttgagcggcatggggcggaggagcgttcggtgggaaggcgcgtcgacgaatgaactcactttccaccgatgcagcacctaccctaccatgtttctgcacttggctagcccacatcagacgcactttactcttcggttgattgttatgtcacgcagtagagacgctgcactgtcaatgtgcct

SEQ ID NO: 377 - DNA, 196 bp, Chlorella sorokiniana
  Clone ID: LIB3602-006-Q1-K1-G9
cccactcgctgagttacatgccggctggcgggtacacggggcaaaccagcggggggagagggaggccgcccccccacgtctgagggtagctgggcggcggcgggccccaaaactaggcagtgaggggaggcaatagggcgggagcgggatcggggtgttggctcttctcccgccgcgggggggcggggccgccaaa

SEQ ID NO: 378 - DNA, 341 bp, Chlorella sorokiniana
  Clone ID: LIB3602-006-Q1-K1-H1
acgcaggctggctttacacatcagcatcacttgccggcattatgcccatacaaagcaaagcgaatcaagcaggcatgggggcgactgcggcccctgggcgggcgggcaagctgacgggagaaatcggtagtagcaatcggtgggctggagaaaacgagagagcaagggcgggtaggtaaaggaggcacttggcgctgaacagggcggggcgggcacacgcgtctgccgccgcccctggcgctgcgcatggcacacaagacaaggcgggcagggccccgctttcagcggggcggagtcaaagggctggaataatgaacccaagtgagagggaaggagagagg

SEQ ID NO: 379 - DNA, 500 bp, Chlorella sorokiniana
  Clone ID: LIB3602-006-Q1-K1-H10
cgctgctctccgtcatcaagcccggcgggaggtggtggtcgccgagagtctaccgtgggctgcgatgagccgctggacatcctgaccgctggctttgtggcggccgtggtggagccgctgctggacctgcgtgtgaaggacgagcccaacgaggcggtgtaccaactctttgaggaggtgggcgcggacctcacccacacgctcgcggtcaacgaggccatcgtagcgcaagaaggcggacatgtgcccctaccttgccagagcgctggcccgcgtgtctggcggcctctacatcctcacctcggctgcacgcaggcagcaatgctgccaagtctggcattgtggcctcctgggtcacccaggcctactttgagcctgtgcgcctgaccattgcggtggccaacgaccgtgccattgagttgctgctgcagcgtggcccacacctttgtgctcaactgcctgtgcgatggcgagtacaaccaagtgctcaagcacttgct

SEQ ID NO: 380 - DNA, 550 bp, Chlorella sorokiniana
  Clone ID: LIB3602-006-Q1-K1-H11
ctcctttgcccaaagcaacacaatgtggaactacagcaccaaaaaaaaaaaaaaaaaaaaaaaaaaaaaaaaaaaaaaaaaaaaaaaaaaaaaaaaaaaaaaaaaaaaaaaaaaaaaaaaaaaaaaaaaaaaaaaaaaaaaaaaaaaaaaaaaaaaaaaaatttaaaaaaaaaaaaaattaaaaaaaaagggggggggggggctttttaaatatttaaattttattaccctttttttgaaaagttttttttttttttttggtcaactaaaataaaattaattggcctggttttaaaaacttttttattgaaaaaactttgtgtttacaaattttattcgttttgcgaaaaatccctttttttcaatttggtttttaaaaaaaaagcccccaacttttccctttttaaaaaattggccaaccttaattggaaaatggaactcccttttattgggctttttatttgcggggggtgtgttggttccgcccattggactctttaatttttaaagcgctttagcccccggctttttagtttttttcttttttttt

SEQ ID NO: 381 - DNA, 229 bp, Chlorella sorokiniana
  Clone ID: LIB3602-006-Q1-K1-H12
aaaaaaaaaggaatgtttggggtgtaaaaaaaaaaaaaataaaaaaaaaaataaaaaaaaaaaaaaaaaaataattaaataaaatattttaattataaatatatatataaatttaaaatttattacttttataaaattataaatttttttttttttttctaatcaaaactatttttttttttttggggggggggggtttttaaactccccccccctttttttgttaacg

SEQ ID NO: 382 - DNA, 446 bp, Chlorella sorokiniana
  Clone ID: LIB3602-006-Q1-K1-H3
cgcacctgctgtcggcgctactggcgctgagcgacagctatatgatggacgtgctcggcaaggagggccaggcccgcagcctgcgggcgctgggctgcggcgcatgcggcgcgatgcagcagcagggcgggggagagctgctcttctgcccctgcggctgggcctgctattgcagccgtgagtgccagaagcgcgactacccctctcacaaggccgagtgcaagcggctgcgcgcgcagaagactgctgcggcgacggcacaggaaaacgagggcaagccaagcggcggcgatgcaggcagcagcggcggcacgagcaagcatgcggctgctggctagcatggcctgtggtgcgcatcggctgctgcgcagattacaatccatacaaactggtatgtgtaagctcgaattggtgcaatgaaaatgtgtaaaggattcgtagggatc

SEQ ID NO: 383 - DNA, 384 bp, Chlorella sorokiniana
  Clone ID: LIB3602-006-Q1-K1-H4
aaaggagcctggcatagcacccaaggggcccgagctggggaaagaaaaggacaggggcagcagaaaaaaaggcaagccggggcattcgtttggcggaggaaaaaaaaaaaaagggtgggaggcctaattggaaaaaaaagggcaaaaggggcaagtgcagctggccccttccaaaagaaaaaaattcttctctcccccacggggggggggacggaacccaaggctttgggggcaccaggggagcaggggaaggggggggaaccaaacttggctgactggtgccacaagggggccgcccctaaccccctggccaaaaaaattttgcccccccgcatatcctccaaaaaaagaaaggaaaggaagccctccggcccctgggcgaaa

SEQ ID NO: 384 - DNA, 549 bp, Chlorella sorokiniana
  Clone ID: LIB3602-006-Q1-K1-H5
tccggtcgcatccatgcggcagcggacgtgtgcgtgaaccagcgcctgaaggtgccccctgccctcaaccgcttcacccgcacgctggacaagaacatggccgagagcctgttcaagctgctgatgaagtaccggcccgaggacaaggcggccaagaaggagcggctgctgaaggaggcggaggcgcgcgaggctggccaggaggttgagaagaagaagcctgtggtggtcaagtacggcatcaaccacatcacgcagctggtggagagcggcaaggcgcagtgcgtggtgattgcgcacgacgtggaccccattgagattgtggtgtggctgcccgcgctgtgcaagaagatgggcgtgccctactgcatcgtcaagggcaaggcgcggctgggcaccgtggtgcacaagaagacggccaccgcgctggcgcttacttttttttattttttttttttttgcgagaacaccaagctgtgtttgttctttaagaccatgtacaacgactgcccccgcgttagctgtggcggcggtatcatgggccccaag

SEQ ID NO: 385 - DNA, 264 bp, Chlorella sorokiniana
  Clone ID: LIB3602-006-Q1-K1-H6
gccgccagtcagctgcaagtgtacttcagcctttgttgaactcgctgccgcctctgattgcgccagtcagcagctactttgcccaacacacgccggggggttccctgggcgggcttccatcccgagcaataatgccatgcagcgctgaacgccacacgacacacccctttcagagaactgcctttcatctcgccctcagctgccatcccctgcctagcgcgatagcgtgcatgcaggcatggcacatgtaaatacactgctgag

SEQ ID NO: 386 - DNA, 542 bp, Chlorella sorokiniana
  unsure (1)..(542): unsure at all n locations; Clone ID: LIB3602-006-Q1-K1-H7
gctgggnacagccgcaggtgcgaggaggggggggcacgccgggaggcacccccggcgccccgggcagcaggcggcggcacgtgacggtgcagctgccgtcggcgccgggcagcgctcggccggcggtgcagagccccggggaacggctggtgcgcgggctatcagcggtgaaggacagggtggctgaaggcgccacatggttctggaacggcccgccaaacccagaggagcgctcgctgttcacgtacgactggaggcgggcaggggaggagggcgcaagccgcgcacccgagggccctggtagcgcccgctcctcgctgacgaccggcaccagtgtcaccggccctgcagccacgtacagcagcgcaggcacgtatggcgtgccgcagttgccgccgcagggtgcctcacccttccagccgctcggacgcgcggcttctgggcagtacaccgcacggacatggggcggcagcgatgcgggcgcctagggaggtgccacgccaaagctgtgctcccttattcctctcatgtgtctactctac

SEQ ID NO: 387 - DNA, 624 bp, Chlorella sorokiniana
  Clone ID: LIB3602-006-Q1-K1-H8
gtggcattgaagagccggctggtaagcgccagtcagcagtcagctaggcagcagcgccgtagcatcagtacgccataaaaacagcccagcccgagcagccgcttcacgcgcagcagcaagcagtctcccacgtagtaacccacggctcgcagtgctgcacctccaaggtgcaccattcactattgccgccgcaacagaaggcagcaggccccgcaagcgcgcccgcagcagcggcggcagcacagcagcaacagcagcagctgctctctccctcttgaataaggcagtctctgcggccagccgcttgcaccatccccacccgccccaccatttccttgtacaggagggcagtgcccgggcgccgcgcctgtttggacatgtccccaccaccgtacccaatgcatgcgcacgccctttcgtttggtttgtttcttccacgctctgccgttgcattcagttgcctctccttttgttgtgtgcagcactgcatgccagcccggcactctttgggcactcccatttcagatctgctttttccaatgcttgccataaggcgcggcggttttggggagttttgcactctcttgctcaactttttccacaaccgggtaatgtacagctttt

SEQ ID NO: 388 - DNA, 441 bp, Chlorella sorokiniana
  Clone ID: LIB3602-006-Q1-K1-H9
gtccggcctcaaggctgcccaggtcgcgctcaactccctgcgccggcagcaggaggaggaggcggccgctgaggcaggccaggagggcaaggagatggtggccgcctaagccagctggactcgccacagctcctcgcctttcaagcctttcaggctggcgtagcgctgtccgcagcagccgccagtcagctgcaagtgtacttcagcctttgttgaactcgctgccgcctctgattgcgccagtcagcagctactttgcccaacacacgccggggggttccctgggcgggcttccatcccgagcaataatgccatgcagcgctgaacgccacacgacacacccctttcagagaactgcctttcatctcgccctcagctgccatcccctgcctagcgcgatagcgtgcatgcaggcatggcacatgtaaatacactgctgag

SEQ ID NO: 389 - DNA, 583 bp, Chlorella sorokiniana
  Clone ID: LIB3602-007-Q1-K1-A10
gctacagccacgccggcggcgggcgggggagcgccaagagcaagttctctgatggcaccaaggtcaagtactcgtgggacctggccaaggacgagctccacgtcacagccaagcacacgcccgccaagctgagcgacgacgcggcggaggccaccctcaccctgggcatgaccatgcgggggcacaagcagcaggaccccaaggtggtgttcggcatcaagttcgatctgtgagcggcaggcacccctggtggcggccccgcaacggcttgcagcacggcagccagccaggcggcaaccagccaggcgcagccagccaggcggcaaggagccagccggcagccaagccggctacagccagtggcaggcaggcctggagtgaccagctggcaagcggcggcgccgccctgcaaggctgttttggtgtagccgcttgcccattccctgttggaccaaattttcggacggtgatttttgggcacctgtgattttggtgacaccggtttcgtgtgaattttccctgtgagtcgattgtgactgtgcactgcggcgctgcgctctcactgaatcccaagctctctcca

SEQ ID NO: 390 - DNA, 628 bp, Chlorella sorokiniana
  unsure (1)..(628): unsure at all n locations; Clone ID: LIB3602-007-Q1-K1-A11
ngacagnacacaatcaagnaacggaggggggcgctcacaatcaagctcatggagcggtactggaacatcaccaatggccagggccagagccaggaagtgcggggtctgggcgtagtgggccagcacccggagctggcacctggagagagcttcacatatcagtcggcctgcccgctgcccacgccccgtggctccatgcaaggcaactacgagttctacagcaaggatgctgcatcgggccggtggaccaagtccttcctcgtggagattgccaaatttgagctgcgggcggacgtgtagtaccgggcaacacccgcagctggttgaacccgctgcttcactgctggctggtgctgtgtgaatgggcgcagtagctgcggctgctgcctcagccagcccccagcaactgcagctcttgagcctggccgccagcctggctggcactcccactcagtttcctcagcttaagctgttcgcaacgaatgcctgttgtacagcacgccgtttcgatgtcacgcttacctcttgcttaccccccacccctctgtcctgctctggctcaaactgcccagtctcttttccagttcccgctgcctccagccctctgtggtcattgcttgtgcaggcg

SEQ ID NO: 391 - DNA, 461 bp, Chlorella sorokiniana
  unsure (1)..(461): unsure at all n locations; Clone ID: LIB3602-007-Q1-K1-A12
cggattctcaacctgcctctactgggggtaccaggcaaccgaggcagccatctttgcacgcgcgctgtgaggccaaggccgctccgtagtgcggacctgacctgccgtgcatcagccagccagcgccggacacagccgcttcgtgcagccacccaagatcaccacaccttgtgccgcccttgcggctcaccaaacgctgtatcccccacctgtacataccacccgcaattgtaccatcaacgcaatccctctcagccccaaacccccaccccctcaacgcaatgatgatcggatcccctctgaacactggctttccatctccatccctctcttgatgcgaacttgtgtgtgcgtgcgtgtgtgccgatgtgctaaccctgctttgcagtgtcttccgtttttgcgagtgatccctcggtcacgaattgcgctcagcagcagaatgtcaaagatatagcnca

SEQ ID NO: 392 - DNA, 642 bp, Chlorella sorokiniana
  unsure (1)..(642): unsure at all n locations; Clone ID: LIB3602-007-Q1-K1-A2
ggcacattgccacgtggccaacaagcgcggtagcagctggggcaccatggtgaatggtactgacggctgcacggcggccaccaacgtggttgcagcaaaggcgcttgccaagatgcgggcagctggggttgcaggcgacgccgccgcctacaaggccgccgctgccgagctggagaaggccgtcgtaactgtgtatatgcaggccactctggcttacgcacaggaggtgggcgaggtcttgacagatgcccctggcaacccgaccgaggaggagcaggccgaaggatacaccttcttcaggaccattgcccctctggtggcaaaggtggaccgcgaaggcgctgctgctgtggacgccgccttcatggaccccaccactggcatcggcatgcaggncaaggccgcactgcagccagccatggaggcgtactgcattacttgtcgatgatatcggcacctttggcgctacccctcaatgcgacttctgagcgcctgggctggcgccactggtactgctgcgaggcccgtacaagccagcagaccctcaagctccaggaagcattgccattcccctatccttgttggctgcccaaataagcggcataggatcgactgccgtgctcctttgcctacgcaaacgct

SEQ ID NO: 393 - DNA, 681 bp, Chlorella sorokiniana
  unsure (1)..(681): unsure at all n locations; Clone ID: LIB3602-007-Q1-K1-A3
tttcggctagccttaccagcttgtccccatttggtagctcaccgccgtttcatttgtttcccccttccgccccttcctctgttcaagttgcgaggccccattctgccacacacagatgcacacgcccacacacgccatctccaacagacgcatttttccctgccatgccccaccccccatgccaccttctctcctgtcttttccccgctacgtggaagcttttttccgcatgccactccccagtgcttgcgaagatgtcgttcggcctcggctgcctccctgtgccccaactgccttccccgctcctggaccccttttcccattctttcattaccggcccgagtagcgccgctgcctattncattttgcagctcttgtagcctccctctgcctagaagcaacgaatgccgcctcaccgctaggaccctgatgtcccctccctctcgtgaggccccgcgcgcctccatgctcttttgttttttcgcccaacgcgccgtgagcctgcggtcacgcagtacccacccgcgctcgctccttcccggcgagagggccctccctccccaacatacagcaccactgcgcatctggctggcgccgccccccgacctggcgggtcccgcctgcgtggcgctgacctcgggttccccatgttccgtatccttccccaagcttgaatgacaa

SEQ ID NO: 394 - DNA, 287 bp, Chlorella sorokiniana
  unsure (1)..(287): unsure at all n locations; Clone ID: LIB3602-007-Q1-K1-A4
ngacgacccttttctcccgctgcaacaaatgcgcaagactcccaccgattgcttgcatgcccttgcaatcgcccaaagacctctgtccggtgctgccatcggttccttccgcatcagccttcctcagcccatcagccttccagcctgccaagcaccgaataccccatactacccgttctcatccccacgtgcacgctcttcacccatgcctcggcctgcgttccgctcctgctctcaatgctgcatccgcttgcacttgcacgccagcatgtaactacctgtactac

SEQ ID NO: 395 - DNA, 671 bp, Chlorella sorokiniana
  Clone ID: LIB3602-007-Q1-K1-A5
gccagccgctggggcacccagtctgtgcggcggcggcagatgcgctagcggcaggagcggcggctccagctgcgtcggatgctgagctggcggcacagcaaagcaagcagcgcagtgcagcggcctgccagcagcgctatgtacagctgtgtgctgcggctagggcggccggcagcgacgaggcggctgcggcaggtggcaggcagcacctagacgccctgctcgccaggctgcggcagcagctgcagcagctgttggccgccagcggagggggcgccaaggcgctaagcatagtgcagcatgtactgcagcaggcggcggccgccgctgcaccgcaggccgccctcgcggcattgctgcagcgcgagctgcatgccgtgacgccaggcgctccgctgccgcctgccggtgccccgggccaagcagtggatgcggcgccgctggcacaggcgcggcagctaatggccgtggtgcagcagcagtgcggcacggcagcagcacgggccatcaccacacggctgcagcagaccctgccagcatcattagacagcggcgtgccgctagcagcacagacagcgagcggagggctgccgcaacaactctggcctggggcgttgccaaccgagctgccgacggcgccaaacccgcaagcagctggttcaggcacacca

SEQ ID NO: 396 - DNA, 542 bp, Chlorella sorokiniana
  Clone ID: LIB3602-007-Q1-K1-A6
tgcactaaggcacgcgtagatggataatacacatcaacctgaggaagcggacccaggcgcgagtggttcccgcgtggaagttatcagaaggcataaagacaggcctactgtgacgattacacgagagctgctggacgagctgtgcctgaaatacccgcagcacaaagcggccaagatcgtagggtgtggtttaacaaggttcaaaacagcgtgtcgggcacttggcttgtcaaactggccataccgtcgccgcaagagcgtgcacacactgttagaaaatatcgcagatgaaggcaatgcagatgaagtaatggagattcttaaagctgaggacgccgcccttctcagggagcctaccaaaggtctttgcctgaacttcaaaagactgcggcaggctttttacaaagagaagtataaggaaagaaaagcctcaaactgatgatgcagaaaacaatccaatccagctcttgttgttttctttgtcttgctcagatgttcgttacatctttagaacccaagcaacatgttaggcatgcaccggc

SEQ ID NO: 397 - DNA, 439 bp, Chlorella sorokiniana
  unsure (1)..(439): unsure at all n locations; Clone ID: LIB3602-007-Q1-K1-A7
atcaagcctgcccanaagccgggtgtggaggaggccgaggccgcccccatccaccgtatccgcatcaccctgacctccaagaacgtcaagagcctggagaaggtgtgcgcggacctggtgcgcggcgccaaggagaagcagctcaaggtcaagggccccgtgcgcatgcccacccgcgtgctgaagatcaccacccgcaagtccccttgcggtaacggtaccaacacctgggaccgcttcgagatgcgcctgcacaagcgcctgatcgacctgcactcccccgccgaggtggtgaagcagatcacctccatcagcatcgagccgggagtcgaggttgaggtcaccatcgccgacgtgtaagcagccatttcagctgtggaagctggtcgcacggtgcgcccctgaccgccgctggcgggcgggtcggcccttcggagcc

SEQ ID NO: 398 - DNA, 521 bp, Chlorella sorokiniana
  unsure (1)..(521): unsure at all n locations; Clone ID: LIB3602-007-Q1-K1-A8
accactcacaccccaacccaagccccgggcagccccttgccactgccccacaaccgcaaccgcaacccaacccgccgccagccctgttgagccgggctgcggcggggccgcaggccccttgcctccccgcaatgcctcccacaccaacaacgntcttgaaacccaacagcaccgctgaagttttcaatgccggcccgcctcttccctcggccccctttcagaaaatttgcacgccccatgcccccacccctacggcgttgcctccccgttttgccggcacagccggttttgagccaaacaaccggcctgcagttcctgccaccccgtataacatctgtagcagttcggcgtcggccccttaactattctttgaacaattgatccccaagtcgcctcgcaccgttggagcaccgctgcttgtgcaccttcccttcgtccctttgtgtttccaacagcattactcaagatcagttatcaagtcacatgtaagcccaccacgctcaaaaaaaaaaaaaanaaaa

SEQ ID NO: 399 - DNA, 561 bp, Chlorella sorokiniana
  Clone ID: LIB3602-007-Q1-K1-A9
tacagcctccggtccctgcctgcgctgtggagcccgacacgccggcgggcggcgccagctggcagacgcgccagcgcctcggcaggagcagcagcagcagcagcagcagcagcagcagcagctgcccatggagggcggggacgaagctgtgccgctgctttcggacagcgacagcggggggttgtccaggctggggctgcgccagcgacagggccgcggcgaggcagcagagcgctctgcccgttcatcataagtaagctgccacgcgagccgggttgcccctgtggtgcggccgaccagccgcaggctccgacatgttttgctcccctgtacgtctcccttcgccctgcctctcttccacactctacactctgctctaacctcttcctctcttctctgtcttcccctcttttcactcccgcctccactctctgccctcctcctcagctgaactgcttgagggtgccccactgcatgctcccgagctcatgcattgtgcactgcattgcatcttgcccagcgcctaacaacgcgggcaagccacgtgtggcatttacagcc

SEQ ID NO: 400 - DNA, 419 bp, Chlorella sorokiniana
  Clone ID: LIB3602-007-Q1-K1-B1
gtcgacccattgctcggcggctgccgccgtcagccgacactgcgcaggctggaccagctgcttgcaccattttgcgatgctgtcgtagccccgcagcgacagacaccccgttttggcaccaccaaccccttctgttgttttggcaccaccaacctccgtaccaccccacaccacaccacccatgatagactaatgctgcttctgagttggatgccaccgcccctcttgacacaacccctccgtccaaacgcatgtgcgccttttatattcacgctgtcggcgcagcgctgagcgtcccgtgctccctcccaacccctccacaccaaccaacccttcaaccttgtgtaaaacttgggcggcaaaaaaaaaaaaaaaaaaataaaataaaaataatttatttttttttttttattttattt

SEQ ID NO: 401 - DNA, 492 bp, Chlorella sorokiniana
  unsure (1)..(492): unsure at all n locations; Clone ID: LIB3602-007-Q1-K1-B10
gcanaagctcggcccatcaccttacggggacagcaaagcggacgagcacatggggcggcggccggcgcggtgctaccgccagatcaagggcaagccctaccccaagtcgcgcttctgccgcggcgtgcccgaccccaagatccgcatttatgatgtgggcgccaagaaggcgggcgtggacttcttccctcactgcgtccacctggtcagctgggagaaggagaacatctcgtccgaggcgctggaggcggcccgcatcgcggccaacaagtacatggtgaagaacgcgggcaaggacgccttccacctgcgcgtccgtgtgcaccccttccacgtgctgcgcatcaacaagatgctttcgtgcgccggcgcagacaggctgcagacaggcatgcgcggtgcgttcggcaagccatttggtgtgtgcgcgcgcgtgggcatcggtcagatcctgctgtccatccgctgcaaggacacgcacgctgcggtggc

SEQ ID NO: 402 - DNA, 491 bp, Chlorella sorokiniana
  Clone ID: LIB3602-007-Q1-K1-B11
aacagttccgcatgaccctgggtctgcccgtggccgcggtgatgaactgcgccgacaacagcggcgccaagaacctgtacatcatctcggtgcacggctggggcgcgcgcctgaaccgcctgcccgccgccgcccccggcgacatggtcatggcgaccgtgaagaagggcaagcccgacctgcgcaagaaggtcatgcccgcgattgtggtgcggcagcgcaaggcgttccggcggaaggacggcacctacatctactttgaggacaacgcgggcgtgattgtcaacaccaagggcgagatgaagggctccgcgatcaccggccccgtggccaaggagtgcgccgacctctggccccgtgtggcggcagcagccaacaccattgtgtagagcggcggccgtccggctgggcgtcgcggcagcgcggaccacactgcagtacccaccgcctgccgcgctcccggcgcagcatgctgtaatgcacatccagcg

SEQ ID NO: 403 - DNA, 602 bp, Chlorella sorokiniana
  unsure (1)..(602): unsure at all n locations; Clone ID: LIB3602-007-Q1-K1-B12
aacaggnaanacagggcagcgctggtgcgtgcgtcggagcgcgggcacacgcacattgcgtgcctgctgcttcggcagctggacgacaacatttgcgctgacgcgctgcgtgtggctgtggaggctgggcaggcagcgctggttttcgccctgcttccacacgtgcttcaatgggaagcgcggctgatgacttccgagctgcgcacgctgcgcatgttcatccccatgctgcaccaggactgccagagactggagcagcaggcaggagctccgctaaacgcgcagctaggagacgacgatgttgtaggcatcccgctcgagggcagctcggggaaacagctgcgtttcaacgtacttttcaagctgctgaaaaagtggaaggagctgcagtggtgggcagaggccgccccagcgatgcagcaggccggcacagctgcagctgcaaccgagatccaggatgaaaaaggtgctgctgcgcttgtcccttctgaaagctgaatgcttattcgcagtgcgacgccgtgtttaaaacaaagtaacgatcagaatggactgtgcctgcaaccatagtcagccaaccacctgtgtaaagcaagcattac

SEQ ID NO: 404 - DNA, 175 bp, Chlorella sorokiniana
  Clone ID: LIB3602-007-Q1-K1-B2
cccgcattggcagcgccggcgtggtgcgccgccaggctgaggatgtgtcgccggtgcgccgcgtgaaccaggccatctggctgatcaccaccggcgcgcgcgagagcgcgttccgcaacatcaagaccattgcggagtgcctggtgtttcgagctgatcaacgcggccaagggca

SEQ ID NO: 405 - DNA, 255 bp, Chlorella sorokiniana
  Clone ID: LIB3602-007-Q1-K1-B4
tcttccggcaggcacagcacagcggcagccaaggatgatgtctctctctgtcccgtgtgcaatcaattaacccaccgacccagccattcctattctagctgctgtcccttgtctcctccctcaccctcccctgctgtttttgcccccgcttttcacatcgcgcatttgttatgcgggcattcgccggtgacctacccagccaagctgcctgcgccattcgccggcagccttcctgccctgtaatcagctcaacat

SEQ ID NO: 406 - DNA, 631 bp, Chlorella sorokiniana
  unsure (1)..(631): unsure at all n locations; Clone ID: LIB3602-007-Q1-K1-B5
cgcatcacccgcganaaggtcaacnnggcgccaccgtgaacgtgggcgggtggacccctccaaggtggtnggtcannccaagctgaagctggacaagnngaccggcgccagcttgctttggagcgcaagnncgcgcgggcaagggctctggtctcgacaagggcaagttcancggaggcggaggggggngggcatgngagaacgtggactaagcgccacgcccaccccgcagcagccagcagcagcagcagtgttgaggccgcgggcgggccaccgacgccagtgcggctcgggtggcggcggcccgacggccccggtgggggcagcctctccgtgtggctgtgcgctccaccggcagcggcgcagcctcggcagcgcttggaagcatggaggctcgagaggcccttgctccggcgcggcccagcggcgcttgttttttgctttgtttttttcgcagcgcgtcacacggcgggcgctggcgcgcagtttgctcccttcttagtttgtgcccagctgcccctggcgcttgtcgttctttgttagttggacccctgaaaaataatngttttttttttttttttttttttgntttnttttttttttttgtgtggtgttttnnggtttttttttt

SEQ ID NO: 407 - DNA, 195 bp, Chlorella sorokiniana
  unsure (1)..(195): unsure at all n locations; Clone ID: LIB3602-007-Q1-K1-B6
gctttcgtgnanagnataacaccctgccatcgctcccttgctacgcctcccccgcccgtgcgctctctgcatcggtcgttctgtttgcctgcgggcgcgcttgctcccgggcgccccgcagattttgcatctgctcgctcgtgtgctgtcaggagtcagcggttgtatgatttcctgttgtaattcgtaacgttc

SEQ ID NO: 408 - DNA, 329 bp, Chlorella sorokiniana
  Clone ID: LIB3602-007-Q1-K1-B7
tgaaaaaaaaaaaaaaaaaaaaaagaagaaaaaaaaaaaaaaaaaaaaggaagaaaaaataataaaggaaaaaaaaataacaaacacaaaaaatacaaaaaaaataaataattataaaaagtgggctgaaattcatataaaggtgggccatctttttacaccgtcctttactgggtaaaaccctgtttttttccggggtgcgtactttttgtaccccgtccccttttttccagctggcgtatttgcaaaaaggccggcttctgatagctttttccaacttttgcaacattcctgtttggcgaatggtgcgcttttctgtagagggggct

SEQ ID NO: 409 - DNA, 100 bp, Chlorella sorokiniana
  unsure (1)..(100): unsure at all n locations; Clone ID: LIB3602-007-Q1-K1-B8
naaaaaaaaaaaaaaaaaaaaaaaaggagaaaaaaaaaaaaaaaaaaaaaaaaaaaaaaaaaaaaaaaaaaaaaaaaaaaaaaaaaaaaaaaaaaaaaaa

SEQ ID NO: 410 - DNA, 420 bp, Chlorella sorokiniana
  unsure (1)..(420): unsure at all n locations; Clone ID: LIB3602-007-Q1-K1-B9
gaaaaaaaaaaaaaaaaaaaaacggggggggggggagaaaaaaaaaaaaaaaaaaaaaaagagggagagaaaaaaaaaaaaaaaaaaaaaaaaagaaaaaaaaatataaaaaagaaaaaaattaaaggggggggtgggttttgaggaggttcgaactttttttttggttggcttgaaccctgttatcttttttttggggtggggggtgggggtacattccactaaccccccgttttccccctttttatgggggtaacccgggtctcccttagtttaagtggggtggccccatttccggttgtggcgggtgggttttctggcttttgggccccgtggtttggctttttgcgcgcttgctgtccgttcttcttgtggggggcgggcgggggggcnctcttttttcccccctgtgttgggggt

SEQ ID NO: 411 - DNA, 176 bp, Chlorella sorokiniana
  Clone ID: LIB3602-007-Q1-K1-C1
gaaaaaaaaaataatcctggggggggaaaaaaaaaaaaaaaaaaaaaaaaaagagggggaaagggaaaaaaaaaaaaaaaaaaaaaaaaaaaaaaaaaaaaaaaaaaaaaagaaaaaaaaaaggaaaaataaaaaaaaaaaagaaattttttttttatattttttaaagggggggg

SEQ ID NO: 412 - DNA, 658 bp, Chlorella sorokiniana
  Clone ID: LIB3602-007-Q1-K1-C10
gctttcggttcaagccggtctgcgctcgcagcggcgccactcaggacacctggggaggtttccccaacgattgctacaggaagtgcgccaatgccgcccatgactttggtgtggattgggtgaagggccactactaccgcgtgcccaagtactgcaagaccaagtggctggcctaccccgtggagtgctccacttgctccggctactactaggcaactagctgagcaaggcagggcagcctgaaacaggctcccatgtgccgacgctgctggcggcatgaggcacagcaccaagaaaggcagctttcaagggcggcgttgtgctggagcaggcatggccgccagtctggagcgccagctacagcacgttgccgcgctcgatggccctgccaaccagcctcgacgcacagctgaagcgctgcaacacacccgtgacaaaccgtgcaacagcagccacacactgcgttgcttgaaccccctttccgtgacccaagacccgatccattccgtgatctctcccatctgcaacccagcacactcccccattccctggaccccatgctgacccctcccccttcctgaccccgaacattccgatgaatgaaaacaccccccgccgttggcttgccctaacatgttccagatgtaagcaccagtct

SEQ ID NO: 413 - DNA, 656 bp, Chlorella sorokiniana
  unsure (1)..(656): unsure at all n locations; Clone ID: LIB3602-007-Q1-K1-C11
ggnaggcacgttagtgctgagggcgccagtgaaaaggtgttcgtgcggacggaccgcacgcatgtgctggacctcgcgtccacggccaccgtggccgatgtgaaggccgccatcgaggcgcgccagggcatccccgccgaggagcagcgggtgatgttcggcggcaagcagctggaggacggcctgtccctggaggcttgcggcatcagcgatgactcccagatgtacatcctgatgcgcctgctgggtggtgccaagaagcgcaagaagaagacctacaccaagccgaagaagcagaagcacaagcacaagaaggtgaagctgcgggtgctcaagttctacaaggtggacgacagcggcaaggtgcagcgcctgcgcaaggtgtgcccccagtgcggccccggcatcttcatggccacccacttcaaccgcgtgtactgcggcaagtgccacctgacgtacgtgtacgacaaggagggccagaccgcctaagcgccccgctcccccctgcggatgcacgcttagcagcagcacacgcggcgggtgcgcccggcatgccggcacaccagccacggagcggcggngcgtccctggcagcggcgcagcgcctgcaagcccttctgttgtgttctgtgccgctgtaatacccctgctgc

SEQ ID NO: 414 - DNA, 624 bp, Chlorella sorokiniana
  unsure (1)..(624): unsure at all n locations; Clone ID: LIB3602-007-Q1-K1-C12
atggccnganacctgttcaagctggtgatgaagtaccggcccgaggacaaggcggccaagaaggagcggctgctgaaggaggcggaggcgcgcgaggctggccaggaggttgagaagaagaagcctgtggtggtcaagtacggcatcaaccacatcacgcagctggtggagagcggcaaggcgcagtgcgtggtgattgcgcacgacgtggaccccattgagattgtggtgtggctgcccgcgctgtgcaagaagatgggcgtgccctactgcatcgtcaagggcaaggcgcggctgggcaccgtggtgcacaagaagacggccaccgcgctggcgctgacggcggtgaagaacgaggaccagcgcgagttcgccaagctggtcgagtccttcaagaccatgtacaacgacggcccccgcgtcagctggggcggcggcatcatgggccccaagagccaggcggcgcagaagaagaaggagcgggctctggccaaggacgccggcctccgcgtgtaagcgggcagcacccacctgccgctcaccgcgcgccgggccgggacagcccggccagcanggtcggcgtgccgcgcgtgggcgcccggcgccgcccggtgttgacagccg

SEQ ID NO: 415 - DNA, 637 bp, Chlorella sorokiniana
  unsure (1)..(637): unsure at all n locations; Clone ID: LIB3602-007-Q1-K1-C2
gngctgcccaccagccaggcactgcacctgtcggccacggaggacctgttgatagggcgggccgacagtggcatgtgctggctattcgacctctcagaacgactgggctgggcggacggcagccacccaggtagctgggttagcgcgaagcagagagggatgcagcttggttcggcggcggcggcggccacggctggcggcgggcaggaggagagagagggagactgggaaatggccgagggcatcgaggaggaagcagagggccacttggatgagcgcgactttgaccgcgcgccgctgccgctgggctgcatcggcgcgccctttgaggtctggtgctcaaatggagaggaggcgccgccgctgcactggctgccgcgcgcggcggcgtggctgtcgcacagccaccagctgctggccctgggcgggctggagctggaggacaagcagcgcctgttcccggcacacaagcaaggcagcccctaccccagcaacgcgctggtggtggcgagcctgtgccggtggtaggaatggcggtggccgcggccgagtggcgccagtgagcttcgtgcatgccagcgggctacattgcgcatgatgtgattgcatgtgatatgggtgttgatttgcccttncc

SEQ ID NO: 416 - DNA, 511 bp, Chlorella sorokiniana
  unsure (1)..(511): unsure at all n locations; Clone ID: LIB3602-007-Q1-K1-C3
cttgtcctcacttacaggctccacgcgaaggagcgtctgagtcgggacaaagatggcgaccgctatcaagcctgcccagaagccgggtgtggaggaggccgaggccgcccccatccaccgtatccgcatcaccctgacctccaatatcgtttttagcctggagaaggtgtgcgcggacctggggcgcggcgccaaggagaagcagctcaaggtcaagggccccgtgcgcatgcccacccgcgtgctgaagatcaccacccgcaagtccccttgcggtaacggtaccaacacctgggaccgcttcgagatgcgcctgcacaagcgcctgatcgacctgcactcccccgccgaggtggtgaagcagancacctncatcagcatcgagccgggagncgagggtgaggtcaccatcgccgacgngtaagcagcctttttatttgtttaatttggncgcacagaacaccccttacctttttttgtgggcgggtcggcccttctgagccgcggtctt

SEQ ID NO: 417 - DNA, 150 bp, Chlorella sorokiniana
  unsure (1)..(150): unsure at all n locations; Clone ID: LIB3602-007-Q1-K1-C4
ntaaaaaaaaaaaaaaaaaaaaaaaaaaaaaaaaaaaaaaaaaaaaaaaaaaaaaaaaaaaaaaagaaaggaaaggggtggcgcgatcctaaaaggttcccaagtctttgctatccctgtgcttggcgcttgtttttatacttgttcttt

SEQ ID NO: 418 - DNA, 587 bp, Chlorella sorokiniana
  Clone ID: LIB3602-007-Q1-K1-C5
cgctttcggccggcgcctggcccgcaccaagcggctgcccgcagtccacgggcggcaaggcgccccgcaagcagctggccaccaaggccgcacgcaagtccgcccccaccaccggcggcgtgaagaagccccaccgctaccgccccggtaccgtggcgctgcgcgagatccgcaagtaccggggggggggggagctgctgatccgcaagctgcccttccagcgcctggtgcgcgagatcgcccaggacttcaagaccgacctgcgcttccagagctccgcggtgctggcgctgcaggaggccgccgaggcctacctggtgggcctgtttgaggacaccaacctgtgcgccatccacgctaagcgcgtgaccatcatgcccaaggtacattcttttggctcggcgcatccgcggcgagcgcgcgtaagctgcgcgtgcgcctcctgcgcatggcatcaacacggccttgcagtggttgggctggtctgtctggaggcgcagtgccagctcgctggcccacagcaccctctcaggctgctgtttagctcttgcgagggccatacagctttggatcttttgacactcttc

SEQ ID NO: 419 - DNA, 314 bp, Chlorella sorokiniana
  unsure (1)..(314): unsure at all n locations; Clone ID: LIB3602-007-Q1-K1-C6
cctgcacatttctaaactcggcggtggggcctctctcaccccgctgctgccttgttccccgctccgncactgaaaccaaccgattgcaccaccgtcacaggctgcgcgccagcctcctctgtcaatttgctgacacctaaaaaaaaaaaaaaaaaaaaaaaaaaaaaaaaaaaaaagggggggggggggaaaaaaaaaaaaaaaaaaaaaaaaaaaaaaaaaaaaaaagggggggaaagattaaaaagagcaaagttaaagaaaagggagataggnaaagatttaaaatattgtttaggggganaaaaaattga

SEQ ID NO: 420 - DNA, 557 bp, Chlorella sorokiniana
  Clone ID: LIB3602-007-Q1-K1-C9
tgattgattgtcattgacatttcagatctcgccgctctgggcccttgctgcacaacctctggtgctcgcaacctgcctcctctcgttgctgctcctcaccagcctgcggcttgctggtgtgactgaggtcacgctccaggcgccagccctccgcagtccacccgcccacaatggcgtacctgggcagctcctccaaaacgtggcggcgcatcgtggatgccacgagccgcagcgcgcccaccatgctggcctttgccgcggcttgtgtggcggtgccctggttcctcggcgaccagcaaggaggcggccaagggggagagcgagctggagaagaagctccgcagccggcagggcatccaggcgcagatgctggccaaggcgcagcgcgagcggctgcaggtcatgctggatgaaatcaaagaccgcagcgcgcagagcgaggcccggtaccgtgccgcgctggacggccaatccctgggcacacacagccactgcagctcagcaggggccgtggccatcaagcgaggcgatgagagcggggcagcgttgtcatctca

SEQ ID NO: 421 - DNA, 462 bp, Chlorella sorokiniana
  Clone ID: LIB3602-007-Q1-K1-D10
acgtcacccttcatcaaccctcgacgcgacgccatgccacctgccacccatccactcaccgtccctccgccacaacctctgccacccactcaccacccatcacccgctcaacgccctccatgcaccatcctccccatccaccaaatctgccaccccaaacgcacgtccgccgctgcaccggggggggggccctcacccgcacccatcttccacccgccacctttcctgccgctcaccgccgcacatcctacctcccacacctcactccatgtccacccttcacccgcgcttcacacagcggctgctgccatgcaaagctgctgccaaacccatccatcatgctcgcacacccactcacccacacgtccaacgtatccagacccattttcaaggcccgactgtacagtgcctttttgcgtccttatgccgatctggttccaggacttagtgtgtaacaaaggg

SEQ ID NO: 422 - DNA, 473 bp, Chlorella sorokiniana
  Clone ID: LIB3602-007-Q1-K1-D11
cctgtctctcttcccgcctggtgggcgcctcctgacccctcctggttttcccccagcgttcgagtgagatgccttcttttctccccttgtccttgtgcactccctcttcctcccttgccgcaccgcaaaatttgctgctgttggagattttacccgcgccagctgccgcccgggcggcggaggggctgtcccctccccctcccgcctcccactgctcatccgctgtacgcctgtgcgtgatttttgggggagcgcctctgcgggtgccacgttcctggtcctgcctccccggcccagcacgccgccgtcttatttcatgccgtaaagggccccaaccccggcccccgcgtctcactacctaattacctatggcccgattgccgctcagatatgcccagctgggcacaaggggctttctgcacacacacacacacaccacctgtaccccagcccctccctgtaaccttggcgag

SEQ ID NO: 423 - DNA, 608 bp, Chlorella sorokiniana
  unsure (1)..(608): unsure at all n locations; Clone ID: LIB3602-007-Q1-K1-D12
atttcgcacatgagttgggccacagctttggcagcagccacacgcacgatttctgcggcgacaaggcatggggtgaccccaacccgatagactactgcattgagaccgacaacaattgcgtgcaaccctgggtgggcgtgctgcccaggtgcactgcgccggttactgcctttggcggcggcgcaggcaccatcatgggctactgcgacgaaattggaccaggatttatcaagaacatcgccatgacgctcggcctcaaccacccttgcggcaacaaaccggagcgtgtggtgacggctatgaaagcagttgtgcagcaaaagcagcgggcgtaccccgcctgcttcgcgcccaagccaacagctgaacctgctatctttgtgtcgaacaaggcggccaacgcggccgccaacgccagtgctgggctgccctcgggcaccgcagctcggtggtgcagcctgactagcactgcactcgcgctctcgttcgccgcattgctcatgttactgtgcatgtgaagcattcgtggtgttgcctgcatatgttgctgttgcgttttggcagttccccgatatgaaacggccacgactgaaaaaaaaaaaanaaaa

SEQ ID NO: 424 - DNA, 357 bp, Chlorella sorokiniana
  unsure (1)..(357): unsure at all n locations; Clone ID: LIB3602-007-Q1-K1-D4
accccggtctggcgctggggggcgagcgccttgcgggcgagggcaccggggggggcctgggcatcaacgacccctccctgttctgggccatcancattgtgttcaccatcgtgtggggcgtgttctacgtgtccacccgtttgattttcgctgtgtttgaccnctagacgggggggggggggggtctgaccctttnatcgggctctcagcattaggcggtccttgcggtttagtcctactgtcctgccctgcatatttctgttcttctgttgcatcttgtccgccttgtgtgctctatatttaaatttcatcttgtgaagagaactttctatgttgtacccttttgtgatatatctt

SEQ ID NO: 425 - DNA, 166 bp, Chlorella sorokiniana
  unsure (1)..(166): unsure at all n locations; Clone ID: LIB3602-007-Q1-K1-D6
aaaaaaaaaaaaattccgggttgggggagaaaaaaaaaaaaaaaaaaaagggggggggggaaaaaaaaaaaaaaaaaaaaaaaaaaaaaaaaaaaaaaaaaaaaaaaaaaanaaaanaaaaaaaaaaaanaaaaaaaaaaaaaaaaaaaattttttttttttttaa

SEQ ID NO: 426 - DNA, 520 bp, Chlorella sorokiniana
  unsure (1)..(520): unsure at all n locations; Clone ID: LIB3602-007-Q1-K1-D8
actgcggccgnggctcggtggggggtgtgctcaggcaggcggctctcaggggggacgccgcgcagtagctgaccgtgcaccgccggctcggcatggcgtttgatgcagctaggggcctgctgtacctccacgcccgaacgctgcccattgtgcaccacnatttcaagagggcaaagttngggggggatnatncntggcacctgaaggtctgcgacttgaacctgagcgccattttgatgcatcagtctggaccggagcaagagggctcgtgcgccgctaatccgatgtggctttgaccagtagggcttcgtcaggagccggcccccacgaaagcagacgtggnnggcctgggggccgnccctgttttagcttttggtggtgggggcggcctngggtccccggganccccgtccgccacccccgggggtggcctggggggccaggggccctcaatggccggtccctggcgccgngtgcccggggccccgggcgccggggcggggggggggggggggggggg

SEQ ID NO: 427 - DNA, 645 bp, Chlorella sorokiniana
  unsure (1)..(645): unsure at all n locations; Clone ID: LIB3602-007-Q1-K1-E1
gttttcggggacacgcgggcgggcaagcaacacggccacagtgaccacccccggcgccaacctgtacctctcctggtccccagactcacactatgtggccgtggccaaccgggacgatgttgtgtccatcattgacgcacgcaagatgaaggtggctcacaagtaccccttcaagtaccaggtgaacgacctggcctttagcaaggacggctccaagctctacatctgcaccggcaacgcgggcggccaggttgaggtgcacagcttcccagacatgcagagagtgcacgcactcaaggggcacaccgccgccgtgtttgcgctggcgtttgaccggcagcagcgctggctggccaccggcggcgcggatgcggtgacgtgcctatgggacacacaggacttcatctgccagcgatcatacataggcatggactaccccgtgcgcagcctcagctncagccacgactcgcggtacctggccatcgcgggggagcagccggtgctggacgtggagaaattggagacgggggagagcctggggcggttcgcgctgcgctactcgccggaggatgtggcgtggaacccgcggcacctgatgctggccagtgcgggcggctatgggcgggacaaccagggcgtggagta

SEQ ID NO: 428 - DNA, 656 bp, Chlorella sorokiniana
  unsure (1)..(656): unsure at all n locations; Clone ID: LIB3602-007-Q1-K1-E10
ggcgagagggccgctcccagctgcagcgcgacatgcgggagagcatctacgccaccattgcggacaccaacaaggtccgggtgaccttcccggaggccagccagattgcggaggagctgctgaagacggagtttgacaccgcgcgcatcatctacaaccgctttgtgtcggccatctcccagaagcccacgatcgccaccgtgctgtccccggacgcgctggagaagacggcggcggagggcgcgcccatcgagcagtacgagattgaggggcccgaccgcgcggagctgctcatggacctggccgagttccagctggccaccacgctgtacaactgcatgctggagaacaactgctcggagcagtcgtcgcgcatgagcgcgatggagaactcgaccaagaacgcgggagaaatgctgggcaagctgacgctgacctacaaccgcacccgccaggcttccattacaacggagttaatagagattatcagtggtgccaccgcccttgctggctaagcgctcagggaacgacaaaccagtcaaggcggcaggagtctgcgccacttgcggaccaagcaggggggctgaagccnccagccgcggtgcagcggcctacggcggccgccagctggcagntggcggggccctttttccatg

SEQ ID NO: 429 - DNA, 236 bp, Chlorella sorokiniana
  unsure (1)..(236): unsure at all n locations; Clone ID: LIB3602-007-Q1-K1-E11
nganagctggncgaccaattcgccaccggccgcctgtacgccgctctgtcctcccgccccggccagtgcggccgcgcggacggctacatcctggagggccgcgagctcgagttctatgtgaagaagagcagaagaagaagggcaaggctgccgcgtaaagcgccgcctagcgaggccgcaacccccgggtgccacttgctggataggatcaagttgtaaggcaccaactcgcagag

SEQ ID NO: 430 - DNA, 250 bp, Chlorella sorokiniana
  Clone ID: LIB3602-007-Q1-K1-E12
aaaaaaaaaaaaaaaaaaaaaaaggggggggaaaaaaaaaaaaaaaaaaaaaaaaaaaaaaaaaaaaaaaaaaaaaaaaaaaaaaaaaaaaaaaaaaaaaaaaaaaaaagaaaaaaaaaaaaaaaagggggcggccgtttttaaaaggctcacaattttacttcacccgtctttcctaaggtattaacttttatttttggggggcccctcaatttaatttccctgggccggcttttaaaaacccctggct

SEQ ID NO: 431 - DNA, 89 bp, Chlorella sorokiniana
  unsure (1)..(89): unsure at all n locations; Clone ID: LIB3602-007-Q1-K1-E2
ggcacctgggcgctccgcccagccacactttgtcccctggttggtggtcaacggcgtggccattggcagngattacgataagctcttcc

SEQ ID NO: 432 - DNA, 567 bp, Chlorella sorokiniana
  unsure (1)..(567): unsure at all n locations; Clone ID: LIB3602-007-Q1-K1-E3
tggcaaaggcaatgcccgatttcctggggaattggtaccccgcccgacacatcgcctacggcaccctgtttggcgcgccgctgctgaacgacggcatggtgctgtcccgccgcgattacacgtacacggagcccaccattacgtacaacagcgcgattgtgggggcgctggcggggctggccgagtactatgatgtgaagccatggaagggtgagctcaaggaggtgaaccccgtggactggcgcccctacctgctcaagaactgagccgctcccatgaactgtgctgctggctagccccggcgcatgccaggaggtcagggagctgaggcagcgccagcgcacggcagctacggtagctgagcatgatgccactgccagtggccaatggccgnccttggcatgcgagccgcggcttctcgctcaaggctggaaggccttctttttgacagaagctcccactctaattgttgtatngnngatgcattgcaatcgttgtgttaagcactgcctgcagttatctgtgtgcccaaggcccccagttgagagctgccacacgattggctat

SEQ ID NO: 433 - DNA, 134 bp, Chlorella sorokiniana
  unsure (1)..(134): unsure at all n locations; Clone ID: LIB3602-007-Q1-K1-E4
cacgctgtccgcagggaggggcgnnaccgcgtcatnnctacttcaagtacccgccggcgacgcgnatggnagnacctctctagcggcgagnaagttcaaaacgtgggctgcacnngcctccgnannnatcctgg

SEQ ID NO: 434 - DNA, 405 bp, Chlorella sorokiniana
  unsure (1)..(405): unsure at all n locations; Clone ID: LIB3602-007-Q1-K1-E5
cccatcttccgcgctgngctgcagaaggccgctgggcgatgcttggcgtggccggcatcctggtccccgcggagctgacccgcgtgggcgtgctgaacgtgcccgactgggccgaggccggcaaggtgtacgccgagagcgagaacgccatccccttctcctccctgctcatggtgcagctgtgggggggggagtttgttgagatcaagcgctgggaggacatcaagcgccccggcagccaggccgagcccggcagcttcctgggctttgagtcgtccttcaagggcaccggcatcagcggttaccccggtggncccttcaaccccttcggcctgggcatcagctgctaggaggtcatggttgacttgnngtggngcgagatccgcaactgtcgtcttgtcttgg

SEQ ID NO: 435 - DNA, 323 bp, Chlorella sorokiniana
  Clone ID: LIB3602-007-Q1-K1-E6
cgtgcagggcctggtgccggcagtcccccctggaaaactggctgaccaccttgctgagccgtctgtgaacaacggcttcgcgtccgccaccaagttcctgcccctggcttgaacgccgtcgtcaacctggagcgacctgggcatcccatattaacggcggccagccggttttggacaagcacacacaacatatgagattcccaacctccctgcgcactgcttgtaacaatcctggctccctcttgtacccttgacccgcactcgggcgtggatatgtaacgttccgcgggaaaaaaaaaaaaaaaaaaaaaaaaaccacactc

SEQ ID NO: 436 - DNA, 94 bp, Chlorella sorokiniana
  Clone ID: LIB3602-007-Q1-K1-E8
tcccggtcgccccgctccgttgatctataaaaaaacgaaagaaaaaaaaaaaaaaaaaaaaaaaaaaaaaaaaaggggggctttttaggggacc

SEQ ID NO: 437 - DNA, 389 bp, Chlorella sorokiniana
  unsure (1)..(389): unsure at all n locations; Clone ID: LIB3602-007-Q1-K1-E9
cctttgcaccacaacccctnagccgggagggtcagtgcaacnncccaaccatcagccgtgcggaccgtggatacnnccccgttgcacccannatcctcccctgccagaaaaagcgcgcntnngctctcacnngcccacannnttcaagctnnaacacttgnacnncctgcactttttttgctctgcccnnataatcccnnctccgtcaatgaggggggggggggagtactgcnnccttctgcacccttcatnntttgcgcactggcagcagttttgcccttgatgctttctcaattcgcgagcgctttcgatnccgtctgtccttttgttctcgtggtgagtgttccnttttttgccccggctcctcctaccatgtgtgttctgtgggt

SEQ ID NO: 438 - DNA, 506 bp, Chlorella sorokiniana
  unsure (1)..(506): unsure at all n locations; Clone ID: LIB3602-007-Q1-K1-F1
ggtcgacccagtgtccgcgtcacccccatgcgcacggnggtcatcattcgtgccagcgccgcagaatgtgctgggcgtcaagggccgccgcattcgcgagttgaccagtgtggtgcagaagcgcttcaagttcccggagggctctgtggagctgtacgccgagaaggttgccaaccgtggcttgtgcgccgtggcacaggcggagtccatgcgctacaagctgctgggcggcttggctgtgcgccgtgcctgctatggcgtgctgcgcttcgtgatggagagcggcgccaagggctgcgaggtgattgtgtctggcaagctgcgtgcgcagcgcgccaagagcatgaagttcaaggatgggtacatggtgtcgagcggcaacccggtgctggagtacatcgacttatttactttccatgtgctgctgcgtcagggtgtgcttgttatcatagcccccatcatcaattattgtgttttgactggcaaggttggccctcgtacccctc

SEQ ID NO: 439 - DNA, 643 bp, Chlorella sorokiniana
  Clone ID: LIB3602-007-Q1-K1-F10
actgccctcacgccccacagcgcaaccctggcgtgctgtggccatggtcgtggtggcggcagacgcaggaagagaagcaggagcagcagcggcaggcggccatggcacaacagaaggcgcaggagcaggcggccatggcgcggcggaaggcagaggaggcggcgcagcagagtgagatgaaaagtcggctggactatgagctggctatggcacagcacaggaagaaccaagagatcctggcccggatgaggaagcagagagaggaacgccagcgcgcagccgcagccgcgccccgcgctcccgccagaaagggcgctcccccggacccgccacccagcggcgcctggccgcccgccccaccagcaccagtgcccggccccgccgacgcccgcgctgccgcagcagaggcgagtgcagctgccgcaaccgcctgggcatccgctgcggtggggcacgaggcggctgccgaggaggccgcaaggcgcgccgacgctcagccggcggtgcagcaggcggaggcggcagcacactgggcgcgagcggcggctgcctggcgcgcagcacacgacgcggtggaggcggccctgcaggcagacccagaggcagaaagagtgcagcaagctgtggcggcagtgaagcagta

SEQ ID NO: 440 - DNA, 532 bp, Chlorella sorokiniana
  Clone ID: LIB3602-007-Q1-K1-F11
tgaaaaaaaaaaaaaaaaaaaaaagaggaggaaaaaaaaaaaaaaaaaaaaaaaaaaaaaaaaaaaaaaaaaaaaaaaaaaaaaaaaaaaaaaaggggggccgttattaaaggatccaaactttacatacacttaacttggggcggccctgttcttttgtttcccagtctttctcaaccccattctttctcggccggttgggttttctttctttgggtccccctaaaatccttttctttgcccccccttttttccaccttgcggcatttggaaactttttccgtttccccttttttttagtttgcccgcccttcccttttttcccaattgttttataacctaaatggccaatgggactccccttttccacggtttttaagcccggatggggtggtggttcccccctttttgcccgttttttttgccgggggtttgggggttcctcctttggtttcctttcctttttttctcgccctttccgccggtttttcccgtttttttctatttttttggctcccttttgggttttttt

SEQ ID NO: 441 - DNA, 423 bp, Chlorella sorokiniana
  unsure (1)..(423): unsure at all n locations; Clone ID: LIB3602-007-Q1-K1-F12
ctgctgtaggcaggatctgacctaccgttttgagattgctttggccctgtagcggcaactggtgcttcgtttgtttgcttcttttcctcctgagcaacttacttcatgtcaagcaggccagttcaaaaaaaaaaaaaaaaaaaaaaaaaaaaaaaaaaaaaaaaaaaaaaaaaaaaaaaaaaaaaaaaaaaaaaaaaaaaaaaaaaaaaaaaaaaaaaaaaaaaaaaaaaaaaggaggggcccttaaaaaaaaatccaatcttacgaacccttacaaccgaagaaataaaaaaactttagggacaccaaaattgaatccacttggccgacattccaacatttgcaaactggaaaaaacccgggtatgccaaaataaatcgcccttacaaaaatccccttttnccgaatgggaaaaaaaacaaa

SEQ ID NO: 442 - DNA, 592 bp, Chlorella sorokiniana
  unsure (1)..(592): unsure at all n locations; Clone ID: LIB3602-007-Q1-K1-F2
cgctctgcaaccatggcggagtccgtccagactttcggccgcaagaagaatgcggtggctgtggcctatgtgaagcgcggcaagggcgagatccgcctcaacggcgccccgctggagctggtgcagcccgagacgctgcgctggatagtttttgagccggtgctgctgctgggcaagctgcgcttgtccaacgtggacatccgcatccgcgtcaagggcggcggccaggtgtcccagatctacgccatccgccaggccatctccaagggcattgtggccttctaccagaagtacgtggatgagcagagcaagaacgagatcaaggacatcctgctgacctacgaccgcacgctgctggtggccgaccctcgccgctgcgagcccaagaagnncggnggccacggngcccgcgcgcggtttcagaaatcttacaggtgaaggctgccccgngggacggttgaacgcctttggatgttttttctgcgccgctggcgtggcggcagcggcgtctgctgtctatgcagctgccctggagcagcatgccctcagcgaaagctccatgagtacaccttgcgtgtgtaacaatacgcct

SEQ ID NO: 443 - DNA, 588 bp, Chlorella sorokiniana
  unsure (1)..(588): unsure at all n locations; Clone ID: LIB3602-007-Q1-K1-F3
caggcaggctgctcaggggccagtttgcccctgtagcctcgagcgccgctcatgcagtcaagccgttggtccgctctttgttttgccctgcgttcgccctcaagaccacacccgcgccatcccatgcgctgacatctacaaccttgtttttctgtgcaccagtgtgatgtgtttttttgcgggtgcggggnaaaaaaaccccgcacccacacacaaggcagagggggaggaaaagagaaaaaaaaacaggggggncagggccagagggtcctagtttacgtaccgctgtttgcgcccgcccaccccctgcctggggttcccttttgcaaatgaccgcccccttttttgccaagggcgggacggccacaaacccggagnccccacngcaacccccgggggagaagcgcaatttggcgactntggttttttttttttttttttttttttaaaaaaaaaaaaaaacacaacccttttttttgcggggcccttttttttttttttttttggtgggagcgacgttcgtcaatgttttttttttgcgtccgcacgccacaccctcctcctcttgtgttcgtttctttttttttt

SEQ ID NO: 444 - DNA, 255 bp, Chlorella sorokiniana
  Clone ID: LIB3602-007-Q1-K1-F4
aaaaaaaaaaaaaaaaaaaaaaaaaaaaaaaaaaaaaaaaaaaaaaaaaaaaaaaaaaaaaaaaaaaaaaaaaaaaaaaaaaaaaaaaaaaaaaaaaaaaaaaaaaaaaaaaaaaaaaaaaaaaaaaaaaaaaaaaaaaaaaaaaaaaaaaaaaggggggggtggtttttagggttaaaagttttgggggggggggggggcgattttttttttttttttttgggtccctaaatttatatatttgggcccgtgttt

SEQ ID NO: 445 - DNA, 499 bp, Chlorella sorokiniana
  unsure (1)..(499): unsure at all n locations; Clone ID: LIB3602-007-Q1-K1-F5
ccgggtcgacccagctttcgggcaggttcaaggacgagnatgtgccggtgcagacggtgctcaaggaccccaagactggcgaggagcggcgcgtggtgattgacgcggacgacggcatccgccccggcaccacgcccgcttccctgggccagctgcgccccgtgttcaagaagggtggctccaccaccgcaggcaacagcagccaggtgacggacggcgcggcggcggtgatgctgatgacgcggcaggaggcggccaagcgcgggctgcctatcctaggcatcttccgcagctttgcggctgtgggcgtgccgccggcagtcatgggcatcggccccgcagtggccatccccgcagcggtggagatggcgggcctcacgctggacgacattgacgtgtacgaaatcaacgaggccttcgcctcgcaggccacctacagcgtggacaagctgggcattgatctggacaaggncaaccccaacggaggcgccatttgcgc

SEQ ID NO: 446 - DNA, 687 bp, Chlorella sorokiniana
  unsure (1)..(687): unsure at all n locations; Clone ID: LIB3602-007-Q1-K1-F7
ggnaggtgcacctccctggnacttcaccagccaaccgcgtgcaagcattagggttctacctggctgggcacgacggcggcggcagggagaaagtcttggctggccctgcgcccgannggctatctacagtccacggcccagtgtcggccatacatcatgttctgacgtcgatccctcgcgccctctacaataccaagnaaacgtgctccacgctgggcagccgcgnaccctgtnngccgtgtgtgccgaagaaccatccccatnntgttctgtgcggcaacaaggggtggatgtgaaagaaccgccaggntcaagcccaagcaggtgacccttccaccgcaagaagaacctgcagtaccacgagatctccgccaagtccaactacaactatgagaagcccttcctgtacctggcgcgcaagctggtgggcgaccccaacctgcactttgtggagcaggtcgcgctggcgccgcccgaggtgcagatcgacctgcagcagcagcaggagtacgagaagcagctgcaggaagcggccaacatgccgctgcccgacggcgacgacgacgacatcgccgagtagggcggctgacatgattgttgcggtgcagcattgcggtgcagggcggtgcaggcgcccagccggccagggcctgctagcggcggcgccagccaaggcggttgccgatc

SEQ ID NO: 447 - DNA, 561 bp, Chlorella sorokiniana
  Clone ID: LIB3602-007-Q1-K1-F8
gcagaagctcggcccatcaccttacgggacagcaaaggcggacgagcaacatggggcggcggccggcgcggtgctaccgccagatcaagggcaagccctaccccaagtcgcgcttctgccgcggcgtgcccgaccccaagatccgcatttatgatgtgggcgccaagaaggcgggcgtggacttcttccctcactgcgtccacctggtcagctgggagaaggagaacatctcgtccgaggcgctggaggcggcccgcatcgcggccaacaagtacatggtgaagaacgcgggcaaggacgccttccacctgcgcgtccgtgtgcaccccttccacgtgctgcgcatcaacaagatgctttcgtgcgccggcgcagacaggctgcagacaggcatgcgcggtgcgttcggcaagccatttggtgtgtgcgcgcgcgtgggcatcggtcagatcctgctgtccatccgctgcaaggacacgcacgctgcggtggcgggagaggccctccgtcgtgccaagttcaagtttcccgggcgccagaagatcgtggctagcaggaact

SEQ ID NO: 448 - DNA, 665 bp, Chlorella sorokiniana
  unsure (1)..(665): unsure at all n locations; Clone ID: LIB3602-007-Q1-K1-F9
cgaccactcgggcctggtngaagacgtggtggagcagttcccagaggccgtggtggtgggcagcaaagtgtgcctggcgttcttgtccaacctgatgcaccggccgttcaagcagcaggccgtcaagggtggcgacaagatcgacctgggcggcgggcacgagctggagtttgtgatggcccccaacctgcactggcccgacaccatgttcagctacgaccacggcaccggggtcatgtacacctgcgacgcctttggcatgcattactgctcggaggacccgtatgacagccagctggcgccgctggagccgcactaccgcttctactacgactgcctcatgctgcccaacgctaagagcgtgaccaccgcgctgcgcaaggtgaaggacctgccctacagcatcatcgccaacggccacggcccgctgctgcgcttcaacgtgcccgagatggttggcaggtacgagcggtggagcaaggccatcacccaggcggcgcacagcgtggcggtgctgtacgccagcgactatggcttctccgaccgcctgtcgcagaccctggcgcacggcatcaccaaggctggtgtgcagacggagatgtttgacctgctgtcggtggaccccgcaggagtggtggagatgctgagccgcaacacggcgtggt

SEQ ID NO: 449 - DNA, 630 bp, Chlorella sorokiniana
  unsure (1)..(630): unsure at all n locations; Clone ID: LIB3602-007-Q1-K1-G11
ttgcctctttatctcgttccgacggggggggccngaactctcgtctcgcctcgcttgccatggccgcgtcaagctgcagggccctggtgacgggcagcggagcctgggcgggcctgcgagcaacacacatgacgatgccggcgtttgccgctcgattgtgcgctttgcagggcgtggggggaggcggcagcngctggcggccaggcccagcaccccaccagcggcagcagtgggcaggcatcacggccagcagcgcgcaggatgcagcagcggcggcggaagcagctccctctccacccaagagcatcgcggagaagattggattcatcggagctgggcaaatgggggaggcgctgctgcgtggcttcctgcgagccaaggtgtccagccccggccgcatctgcgccagcgtcaaggactgggagcggcgagaggcgctggagcgcatgggcgtggggtcggtgtttggggacgccaccgagggcggcagctgtgatgtggccaactttgcgcgcatcctgctgctgtgcaccaagccgcaagcgctgcccgaggtgctggagagcttggcgccgcatgtgacagaggagcacctggtcatcagcattgcggcgggcgtgacgctcaaca

SEQ ID NO: 450 - DNA, 377 bp, Chlorella sorokiniana
  unsure (1)..(377): unsure at all n locations; Clone ID: LIB3602-007-Q1-K1-G12
ccccgcgtccgcccagcgtccgcgccgcgtcatcaccctgcgcaagagcctgttcccccagacagccgcaggcgctgngaagaatccgncctgaaattcatcgatacgtccagcaagttcggcaacggccgcttccagacctcggaggagaaggccaagatcctgggccgcctcaaggcctgagcccagaaggcgtgctgagcggggagcgcagcgcgcacagcacgccgcccgcccgccggcggcggcggcgctctgcgcccgcccagctagattgcggcgcaggcgtaggcggctgggccgctgcgccggccgcctgagtgccctgcagcagctgtgcatgcatgcctgggaggagcatgtaacaaacctgctgc

SEQ ID NO: 451 - DNA, 404 bp, Chlorella sorokiniana
  unsure (1)..(404): unsure at all n locations; Clone ID: LIB3602-007-Q1-K1-G2
ccaatcgcgcttctgccgcggcgtgcccgaccccaanatccgcatttatgatgtgggcgccaagaaggcgggcgtggacttcttccctcactgcgtccacctggtcagctgggagaaggagaacatctcgtccgaggcgctggaggcggcccgcatcgcggccaacagggggcgggggagagaacgcgggcaaggacgccttccacctgcgcgtccgggtgcaccccttccacgtgctgcgcatcaacaagatgctttcgtgcgccggcgcatacaggctgcagacaggcatgcgcggtgcgttcggnaagccatttggtgtgtgcgcgcgcgtgggcatcggtcagtatcctgctgtccatccgttgcaaggacacgcacgcngcggnggcggaggagggcct

SEQ ID NO: 452 - DNA, 181 bp, Chlorella sorokiniana
  unsure (1)..(181): unsure at all n locations; Clone ID: LIB3602-007-Q1-K1-G3
ggggacgcgccttgttttggttttttatttttttttggagcggcgtttactctcttttttttccgntacattttgccagcggccctatcgcccgttcctttcggttnntncccttcctttttggccacgttgggcgggtttccccggnaagctttaaattgggggctcccttttgggttcc

SEQ ID NO: 453 - DNA, 413 bp, Chlorella sorokiniana
  unsure (1)..(413): unsure at all n locations; Clone ID: LIB3602-007-Q1-K1-G4
aaaaaaaaaaaaaaaacaaagaaaaaaaaaaaaaaaaaaaaaaaaaaaaaaaaaaaaaaaaaaaaaaagggaggacgaatttaaaggatccaaactggcgtgcgcttttttgggacccattttttgttctttggggttcccataatttattttttttttccggggctttacaatctttttgaggtggggggggccttgccatttcccaactttgtaaactccctgcttttccccctttaaccggcttggcgtaatagcccccttgtgccccccctctttttttctttcccaacagtctttctctttgattggtccctgggtctcccctttttactggcatttggccccctcttttggtggttttttcggctgggcgggtcgttttttatgctcttttttcccgttnctttggc

SEQ ID NO: 454 - DNA, 607 bp, Chlorella sorokiniana
  unsure (1)..(607): unsure at all n locations; Clone ID: LIB3602-007-Q1-K1-G5
gcgagctgncgtggcgaagccggcgatcgcgctgcgtgctgtcccgcggcggggggcggtggccatgacgcaggaccacagcccaggatgcggatgagtatgcacgcatcatgaaggcgggcggctttgtggctgattgtttcgtcaacggcagcctgaacctgtctggggggcggggcgacctggagtacaagcagaccaaggagctggggccggaggagcagatggtgaccgcgctgcccgacatccgcaaggagacgctgcagcccggagatgagttcctcatcctggcctgcgacggcatctgggacgtgctgaccaaccaggaggcggtggactttgtgcgcgagcggctgactgcgggcaaggcgccgcgcgacatctgcgaggagatgtgcgaccactgcctggcttcagacactgttttctgctgcaagggctgcgacaacatgagcgttatcgtagtgcagtttaaggactatgtgncaaagtaggcaggcatgcgcttgtgcgccaacgcagcggcccatccctcgcgccttcactcccaacgaacgacctttgttgtcagtctggctccccgttcctggtgtgcggcgatccacat

SEQ ID NO: 455 - DNA, 154 bp, Chlorella sorokiniana
  unsure (1)..(154): unsure at all n locations; Clone ID: LIB3602-007-Q1-K1-G6
cccctgnacccacgatgctggccagcgcgagcgtgggctacaagctcactgnaggtgcggcaaggaacggnncacctgcccnnctggctgnncgccccgnacggcaagaacnnccaggtnnnactgtggagtaccaagaaagggacnnggcggc

SEQ ID NO: 456 - DNA, 227 bp, Chlorella sorokiniana
  unsure (1)..(227): unsure at all n locations; Clone ID: LIB3602-007-Q1-K1-G7
gctttcgagnggagncgaggactgggcttctccctgttcgactgagcgcacagccggccgcggccagccaccctccagtgcctggtccgctccagttgcagcggcagctcgatccctcgcctgcggcacgtacggcgtagcgtggcggcagcggcggcggnncagccttaagcggcntgtttgtgtggggtgncgtcgcagcttgcggcgcatgtaacgcactcctt

SEQ ID NO: 457 - DNA, 311 bp, Chlorella sorokiniana
  unsure (1)..(311): unsure at all n locations; Clone ID: LIB3602-007-Q1-K1-G8
ctggaggcggacgagggcaaggagcgggcggccagcgaggcggcagacctcatctaccacgccatggtgctgctcaacaagcagggcgtgagcctggaggatgtgagcaaggtgctgcggtcacggtttggcacgtcaggcattgagggggaggggggcccgcccgcccaagcagtgagctgcttggtggctccggtcagctgctgcggctgctattttccatgctcagccatgacttgctgcgctgctgaccgctgccctgtaaagctgagtngcnnaaaaaaaaaaaaaaaaaaaaaaaaaaaagaaaa

SEQ ID NO: 458 - DNA, 359 bp, Chlorella sorokiniana
  Clone ID: LIB3602-007-Q1-K1-G9
ccccagcgggcggtaaaaggaaacaccccgggaaagaggggacagggccggggggggccaaaaaaaggggagagaggggggggggcaccccggaaggaaggcaaaaaaaggggggaaaaaaagggggggaggggagggggggaactttggggggggggggggggcatgggaaaaagcgggggaggaccgggggaaaaactggaaagggagcatgggggggtttttctaaaggggaagggccccttcctttttaaggggcctggaatcgccgggggagagtaaggggtaaagcgccggttttaacccacgcgggtttggggcctttgggggcagctggtcacccaattgtttgagctggg

SEQ ID NO: 459 - DNA, 236 bp, Chlorella sorokiniana
  unsure (1)..(236): unsure at all n locations; Clone ID: LIB3602-007-Q1-K1-H1
gggccttttggcacttgctttgcacccctctgccagggcctcggccctgtctgctacccacctgctccctgccaggctcgctgctttgcacccccgcctgcctcggtatgcaccctcccttcctgggccctggcccagtcgcacaaccccccnacctgggnccnnncttggccnnnctgtttgctttgaaccccgctcgcttgccgcactttgcggcgcacccttgctccttcccc

SEQ ID NO: 460 - DNA, 497 bp, Chlorella sorokiniana
  Clone ID: LIB3602-007-Q1-K1-H10
gttctagaacgcgagcggccgcgcgtgggggtttttttttttttttttttttttttgtttttttttttttttttttttttttttttttttttttttttttttttttttttttttcccccccttcctaaaaagttttttgcaacccggccccggggccggtggggggcactgggggggggggggggggggggcaacatttttaaaaaacccccaaaaaaagggaaaaagggggcccccaccaagggggggaaccaaaaagggcaagggggggcaaaaagggggaatggggggggccccgaaaaaaaaagggccccaaatggaccgggggcccccaaaaaggaaaaaggggcaaccgaaaaaaagggggggttttacccaccaaattaccggggcttaaaggaccgaaaaagggtgaaaaagaaaagcccgcattccgcccttttaaaagaaccaaacttaaataccccggcctgcaaacgtaatcgttttttttaggg

SEQ ID NO: 461 - DNA, 619 bp, Chlorella sorokiniana
  Clone ID: LIB3602-007-Q1-K1-H12
ggcgcaggcgcagccgggcagcatggagggcccaccacagtgggtgtgatcacgccgtaccgcgagcagcgcaagctgctgcgcgagacgtttgaggaggtgtgcggcaaaggccccgcctcagaggtgttcattgagacagtggactcgttccagggcaagcagttggatgtggtcattctgtcctgcgtgcgcgcatccacgggcggcggcctgggctttgtgaacgacatccggcgcatgaacgtggccatcacgcgtgccaagcgcgcgctgtgggtgctgggctccatcgccacgctgcgcgccaaccgcgagtgggcggcgctcatcaccgatgctgaggagcgcggcgtggtgattgcggatgccgaggcgaatgacttattcccggatttgccgtactggcaggcgcaggcacagccagccgagcagcagcagcagcagcagcagcagcagcagcagcagcagcagcagcagcagcagcagccagtggcgctggggcagggccagcaggcacagccgggaccgcaagagtatgcagacaggcagccggcggagcgagcagcagcgggcggtggccacgagcatccgcaggcgcagcagcagcagctagggc

SEQ ID NO: 462 - DNA, 477 bp, Chlorella sorokiniana
  unsure (1)..(477): unsure at all n locations; Clone ID: LIB3602-007-Q1-K1-H2
gctttcggccgcataccttgggttgcgccaaacgagaggcctccctcgctctgtatgcaaagcggctggcgcccggcccgacagccgtgcagtccatgatgctgtggggtggatgcgcgggcgtgacggctctgtggctcactcagtcttttttgtatatcaagaagcagctgggcttttgcgaggagcagaagtgaggagcagagcgcggcgggcttgcagccgccccccgccagcagctaagcgggctcgagtccggctgtccgcggcgggctggcatgtgcgtccaccccatcgtttccctgctctgccattgtccctgtttcttgttgcccttcacgctcgtttctctgctacatgccagcactgcggtcgcacctcaagcttgccgatacccgcttngacgngcgngccaccatcactcccaccttgatgtaacccaccttttttcaaaaaaaaaatttntttttttttttt

SEQ ID NO: 463 - DNA, 681 bp, Chlorella sorokiniana
  unsure (1)..(681): unsure at all n locations; Clone ID: LIB3602-007-Q1-K1-H3
cggccgcgtgggtgcgccggcctgccccgccccactcaactgctgcagccgtgctgatgctcacattcatgctagtgggcggcttttatgtgaccaacatccccgtgtggattggtgagccctccactctgcactttttttgggtgcttgcgatgcgatgtgtctgcagagatctgtgtgcagaggtccacatacacgcgcatgccaaccagtgcaacgcccgagtgcatgccatctcctcctgacacgaattgcatctccattctccctgtgcagcctggatcaagtggctgtccttcctcacgtacaccttcagcctgctgctcaagattgagtttgcggggcgggacctgtgggactgcaggtgcacttgctggtcgatttgcacacagcgctcgcctctgctgctgccgagggcatgttgcacagtgcccacaccggccagggcgattaccttgcggcgggaagcctgcttctagcgctctgtgttgcggtagcttgctcacaatgtcaacctctggatccctggtctgcagcattggcagcgatgagaacttcaacccatccgacccctggaactatgtggcctctgggcagtgcgagccggtcaaggacctgaacgacagcttcaacacatcggtggcccctggactccccgccctgngaagcagcggtgctggt

SEQ ID NO: 464 - DNA, 372 bp, Chlorella sorokiniana
  Clone ID: LIB3602-007-Q1-K1-H4
cggcgggcggcatcatccgccacgcactgcagcagctggaggcgatgggcctggtggagaagaaccccgcggcccagggcggccgccgcatcactcccgagggccagcgccagatggacctggtggcgggcggcgtgaccgtgacccgcttccactacctgggctgagcagcgcgccgctggcgggccgccgcacagccgcagcgcgcgggctgagcgcggcgccgccgcatgcgccgcggccgtcccccgccggcacgcatgccctcatgtgttggcagccgcaggacgtgtaagaggacttcgcgaaaaaaaaaaaaaaaaaaaaaaaaaataatataatttataaaaatatataataaaataattaaaa

SEQ ID NO: 465 - DNA, 500 bp, Chlorella sorokiniana
  Clone ID: LIB3602-007-Q1-K1-H5
cgcaccctcccttcctgggcctcggccctgtctcgcaccctcctacctgggcccttggccctgtctgctacgaccccacccgctgccgcactgcggcgcaccctgctccttccccgcaccgacttgcactttggccctcttgctttggccgcccattgcctgccgtgccccgcccgcccgcctcatggggcgctccatgcagctcacatccccctggcaggctggctgagcgcttaggctggtcggctgctgcccgttggcctctttgctctcggttttgctccctttgcttccacaacccgcttgcagcaacgttgctcgtgcactgctcccagcagttggtggtgctcaacgatggggtcacccggacacccgacctccgctgttgttgtttcattccagcattgcatgcccacgttgtgttgtttccagagccagtcagcctgtggaccaggcccagcctctgtaacccaagcaagccgtataaaaaaaataatata

SEQ ID NO: 466 - DNA, 462 bp, Chlorella sorokiniana
  unsure (1)..(462): unsure at all n locations; Clone ID: LIB3602-007-Q1-K1-H6
cgcactgcggcgcaccctgctccttccccgcaccgacttgcactttggccctcttgctttggccgcccattgcctgccgtgccccgcccgcccgcctcatggggcgctccatgcagctcacatccccctggcaggctggctgagcgcttaggctggtcggctgctgcccgttggcctctgtgctctcggttttgctccctttgcttccacaacccgcttgcagcaacgttgctcgtgcactgctcccagcagttggtggtgctcaacgatggggtcacccggacaccctacctccgctgttgttgtttcattccagcattgcatgcccacgttgngttgnnnccagagccagtcagcctggggaccaggcccagcctctgtaacccaagcaagccgtgtaatatttactcagccccgacccgtgttttgtgtgtttttttttttgtgttttttttcaccaaa

SEQ ID NO: 467 - DNA, 561 bp, Chlorella sorokiniana
  unsure (1)..(561): unsure at all n locations; Clone ID: LIB3602-007-Q1-K1-H7
gcgggccgaggaggcgggggtggcagacaagccccacgagccggcggctggcgccccgatgatgggcatggctcagcgcttcctaggcggggaggaggctggggcgggggacaagggcggcgctggctggggtgccatggccggggcggctcagtccttcctggggcacggcggcgagggcggggtggtgggcggtgctaccgccgagggcgcgggcaagagcgatgccgggctggtggacaagctgctggggctgtacgctcagcaccagggcaagcagtttgaggggaagtcggagggcgaatatgaccagctggcgggtctggccaacaatgtgcttggcaacgtgggcaaggagctcctgaaggtctgggtgaagcagcgcctcggcatctatagccggcttcaacctgcgtgctgcgtgctatggtcgcacacggcatccccccccacaaagcgcatgcggcagtggaggaccctgcttgcacccacgcatttacatctctgcagaatgctctcgctgcacatttgttgcccagtgcatgtaaacgtacanttgtg

SEQ ID NO: 468 - DNA, 129 bp, Chlorella sorokiniana
  Clone ID: LIB3602-007-Q1-K1-H8
gttctagaacgcgagcggccgcgctgtggggtgtttttttttttaaatttttttgggggggttttttttttttttttttttttttttttttttttttttttttttttttttttggaggggggggggggg

SEQ ID NO: 469 - DNA, 664 bp, Chlorella sorokiniana
  unsure (1)..(664): unsure at all n locations; Clone ID: LIB3602-007-Q1-K1-H9
gccacgtcatgcacatctcctccaagtgacggggcagctcaagccggggctcacatcctgggacgcgctgcgggcggcactgccggcaggcacagtcagcggagcacccaaggtgcgagcgatgcagattattgatgagcttgaggtggcacggcgaggcccatacggcggcggctttggcctcgtgtcgttcacaggcggcatggacatggcgctcgcgctgcgcaccatggtcatccccacggcagccaacgacaccctgtacaactatgccggagacaagccgcggcgggagtggacggtgcacctgcaggcgggcgcgggccttgtggcggactcggtgccagagagcgagtgggaggagactgtgaacaagtctgctgctctgggccgggccattgacctggctgagcaggcgtttgtgtcctctgatgccggcgcttcgcagtagcaggctgcggtagggggcaccacgcctcgcagcacggcccgttgttgagtgcactcacgtgtgactcgcacctgccctgccaccaagagctgggtgctccctttgaatgcgcactgccattgctgtgccgctgctgctgtgctgcgccccttgctgcctgcttctctgctcccncttgtgattnccgttgctcccctcttctgcccgcctgta

SEQ ID NO: 470 - DNA, 415 bp, Chlorella sorokiniana
  unsure (1)..(415): unsure at all n locations; Clone ID: LIB3602-018-Q6-K1-A1
gccggcgcttcgatcttcaacgaggacggnctgaactacctgggcaacccctgcctgatccacgcccagtgcatggtgtctgtgctgctgacccagctggtgatcatgggcgccgtcgaggcgtaccgatacagcggtgagggccccatggagaccagcggcctctccgtgtacccaggctgctagttcgaccgcctgggactgtgtgacgaccccgacagcgtggctgagctgaaggtgaatgagatcactaacggccgcctcgccatgttctccatgtgcggttaattcgtgcacggcctggtgaccggaaagtccctccctggaaaacctggctgaccaccttgctgtgccgtatgtgaacaacggcttcgcgttcgccaccaaagtttctgcccctggcctgaacgccgtc

SEQ ID NO: 471 - DNA, 364 bp, Chlorella sorokiniana
  Clone ID: LIB3602-018-Q6-K1-A10
cgattaccaaacaacttgcaccttgtttgctcgtgtttttgaagcagctcccctctccattcctcgactcatctggctcgatacgcccatccacactcatttgtcccgagaagagactcttgcatttcttgcttggtgccagggggagtcctccccctagcagccaaagccattcaagcaccgcacccctgcccctcggctgtggcagccacagcgcaaacttgtgaggagaccctcactcccaaaaacatgcatcattgtagcgcttttgctgttggcaaccctgtagcactgtccctcctgctgcagctcctctctcgctttgttttcgtcacaaaagacgagtgtgtaacagcagctggtc

SEQ ID NO: 472 - DNA, 507 bp, Chlorella sorokiniana
  unsure (1)..(507): unsure at all n locations; Clone ID: LIB3602-018-Q6-K1-A11
cgctggtgcaggccatgcagcggtgcctgaaggaatgcaagccctggctgcccaacccgtcatacagcaactatcgagaggtgggcggcatccaactgcgccctcctggtgctgcttccttcggagcgcacatgcttaggcttggatgcttcttccagtgactgatgtgtcctcactgcgctttgctgctcagcagaaggcacgctatgcggaaaccgtgctggctgctgtgcgccaccagtttcctgccacccatgccaaccgttctctctccagctactattcaacccccagccccaacacctttgttgacgacaaggcggcaaaaaagattggcaactgcagcagctgcggcatctactttttggagctcaagttctgcgcccgctgccgcgccgccaagtactgctcccgcgaatgccaggcccagcactggcgggcggngcacaaggctgagtgcgtgccagtggggtcaagcgcaggggacggccagngtggtagcagcag

SEQ ID NO: 473 - DNA, 511 bp, Chlorella sorokiniana
  Clone ID: LIB3602-018-Q6-K1-A3
cacgcgtgcgcgaggacgtgttccgcaaccccgacaagtttgacatccgccgcccataggttggggagcaggtggcctacggcgcaggcatccaccggtgcattgccgagtacctggccctggtggagctgcaggaggcgttcaagggcctgttcggccgcttcccaaacctcaagctggccgtggacgagagcaagctggagtggagcgaccccaaggccgatgtgggcctgaaggagctgcccgtcacctggtgaactcgcggctggagcagcgccaccgccatgctggctgtgcagccaccaccagacgtctcgcatgtgctgcccttccggacccgtggtgcaccgggcgtgccccgggtgcatgccagctgagagcccctaacgcgcccaggcacgcttggggcagctactaaactaaacccaagccttggagcagcataactgcccttaaaccttgctggcccgctgcgttgaaactcacgggctcagtcacaatcgagcgtgtt

SEQ ID NO: 474 - DNA, 520 bp, Chlorella sorokiniana
  Clone ID: LIB3602-018-Q6-K1-A4
acgaggcgatcggtaatcgggcagctcaagatgcaggcgaccatggctgctgcctctgtggcccccgtccagacccgctcggcggtgaagggcttcggtgccaagcccgccgctgcgcgcgtggctgcccgccgcatgcgcgtggtgtcccaggccgcttccactgagctgaagcgcgccgacgtgcccctggagctggaggagattggcctgcccatgaacaccttcggccccaagaaccccttcaccggcaagattgtgagcgtggagaccatcaccggtcccaaggcgaccggcgagacctgtcacatcatcattcagaccgacaagaagatcccctctgtggagggccagtcctatggcgtgatcccccccggcaccaagatcaactccgagggcaaggaggtgcccaacagcacccggctctactgcatcgcctccacccgctactgtgacaactacgactgaaacaccgtcttcgtgtgcgtgcgccaagccgtgtacgtggaccccgagaccg

SEQ ID NO: 475 - DNA, 546 bp, Chlorella sorokiniana
  unsure (1)..(546): unsure at all n locations; Clone ID: LIB3602-018-Q6-K1-A5
gccgatatgcgatgcgatagcaacgaatgtgccctcagcgaccagccccagtcttcagcacttgcacctgcggctgcttgcacccggtccaatcaacaaatctgctgcaccatccaaccgctttgtcgatccaccgcaaccggcgtctcaccgtttccggacgcccccttggttcagcgatgcttgcatgggcgtgcctgcacccgtgtgggtgcaggccttgctcacgcttgtccgacctcttgctgtggcgtgccactggtctcagtgcccactgcacacccgcccccttgtgcttgtggggccaggcggtcttggccggccgacagactggcctactaattagcgcccgtgttttcccttgtcccaccttgcaatcgtccgatgttttttgctcttcttttattccggtgcccccgtactccgcgccacgcaagcccactcagctgcagcgcgcgggtgctgatttaactgcccctccttctgacagcagttcgctttgtttgccctaggncggaccacactccaacgcatgctgttccttgc

SEQ ID NO: 476 - DNA, 551 bp, Chlorella sorokiniana
  Clone ID: LIB3602-018-Q6-K1-A6
gcagggcatgagcgagagcgagtttggggacggcgagaagttcgccgccttccagaacatgcgcggcgggcgggtgcagctgatggcgctgcccatgcccgactccgactactacaacgcagagaagggcgacgcgctctatgcctttgagctggcgctggctctgcagaagctgaacatggacaagctcaaggcctgccactcgctggccgacaagtcggatgacttccaggcccaggatttcctggaggacgagatgagcgcccaggccaaggtggtgaaggagctgggagactatgtgtgcgagctcaagcgcgtgggcaagggccacagcgtcttccactttgatgagaggattgaccagtgaggcctgactgctgcggcgtgagctgaccaggcagcaagttgcaaagggcgcagctgcagaaatggcctgcaagcccagcggcgccagcagggcggcaggcgtcggcggcggcaggcgtcggcgtggcatacgcactgatgcccacctgccacacaccactagcttgcgttgaatgatggttgat

SEQ ID NO: 477 - DNA, 358 bp, Chlorella sorokiniana
  unsure (1)..(358): unsure at all n locations; Clone ID: LIB3602-018-Q6-K1-A7
tgcagcttatgcagcatcgttgcggctgtcccgctgttcacccctttgcctcacctccctgcccctgctagctccttcccctccccacaaatgaacccaacagctggcctcgctcggctgtgaaccagcccctaaccttgccagaacaattcgttcgcttcgcgcgcttgcaccctccatactgcaccgctgccgaccctccttcccttccctcctgcacaccaaaacaccctgctgcacacgtccctgccactcgcccggcgattgatcccgggagggttgaaccctccaacccgctgcgcggttttttcccttcaatttttgcagttgtaacatgtggcagcgccccccannaaaa

SEQ ID NO: 478 - DNA, 111 bp, Chlorella sorokiniana
  Clone ID: LIB3602-018-Q6-K1-A8
aaaaaaaaaaaaaaaaaaaaaaataaaaaaaaaatataaaataaaaaaaaaaaaaaaaaatataagaaaaagggaaaatgtcggacgttttggaggggccggcctttttaa

SEQ ID NO: 479 - DNA, 424 bp, Chlorella sorokiniana
  unsure (1)..(424): unsure at all n locations; Clone ID: LIB3602-018-Q6-K1-A9
cggacgcgtgggtttttttttttttttttttttttttttttttttttggctaggtgtgccttacaagctgccgccgcgggggcggccccaagcaagacgggtgggcggggtgcgggcggagggggcacccgcgcgctgnattcaccccctccgccccccgcgcgctgctgttgcggggagggcgctcgcctgctggtgtgcagacaagcagcttactcctcgtcctcctcctcctcagcctggtccgcaatgttgaagtagcggagctcgtacacggagcggtccttgttggaggcgatcacgcgcagccagtcgcgcacgttgtgcttcttcaggtacttcttggtgaggtacttgaggtaccgcttgctcatggggatctcgctggtgaccgtgatcttggtcttgtcgcgggtcaccttga

SEQ ID NO: 480 - DNA, 406 bp, Chlorella sorokiniana
  Clone ID: LIB3602-018-Q6-K1-B1
cgcgcaaaaaaaaacaaataaatccgctgcaaggacactcacgctgatttggcagaagaggccctaaaaaaaaaaagggggaacctccgcgggcgccagaagatcatccatagcacgaactggggcttcactccctacctgcgcgacgattactaggcgtggaagcatgaaggccgccttgtgaaccaccgtgtgaatgccaagctgcttggcaaccaccgaccgatggacgctcgggagccatttccagattttcaagggtcctgaccgtctatggcgtctgcccgtgcatgcctaacatacagtttggcatctaaagatgcaacgaacatctgccctgtaacggaaaaaaaaccgcgaaaggcggggcgatttagaggatccaaaacttacttacttcgccatg

SEQ ID NO: 481 - DNA, 548 bp, Chlorella sorokiniana
  Clone ID: LIB3602-018-Q6-K1-B10
gtgctagctgtcctcgagcagcagggctacggggcgctcatgcctatgcaggtgggcgccgaggtggcgagccccactgtagcgttgccggcagccgttgggcagcatcgccgccacgtgagcagcagcgccgcagcggcgcgagatgcgattcagggcgacatcattgcccccgatgttgggctggcgcggatcgacgggctcagcgaagcaggcttcagcgtgaacaacgtggaggtggatggcgccatcatgctgtcaggggacgtattcacgctctggcgtgcaaagcggtggtcagatgtgacgctggaaagcctggcgctgttgcgcctgctgcggcctgtcccagacttgttggtgctgggcactggcaggcgggcaaagcagctagcaccggagctggcgcggcagctgcatgagatgggggtgcgggttgatgccatggacacggtcaatgcggtggcgacatttaatgtcctcaatcaggaggcgcgcagtgtggtgggtgcgctcctcccccaaaatgttgaggactgaaaagagca

SEQ ID NO: 482 - DNA, 394 bp, Chlorella sorokiniana
  unsure (1)..(394): unsure at all n locations; Clone ID: LIB3602-018-Q6-K1-B11
gtgaccagctgcagccgcgcgccgctgggcggcttcaagcacctgcacccgccgctgaccatacacaaggtggactgtggcgcttcgctgctggctgcggtggggggcaaggacgtcgaccgactgcccacagcctccacctgctccaacaccctcaagctgcccaacttccggcgctccgccacgctgcgagagaagctgctgtacgccatcaagagcggggcagggttcgagctgtcgtgaggcagcctgcagtcctacatctattgtcatggcgatggagaatgatgaggcccggtggcagacagcaatacacgttggttgcaagtcctgacctgccataaagcttcatctgataggattcgacccatgcaatcaagtcagaggcnnnnna

SEQ ID NO: 483 - DNA, 299 bp, Chlorella sorokiniana
  unsure (1)..(299): unsure at all n locations; Clone ID: LIB3602-018-Q6-K1-B12
cccacgcgtccggcggtgcggtctggaggcgtgcggccaggtaggctccctgtgacattgttttgtgcttgatgagacgccggcgcccgccgccctttgtccgcccgtgctccttttgtgccatgtctctgctgcaggcggcgcgccgcgcgcccgccgtatttctgtgctgcccattagcatcacccggttgctgccatttcatgatgcaacgccctgaagaacacgcccttaccaaaccaaaaccaacccgccgcccgctgttgtgcctctgatgtaatgcacacgcncncnnnnna

SEQ ID NO: 484 - DNA, 514 bp, Chlorella sorokiniana
  Clone ID: LIB3602-018-Q6-K1-B2
cgaaccggaattcgacctacgacgtacgcgcgggcacgcactgcaaggcgggtctgttgatgcaggcggtatccgtgttcccagtgatgatgggagcggcctgtaaccagaacaacattaattcagtgatgcaccagctgcgcccctacaaccagtcggtgctggacgcgacccaggcggcagcgcgcgccatcaccattgccgtgttcctgtgcatcggagtcgccaactatgccgtgttcggaactaagctgcagcctgatgtgcttctgaactacagcgggcacggcctgcgccggctgatgccgcgccgtcctgcactcgcgctggcggtcgccgataagctgtccttcctggtcaatggcctgtttaccctgccggcctacctgtacccgtaccagcacaacctgtgggcggcgctgtcgcgccagtctcccgagcaccgcatgaatgaccagcgctcgtttgctggtacgaacattgcctcgctggcaggatgcacactgatcgcggt

SEQ ID NO: 485 - DNA, 380 bp, Chlorella sorokiniana
  Clone ID: LIB3602-018-Q6-K1-B3
cgcaacacacacttcaagcggacctgtttatggaggtggcatctttgttcccagacatgataataccggccgggaccagaacaacattggttgggtgatgcaccagctgcgcccctacaaccagtcgatgctagacccgacctaagcgtgaacccacgccatcaccattggcgtgttcctgtacatcgcagtcggcaactatgccgccttacgaactaagctgcatactgatgtgcttctaaactacagtgtgcaccgcctgcccctcctgatgccgtcccgttctgccctacctctctagattacccaccagctgtccttcttcgtgaacagactgtttaatgcacatccatccgtgtacccgtaccagcacaacctgt

SEQ ID NO: 486 - DNA, 522 bp, Chlorella sorokiniana
  Clone ID: LIB3602-018-Q6-K1-B4
gcgcgcccggtgctgccactgccggccagcttccgcagcaggctcagcaggctcagcagccgccagcaggggcagcagtgcctgttgcgccgcccaatggccagcccagggcgacagccacgcctgggcagccgggcagcagcaagccagctggcaacggtgcagcagcagcagcggcagcagcggggcaggcgccgcaagcggatgggccgccccggcaggaaccgctggatctgccgctggccattgcggccaagggcaagggcgggggcagcgtttacgacatcctggtgcacgagatcaaggcggccaagctgcagcagaagctgctggtgaagagcgtggcggagctgcagcgcaacagcagcggcgcgtacgctgagctggcgggcgacattgccagcctggcggcccgccttgccaagctgtccagcgagcccagcgtgagcgaggaggcgctggctgcgctggtggacatgcttgtgaaggcgcacctgctgcaggtcacgtcgcacatgctga

SEQ ID NO: 487 - DNA, 478 bp, Chlorella sorokiniana
  Clone ID: LIB3602-018-Q6-K1-B5
acgcggggacgatagccgtggcggatgcatcacggacggggctcactaccgtgatgtttgctgaaacaccggcggagggcctgtgttgctgtcccaatcttaaatcgatgcacacaacgattgttacacaggttgcctgaagcaagacatctggcaacagtgcagaagtagcaaatgtagcaacagttgcaggcgccgcaagcggatgggcctccccgaaacgaaccgatggatctgccactggccattgcaggcaacgtcaagggcgtgagcagcgtttacgacattctggtgcaagagatcaaggcggccaatctgcatcaaaagcttctggtgaagagcgttgctgatatgcatcgcaacattattagcacgtacgcttagctgacaggcgacattgccagcatggaagcccgccttgccaagctgcccatatagcccagcgtgagcaaggaagagctagctgcacgggtggaca

SEQ ID NO: 488 - DNA, 469 bp, Chlorella sorokiniana
  Clone ID: LIB3602-018-Q6-K1-B6
cccacgcgtacggccctacttacttatggaccgccgaggtgcgcctcaacgctcaacacccccttgagaagatggcaaatatgagataatgctgtgccacccacaatgatgctgtacagctgccctttttgcaaaacgaaccttttctgccacgctgtctggcccggcctcacgcgcggcacgatgcctgccgagggctcgccgtccattttgcatgactccctaggctgctggccagccactcgcccgcaagctgcacctgtttatcctgtttcctgcccatctgtgtaccccttcagcccccgtgtagacccgtttattcctgccgccatcctcagccatgccacaagccacgcggtccacaaacgcattcggttgctccgcctccctgtcagctgcccttcagagtaccatctgaaagctaagcataacgccaagccactgctcgctccttttggatcgcccgttt

SEQ ID NO: 489 - DNA, 326 bp, Chlorella sorokiniana
  Clone ID: LIB3602-018-Q6-K1-B7
atcctgctgtccatccgctgcaaggacacgcacgctgcggtggcggaggaggccctccgtcgtgccaagttcaagttccccgggcgccagaagatcgtggctagcaggaactggggcttcactccctacctgcgcgacgattacttggagtggaagcgtgagggccgccttgtgaacgacggtgtgaatgccaagctgcttggcaaccacggcccgctggacgcacgggagcccggccagattttcgagggtcctgcccgtctgtggcgtgtgccggtgcatgcctaacatgttgcttgggttctaaagatgtaacgaacatctga

SEQ ID NO: 490 - DNA, 355 bp, Chlorella sorokiniana
  Clone ID: LIB3602-018-Q6-K1-B9
cggcgacatggtcatggcgaccgtgaagaagggcaagcccgacctgcgcaagaaggtcatgcccgcgattgtggtgcggcagcgcaaggcgttccggcggaaggacggcacctacatctactttgaggacaacgcgggcgtgattgtcaacaccaagggcgagatgaagggctccgcgatcaccggccccgtggccaaggagtgcgccgacctctggccccgtgtggcggcagcagccaacaccattgtgtagagcggcggccgtccggctgggcgtcgcggcagcgcggaccacactgcagtacccaccgcctgccgcgctcccggcgcagcatgctgtaatgcacatccagcg

SEQ ID NO: 491 - DNA, 350 bp, Chlorella sorokiniana
  Clone ID: LIB3602-018-Q6-K1-C1
gcggttcggcttcttcatccaggccatcgtgaccggcgagggccccatcaagaacctgaacgaccacctggctgacgcgtcggctaacaacttctacgccctgtacgccaagaacctggcgtaagcacttgtcgtacgaacgtacgaggcccgcgcgcgattgtgcgccccttgagaagatcacaccaccctgtcgcaccgcactgtcgcctgtacgcacccaccatgtgtatgtgctagagcctatgaagttttgtgtaagcccttgatactcgtcaggaaggaagaagaggaggatccgccggcagcgtgtaaccgcaaacaaatgatagcgaagcaatctcgcatat

SEQ ID NO: 492 - DNA, 75 bp, Chlorella sorokiniana
  unsure (1)..(75): unsure at all n locations; Clone ID: LIB3602-018-Q6-K1-C11
aaaaaaaaaaaaaaaaaaaaaaaaaaaaaaaaaaaaaaaaaaaaaaaaaaaaaaanaaaaaaaaaaaaaaaagaa

SEQ ID NO: 493 - DNA, 527 bp, Chlorella sorokiniana
  unsure (1)..(527): unsure at all n locations; Clone ID: LIB3602-018-Q6-K1-C2
gcgagattgacgacagcaaggtgctgctgctgtctggagtcgcagcttccacattcgccatccacgccaccgtcgcgcgctaagcactacaatgagctgtacatgagcaaggacctgccggtcaacgagccgatgacccgatggttcgggctggccctggccacctgcggcggcggcattacgataaccctgtccgctggagactacagcgacaagaagcccgtcaaggatgcactcaaggcatcgggcgccgggtggaccaccgcccttgtcaccacgctctacaacgcgcatgacgggcaccagaagaaggagccagcctacaccttagccgaccgcatggctgccatggccgccctctgcctgtggcgcggcttcagggaggacgaatgaggagcagccaactatcgcgcacccagcaatgagcagggctggtcaacatgccaataagaacacacaaaactntgccatccggcctgcccaaagcgtggagttttggtccgacttttaatttcggttttcttgca

SEQ ID NO: 494 - DNA, 491 bp, Chlorella sorokiniana
  Clone ID: LIB3602-018-Q6-K1-C3
cccaagtcgcgcttctgccgcggcgtgcccgaccccaagatccgtatttatgatgtgggcgccaagaaggcgggcgtggactttttacctcactgcgtacacctggtcagctggcagaaggagaacatctcgtccgaggcgctggaggcggcccgcatagcggccaacaagtacatggtgaagaacgctggcaaggacgccttacacctgcgcgtccgtgtgcacccgttccacgtgctgcgcatcaacaagatgctatcgtgcgccggcgcagacaggtctgagacaggcatgcgcagtgcgttaaggaagccatttgatgtgtgcgcgcgcgtgtgcatcgttcagatgctgctgtccattcgctgcaatgacacgcacgctgctgaggctgaggaggctctccgtcatgccaagatgaagttccccgggcgccataagatcgtgaatagcaggaactgtggcttcactccttacctgcgcgacgattt

SEQ ID NO: 495 - DNA, 554 bp, Chlorella sorokiniana
  Clone ID: LIB3602-018-Q6-K1-C4
ggccgctgcaccgcctgcgccgccaactgcggcagctgcaactccaccaccgcctgcctggagtgcattggcgcatacacaattgacccagccacccagctgtgtgtggcatgtgctgagggctgcggaggctgcagcgatggagtggacacgtgtgagtggtgtgacagcggctacaccgccaacacaacagacggctcactgtgccaaaagtgtgcggacccgcactgcaccatctgcgtgaccgggccaaccagctgcaccatctgtgacgatccagagatgaagtacggacctgatctgcagcagggagactgcaagctctgcgccttggagcactgcgccaactgccaggaggattacaaggcctgccgctggtgcctggacggctactggtggaacgcaaaggagggcaagtgcacgccgtgccagaccgagcactgccgcacgtgtgcaaccaacggcgacgatgggttggaggaatgcaattcatgtgaagatgggtacgattttgatgaggctggaagtggccacccaaagtgtgtgaaggcagc

SEQ ID NO: 496 - DNA, 547 bp, Chlorella sorokiniana
  unsure (1)..(547): unsure at all n locations; Clone ID: LIB3602-018-Q6-K1-C5
gctcatttcttctcggaccctcgtcatccccgatgaggtgtctatcgaggtcaaggcgcggcgggttcgcgtgaagggccctcgcggcacgctgcagcgcgacttcaagcacctggctgtggacatgttcctgactgaggaggagggcaagaaggtgctcaaggtggactgccactttggcaagcgcaagagcctggcgtccatccgcacctgcacctcgcacgtgcagaacatgatcaccggcgtgaccaagggctacgagtacaagatgcgcctggtgtacgcccatttccccatcaacatcaacatcgagaacaagggcggcaaggtggagatccgcaacttcctgggcgagaagattgtgcgcgtggtggacatgctgccgggcgtgacctgcgagcgcagcgccgccgtcaaggacgagctgatcctgaccggcaacgacatcgagctggtgtcccgcagcagcgcgctgatccaccagaagtgcctggtgaagaagaaggacatncgcaagttcctggacggcatctaccttaacgagcgc

SEQ ID NO: 497 - DNA, 559 bp, Chlorella sorokiniana
  Clone ID: LIB3602-018-Q6-K1-C6
gctcatttattctcggaccctcgtcatccccgatgaggtgtctatcgaggtcaaggcgcggcgggttcgcgtgaggggccctcgcggcacgctgcagcgcgacttcaagcacctggctgtggacatgttcctgactgaggaggagggcacgaaggtgctcaaggtggactgccactttggcaagcgcaagagcctggcgtccatccgcacctgcacctcgcacgtgcagaacatgatcaccggcgtgaccaagggctacgagtacaagatgcgcctggtgtacgcccatttccccatcaacatcaacatcgagaacaagggcggcaaggtggagatccgcaacttcctgggcgagaagattgtgcgcgtggtggacatgctgccgggcgtgacctgcgagcgcagcgccgccgtcaaggacgagctgatcctgaccggcaacgacatcgagctggtgtcccgcagcagcgcgctgatccaccagaagtgcctggtgaagaagaaggacatccgcaagttcctggacggcatctacctcagcgagcgcgggaccctggtg

SEQ ID NO: 498 - DNA, 482 bp, Chlorella sorokiniana
  Clone ID: LIB3602-018-Q6-K1-C7
tggaccactcgatccacgaccccggggccgcccgcctggcgcgccgatcccgctcgcgcaaggagctgggccggcagccctccaagccgctaactgaagaagaagagctgcagcgcgcgctggagatgagcatggcagatgcaggcggcggcggtggtggcggcggcggcggcctggcccgcggcggcagcagctatggcggcagccttggcggcaccacgagtggcgcgggcacctcagacatgggcgacgattttgaggaggaggacgaggaggcaggagaggaggagccggcggcagcggcggaagcccagccccccgctgcttcgcctgcccaggtgcaagcagaggccgaggcccgcctgcctcccgagcctgccggcagcgagggcgtgaggatagccgtgcgcctgcccgacggccggcgggtgcagcgccgcttcccagcgggcgcaccagtggccgctgtgtatgacctgtgc

SEQ ID NO: 499 - DNA, 531 bp, Chlorella sorokiniana
  Clone ID: LIB3602-018-Q6-K1-C8
cacgcccgctgggccatgctcggcgccctgggctgcgtgacccccgagctgctgcagcgcaacggcgtcgccaacttcggcgaggctgtgtggttcaaggctggcgcccagatcttccaggagggcggccttgactacctgggcaacccctccctgatccacgctcagtccatcgtggccatcctgctgacccagctggtgctcatgggcctgattgagggctaccgcgtcaacggcggcccggccggcgagggcctggatgccctgtaccccggtgaggccttcgaccccctgggcctggctgacgaccccgacaccttcgctgagctgaaggttaaggagctgaagaacggccgcctggccatggtgtccatgctcggcttcggcgtgcagggcctgatcacccgcaagggccccattgagaacctggctgaccacctggcggcccccgacgccaccaacttctgggtggactacgcccccaagtccgccggcatcggctactaagctgtttccgtcgcttgactggcg

SEQ ID NO: 500 - DNA, 552 bp, Chlorella sorokiniana
  Clone ID: LIB3602-018-Q6-K1-D10
gaccattttgcacgcacgccagcatcccccagccgaccgagtgaggctcacaggcagacatggtctggcggtggactctgatcaaggcgctgaggccctaccgacaggccgagttgaagtatttcaagcccaagccggatttctacccgctgctgactgtggtgggcgtggcggcttccactgtggtctactgctcctaccgagccctggcacacaaccccgacgtgcacctgagcaagatccacaagcacgacgagctgagcgagagcgcggagcacatggagcgcgccgaaaagtactggcacagcatcttccgcaaggcgtggcttagccgcgtgcacgacggggacgtggtggacgcccgcatgatgcgcgtctaggcagtcgagacgcgtctaggcctggaggcagccccccgcctctgtgccacaccatgccaatgttaattgaaccccgccaacatacagcaacttcgagcgagccactcacaacaagacggcagcagctggagcgcgccctgttaggaagccgccgtgcccagctgcatccaac

SEQ ID NO: 501 - DNA, 319 bp, Chlorella sorokiniana
  unsure (1)..(319): unsure at all n locations; Clone ID: LIB3602-018-Q6-K1-D11
gtgaagccggcggcgcagggcgaggagggccagattctgaagaaggagttccctgtgcaccactccaacgtggcggtctactccacggcgcagcanacgcactcccgcgtgggcttcaaggtggtggacggcaagaaggttcgctacctgaagaagacgggcgaggtccttcctgagcggctgcctgagaaaaggctgagtaggggccacgttgggccacacgcgcagggcacattgctcctggctggcccaatcccatcacctgctgccattcttnctttgctcatttgctcctctttcatactctgttcggctcttt

SEQ ID NO: 502 - DNA, 520 bp, Chlorella sorokiniana
  Clone ID: LIB3602-018-Q6-K1-D2
accgagttcaggtacggcggcatgagctacctggcctgcgagcggctcacgctctgccccatccagaagaagctgatcgccaaggagcggctcagccagaaggagattgaatgggtgaacgcttaccaccagcaggtctgggattcgctgtccccccggctggcgggcgaggaggaggagctggcctggctcaaggaggccacctcacctttgtgaacttgaagcgtgtgaatggctgcggccaactgcctggcgtcattcggccagcagcagagctggcctggctcaaggaggccacctcgccgctgtgaaacacgtgccaattgccgctcaacatggcagccagctgaccgcaacagtgccgctttgcaccaacaaccagcagcctagctgctgctgctgctgctgctgctgctgctgctgagccgccggatttctttcatctgtttcctcagctcgccacttgtaccctgaatacacgctcggttccatcagttgctctgtgtgaatgccaaacttg

SEQ ID NO: 503 - DNA, 552 bp, Chlorella sorokiniana
  Clone ID: LIB3602-018-Q6-K1-D3
gccctaccccaagtcgcgcttctgccgcggcgtgcccgaccccaagatccgcatttatgatgtgggcgccaagaaggcgggcgtggacttcttccctcactgcgtccacctggtcagctgggagaaggagaacatctcgtccgaggcgctggaggcggcccgcatcgcggccaacaagtacatggtgaagaacgcgggcaaggacgccttccacctgcgcgtccgtgtgcaccccttccacgtgctgcgcatcaacaagatgctttcgtgcgccggcgcagacaggctgcagacaggcatgcgcggtgtgttcggcaagccatttggtgtgtgcgcgcgcgtgggcatcggtcagatcctgctgtccatccgctgcaaggacacgcacgctgcggtggcggaggaggccctccgtcgtgccaagttcaagttccccgggcgccagaagatcgtggctagcaggaactggggcttcactccctacctgcgcgacgattacttggagtggaagcgtgagggccgccttgtgaacgacggtgtgaatgccaagct

SEQ ID NO: 504 - DNA, 329 bp, Chlorella sorokiniana
  Clone ID: LIB3602-018-Q6-K1-D4
acgcccacacccataaaatctcatccgacattgataccgccctgattatgtgagtgatcaaatgacgaacaatggggtggcatgctgtaaccgggtagcgtccaccaaccaacaggacaaattgaagaagtgaaaacatcaagtccgaagcgtatccaggcggacactataaggggccaacaagtacatgactaacaacttctgctacgacgcattccacctacacagtccttgtgcagcacttgcacatgctacacattaacaagatgcttacctacgccggcgcagacaaaatgctgacagacatgcactgaatctccatcatgcca

SEQ ID NO: 505 - DNA, 309 bp, Chlorella sorokiniana
  Clone ID: LIB3602-018-Q6-K1-D5
cataaaaacattaaatctcatacgccattgatacccacctgattttgtgagtcttacaaatcaccatggatgtgggggcatgctgttatcaaggtaccgacgaaaaaacaacgggccggctgttttaaaggtccaaacctaacttcctctgcactccgaggtaacagtttttgtattgggccccctaagttaatttcactggccctcctttaacaccgcagagcctgggaaacccctggctgttcccgatctaaatgcccttcgagctcttccccttctcgccggtcgtgttactcgcaaaaaggccct

SEQ ID NO: 506 - DNA, 523 bp, Chlorella sorokiniana
  Clone ID: LIB3602-018-Q6-K1-D6
cgccgccttcaagtccatgggcgcctccaccactccccaaggcgatgtgctggatgcctctgccctgcgcaagatgtttgcctcggaccgcgtggaccagctgatggccatggccgacaagaacaaggacggcaagatcgacttcaaggagttctgcgacctgatccgcaagtacccctgcgactgagcgatacataaggcagatgcacggaccaatccctgcaataaatgcaccgtttcacaccgggccacgggcgcggcgctgattgacgcgtccccaagtaaactcctctcccaagccagtggcgccacggcacagcaccacgtgcggctgaagctgctgctgccctcagccacttcctctgttttccccgtcctcagttttccagttcttctggctttcagactttcagatgattgtgctttcatcctgtccctacgccacagcctgctgcctcgccactgctgctgaggcagtgagcctgctgtgctgcaacggccgacccttctgtaacgaacgacg

SEQ ID NO: 507 - DNA, 205 bp, Chlorella sorokiniana
  Clone ID: LIB3602-018-Q6-K1-D7
ttccacctgtcacaacagccgtactagtctccctgcctgtctctcatctttctcattcttcatccccagttcatcgcgctacgtggcgaggcgcgcaacacataaagtgttgcacgcacgtgagctgaatagcgacctcagcggtaaatagtaactttttgaaaaaaaaaaaaaaaaaaaaaaaaaaaaaaaaaaaaaaagggag

SEQ ID NO: 508 - DNA, 385 bp, Chlorella sorokiniana
  Clone ID: LIB3602-018-Q6-K1-D9
cgagcaggtgctgggcgacaaggacatcatctgcgtggaggacctggtgcacgagatcttcaccgtgggccccaacttcaagcaggccaacaacttcctgtggcccttcaagctgtcctcccccaagggcggcatcgacaagaagcgcctgcactacatcgagggcggccaggccggcaaccgccaggagtacatcaacaacctggtgcgcgccatgaactgagcgctgagccggcgagcacagcgcagcgcgcgcagcacgcacagcgcggcgcgtgcagcagcctggacggagcggccccctgatgcctgctagccacggcactgttggccgggccagtcgtgaggccccgagcgcacccgaatgtccaagggagtgcacggg

SEQ ID NO: 509 - DNA, 260 bp, Chlorella sorokiniana
  Clone ID: LIB3602-018-Q6-K1-E1
atagttctagatcgcgagcggccgccctcgaatctagaactagttttgacgcgtggacggacacgtgggataggggctaaattaaaaaaggtggcggactttaacattaaaatattagcactgtttcctaaatgacacctgcgttcctttacctgtgcgctaaattaaagaatttaaactcgttaaaccgaaatttttataataacaaatttgttttgaacaataaactgtgctattatcctgaaagaacagacaagagg

SEQ ID NO: 510 - DNA, 81 bp, Chlorella sorokiniana
  Clone ID: LIB3602-018-Q6-K1-E10
aaaaaaaaaaaaaaaaaaaaaaaaaaaaaaaaaaaaaaaaaaaaaaaaaaaaaaaaaaaaaaaaaaaaaaagaaaaaaaaa

SEQ ID NO: 511 - DNA, 546 bp, Chlorella sorokiniana
  unsure (1)..(546): unsure at all n locations; Clone ID: LIB3602-018-Q6-K1-E11
caaggacgagcgcaacgccaacttcttcgcgaagtgggcggtggcgcaggcggtgaccgccgcggccggcgtgctgtcctatcccttcgacactgtgcgccgtcggctgatgatgcaggcgggcggcgagcgccagtactctggcaccctggactgctggcgcaaggtggcggcccaggagggcatgggcgccttcttcaagggcgcgctgtccaacgtgctgcgtggcgcgggcggcgccttcgtgctggtgctctacgacgagattaaaaagtatctgaaccccgacgccaagcccagctccgagtaaagagctcgcgcaggctgcccgacccacggcggngtggaacttttttttccaacaaaccagccaacccacgctcctccgcactgcacagttgcctcctcttacagcgcttgctccctaccctccgctcgcccatgccatgagccgccagtgctgctgacgcacacgggcgctcgggacacgatatatgctgcgcacctccggcccctctgatgggcaaagctgcaacagatccgcag

SEQ ID NO: 512 - DNA, 398 bp, Chlorella sorokiniana
  unsure (1)..(398): unsure at all n locations; Clone ID: LIB3602-018-Q6-K1-E12
taaggagcagaagtcgaaggaggcgaaggcgcttgccgccgccaactccagcaagggcaagaagaagaaatggtccaagggcaagctgaaggagaaggtgaacaacctggtcctcttcgacaaggccacctatgagaagctgctcactgaggtgcccaagtacaagatgatcactccctcggtgctgtccgaccgcctgcggatcaacggcagcctggcgcgcgccgccatcaaggagctgctgggcaaggggctgattaaggaggtggccaagagccgcgcgcagcagatttacacccgcgcgacggcagccgccagctaagcagccacccagcagtttggcagcatgctagtgcactcgttgtgcttgccaatctggtaacaggtccctcgcanna

SEQ ID NO: 513 - DNA, 522 bp, Chlorella sorokiniana
  Clone ID: LIB3602-018-Q6-K1-E2
gctgaaccgcggccagacgctgtacctgctggaccagagcggcgaaaccgccaaagcggtggcccgcgagctgaccaagcgcggctttagcaaggtgtttgtggtgtctggcggctgcaacgcctggaccaacgccaagctgcgcaccaagccgtggcagggggaggggctcaacaccctgcgcgccccctccgcgcttgacgagatcatccaggtcactgagaagctggagcccctggccgagaagctggaggtgcccgagaaggtgaaggtcaacgcctgagctgcaagcctgtgagccttcaccgccactggcagcatggtaccagccgcccagagcagccattgctgtccatcgcggccccatctgatcgaacccaaggaatgtatccctcgcccccgtcccccgccctctgcctctcccagtggggccgccccccaacccagtctgatccgatttgcttgcgtgccgacatttcaggcactcccccttgtcgttcgcctgtacattacccgcttgac

SEQ ID NO: 514 - DNA, 511 bp, Chlorella sorokiniana
  Clone ID: LIB3602-018-Q6-K1-E3
cccatgcgcacggaggtcatcattcgtgccacgcgcacgcagaatgtgctgggcgtcaagggccgccgcattcgcgagttgaccagtgtggtgcagaggcgcttcaagttcccggagggctctgtggagctgcacgccgagaaggttgccaaccgtggcttgtgcgccgtggcacaggctgagtccatgcgctacaagctgctgggcggtttggctgtgcgccgtgcctgctatggcgtgctgcgcttcgtgatggagagcggcgccaagggctgcgaggtgattgtgtctggcaagctgcgtgcgcagcgcgccaagagcatgaagttcaaggatgggtacatggtgtcgagcggcaacccggtgctggagtacatcgactcatgcactcgtcatgtgctgctgcgtcagggtgtgcttggcatcaaggttcgcatcatgaacgagtgggatccgactggcaaggttggcccctcgacccctctgtcggatgtcgtcaccgtgctggcac

SEQ ID NO: 515 - DNA, 549 bp, Chlorella sorokiniana
  Clone ID: LIB3602-018-Q6-K1-E4
ggacagcggctctgcaaccatggcggagtccgtccagactttcggccgcaagaagaatgcggtggctgtggcctatgtgaagcgcggcaagggcgagatccgcctcaacggcgccccgctggagctggtgcagcccgagacgctgcgctggaaggcgtttgagccggtgctgctgctgggcaagcagcgcttctccaacgtggacatccgcatccgcgtcaagggcggcggccaggtgtcccagatctacgccatccgccaggccatctccaagggcattgtggccttctaccagaagtacgtggatgagcagagcaagaacgagatcaaggacatcctgctgacctacgaccgcacgctgctggtggccgaccctcgccgctgcgagcccaagaagttcggtggccacggtgcccgcgcgcggtttcagaaatcttacaggtgaaggctgccccgtgggacggttgggcgcctctggaggcttcttctgcgccgctggcgtggcggcagcggcgtctgcggcctaggcagctggcctggagcagcatg

SEQ ID NO: 516 - DNA, 288 bp, Chlorella sorokiniana
  Clone ID: LIB3602-018-Q6-K1-E5
acgcacccgaccctttccaaccagacattttttgtttggtccgcagggcggttctactgtgtctgtgtctgtgcgggcagagaagagctgccctgtattgatcgttacaaactttaattccgtccctggcacgcctgcatttaccctgctccctccctcccccgcctgtattcagaaattgtttagtcataggacgccggcgtctagccggagcgcgctccttgtaacattcttgggcccaaaaaaaatttacgccagctgccagaatatcaaaaaggccacggccgg

SEQ ID NO: 517 - DNA, 563 bp, Chlorella sorokiniana
  Clone ID: LIB3602-018-Q6-K1-E6
acgccccaggcctgctcatcttcaacgacatccgcctgcgcggcttctggctcaccgggggctacgccaagatgaaggacggctggcgcgccaaggaggatctggtggaccgagtggtggcgctgttccgcacgaaagtcttccgccctggcggcgtggcggccttcccgctggagcagtgggaagatgcgatgaagcaagcgcgggccgacttccgggacaaaatcctgctcaagagctataatggagaccggccgccctcctaggcataggcaggacacctcgcctgcctaggcaggttgctctacagcccacctgccgcccacctgccgcccagccggccttgccatgcggcggcggctccacccgccaccatgaaccgctggccacccagctgcataccgaacgcaacccatcacccaccggaccaccgtcaaaccccttatgctgaccgtgccacgtgttgtggtcagcacagcagctcccacaggagctgctgatttcatcggccacccacctggctcgcccctcgttccacccatgtgtgctcctgcacaggcgcg

SEQ ID NO: 518 - DNA, 92 bp, Chlorella sorokiniana
  unsure (1)..(92): unsure at all n locations; Clone ID: LIB3602-018-Q6-K1-E7
aaaaaaaaaaaaaaaaaaaaaaaaaaaaaaaaaaaaaaaaaaaaaaaaaaaaaaaaaaaaaaaaaaaaaaagaaaannggggcggccgtttt

SEQ ID NO: 519 - DNA, 551 bp, Chlorella sorokiniana
  Clone ID: LIB3602-018-Q6-K1-E8
cagccactggagacggcgtggcgtctggcagcagcggcttcaccatgaagctcaacatcgcattcccgtctacgggctgccagaagaagctggagattgaggatgacgccaagctgcgcgccttctacgacaagcgcgtgtcgcaggaggtggacggcgaggccctgggcgaggagttcaagggctacgtcttcaagatcatgggcggccaggacaagcagggcttccccatgaagcagggcgtgctgaccaacggccgcgtgcaggtgctgatgtcgcccggcgaccagtgcttccgcggctacggccgccgcaacggcgagcgccgccgcaagtcggtgcgcggctgcatcgtgtcccaggacctgtccgtgctcaacctggtgatcgtgaagaagggcgagcaggagctgccgggcctgaccgacgaggagaagccccgccagcgcggccccaagcgcgcgtccaagatccgcaagatgttcaacctgaccaaggatgacgacgtgcgccactacgtgaagatctacggcaagaaggtggagaagaac

SEQ ID NO: 520 - DNA, 279 bp, Chlorella sorokiniana
  unsure (1)..(279): unsure at all n locations; Clone ID: LIB3602-018-Q6-K1-E9
ctatgattagagcgctccccgaggcgctcgtacccggctgctgcatctggcgctctgcgctaactttcatacatccaatgctgccctgtatctgccctgtaacttgcactctgcatccctccatgtacatgatgcatgccttcctttccaataacacggcttgatacagatggatcgcccctcccctgcccccattcaaacacttgtccttctttgcacctcagagcacaggttcatttgcttgcaacccatgcattctgtaaatcaagctaccgnnna

SEQ ID NO: 521 - DNA, 546 bp, Chlorella sorokiniana
  Clone ID: LIB3602-018-Q6-K1-F1
gtcctgcagctgaaacgcgtccacattgcagcccaggtgcctgcctgcaaacgctgtgttttgccgcagcctgctcctggcctgcttgcttgcccaatgcctccagctctgttgtcaaccgaggcatgatgcgcatgagcatgatacagtgccctcagagagcgctgcagctactgccgccgccacccgccgccaacagcttgggcaccggcttcccacccgcaggcacttgcagccatgacgctgaccaactcgcccgtccacccctacttcccgatcgacctgcacctgcccgactatgtgccgctgcaagcgcacttcagctacatcttgggagtgttcacggctgctgttgcgattgtgtttgcgatcacctggaagctctcagcccggcacaagcacctgaccaccgttgagcgcgtgattgcctgctggttcatggtgacgggcctcatccactctgtgatcgaaggctgggtggtggccaaggccgacttctacaaggacacctccggcaactacctgtcggacacatggaaggagtac

SEQ ID NO: 522 - DNA, 415 bp, Chlorella sorokiniana
  unsure (1)..(415): unsure at all n locations; Clone ID: LIB3602-018-Q6-K1-F10
cccacgcgtccgggagatctgagcggctgccggccggctcagcgcgctggcgggagcagccgcggcgtgcccggcagcatcagtgtgatatgccgtgcagcgccgccacccccagtgtaacttgaggcttcgnanaaaaaaaaaaaaaaaaaaaaaaaaaaaaaaaaaaaaaaaaaaaaaaaaaaaataaaaaaaaaaaaaaaaaaaanaaaaaaaaaaaaaaaaaaaaaaaaaaaaaaaaaaaaaaaaaaaaaaataaaaaaaaaaaaataaaaaaanggggggggcctttttaaaggtcaaaattttctttgcggggggttggaagtaaaaagttttttttttggggcccccaaaattaaattcctggcccggttttttaaaagtgggagatggaaaaaaccttgtgttaccc

SEQ ID NO: 523 - DNA, 439 bp, Chlorella sorokiniana
  unsure (1)..(439): unsure at all n locations; Clone ID: LIB3602-018-Q6-K1-F11
gggcccgaacaaacccttaagtgcaaggggaacgagatccgaaacggccgcctcgccatgatggccttcctgggctttgttgcgcagtacgccgccaccggaaagggccccattgacaacctggttgaccacgtggccgaccctttccacaccacttttgggcacaatggggggagcgtgccctttatccaataagccccttacggattggcccggttggtttgcgggggaaattgttgcctgggttggttttccgccgcccccaccccctgaaaaaaactccctcctgttccaattacgtgtattggtggcctgtacccaaggttttcgtttggtggtgctccctccgaatgggcaccacggggccaccctttgcaaaaaccgtttttttaaaaaaaaaaaataaaaattataaaaaattanngggggggggccgttt

SEQ ID NO: 524 - DNA, 441 bp, Chlorella sorokiniana
  unsure (1)..(441): unsure at all n locations; Clone ID: LIB3602-018-Q6-K1-F12
ccacgcgnncgcttntactaccgncgcctcaccaagaaccccaactactacaacatgacgggcgtgagccaccggcacgtgagcgaccacctgtctgagctggtggagggcatcctggcggacctggaacagtccaagctgattgcggtggaggacgacatggacctggagcccctcaacctgggcatgattgcggcgtactactacattgcgtacaccaccatcgagctgttcgccttcagcctcaccgncaagacgaagctcaagggcctgctggagatcctgtccagcgccagcgagtacgacgatgtgcctgtgcgcccaggagaggagcgcgtggtgcanaaactgctgcancacgcgccgctggctgtggacaagcccaagttcaccgacccgcacaccaaggtcaacgcgctggtgcaaacgcacctgtctcgc

SEQ ID NO: 525 - DNA, 277 bp, Chlorella sorokiniana
  Clone ID: LIB3602-018-Q6-K1-F2
aaaaagaaaataaaaaataaaacacaatgcaaatccgggtgtctgtttataaacaaaacaagcttacatacgcagtgcgggcgacatgatagatcgtctatatgcgctaccgttaagtcaatatacctgagcctttattttacatcaacatgaaatcgaataactcatggagtgctctaacatattcggcttgaaccacactccaatatctccaacttgcgttgtaaagaagaaggccctacctatcgtgattctgaacaactggacaggctaaata

SEQ ID NO: 526 - DNA, 500 bp, Chlorella sorokiniana
  Clone ID: LIB3602-018-Q6-K1-F3
gcgcgagaccgcagcagccatgtgcctgggcggcaaagcggacgacagtgatgcagacctcgtgcggcggctgtttgaggcggtgggcaagatttacagggtggacgacaagctgctcagcgcggttacgggcctgagcggcagcgggccggcgtacgtgtttgtcatgatcgaggccctggccgacggaggcgtgcgtgcgggcctgccccgcgatattgcgcagcagctggcggctcagacggtgctcggcagcgccaagatggtgctcgaaaccggcaagcaccccggagcgctcaaggacatggtcacttcacccgcaggtaccaccatcgccggcgtgcacgagcttgaaaaggcgggcgtgcgggcggcctttattaatgcagtttactcggccacacagcgggctgatgagctggccaagctgggcgcttgagccaattttttggacgtttcagcagacacctgcagttgcagcgcttgagcagttttttttg

SEQ ID NO: 527 - DNA, 492 bp, Chlorella sorokiniana
  Clone ID: LIB3602-018-Q6-K1-F4
cgaaaaaaaaaaaaaaaaataaaaaaaaaaaaaaaacaatattgggtctacccctctaataaaacccaagcttgcgtgcgcgttcttgagagatcaacaggtcatatatagcaacccctaacttcaattcacggccagtgcttccacaatgcagagtatgggaccaccatgaacaaccccattttaatcaaattcctgcacatccccatttcaatagctgttgtaaaaaacaacattcctacacctgtgcgtatttacgaacaggatccacactcctaaccgtaaacaacactcgccctttctcaacatataaagtgcagccccctgtttagccaccctcaacgtgcccgatatttttgtcacccccatagcgcccgctccattttgtatatccctttccccccaacacatgtctgtttactttccctttctagctacaaatgccagttttcctctagaattactatataggggtattcctcaccgttaccc

SEQ ID NO: 528 - DNA, 545 bp, Chlorella sorokiniana
  Clone ID: LIB3602-018-Q6-K1-F5
gacgcggagatctcccgccaggtggactacatcgtgggcaacggctggaccccctgcctcgagttcgcgggcgctgactctgcgtacaccagcaacgagaactgcgtgcgcatgcagaacaccacctgcctgtactacgacaaccgctactggaccatgtggaagctgcccatgttcggctgcaccgatggcggccaggtgctgcgcgagattcaggcgtgccgccgcgccttccccgacgcctacatccgcgtggtgggctttgaccccgtgcgccaggtgcaggtgtctggcttcctggtgaaccgccccagctctgtgcgcgactaccagggcccctccacccgctccgtgtaagcggctgagcggcagctcaactgtggcctagccactgcagcagcagcagccggcggtcagcggcggcggcgtgtgcggcggcccgcacagggcctttgcccgacgcctttcgctgccgccaccccaccccttccaacccgacattgtttgtttggtccgcagggcggttctcctgtgtctgtgtctgt

SEQ ID NO: 529 - DNA, 472 bp, Chlorella sorokiniana
  unsure (1)..(472): unsure at all n locations; Clone ID: LIB3602-018-Q6-K1-F6
aaactcaggcacgacgcatgccgcnccgngcagcacccagaccgcgggggcgcgccccaccgcggcggggaagccccaccagcgcgcggcacgagcggcccggcctgcggcgagcagcgccgcgaagaaagagcaggaggctgccggcgcgaccgccgccgacgccgcggngcgggccaacccgangactgcccaggcngcggccacccccagcccgaacaaccggancggcgccgnggaggcgggccgccaggggcaggccgccagngcnggcgccaacaccgcgagcnccaaccgcgactccaaccgccgctaaactatgcggactggtgtaccggaccccgagaagagaagtaacctcttgcttgctaggccctgcttagagttttagctgctcagcgctgtggcgccggcggcacaccctatgtgggacaacacctgtgtgcactaaagaggaattttatcctgtaac

SEQ ID NO: 530 - DNA, 535 bp, Chlorella sorokiniana
  unsure (1)..(535): unsure at all n locations; Clone ID: LIB3602-018-Q6-K1-F7
ggatcaccccatagccaccatgcagaccgtcgccgcccgcaccggcgtggccgcctctggcgccacccgccgcgtgacctccatgcgccgcaccgtgaaggccaagcccgtcaagtccgacagcgtgtggtacggcccggaccgccccaagttcctgggccccttctccgatggcctggtgcccgcctacctgaccggtgagttccccggcgactacggctgggacacctctggcctgtccgccgaccccgagaccttcaagaagtaccgcaccatcgaggtcatccacgcccgctgggccatgcttggcgccctgngctgcatcttccccgaggtgctggagaagtacagcggcgtgcagttcggcgaggccgtgtggttcaaggctggcgcccagatcttcgctgacggcggcctgaactacctgggcaactccggcctggtgcacgcccagtccatcgtggccaccctggtggtccaggtgctgctgatgggcgccgtggagatctaccgcgccaacggcgagggccccaac

SEQ ID NO: 531 - DNA, 536 bp, Chlorella sorokiniana
  Clone ID: LIB3602-018-Q6-K1-F8
gcagccagcagcagcgaagagcttgtgccctactccaacccctcccaaggctacaccctgatgcgacccaccagctgggagcaggtggacaaggcgggtgcagatgccttgttccgagatccaaccaagaagagcagcaacgtgggggtgacggtctacccagtgacaattgcgcgcctggagcagtttggcgatctggatgctgtgggcgagcggctgctggcagcagagcgagccaaggagagcacgctgggggtgaccatggtggcgcaggctgctcgctcgctgcccagcggcccggcagtgtacgactttgagtatgagctggagagcactcgtggccgcaagcgcatcctgtccacggtcaccatcgcggggcgcaagctgtacatcgcaaacggcaacgtgggctgcagcaaggaaagctgcgatgcggcggcggcgggggcgctgccgctggtgcggcgcgtcacgcagtcgctggctgtgcagtgacaacggctgtggcagtgtccagcacttgcaagctcttttgt

SEQ ID NO: 532 - DNA, 470 bp, Chlorella sorokiniana
  unsure (1)..(470): unsure at all n locations; Clone ID: LIB3602-018-Q6-K1-F9
tcgtcctccctgcctacctggtctgcctgccctagtgtgctggactggtagcaccctttgctgccccagcgtctgtctgcctctgcctccttgtgctttcatgcagctttcatgcagcttatgcagcatcgttgcggctgtcccgctgttcacccctttgcctcacctccctgcccctgctagctccttcccctccccacaaatgaacccaacagctggcctcgctcggctgtgaaccagcccctaaccttgccagaacaattcgttcgcttcgcgcgcttgcaccctccatactgcaccgctgccgaccctccttcccttccctcctgcacaccaaaacaccctgctgcacacgtncctgccactcgcccggcgattgatcccgggagggttgaaccctccaacccgctgcgcggttntttcccttcaatttttgcagttgtaacatgtggcagcgccaaannnaaaaa

SEQ ID NO: 533 - DNA, 133 bp, Chlorella sorokiniana
  Clone ID: LIB3602-018-Q6-K1-G1
gcgggacagagaccaaaaaagacaaagcgcacttgcctgccattctaaatgagccaggcatacgtccaccatgacgatgcgggttctacgatgacgagcggtggcggcctcctgcacgtcacaaccctgggct

SEQ ID NO: 534 - DNA, 553 bp, Chlorella sorokiniana
  unsure (1)..(553): unsure at all n locations; Clone ID: LIB3602-018-Q6-K1-G10
gggagccgtgctgggcctgctgattggctgcgtggcgcccctgaagcacctcttctttcccagccagaccgcggcgctcggcttcatgacgggcgcgatgcanagcatccagcagtcctacctctttgtggcgtccttcatcaacggggcggcgatcgcaaagggccccgggcgaggcactcgctccctgggctggaaagctatgttctcggtggtggcaattcgtttcctgctgctgcccgcgctgggagcggtggtggttgcgggcaccgtcgccgccggcttgtacctgccgcccaacccgctgttcgcctttctcatgctgctccagtactgcgtgccggccagcaaccagtgccagaacctggcgaccatggagcggaactgcgagcaggagatgggcgcgctggtgttttggaactacgcggcggcgcttgtggccgtgcccgcctggatggtgggctacctgtggatgcttggagcatttgggctgtacagcagctgagctgaaggggggcaggcgcactcttctcgaggcatgctaatcagcttg

SEQ ID NO: 535 - DNA, 443 bp, Chlorella sorokiniana
  unsure (1)..(443): unsure at all n locations; Clone ID: LIB3602-018-Q6-K1-G11
cccagatgtacatcctgatgcgcctgctgggtggtgccaagaagcgcaagaagaagacctacaccaagccgaagaagcagaagcacaagcacaagaaggtgaagctgcgggtgctcaagttctacaaggtggacgacagcggcaaggtgcagcgcctgcgcaaggtgtgcccccagtgcggccccggcatcttcatggccacccacttcaaccgcgtgtactgcggcaagtgccacctgacgtacgtgtacgacaaggagggccagaccgcctaagcgccccgctcccccctgcggatgcacgcttagcagcagcacacgcggcgggtgcgcccggcatgccggcacaccagccacggagcggcggggcgtccctggcagcggcgcagcgcctgcaagcccttctgttgtgttctgtgccgctgtaatacccctgctgcnnaa

SEQ ID NO: 536 - DNA, 543 bp, Chlorella sorokiniana
  unsure (1)..(543): unsure at all n locations; Clone ID: LIB3602-018-Q6-K1-G12
gggccttgggcgagctcggtgtcccgctcctgcgtcacccagccatggcggcgatttccaagacccgcaaggccgtcgccgatggcgtcttctacgctgaactcaacgagctcctcatgcgggagctgggcggngagggctactctggtgttgaggtccgcgtcacccccatgcgcacggaggtcatcattcgtgccacgcgcacgcagaatgtgctgggcgtcaagggccgccgcattcgcgagttgaccagtgtggtgcagaagcgcttcaagttcccggagggctctgtggagctgtacgccgagaaggttgccaaccgtggcttgtgcgccgtggcacaggcggagtccatgcgctacaagctgctgggcggcttggctgtgcgccgtgcctgctatggcgtgctgcgcttcgtgatggagagcggcgccaagggctgcgaggtgattgtgtctggcaagctgcgtgcgcagcgcgccaagagcatgaagttcaaggatgggtacatggtgtcgagcggcaacccggtgcgggagtaca

SEQ ID NO: 537 - DNA, 554 bp, Chlorella sorokiniana
  Clone ID: LIB3602-018-Q6-K1-G3
gcgcagctgcaggcccgcaccatctatccgccggaccccgcagccgctgggctggtcaagaaggcagccagcggcaaggcaattgggacgttcacggacccgctgccgctgagcgaccctccctccaccactccttggctgtcgctggctgagggccgcaccgcatttgcagccgaggcagccggcctgtgccggtaccacctgagtgtgtggtcctcccagaagaagctggtactgctgtaccgtgagcaggggggcagcagcgacggcagcagcagcgacggcagcagcagcatacgcggcggcggcgagggcagcctgcggcccacgcagtttgccatctgtccagctgcagacgactatgtcgtcgacatgtggttattaacttgcgagcggcagatcacagaccctctcggtgcggatgtgcagtcagcggggtgcagctgccagctagcagacaacgatatccatgcagcgtgccccacagggcagtggggctggcgatctactgctcgagagccgcggcaggggctgtggttttacgtggtggtgct

SEQ ID NO: 538 - DNA, 391 bp, Chlorella sorokiniana
  unsure (1)..(391): unsure at all n locations; Clone ID: LIB3602-018-Q6-K1-G5
tcgacccagcgtccgataaaaaaaaaaaaataaaataataaaattaaataaagttttagngatataataataaaaaataagggcgaatttatggggaggatgaggggttctatacagatcattcaattaaactacctgtttgtggtgtaacaaataaacgggctggtgaacccatagggtcacccaccttgctctccttaccccagatggtcatctatttaattggcgtaataaaaaaaaggcctgctcctttccgcccttttgaacagtagcacatcctgaattgccaatcttactctctttgtagcctgccattctactgcgcggtttttttatttagctaaataataaccgctacacttgttataaccctaaaacccgctgaattatt

SEQ ID NO: 539 - DNA, 317 bp, Chlorella sorokiniana
  Clone ID: LIB3602-018-Q6-K1-G6
gcgaaggagatcaagaacggccgccttgccatgctgtccatgttcggcttcttcatccaggccatcgtgaccggcgagggccccatcaagaacctgaacgaccacctggctgacgcctctgctaacaacttctacgccctgtacgccaagaacctggcgtaagcacttgtcgtacgaacgtacgaggcccgcgcgcgattgtgcgccccttgagaagatcacacgaccctgtcgcaccgcactgccgcctgtacgcacccaccatgtgtatgtgctagagcctatgaagttttgtgtaagcccttgatactcctaac

SEQ ID NO: 540 - DNA, 549 bp, Chlorella sorokiniana
  Clone ID: LIB3602-018-Q6-K1-G7
cggacgcgtgggctggtggatgaggtggtttgggaggagcactgcacggggcacgcggctgatgccgacctggacatcaaggaggtgaagccgaagcagctgtgcctggtggccttcctgccccacatcctggactccaaggcggcgggccgcgaagcatacctgcagatccttcgagacctagcggtcaagtacaaggaccgccccttctcctacctgtgggccgagggcggcgcacagccaaagctggaggccaactttggtgtgggaggctacggctaccccgcgctcatcgccttcaacccggccaaggccaagtacgccaccagcaagtcggcgtttgaggacaagcacgtgaagcagttcctggagtcggtccgcttgggctttgagagcgtgtcggatgtgagcggcactctggccaagatcgaaaaccgcgcaccctgggacggcggcgagggcactgtggatgcagcggacgagtttgacttggcggatttgatgggagatgatgacaagaaggaggagctctgagcgcagcttctagct

SEQ ID NO: 541 - DNA, 431 bp, Chlorella sorokiniana
  unsure (1)..(431): unsure at all n locations; Clone ID: LIB3602-018-Q6-K1-G8
gccggtttcgctgcagcgcctggtgctttccagcaaccggctgtccagcttagcggggctggagcagctgcgcaacctcaaggtgctggtgctggacggcaaccgcatctcgcacctgcccgagtggctgggcgagatgaccaagctggagacgctgtcgctgggcgacaatgctgtgtgcgagctgccggccagcctgngcaacctgacgcggctgcgccagctgctggtgtgccacaacaagctgcgccgcctgccggaggagctgggcaactgctcggccctggaggagctggatgtgcaccacaacgcgctcgaggagctgccggcctcgctgggccggctccagcgcctcaagctgctgcagctggacagcaaccagatcagcgagctgccgcctgctgtcctgcgcgactgctctgcacttgtcg

SEQ ID NO: 542 - DNA, 411 bp, Chlorella sorokiniana
  unsure (1)..(411): unsure at all n locations; Clone ID: LIB3602-018-Q6-K1-G9
aaaaaaaaaaaaaaaaaaaaaaaaaaaataaaaataaaaaatttaaaannnnnnaaaaaaaaaaaaaagaaggagaggtaatttaaaaggggggggggggaaataaaatatattatttttaaaattaaatttaaatttattttaaattattaaggtggggggggcttttataaaaaataaaattttattttagtttttttgaaaagaattatttttttttatggggaaataaaaaaaaataaaggggggcggttttaaaaagttttaaatggaaaaaactttggtttaaaaaaattaaattcgtttggaaaaaaaaccttttttaaaaagttggtttaataaaaaaaaggcccaaaaatttggtttttaaaaaattttgccaattttaattggaaatgggaaatccttttt

SEQ ID NO: 543 - DNA, 519 bp, Chlorella sorokiniana
  unsure (1)..(519): unsure at all n locations; Clone ID: LIB3602-018-Q6-K1-H1
tgcgcggctatggcctgtcnggagacgcgcacacatcacacagccgccccccggcggcattggtgccggctggcaatgcagcgtgcgctgcggcaggcaaggctggcacctcaacaggtctgctacatcaatgcgcatgcgacgtccacgccgcaaggcgacgacattgagcagcgggccatcgcggcggtgtttggagaggtggctacgagcgcggcgccagcctccggcggccctcccctggccgtctactccaccaagggcgccacggggcacctgctgggggcggccggtgctgtggaagccatctttgcgctgctggcgctgcggcacggcgtggcgccccccaccgtcaacctgacggctcccgacccgacgctgctggccggcctggtggccggttcccctaccaccctggcccagggacctcgtgccgtgctgtccaacagctttggatttgggggcactaacgcagccttggtgtttgcctcgccccccgggccggtgtgagcgggcgcc

SEQ ID NO: 544 - DNA, 275 bp, Chlorella sorokiniana
  unsure (1)..(275): unsure at all n locations; Clone ID: LIB3602-018-Q6-K1-H10
cacaactgcaggaggtgctggctgagctcaccaaggagcagcgcgcggctgccgagaagaaggtctgaggcagccatagtgcggcgctgccgggcatcgcagccctctgaaactcacccccttgtgaccatgcgtgtttcagtattgttacttcgtaattctgctaccggtgtgtttatttatgttgtcgccttgccgactgacctgccatgtgtacaattcattcatgagacgatcccgagccatatggtaacctcactgcgagccccnnanaa

SEQ ID NO: 545 - DNA, 553 bp, Chlorella sorokiniana
  unsure (1)..(553): unsure at all n locations; Clone ID: LIB3602-018-Q6-K1-H11
gaaagcgtgtgcacagcagcagcggcagcatgcggacgcctggcatcgagcgctgttgctgcctgcctgatgtgcggtcgcggtgaaaggccatacacccgcttctgagtgtctgcatgctgctgagttgagaccaaacttttgtttattcccctctttccgcagactctgggcctgctgatcggagccacagtgatggtcgtcaagactgcgcagacagtggcaggtgggcttctgattcgggcttatgtcatgcccctccctgccgggggaacgcagtgccctgccgcagctgtagggaatccacggggcagcacacacgttacttgctggggttgcatcaccgatgtggcgattagcaaggcgtccggngtgcaagtgttcccattctttccctctccgtctcactgcgccggcctgccccgccccactcaactgctgcagccgtgctgatgctcacattcatgctagtgggcggcttttatgtgaccaacatccccgtgtggattgcctggatcaagtggctgtccttcctcacgtacaccttcagcct

SEQ ID NO: 546 - DNA, 364 bp, Chlorella sorokiniana
  unsure (1)..(364): unsure at all n locations; Clone ID: LIB3602-018-Q6-K1-H12
ggagacatcatcncanagctccncaacatccttaccacacacctggcggcggccggcggcagcagcaatgcggccgtggcgccgtgaggcgcggagcgcacgctacgcggagaaccaaaaccacccgcctgcctgccagcgcgccttggcccggcggaagtggtgcccattgtacagcagcaaattggctgcgcatccattattcggagctcccctatcattcttgcctgagggacgcgcgtgattggaaaaacccgtgcccactcttagaccccccctacttttgcacttttgctttaactctgcactggaaccctactgagacacactccaacgcaacacaccataaaacttgaatgaaccc

SEQ ID NO: 547 - DNA, 566 bp, Chlorella sorokiniana
  unsure (1)..(566): unsure at all n locations; Clone ID: LIB3602-018-Q6-K1-H3
cacgcgggcgcggacgcgtgggcngacgcctgggcgagaagtaaagtgtcactcttgacgcccaaagcaaactggtgcaccagcgacaacatccaggcaccgagggagtgcggagccgccagccagtgcggtgccgaaacgcagtccatgccccatcccccttggctataccctccctccccccttgcccaggcgccgtcctctgatgatccagtggtgccctgattcttagagcccacccatctgaacgttcagtgacatcacactatgtccgagcatttcgtttcgttagcgctgccatttcattgcccccctccgattattttggtcaaccaacttgatccccaacaaacgcaccctttcatgcacattcgtttacatttgatgagcagatccaagatgtaacagatgtcgcaccatattatataatgttaaaactatgcagatttgagcaaaaaaagtcttgtgttctgacacttaagttgttttggcattccctacctttgactatctctttatattaacaaataattttgtaattaaagagttttttattttaaaaatat

SEQ ID NO: 548 - DNA, 248 bp, Chlorella sorokiniana
  Clone ID: LIB3602-018-Q6-K1-H4
gcgcggctgccaataagaaggtctgaggcgaccatagtgcggcggtggcgggcatcgcaaccctctgaaactcacccccttgtgaccatgcgtgtttcattattgtgacttcgtaattctgttaccggtgtgtttatttacgtcagtcgtcttgccgactgacctgccttgtgtacaattcattaatgacacgatccccacccatatactaacctcattcatagccacttgaactacccagagggata

SEQ ID NO: 549 - DNA, 346 bp, Chlorella sorokiniana
  unsure (1)..(346): unsure at all n locations; Clone ID: LIB3602-018-Q6-K1-H6
tggcgggcggtgggcgcacggtgtcactgcgcacagccccggcacggaggcgtactcgtcgtcccggctgaacaagtccacgacacataagatggcagccaagtcggagattacactgacgagttcaacaagaagagctggaggaagtttggcaagcaaaatggccgagccatgccggagtgccagcgcatgcactagccacctgncttctgggcatgcctctgccgaagctagggggtgtgccttgcatcattcgtatttatgctcaccacgctgttgcatgctgccatttttctagctctcaccggttatataaacactgcgaataagaccaaacatccccgtg

SEQ ID NO: 550 - DNA, 445 bp, Chlorella sorokiniana
  unsure (1)..(445): unsure at all n locations; Clone ID: LIB3602-018-Q6-K1-H7
atggccggcgagcgtgtgcggctctacgtcacgggccagttcctgggctacaagaggagcaaggccaaccagtacaaccacaccgcgctggtgaaggttgagggcgtgaacagcaaggaggagaccgagttctacctcggcaagcgcctggcgtacgtgtacaaggcgaagaccgagaagaagggcagcaagtaccgcgtgatctggggcaaggtgacccgcgcccacggcagcgtcggcaccatccgggccaagttccagaagaacctgcccnctgcggccatcggcagcaagatccgcgtgatgctgtacccctcccgcgtgtgagggtcggttgcttcccggagcagcagcggtgcggcacggcgcggcggtgacgagtcgtggcagtgcgaccncgctcggcacggccgcccgggtggcgccgccgtcgcctccatgtaac

SEQ ID NO: 551 - DNA, 557 bp, Chlorella sorokiniana
  unsure (1)..(557): unsure at all n locations; Clone ID: LIB3602-018-Q6-K1-H8
ggattgtcgactaccgtaaccaatacgtaccatgcttgaggcagcattatgaccgtctgctggacctgccacagcacctgcccatccgaattttgtttcccagtcaagggttttggcgtgattacctgngagatacaacattccctgagctagataaccctgcaggccagtccgacacattcaggcggttctacggaacgtgcgcctggccctcagacgtgttcgggcacgcatggaagacctttgatgcacattggccgcaagattatttgcgagacatgtcgaagaatgtgagtgcgcacgacactttccctgagtgcgacaagcactacaccctggaagatgagctggccatggcgcangcatgctgcttcacattgtaccccggctgcgcaaagcccgatggcagcaaccgctgccatggcccgcactgccccaagaaccccttgtggtggcaccccaactgcacctncattcccaccatggctgcgcccttgaattgacgagggtttgtttgtgaaagcatgtaatgttgccatatttagtatttcattttt

SEQ ID NO: 552 - DNA, 502 bp, Chlorella sorokiniana
  Clone ID: LIB3602-018-Q6-K1-H9
ccttgtttcttgccctgcaccagatctccaagcaacgatgcaggctgcccagctccaggctcgcgccacggcggcccgccgtggctcgccgcaccaccgtgcgcgtgcaggctcagcaggccgcgccccgcgctcaggcccccaagccccagcagtttgctgctggcctggctgccgccttcgctgccgtgaccctggtgctggcgcccgccgccaacgctgctgaggcccgcgcggaagtgaagagcgtggtgtgcgccagcaaccccacctccaagatctgcctcaaggacagcgccaagaactgaggcgtgccagctggactgagcgagcgctgagcccttgctggccgcacctgaggcaggcagccattgctgactgccggggggcaccgggccgccacccgctgcccggcagcatgggcgaggcggcgtgagaaagagaggacttgtgcactgccacacagttttttggacacctgtgctgtaacatatacttgagg

SEQ ID NO: 553 - DNA, 319 bp, Chlorella sorokiniana
  Clone ID: LIB3602-021-Q6-K1-A1
catggccacgctggatggctgaccggagccaatcacacccccaacacacatttcgtcgtctgcccacatccccgccaaggtgacacccaataaacatcgcagactgcctacgtacgccacctgactctgcaatgcctttgtgcaccgattttgtagcgccttgtataagccttatgctgcttgtccattgtgttaccccgctctgcgccttgccgaggctgatctcactctcaatcccgcaagaatgcagaccctgcaaccgtttgctcccaacagttttgcccccgccccctatttctttaacgcctgagcgcgtgcc

SEQ ID NO: 554 - DNA, 268 bp, Chlorella sorokiniana
  unsure (1)..(268): unsure at all n locations; Clone ID: LIB3602-021-Q6-K1-A10
tttgaccccgctcgctgccgcactgcggcgcaccatgctccttccccacaccgaccctgcaccttggccctcatattgctgccgtccgtcgcctgccgtgccccgccagcccgcctcatggggcgctccatgcagctcacatccccctggcaggctggctgagcacttaggctagacagcagctgcccgttggcctccctgcacccggttttgctcccttcttgcttccacnaacccgcttgcagcaaccgttgcttcgtgcacctgc

SEQ ID NO: 555 - DNA, 283 bp, Chlorella sorokiniana
  Clone ID: LIB3602-021-Q6-K1-A11
atggtgctgagcggcaggtggcgtctataagtccgttggttgagagcatttgcagagtggaacaggaagttttgcctcccctgctcttgttccccctatttgtgacgccgttgcgcaccaggcgctcgcaatttattgaacctgatgtgctgcttgcgcatacttgtgacaccgttgctcactaggcattgccactttattaaaacgagacgtggaaaaaataaaatatgacaaacaaaacgatggaaaagcaacaaaaaaagccactttcatgaaatagaac

SEQ ID NO: 556 - DNA, 271 bp, Chlorella sorokiniana
  Clone ID: LIB3602-021-Q6-K1-A12
ggaggagcctggacgcaatggtgcagggcggctacaagtaccaccagtaccaggtggtgggccgccatgtgcccaccgagaaggagccggagcccaccatctaccgcatgaagctgtgggccaccgacgccgtgcgcgccaagtccaagttctggtacttcctgcgcaagctgctcaaggtgaataaggccaacgggcagatcctggccatcaacgagatctttgagcgcaaccccaccaccgtgaagaactatcggtatatgggtggcgc

SEQ ID NO: 557 - DNA, 266 bp, Chlorella sorokiniana
  Clone ID: LIB3602-021-Q6-K1-A2
gatgatctgccgcaagtgctacgcccgcctgcacccccgcgctgtgaactgccgcaagaagaagtgcggccacacctcgcagctgcgccccaagaagaaactcaagtaaactactcgcttcggcacgagcggaagcggcatgagcggcagcaaccgctgccccccccccgccccgccagccgggatgccatgacagcaccggctgctcagctgctgatgtgctgcatgtcaattgctgctgcggaaatgtaaccggtggtagcgat

SEQ ID NO: 558 - DNA, 238 bp, Chlorella sorokiniana
  Clone ID: LIB3602-021-Q6-K1-A3
ggctttggccctacactctgattcaccattggcctgcaaaggagaacccaagcggggcgcccacggacagactgcactcacgcccttcgggcgaatccaggcgaccggcgcgtggtaacatgtgccatatcggtatgagctatggataagcacgctgagtgcctgctctgactacgcctacggcgcgcgcggcgcgggcggcgtgatccctcccaatgccaccctggtgttcgatgtt

SEQ ID NO: 559 - DNA, 339 bp, Chlorella sorokiniana
  unsure (1)..(339): unsure at all n locations; Clone ID: LIB3602-021-Q6-K1-A4
gtttgagaagaagctcaaggcggccaagaccactgcagaggagattcgccgtgtgctgctgggcaagaactgaagggtgtagcgcagtacaccacgggctaacatcgcagcaggccggcaccatgtgccgcctgctcttcagcagcctgctgcggcaactagctagcgtggggcaccagcagccagccaccttccctcttgcaccacctctgctgctaccacatttgncaatggcagcgaggcattgctgcactttgtattacatcactgctttccagcttccaactcttctcaagctcagcctctcccgccaaacctttctgattgctctctttttgc

SEQ ID NO: 560 - DNA, 284 bp, Chlorella sorokiniana
  unsure (1)..(284): unsure at all n locations; Clone ID: LIB3602-021-Q6-K1-A5
ggctctgtcgatgaaggccgcccgcccggtggcagcccgccgctccgtggtggtgcgcgccgaggaggccgctgcgccagctgccgcccccaagaagccggacgtcggccccaagcgcggcactcaggtgcgcattctgcggcctgagtcctactggttccgcgagaccggcaaggtggtgtctgtggaccagagcggcatccgctaccccgtggtggtgcgcttcgagaaggtcaactacgccggcgtgagcanccaacaanctacgcgctggnacgaaggtt

SEQ ID NO: 561 - DNA, 288 bp, Chlorella sorokiniana
  unsure (1)..(288): unsure at all n locations; Clone ID: LIB3602-021-Q6-K1-A6
ccttgcagctacgagtggaacaagtacaaccagacgcactacgacggagacaacccaccgcccaagacagtgcagggctacaagttcaacatcttctaccccgagctcatcgacaagacggtggcccccacgtacaaggtggagaaggacccgctggcggaagacggtgcgtcggctttgcctttagttttgcttgatctgcctggtgaagacgccgccatgcaaggggagagggacccggtggcggaggatggtgggtaaaggtcattgtttgantcgctttttcag

SEQ ID NO: 562 - DNA, 66 bp, Chlorella sorokiniana
  Clone ID: LIB3602-021-Q6-K1-A7
atgaaaaaaaaaaagataatataaaaaaataaaaaaaaagaaaaatgatatttataaatatagaag

SEQ ID NO: 563 - DNA, 317 bp, Chlorella sorokiniana
  unsure (1)..(317): unsure at all n locations; Clone ID: LIB3602-021-Q6-K1-A8
accagtcgttcggagagcagctatgccaggacccaaatcaggccgctgacaaactggttgaggccatggcagctggcggcgaggaggctcgcattgcggtagcagctctcctgtcctacagctgcccaggcggcccgccgcagatgcaggccacgtttgatgccttcacaaacgccacgactgcagaccggaacgcgctcagacatggggttgtgaggctgaacatggcggagcctgtgactagcgcacaagcgagagtggcaccgtgctggcggcgtacaggngtgcnnnactcaaacggccctgccttggggggg

SEQ ID NO: 564 - DNA, 259 bp, Chlorella sorokiniana
  unsure (1)..(259): unsure at all n locations; Clone ID: LIB3602-021-Q6-K1-A9
cccgccagcccgcctcatggggcgctccatgcagctcacatccccctggcaggctggctgagcacttaggctagacagcagctgcccgttggcctccctgcacccggttttgctcccttcttgcttccacaacccgcttgcagcaacgttgctcgtgcactgctcccagcagccggtggtgctcaacgatggggtcacccggacacccgacctccgctgttgttgtttcattccagcattgcatgncccacgtgtgtgt

SEQ ID NO: 565 - DNA, 196 bp, Chlorella sorokiniana
  Clone ID: LIB3602-021-Q6-K1-B1
gaggccctggccctgaccctgacctaccaagcgacaagcaaagccgcgtgagtcctcaattggagaggacgcagagccccggtgctcgcttggtttacgctctggttgcaattcacatacatgccggcattcttgaaatgacggctgccatttgtttaaccaaacacctgccgacttttttccaaccttttttgtc

SEQ ID NO: 566 - DNA, 237 bp, Chlorella sorokiniana
  Clone ID: LIB3602-021-Q6-K1-B10
aagtgacacatgcgaaacaggtgcttgtcgcctcgtgtcgctgctgtgccgctcgttccgctcgtgcctcctgcctgcccttggtgctgtgtgctttgcctgctatctactggcgctgagcgcaaccatattggggtaagtattgcatttacagggccctgcagacgccaattgatcgtaatggagagcactcggccgtcgagattgtgtgcacacaacatgtaacaagctaagcat

SEQ ID NO: 567 - DNA, 299 bp, Chlorella sorokiniana
  unsure (1)..(299): unsure at all n locations; Clone ID: LIB3602-021-Q6-K1-B11
cggcggcagcgcacccacagcctggagaccaccaagtacaccaccagcatccccacgcacgtgcgcgaccctgcggcgcgcgtggtgcccacccgcagcggcgagacggtcagtgcacagctctacatgcggcagctggacatgcacattggcaacgctaggatgcgctctgctggcgcgagcgtggagcacatccagcgccgcctggcggacaactgcggcagcaccagctctgtggacgagttccgcttcctccaagctgtgccccctgtgnccatgcnnnggtgatgngggtgcag

SEQ ID NO: 568 - DNA, 294 bp, Chlorella sorokiniana
  unsure (1)..(294): unsure at all n locations; Clone ID: LIB3602-021-Q6-K1-B12
gtcgaagcgtactaagaaggtcgggatcgtcggcaagtacggcacccgctatggcgcttcgctgaggaagcagatcaagaagatcgaagttagccagcactccaagtacttctgcagcttctgcggcaagttcgccatgaagcgccaggtggttggcatctggaagtgcaaggcctgcaagaagacccaggctggcggcgcgtacgtgctcaacactgcggcgtccgtgactgtgcggtccaccatccgnccgcctgcgggagcagannccgagaanngtaagncgaaaagcgg

SEQ ID NO: 569 - DNA, 337 bp, Chlorella sorokiniana
  unsure (1)..(337): unsure at all n locations; Clone ID: LIB3602-021-Q6-K1-B2
gccgggcacgcagcgcaggctggacttctgcgaggcgctgttgtcggcggccacggcctacggcatcgcgggctgctggcagtggaagccgctgctggacggcaagcaggtcatggcggcggtgggcatgaagagcggcggaccagcgctggggaagctcatggaggcggcagtggagtggcagcttgcgcacccggatggcacagcggagcagtgccgggagcacctgcaggcgcagcacgcggcggcgcagcaggcggcgggcatggagtgagagggaggagggttggagcgagggcaacggtgcggcgcaaggcgcctgcgnngcacctgccgt

SEQ ID NO: 570 - DNA, 277 bp, Chlorella sorokiniana
  Clone ID: LIB3602-021-Q6-K1-B3
cttgtgccttttgactgctatctacttgttgaattgtgcaagcgcttggccccatcaatgcccccagttttgagatgtgccaccctgccttgtatgtacgtaaactgtgtaatcgagccagtgaaaaaaaaaaaaaggaaaaaaaaaaaaaaaaaaaaaaaaaaaaaaaaaaaaaaaaaaaaaaaaaaaaaaaaaaaaaaaaaaaaaaaaaaaaaaaaaaaaaaaaataaaaaaaaaaaaaaaaaagggggggccccgtttaaaaggaccaaatttt

SEQ ID NO: 571 - DNA, 275 bp, Chlorella sorokiniana
  unsure (1)..(275): unsure at all n locations; Clone ID: LIB3602-021-Q6-K1-B4
gtggtacggccccgaccgcgtgctgtacctgcccggcggcctgctggcccgcgacgagatcaaccccgtgctgaatggcaccctgcccggcgactacggctacgaccccctgggcctggccaaggacgccgagaccctggccaagtaccgcgccaacgagctgctgcacgcccgctgggccatgcttgccgccgccggcgccatcatccctgagggcctggccgccaacggcgccgacgtcaagggcgccacctggtttgagaccggcgnccgcc

SEQ ID NO: 572 - DNA, 315 bp, Chlorella sorokiniana
  unsure (1)..(315): unsure at all n locations; Clone ID: LIB3602-021-Q6-K1-B5
cggacgcgtgggcgccaacccttgggacgtgatggtggacatgttcttctaccgcgagcccgaggaggccaaggaggagggcgaggccgaggccgcccccgagtacgacgccgccgccggctttgccggcgcgccgctgcccagcggcgaggaggccgccggcttcgacgcctacggctacaacgccgtggcggttgagaccgcgcggttcaccgcaccgcttgagtgtgtccccgcccgccccgagccttcgccccggccgccgcccctgagtaccccgccgccggctactgnnagcgggctttgagggccccg

SEQ ID NO: 573 - DNA, 275 bp, Chlorella sorokiniana
  unsure (1)..(275): unsure at all n locations; Clone ID: LIB3602-021-Q6-K1-B6
gcatccttaatccacagcatccctcacttcacctcgctgcgtgctgcatctcacgagcactattattgccgctacgttgcttcataccttggattgcgcagcctgccgccaccggtcttgcttccgtgccgccaggctgtgcaatgcaaagccgtcttaccgccctcagcctttctttgggcgctcctttcatccctgcccaatcgccatccccttcctcccctccctgcccctcagccactcagcaggntttcatggcctacnncaccctgccg

SEQ ID NO: 574 - DNA, 91 bp, Chlorella sorokiniana
  Clone ID: LIB3602-021-Q6-K1-B7
aaaaaaaaaaaaaaaaaaaaaaaaaaaaaataaaaaaaaaaaaaagaacaaaaaaaaaaaaaaaaaaaaaaaaaagaaaaaaaaaaataaa

SEQ ID NO: 575 - DNA, 317 bp, Chlorella sorokiniana
  unsure (1)..(317): unsure at all n locations; Clone ID: LIB3602-021-Q6-K1-B8
caactatgcagcgtactttgccgcggcgtctgcccccgcctgggaagtcgtcatctcaaatgcaggccacttccaatacctcgatggccggggcggtgtgatggacgccatctgcgctgtcggctcagcacctgatgccagcgtggcagctttcacacaagctgccatggtggcctgggcagaaaccatggtgcgcggagatcccatgtatgtcggccacacagtcaacggcagcatcgatgacagcgacggcagcaccagcggcggcagcggcagcaggggcggcngtggggcnngccgcagcnnncgccgcagac

SEQ ID NO: 576 - DNA, 296 bp, Chlorella sorokiniana
  Clone ID: LIB3602-021-Q6-K1-B9
cacgcggcgccgctgcgcgacgcccgctcgcagcccaccttgcttccgcggccgcctcacgcagcggccgggcggctgacccttgatgcatcactacccacaattgcttgcctgttctggccacacacccgtccagaattatccattcgctgatctttgtttgatgctacacccccaacacactccacgaactaccttcccaaacaaacgcttcctggtttgttccgttgttcagccgtgcatcccctcttttccccgcccgcactcgacgtgcatctatcctttccactttcacc

SEQ ID NO: 577 - DNA, 316 bp, Chlorella sorokiniana
  Clone ID: LIB3602-021-Q6-K1-C1
ggtagaaccgaaccccacctaacacccaaccgcagccggcgaaccgccgcctgcataccaccgtagcgacgcatccccctccgatcgacggagtgtactaaatttgccgccttgtgcggccactcatttttgcgggcaccctgccccggtgctaatgatgctggccaacgcaccggacgatgccctcaccgcgcagcccttttacttgagcatgttgttgaacccaaatcaatctatcgccccgcaatcaggggcgcctccctcttattttctgactttaggcccgcctgccttggtatttcccctcccaaccccc

SEQ ID NO: 578 - DNA, 276 bp, Chlorella sorokiniana
  Clone ID: LIB3602-021-Q6-K1-C10
cacggtggtggtggcgcacaggctgagcaccgtgcgggacgccgacagcatcgcggtggtgttcaagggcaaaatcatcgagcagggcgcccacgacaagctgatggccatcccccacggctcgtacgcgcgcctggtgcgccaccagctgacccgcaccaccacaagctccctgtccacccgaggccccagccggcgaggactgccggcccctgcacccggcaaggagtagcgcagtacggcggcaggcagcattgctgccgtttttgcttgcgt

SEQ ID NO: 579 - DNA, 336 bp, Chlorella sorokiniana
  Clone ID: LIB3602-021-Q6-K1-C11
cggtttcctcgtgtgcgcctatatctgccaccgccgcggcacccccaccgcttgcgccctggaagtgatggccgccatcggcatcttgttcggtccctaggcgccctccttgctttgagcctggcaatccgttcccttgagcagtggcggacatgagcgtgcacagggcaaccctggccacccacgcctcggccacgcctccacagaggcgcacagacagcctaattgggcagaaccgtgctctgcgccggtacaagctgcggatgctgccgcctgccccgcccatgacagcgagctcagccagccacgcctgtgtggcagcttcattaccattta

SEQ ID NO: 580 - DNA, 293 bp, Chlorella sorokiniana
  unsure (1)..(293): unsure at all n locations; Clone ID: LIB3602-021-Q6-K1-C12
gcatgtaccgccgcagcccggcagcgcttgtattttaggcagccccgaatatgccccaacgcacccacccgcccaaccggcgagccgcgcccaacatagcggggcgcggagccacccccattcatctcctaccctgcctttccccctgtgaatgtagccttccctgtagctcttgccctgttttgcgctattgccttgctctgactgtgtcggagccgacgagtcggcgagggaggcccgctgtgtgtgtgatttttgcgagggtcaacgcctggggtgccnntcccccattt

SEQ ID NO: 581 - DNA, 324 bp, Chlorella sorokiniana
  unsure (1)..(324): unsure at all n locations; Clone ID: LIB3602-021-Q6-K1-C2
cataccccctcacacacacagcattgcttgttcagcgaattggctgcacgccagcagcagcgcccatgtgcgcgtcaccttgcacgcgccgcgccccagttttctctcgtgcccctgcacagtgcactcactctgtagcctgctgtccgggcccccttcgatggatgcgcttcaatgccttcagacccctttgcctttcgtttcgttgacggctactacagagcatgaatgtgctcgagtgcaaaaaaaaaaaaaaaaaaaaaaaaaaaaaaaaaaaaaaataaatataaaaaataannaaaaaaaaaaaaatataaaataana

SEQ ID NO: 582 - DNA, 273 bp, Chlorella sorokiniana
  Clone ID: LIB3602-021-Q6-K1-C3
gcagccccagcggcagcggcgcagcaggcgccggtaccgccgccggcgtgctgcgcacgctgcgcctgtcggcacgctccatgcgctttgtggcagtgcggggctctggtgatgagggcgagcagcggccgcagacagcagcagcaacaacagcaacggcggcgggcggcgctgccaccccgacggccccggcaggccagccggcgccatcgcagcagcggcagcaggcgggcgcagcaccggaggaggatgaggtgcacagctgcagcggat

SEQ ID NO: 583 - DNA, 120 bp, Chlorella sorokiniana
  Clone ID: LIB3602-021-Q6-K1-C4
aaaaaaaaaaaaaaaaaaaaaaaaaaaaaaaaaaaaaaaaaaaaaaaaaaaaaaaaaaaaaaaaaaaaaaaaaaaaaaaaaaaaaaaaaaaaaaaaaaaaaaaaaaaaaaaaaaaaaagg

SEQ ID NO: 584 - DNA, 275 bp, Chlorella sorokiniana
  Clone ID: LIB3602-021-Q6-K1-C5
gccctccattctggcctgcgggtaccggcgccttgttccgggcatctgctggctgggcgtgcggcggtccatgctgcaccatgtgtgggccggcgacctgcaggacatcgatgctgacggcaaagagaagcgggatgggctcgttcagaagctggatagcctcggcactgactgggcaaacgcctgggcggcggacatgcagacggacaaggtgtgccgcatccaggcgctgtacaacgtgtgcggcggcaaccgtgggccttcggcaccccgcc

SEQ ID NO: 585 - DNA, 256 bp, Chlorella sorokiniana
  Clone ID: LIB3602-021-Q6-K1-C6
aaaataaattataaaaaaaaaaaaacaaaaaaaaaaaaaaaaaacataataaaaaataaacaaaaaaaaaaaacatactaaaaacataaataaaaaaacacacctaaaaaaaacaaaatactcgggcccccccttttaagggttccacttttccttccccttccttccaccttcttattttttttttagcgccccttaatttaatttccttgcccgcctttttccccctttggacttgcaaaaccctttgctttcc

SEQ ID NO: 586 - DNA, 284 bp, Chlorella sorokiniana
  unsure (1)..(284): unsure at all n locations; Clone ID: LIB3602-021-Q6-K1-C7
cggacgcgtgggcggacgcgtgggcggacgcgtggggggcaactttgtgaaggccaccttctacgccctggccaacacctacggcttcctcacccccgacctctggcgcgagaccgtgttcaccaagagcccgctgcaggagtactccgacttcctggccaagccggtggttggcaaggcctactgagcggcctccccatgcccgccgccccgcgcgccgcggcggcaggagcagcagcgtaaccagcagcgccctgacgcgaggatnagatgagnnnagttgg

SEQ ID NO: 587 - DNA, 270 bp, Chlorella sorokiniana
  Clone ID: LIB3602-021-Q6-K1-C8
cacggatgcagcggcagagcggatacgcagcctgctgtccaagcgagacaaggaatttctgcggctgggcgtgaagacgcgcggctgcaacggcatggcctacacgctcaactatgcggactcgaaagggcgctttgatgagctggtggagagccatggcgtgaaggtcctggtggacccggcggcgctgatgcacgtgctgggcacaaagatggactatgtggaggaccgcctcaagtcggagtttgtgtttgttaatcccaacgccaa

SEQ ID NO: 588 - DNA, 289 bp, Chlorella sorokiniana
  unsure (1)..(289): unsure at all n locations; Clone ID: LIB3602-021-Q6-K1-C9
ggcttctccctgttcgactgagcgggccacagcctgcctggttgagctggagcacaggccagccctgcaagcagccgcaccaaggatgccgaggtgtggctgctgggctggcaagcccaggggtgcagctgcccgccctggctgcaagcccaggggtgcagctgccgcctgctggcggacggcccgggtgcgggtctcgcgcgcgactgtgacagccgtgcaggcgtgtgccccggcgtggccatgtgttgatggcacgctggacacatccatngtaacgcctgcctgc

SEQ ID NO: 589 - DNA, 238 bp, Chlorella sorokiniana
  Clone ID: LIB3602-021-Q6-K1-D1
gccttgcgtgcacacctccgtactggctgactttcgctttgcatttctatggcaggcagctctctcctaggtagctccctcagaattccttcggatgtaggcagctcactgaaaaaaaaaaaaaaaaaaaaaaaaaaaaaaaaaaaaaaaaaaaaaaaaaaaaaagaaaaaaaaaaaaaaaaaaaaaaaacgggcggccgcaaacatgacaaccaaatatatgtactatagcaagaac

SEQ ID NO: 590 - DNA, 249 bp, Chlorella sorokiniana
  Clone ID: LIB3602-021-Q6-K1-D10
atttttgctgccaggagcggcgcggcggcggccaccacgggcgctgcattggcgcccctggctgcccccgcaacaccgccctgtcgtgcttttgtgttttgtgcgaacccccaccaacccgctaagcgttttccttgccagcacttccacttcccgccatctcccttgccgcccctcgggcacctgactgcgcccgcgtcgcatgtcgcccctcgcgcgcatgcaatgttgacatgtgaaatgcatgta

SEQ ID NO: 591 - DNA, 267 bp, Chlorella sorokiniana
  unsure (1)..(267): unsure at all n locations; Clone ID: LIB3602-021-Q6-K1-D11
gtgatggcggaggagaacatgcgcggcatcgccttcgagatctgcgatgtggtcatgcacgctgacgccatccaccgcggcggcggccagatcatccccaccgcccgccgcgccatgtacgccgcggagctgacggcgcagccgcgcctgctggagcccacctacctggtggagatccagtgccctgagcaggccatgggcggcgtgtacagcgtgctgaaccagaagcgcggcatggtgtttgagggagatgcnagcggctcgggc

SEQ ID NO: 592 - DNA, 247 bp, Chlorella sorokiniana
  Clone ID: LIB3602-021-Q6-K1-D12
gcgggccaggaacggcagctgttgcggaatgggatgttgttagtgagcggcacggccgtgctgcgagaggcaaggaccggcgggggccctagacgccgacgacagggctgggaccactgctacgtggcggcatctgaactgtgccaccacaggcggcggaagaccactgaccattaaagcaacgcactgtcggtgcagcgtttgcggcggcgtgtgccggattgcagccagttgcgagggctgccgc

SEQ ID NO: 593 - DNA, 273 bp, Chlorella sorokiniana
  unsure (1)..(273): unsure at all n locations; Clone ID: LIB3602-021-Q6-K1-D2
cggacgcgtgggcggacgcgtgggcgccacctggagacggctcgtgcccagggaatgtaccagcagcacatgatgcagcagatggcgatgcagcagcagcagcagatggccatgtcgcagcagcagcagatgcagcagccgctggcggctatcgcgccgcagcattcggtccagccgccggccatgcagggcggagatgctcaggcgcagcatgcccaggcgcagcatgtgcaggtgcagcaggtgcaggccgcanngccgctggnncgcagg

SEQ ID NO: 594 - DNA, 282 bp, Chlorella sorokiniana
  unsure (1)..(282): unsure at all n locations; Clone ID: LIB3602-021-Q6-K1-D3
gtcccctgtagtggagcagcccgccttcagccatgggtaagactcgcggtatgggagctggccgcaagctgcggctgcaccgcaaggacgagcgctgggcggacaaggactacaagaagtcgcacctgggctccgagtggaagaagcccttcgccggcgcttcgcacgccaagggcatcgtgctggagaagatcggcattgaggccaagcagcccaactccgctatccgcaagtgcgcgcgtgtgcagctgaatcaagaacggcaagaaagattnngcggcg

SEQ ID NO: 595 - DNA, 263 bp, Chlorella sorokiniana
  Clone ID: LIB3602-021-Q6-K1-D4
taaaaaaaataaaagaaaaaaaaagaataaaaaaatagaaaaaaaactaaaaaaaagtatagctgaaaagaaagatgaagatgaacaaaaaaggacgagcgaatggaaaaacaaagactacaaagggggggggcgtcggttttaggggtcctaggtttctgtgccggggcttggaacgttttggtttttttttggggtcccttaattttagtggccgggcggtccttttcccctgtcgggatgggcaaacccgtgccgttccc

SEQ ID NO: 596 - DNA, 280 bp, Chlorella sorokiniana
  Clone ID: LIB3602-021-Q6-K1-D5
taaggagcagaagtcgaaggaggcgaaggcgcttgccgccgccaactccagcaagggcaagaagaagaaatggtccaagggcaagctgaaggagaaggtgaacaacctggtcctcttcgacaaggccacctatgagaagctgctcactgaggtgcccaagtacaagatgatcactccctcggtgctgtccgaccgcctgcggatcaacggcagcctggcgcgcgccgccatcaaggagctgctgggcaaggggcatgattaaggggaggtggccccaaga

SEQ ID NO: 597 - DNA, 320 bp, Chlorella sorokiniana
  unsure (1)..(320): unsure at all n locations; Clone ID: LIB3602-021-Q6-K1-D6
atcgtcggcaagtacggcacccgctatggcgcttcgctgaggaagcagatcaagaagatcgaagttagccagcactccaagtacttctgcagcttctgcggcaagttcgccatgaagcgccaggtggttggcatctggaagtgcaaggcctgcaagaagacccaggctggcggcgcgtacgtgctcaacactgcggcgtccgtgactgtgcggtccaccatccgccgcctgcgggagcagaccgagaagtaagcgagcggcattgaggagtgaagcgggcggcggcggcggccgctgcagcagcgcgctgcancgcgtgc

SEQ ID NO: 598 - DNA, 275 bp, Chlorella sorokiniana
  unsure (1)..(275): unsure at all n locations; Clone ID: LIB3602-021-Q6-K1-D8
ggcggcacaggtgtgcaaccagctgcggctgcacatgcggcgcagcatcgcggggtactatgaggggcggctgcgcagcgatgacgacatgacgccatgcgacacgcgcaacgtgtgcctggcggtgcgggaggatgcgcggccgggcaccgtgccccccgacccacgctgcaccggccacatgcggcaggtggtgtcggagtcgcagctgtacacgcagctctcctacatccaccgcctgtttgatgtnggagggcctgctgcacttcgctgga

SEQ ID NO: 599 - DNA, 275 bp, Chlorella sorokiniana
  Clone ID: LIB3602-021-Q6-K1-D9
gggaaaaccacagcgcggtggtgtggcaggatggcagcggtggagcgcagatggtcgtgtttggcggccagctgaacgtgagtgagggcaaactgggcttggctggcatgcctcgcaacgtgcaaatgtgtgctgggcatcgaaacgcagagtgctgtagtggaggattcgatgctactgcctgcaggaaagagggctgttctgctcgtctgtgttccttcttgtatgaacacaaacgcaatgcaggaagtcgcaacgtgatgagacggctagac

SEQ ID NO: 600 - DNA, 265 bp, Chlorella sorokiniana
  Clone ID: LIB3602-021-Q6-K1-E1
gaattccgggtcggccccaggcgtccgaaaaaaaaaaaaaaaaaaaaaaaaaaaaaaaaaaaaagaaaaaaaaaataaaaaaaaaaaataaaaaaaaaaaaaaaggtgaaaataaaaagaagggaaaaagggataaaaaaaaaaaggggggggccgttttaggggggcgcgtttttttggcggtcgcagggtactttttggtttttttgtggggccctctaatttagtggggttggcggtgtttttcccgggggggttttggaaa

SEQ ID NO: 601 - DNA, 316 bp, Chlorella sorokiniana
  Clone ID: LIB3602-021-Q6-K1-E10
cacaaacacactgctgacgcttgcaagccttctcgtgccaccagtcgacagcccgctatcaagaagccgcgccgaatgagctcctccctgtccaccggctggaagcttgtctccaagtgggcccggatgcctgcatccaacctgcgggagggctgctggactcgacatggagctgcgcaaacctgaaccggtgttgaaaggcggaaggacgaggagctggccagccgagctgcccgcaaacgccggccaagacggacgcgcacctggccaccttctggtgaagcggcgcacttagcagcacaagtagcaggccgcc

SEQ ID NO: 602 - DNA, 251 bp, Chlorella sorokiniana
  Clone ID: LIB3602-021-Q6-K1-E11
cggacgcgtgggcggacgcgtgggaaaaaaaaaaaaaaaaaaaaaaaaaaaaaaaggtcaaacgatatagagagagccaaacttacatacgcaatgcgtgccacgtcctggcgtcttctatggtggcaccctatgttccgctcactggccggcgatttactacttctttattgggcaaaccatggtgtttcccttctcagtcttcttgcagcgtattccctgttcccccgctggcttatcccctatcaggc

SEQ ID NO: 603 - DNA, 275 bp, Chlorella sorokiniana
  Clone ID: LIB3602-021-Q6-K1-E12
cggacgcgtgggctgcgcacctggctgctcaaggtgctgcctgacgcgccgccgaccaaggaggaggtgcagcacatgtccgtggcgcagctcaaggcgttcctgcaatccaagggcgtgtcgaccgcgggcatgtttgagaagagcgagatggtcgaaaaggcgctatcgctactgtgagggaggcagaggcctggaccaggcgccaggcaggtggccaacccaggcaaagagcggccaggcttgcaccttgcagcacagcgcccgcaggcatt

SEQ ID NO: 604 - DNA, 282 bp, Chlorella sorokiniana
  unsure (1)..(282): unsure at all n locations; Clone ID: LIB3602-021-Q6-K1-E2
acctgggcaagcggctgcacggcatcaccttcaagaagcgggcgccccgcgccatcaaggagatccagaagtttgcggccaagcagatgggcaccaaggtggtgcgcgtggacgtcaagctgaacaaggcggtgtggagccagggcatcaagaacgtgcccaaccggctgcgcattgtggtgcagcggaagcgcaacgaggacgacgaggactctgaggagatgttctccctggtgaccctggctgagganccagaacanccaagaagggnncgtggtttgt

SEQ ID NO: 605 - DNA, 106 bp, Chlorella sorokiniana
  Clone ID: LIB3602-021-Q6-K1-E3
gttagtgcacacgccactgagactcgccctatcgccccgctgcccacccccccggccagcggaggaacccatttttaattactcggtgtaaccggatgctcaggcc

SEQ ID NO: 606 - DNA, 270 bp, Chlorella sorokiniana
  unsure (1)..(270): unsure at all n locations; Clone ID: LIB3602-021-Q6-K1-E4
cgatgccttggcggcgcatttatggaggtgcctcaaggcacgtggagcctggcggcccatcctttgttattcgcccaccaaattgggcctctgtggtgccgtgcgcagctcctcgctatctagatgctggctttgccctccttcaagtgcactttgcgcaaaggttgcttggcctgctgttctgtgctggcgggcaaccccttcgggctcaccgcggccccctcatgctgcccttctggtggtcccattccctttgttgctcagnctgac

SEQ ID NO: 607 - DNA, 277 bp, Chlorella sorokiniana
  Clone ID: LIB3602-021-Q6-K1-E5
cgtgcaccacgcacacaccaacaagctggtggaggacacagcctggcaccctgtggagcgcgagaagatggagaagtggagccccgcggagtctgccatctacaagctgttcctgggcaccccgctgaagctgtttgcctccatcggccactggtggatctggcactttgacctgagcaagtacaccgagcagcaaaagccgcgcgtgctggtcagccttgcagcagtgggcctgttcatggccgtcggcttggccgctgcttgtgtactttacacc

SEQ ID NO: 608 - DNA, 281 bp, Chlorella sorokiniana
  unsure (1)..(281): unsure at all n locations; Clone ID: LIB3602-021-Q6-K1-E6
ggcgtgagcttgccccatgccccgccccgccgcgcggccgccccagcagcagcagcagcctcgcagcagcagagcgtacaacccccctgattgtttgcagccccctttttggaccccggcagatcagcccttggaagcaccaccccccgtcagcaagcagtgcacagcagcagccgcagcaacatggttcttttctggggtctttgcctgcatcttctgtgtccctctttctgattatagcgtgccgccctttggcgctttggtgtgttgaccnnncagca

SEQ ID NO: 609 - DNA, 189 bp, Chlorella sorokiniana
  Clone ID: LIB3602-021-Q6-K1-E7
atacgggttcgaaggaggtttggacggacgaccagaaaggaaggggggaagaagaaggaaggggcgggggacgaaacaggggggggggggaaaaaagccgaacacgggctgaagaaaaaaggggggggggggaaaaaacaacggcccgagggcaaaaaaaaagaacacgggcagcaaggaaagaaggag

SEQ ID NO: 610 - DNA, 287 bp, Chlorella sorokiniana
  unsure (1)..(287): unsure at all n locations; Clone ID: LIB3602-021-Q6-K1-E8
cttccagcagcctcctgttgtgcccgcccattttgtactccccaattctgggcccctcatttttctgccattttttcagccgtggctgccccttctggtctgtaccaacaccccaccgggcctctgtgtacccccatggcctgtccaccctctttcatttcagcatgctctgcatctgtctgctgcattgcgctgcactgcatgtgcacatgcgattgatctgcttcactgcaacacagcaggaaaacanaaaaaaaaaaaaaaaaaaaaanaaaaaanannaaaaa

SEQ ID NO: 611 - DNA, 267 bp, Chlorella sorokiniana
  unsure (1)..(267): unsure at all n locations; Clone ID: LIB3602-021-Q6-K1-E9
ctgctctgcggcccttcatacctttgtacctttctgtatcatcttgcagcaatggcagccggctgcatctttctaacatcgtcaccggcccactcgtttgtgccatgcccacctgcctccaacgtcacccttcatcaaccctcacccaacccatccacctgccacccatccactcaccttccctccgccacaacctctgccacccactcaccacccatcacccgctcaacgccctccatgcanccatcctccccatccaccaaatct

SEQ ID NO: 612 - DNA, 264 bp, Chlorella sorokiniana
  Clone ID: LIB3602-021-Q6-K1-F1
cctaaaggtgaagggtaacgtgtacaagaacaagcgcgtgctcatggaggccatcacaagcagaaggcggagaagatccggagaagaacattgcggaccctggaggcgcgggcgccaagaacaaggcgggcgcgagcgcaaggcggccgcggaggagcttcgcaggcgtgaccgcgcaccgagagccaaagtaagcggtccgttgggagcagccgggggggcgaccggtgtccccgcccgcgcgttgttcttgcagccttgcca

SEQ ID NO: 613 - DNA, 217 bp, Chlorella sorokiniana
  Clone ID: LIB3602-021-Q6-K1-F10
actccgaatatggatgctctccaccaggaactcatagcaaccacgatcagagcgcagccggcgctgcaagtgcttctgaagcttctattgtaggctcgcctttaagcgccagccgcacagcctgtcaaagtgcattatatcataaatcaaactgggcagtctgctaacatgcacaaaaactagttctgaaccatacgccgggtccctgatgatacct

SEQ ID NO: 614 - DNA, 273 bp, Chlorella sorokiniana
  unsure (1)..(273): unsure at all n locations; Clone ID: LIB3602-021-Q6-K1-F11
caggcggagagcatgctgccgcactaccagctgtacctgaagcgccaggcagagctgggtgctgagctggcgggcggcatggaggcgcttcagctggcgcggcaggagcttgctgccaagcaggagccgctgcacggcaccctgagcggcattgcgtcagagtacatcgctctgtttgaggcgggcggggcggttgagcaccagatgcgctccgccactttcattctccacgacttcatgtgtaccagcgggcgggtgcttacggcgnctcca

SEQ ID NO: 615 - DNA, 274 bp, Chlorella sorokiniana
  Clone ID: LIB3602-021-Q6-K1-F12
gcgcttcccgcaggtcccgtcggagccatcgcagcaaactcaggcacgatgcaggccgctctgtgcagctcccagaccgcctttgtgcgccccaccgtggcggccaagccccagcagcgcgcggctcgtgcggcccggcctgtggtgtgcagcgccgtgaagaaggagcaggtggctgccggcgtgaccgccgccgccgccgcggtgctggccaaccccctggctgcccaggctgctgccacccccagcctgaacaacctgatcggctccgtgg

SEQ ID NO: 616 - DNA, 181 bp, Chlorella sorokiniana
  Clone ID: LIB3602-021-Q6-K1-F2
tccgattcccggtcgcccacgcgtcgaaaaaagaaaaggtaaaaaaaaaaaaaacaaaaaaaaaaaaaaaaaaaaaaataaaaaaaaaaaaaggcgggggtgtggtgtacggcttaggccgccggctgccgcttgtacctctgtttcgtgccgcgtgcgtgcgtggctgccttgttggcgc

SEQ ID NO: 617 - DNA, 82 bp, Chlorella sorokiniana
  Clone ID: LIB3602-021-Q6-K1-F3
aaaaaaaaaaaaaaaaaaaaaaaaaaaaaaaaaaaaaaaaaaaaaaaaaaaaaaaaaaaaaaaaaaaaaaaaaaaaaaaaaa

SEQ ID NO: 618 - DNA, 285 bp, Chlorella sorokiniana
  unsure (1)..(285): unsure at all n locations; Clone ID: LIB3602-021-Q6-K1-F4
cgacgacgcgctggagctggccaggtggcactcctccggcccccacttcaaccgctccctggagtggctgctcttcacggccctggaaatcgatgccgacacccggccacatgggaccacagcaggcgcagcgggcgcagcaggtgcagcgcaggcccccattctgggctcgcctgtgggtgccgcccgcacagcccgccaggctcgcttcaactcatcctactcagtcactgtgggcagcgctgcggcagccggggcagcaggcaagcgaggggccnntgagcg

SEQ ID NO: 619 - DNA, 207 bp, Chlorella sorokiniana
  unsure (1)..(207): unsure at all n locations; Clone ID: LIB3602-021-Q6-K1-F5
ctgcaggcgcgcactgtggaggacacacaccacattggtgggggttgtgctctgccaggccccatttagcaagcagccgccgtgcgctaccgtactggccttttgccaccagggccgcattgcgccatgccggcgccgtgcgtggctgcctactctccctccccattcccacattgctctccttttgctacacctcttgnggttcct

SEQ ID NO: 620 - DNA, 318 bp, Chlorella sorokiniana
  unsure (1)..(318): unsure at all n locations; Clone ID: LIB3602-021-Q6-K1-F6
caagcaccaagtcatcaaaatggggcaccaggtgcgggcgccctggcacctcacctattcatgtgcagaggggcagggggaaccgtgcggcaaatgcgcgcgctgcatgctgcgggcccaggcgtttgaggaggcagaggttgaagacccacagctggcgcagcagcggtgagagcggctcggtgaagcggctcggcggcatgcacagccagatagagcgctgctcatagagcgctgctggcgcatcagcagcagcagcggcggcagcagcagcagcagcagtagcagcattngcaaccgcttgcttggcgagacaca

SEQ ID NO: 621 - DNA, 276 bp, Chlorella sorokiniana
  Clone ID: LIB3602-021-Q6-K1-F7
ggcgcagacaggctgcagacaggcatgcgcggtgcgttcggcaagccatttggtgtgtgcgcgcgcgtgggcatcggtcagatcctgctgtccatccgctgcaaggacacgcacgctgcggtggcggaggaggccctccgtcgtgccaagttcaagttccccgggcgccagaagatcgtggctagcaggaactggggcttcactccctacctgcgcgacgattacttggagtggaagcgtgagggccgccttgtgaacgacggtgtgaaatgccaa

SEQ ID NO: 622 - DNA, 289 bp, Chlorella sorokiniana
  unsure (1)..(289): unsure at all n locations; Clone ID: LIB3602-021-Q6-K1-F8
ggcagggggagcggcagcggcagcgcagcccctcgctgcagccggacacgtgggactggcagcagcgcctgcagaacgagctgagcatggaccagtcggaggacgacccctggggcgcctacagcggcggcgactggcacgcggacgagtacgaaacgcccgatgagtatgctcggcgcatctgggaggagatgcaggcgcaccgccgggcaaaacaggatgcggagcgcgcggcattcacgcagcgcaggtcggcgcgaggaggcgcagnncggcaggcattttccgc

SEQ ID NO: 623 - DNA, 255 bp, Chlorella sorokiniana
  Clone ID: LIB3602-021-Q6-K1-F9
ggctgcttgggtggagcacagcggctggcaccatgtcgaagcgtactaagaaggtcgggatcgtcggcaagtacggcacccgctatggcgcttcgctgaggaagcagatcaagaagatcgaagttagccagcactccaagtacttctgcagcttctgcggcaagttcgccatgaagcgccaggtggttggcatctggaagtgcaaggcctgcaagaagacccaggctggcggcgcgtacgtgctcaacaactgcg

SEQ ID NO: 624 - DNA, 348 bp, Chlorella sorokiniana
  unsure (1)..(348): unsure at all n locations; Clone ID: LIB3602-021-Q6-K1-G1
cagcaggcctacggagcgctgagcaatggcattcgcaccgtcatcacagcgcacgcgcagcagaaccccggcaccaccatctcttaccggacgctggtgacgggcgtgcggcaggcgctggcgcaggcgcggttcagccagaacccctgcctcgagtgcagcaaggaaaacgcagacacgcccttcatcctgccctgagggagggcaaggcaggttggcagggctgtgcatcatcccctgcggcctgctgcaccgtcctcctgatgcagcgctgcagggctgcaacgcggcgcacagcatggcttggaactcaacntcacaacgtgccgtngcttgnannatctattt

SEQ ID NO: 625 - DNA, 64 bp, Chlorella sorokiniana
  Clone ID: LIB3602-021-Q6-K1-G10
aaaaaaaaaaaaaaaaaaaaaaaaaaaaaaaaaaaaaaaaaaaaaaaaaaaaaaaaaaaaaaaa

SEQ ID NO: 626 - DNA, 279 bp, Chlorella sorokiniana
  Clone ID: LIB3602-021-Q6-K1-G11
ggggggcagggcagcaagccttgtcgccgctcggcttgtgtaagcttggaaaacccaaaaaaaaaaaaaaaaaaaaaaaaaaaaaaaaaaaaaaaaaaaaaaaaataaaaaaaaaaaaaaaaaaaaaaaaaaaaaaaaaaaaaaaaaaaaaaaaaaaaaaaaaaaaaaaaaagaataaaaaaaaataaaaatactacggaataataaaaaaaaaaaaacatcgggggcgacccttatcaagcaacatggttctcatagtggtatagtgtgagggactaa

SEQ ID NO: 627 - DNA, 226 bp, Chlorella sorokiniana
  Clone ID: LIB3602-021-Q6-K1-G12
ttttattttgttttcgcttgtaacaactgctctgatctacccaatggccttccttataccacgttccgatacactcctcacaagggcggcaacatgcgccgctcccctgtgccacagtccccatctgctgcttacaacccccgcctttttcttcatcaagccccgcgctcctttgaaagaattacctgtgccaccatcatgctcccaaaccactgtcatgtggtgt

SEQ ID NO: 628 - DNA, 279 bp, Chlorella sorokiniana
  unsure (1)..(279): unsure at all n locations; Clone ID: LIB3602-021-Q6-K1-G2
gccctctgacgcgcgctgcaccctgccctggtgctgagcgctgagcacctgccatcttgcctgaccctcccccttttgcgctgtgacgtttcatgctgaacacccacccgttgtggcttgctgcatttcgttgcgatgcttgatgctgccccatctcatttcacctcatcagcacgtgcgcgtcttaacgcgatctatgattgcatgctgcctgcccccttgcctgtacactacaccttgagagcgtttgcanagctcacagtttttcatttctgatct

SEQ ID NO: 629 - DNA, 277 bp, Chlorella sorokiniana
  Clone ID: LIB3602-021-Q6-K1-G3
gcagcagcggtggcgccagcgcttggtagacagcagcattcccaggtggcggcagcagcatgagcggaggggccaaccccgcccaggtgctgctgctgtaccgccgcatcctgaaggcggcgcagcgcttcccgtccatcaagcgggacgcaatcattgctgacatcaaagcgcagttccatgaacacaaggagctgactgatccggacaaggtgcggcacgagctgcgggtggcgctgcgcagcctgcaggaagctggagcagtacgcgggccatg

SEQ ID NO: 630 - DNA, 271 bp, Chlorella sorokiniana
  Clone ID: LIB3602-021-Q6-K1-G4
agccaggcttgctgctggtgcactcccacaccgacctggccctgcacctgttcaacctgaactgccgccacctggcgtccgcggacacgcacgagcgcctggctgcactgtgccccaccgccgacggccgcctgctgctggctgccggtaccagcggcctcgtcacgctgcgctggctgcactcgctgcaggtgctgctgcggtacgacagtggcaggggcccggtcacagccctggccgtctctccagagggctgcttcctggcaggcac

SEQ ID NO: 631 - DNA, 271 bp, Chlorella sorokiniana
  Clone ID: LIB3602-021-Q6-K1-G5
cggccagactggctattgcactgagtgggcgaccggtgcaggtggagcagaggactgcgtgggtccgcccgaccagcagtgcgtcatcacaggcgaccagtactggatcggcggctgcgtgctgctgcatgccatcccgatgtatgctgcgatggcaggcctgcagttctgcgtgaacctggcctgcctgtacgtcatccggcgcaactggagctgggccgacagccagccggccagcctccagaacccaggcgctgggtgccgacaatgg

SEQ ID NO: 632 - DNA, 271 bp, Chlorella sorokiniana
  Clone ID: LIB3602-021-Q6-K1-G6
ctctggcctgtcggccgaccccgccaccttcgctcgctaccgcgagatcgaggtcatccatgcccgctgggccatgctcggcgccctgggctgcgtcgtgcccgagctgctggacggcaccaaccacattgcctggttcaaggccggcgccgagatcttcggcgacgacggcatccagtacctgggcatccccggcctgatcaacgccaagtccatcgtggcgaccctgatcgtgcaggtggtgctcatgtcgtatgttgagggctaccgc

SEQ ID NO: 633 - DNA, 77 bp, Chlorella sorokiniana
  Clone ID: LIB3602-021-Q6-K1-G7
aaaaaaaaaaaaaaaaaaaaaaaaaaaaaaaaaaaaaaaaaaaaaaaaaaaaaaaaaaaaaaaaaaaaaaaaaaaaa

SEQ ID NO: 634 - DNA, 276 bp, Chlorella sorokiniana
  Clone ID: LIB3602-021-Q6-K1-G8
aaaaaaaaaaaaaaaaaaaaaaaaaaaaaaaaaaaaaaaaaaaaaaaaaaaaaaaaaaaaaaaaaaaaaaaaaaaaaaaaaaaaaaaaaaaaaaaaaaaaaaaaaaaaaaaaaaaaaaaaaaaaaaaaaaattataaagggggggttgtttttagggattctaattttccttccggttgcttggacgttattgttttttttttggggctccttaatttaatttttttgggggtttttttaaacttttttatttggaaaaactttggttttccccat

SEQ ID NO: 635 - DNA, 273 bp, Chlorella sorokiniana
  Clone ID: LIB3602-021-Q6-K1-G9
cgaaggagcaccccgtgtttgcctccgaccccgacaagctggctgggctggaggaggcggaggccaaggcggaggcggtgctgtccaagctgcgcaagcaggtctccaagctggagagcgcgctgcagccgctgcaggagttccttgacgctgagctggccggtgatgaggagggcgtgcacctgtctctggaggagcggctggaagcggatgcagcagcccgccaggcagaggcaagcaaggcggcatgcagacaagagcactcgccgccgc

SEQ ID NO: 636 - DNA, 159 bp, Chlorella sorokiniana
  Clone ID: LIB3602-021-Q6-K1-H1
gcgacaaggacggcgaggacgagtactgagcggcggcgtgatgtggcggcggtgtgggcggcggctgctcagtacggcagccccgagccctgcctttgcagtgcctgcgccgtgtgactggatgaggcggcggaatgaaatgtaacatgaatgaacagt

SEQ ID NO: 637 - DNA, 247 bp, Chlorella sorokiniana
  Clone ID: LIB3602-021-Q6-K1-H10
aacaaatatcttacgggcaaatcatgcatgaaaagaatacaggacgaaatgttcagaagtagactgtgtaggtagcgcaacaggcggaagtgattccaagcggtcgctgactgtctcgagggccagccgtgtgcgccgctcgcctgatccaaagcctgcgtgtcgtgtttggcaccctgtattttgcctccatggagtacgaggctcctttgatggtatacgctgtggcaccgtcattctgccgagc

SEQ ID NO: 638 - DNA, 290 bp, Chlorella sorokiniana
  unsure (1)..(290): unsure at all n locations; Clone ID: LIB3602-021-Q6-K1-H11
gcctaccagcaggcgccgccgcagcgaggccgccccaacccagcagcgctgacagcccctctggaacacagcatgcgtgagcaggaggcggtggcgctgcaggcgcagctgctgcatgagcaggcagcggcagggcagtggcatgaccagcaggcgatggagccgagccagcagtgatgccagctgcatacgagcgggccgcgggagactgcaggcagcgccgaccagcagcgtttgatgtgcggcaaccacagcatgctgcacatgaacangcnagctannggatggca

SEQ ID NO: 639 - DNA, 204 bp, Chlorella sorokiniana
  Clone ID: LIB3602-021-Q6-K1-H12
ccgctcgggtgcattacacgtgtgctgcaatgagagtgtgagcgcgcgtgcgccaacaaaatgcaggtggggggggagcggtgaaaatggcaggaggcgggcgggccctcagggccctgcacaaccgcgccgtccatccgacatcatcgacatttcaggaagccatcatctattgaaaagacaggataaaaggtgggagaaaaa

SEQ ID NO: 640 - DNA, 283 bp, Chlorella sorokiniana
  unsure (1)..(283): unsure at all n locations; Clone ID: LIB3602-021-Q6-K1-H2
gaagctgcagacaaacgagatccgcaacggccgcctggccatgattgcgtgcctgggctgcgcggcgcagggcgtcatgacgcagaagggccccttcgccaacctgctggagcacctggccgaccccgtgtccaacaacctgctgggcaacctggccaccatcctgaagcagtaagcgtgctgccccaagccccggcctgggtgtgagggctgccagggcggcggccagccacatctagagcctttgcattcctttgggctcggggncggcgaactggggtgg

SEQ ID NO: 641 - DNA, 265 bp, Chlorella sorokiniana
  Clone ID: LIB3602-021-Q6-K1-H3
gattgtggtcgcctttgtggaggtgctgatgcacttctgctgagcgcctcatctgaagtgctgaggtgatcctgtcaggcccccatgcagcacagcccaaacagcatctgcctggcgcggcacagcaccgctgctcggccggcacgctgttcttgggctgctgtgcattgcagcatgctgctccggcggcgcggcagggcacctccccttcctctgccgcacacaagtatgcccgcccttccacgcctagcttcccaagcaagtt

SEQ ID NO: 642 - DNA, 293 bp, Chlorella sorokiniana
  unsure (1)..(293): unsure at all n locations; Clone ID: LIB3602-021-Q6-K1-H4
gtacaaacacagccctttcatgcatgctctctgccccatgcgttaccgcctgtcaccactgctctggtctccccaatgccctccctgataccacgttccgctacactcctcgcaaggccggcagcatgcgccgctcccctgtgccacagccgccatctgctccttccagcccccgccttttcctccatcaagccccgcgctcctttgaaggaattccctgtgccaccatcatgctcccaaaccactgtcatggngtgtaaggcacgtcaacacaaatagaaacaataaataac

SEQ ID NO: 643 - DNA, 174 bp, Chlorella sorokiniana
  Clone ID: LIB3602-021-Q6-K1-H5
agggggccatacaattacagtacagcaacgctaggcgaatttgcgctatgcaacggatcaaagccaaaagggcgttaggagcgtgtgccagggcagggcgatgcacaagcgccttgtacctggtggggacaaaaattatttaaagtcaggctgtttgtgtgtccgccagctgcc

SEQ ID NO: 644 - DNA, 270 bp, Chlorella sorokiniana
  Clone ID: LIB3602-021-Q6-K1-H6
gtaaagagcaaagatgccggcgggccagggctaccgcgcgcgtacgcgccacatgttcagccgcggcttcaggcagaagggcttcatcccgctgtccacctacctgaccaactacaagctgggtgactatgtggacatcaaggtcaacgccgcggtgcacaagggcatgccccacaagttctaccacggcaagactggctgcgtgtggaatgtgaccaagcgcgccgtgggcgtggagctgctcaagcaggtcaacgggcggtacatcaa

SEQ ID NO: 645 - DNA, 56 bp, Chlorella sorokiniana
  Clone ID: LIB3602-021-Q6-K1-H7
aaaaaaaaaaaaaaaaaaaaaaaaaaaaaaaaaaaaaaaaaaaaaaaaaaaaaaaa

SEQ ID NO: 646 - DNA, 301 bp, Chlorella sorokiniana
  unsure (1)..(301): unsure at all n locations; Clone ID: LIB3602-021-Q6-K1-H8
ccacgctgagcggcggcacactggggcagcagatctggactccacgagcgctgcagtcgctaccaaaccgacttgcttttcggcgttgcattgagctagcatgtttgcacttgtgcctgtcgccttgcttggtgtgcacttgcttgtggcaccatgcacattagtagccccgtgttaggatagctttcatcttgctacataccaagcttcttttgatgtacgtttgaagaacccttcatcagcttctgcgccgcagcccgagtctttgatcacaaacccaccanancgtcaanncgtgttg

SEQ ID NO: 647 - DNA, 267 bp, Chlorella sorokiniana
  Clone ID: LIB3602-021-Q6-K1-H9
gacggctatcgcacggcagctcaagcatggggcgatacggaggaaagtttagcgagactgtcggcgcccagcggagggagagggcgggacgcgggaggcgccaaccgggtgtcggacccccatccaaagcctgggccggtatggagggttgagcgaacgcacaggacctgatataagaatgaccgcgccgagggggttacctgcgcagctggcacttcgggtggaaagccacttttacgagcgggtgggcgccgctgctttgccacc

SEQ ID NO: 648 - DNA, 74 bp, Chlorella sorokiniana
  Clone ID: LIB3602-022-Q6-K1-A1
aaaaaaaaaaaaaaaaaaaaaaaaaaaaaaaaaaaaaaaaaaaaaaaaaaaaaaaaaaaaaaaaaaaaaaaaaa

SEQ ID NO: 649 - DNA, 449 bp, Chlorella sorokiniana
  unsure (1)..(449): unsure at all n locations; Clone ID: LIB3602-022-Q6-K1-A10
cccacgcgtccggaaggcgtggcgggcgcgcgacccggtcacccgcttccagctctggctggtgcagcagggctggtggagcgacgagcaggataaggaggcccgggcagcagcacgcagtgaggtggttctggccctagcggcggcccagaaggagcccaagccgcccctgtctgccatgttcaccgatgtgtatgcagagatgccctggcacctgcgggagcaatacgaggaggtgctagcacatgtgaaggcgcacccggatgcctgccccgccgacatccccatccgctgagcggcagcagctcatgagcggcagcgcctgatgcaacacaggtcagcggtggtgctgcagcaggcgcccgttcgcaaagtggcggcgcagcatatggctgcacagcttttgtggtgcctcgcgtcccccacaagcnnagctgcaaagcccagca

SEQ ID NO: 650 - DNA, 232 bp, Chlorella sorokiniana
  Clone ID: LIB3602-022-Q6-K1-A12
aaaaaaaaaaaaaaaaaaaaaaaaaaaaaaaaaaaaaaaaaaaaaaaataaaaaataaaaaaaaaaaaaaaagaagaaaaaaaaaaaaaaaaaaaaaaaaaaaaaaaataaaaaaaaaagaaaaataaaataaaggggggggcctttttatggactcaaattttcctaacccgggtttggaatggtaaaaattttttttttgggcccctaaatttaatttaaggggcggggt

SEQ ID NO: 651 - DNA, 439 bp, Chlorella sorokiniana
  unsure (1)..(439): unsure at all n locations; Clone ID: LIB3602-022-Q6-K1-A2
cgcatggacccagatccggttccacctgcccgtgtggctgggcgtgggcgaggcgctcagctccatgatccaggccggcaagctggagctgctgcaggacatgttcaccaactggatgttcttccgcgtcacgctggacatgctggagatggtgtttgccaaggccgacccccgcgtggtgaagatgtactccaaggcactggtggaccccagcctgcattcgctgggggatgagctgctggccaagtttgaggacacggagcgcgcgctgctcacggtggtgaagcacagccggctgctgtcctccagctccaccgccttcctgcagcagaagctgcagctgcgtgcgccctatgtggcgcccctcaacatcctgcaggtcagttgcttgaagacgctgcgtgcgattgagggcggcacnncagcgtggagaggcatg

SEQ ID NO: 652 - DNA, 225 bp, Chlorella sorokiniana
  Clone ID: LIB3602-022-Q6-K1-A3
aaaaagaaaaaaaaaaagaaaaaaaactgaaaaaaagaaaaaaaaaaggaaaaagaagaaaaaaaaaataaaaaaaggcgggaggaagagtggacaatggtggtgagacatgtcccctgcactggggtgggctttcggacagagccgccggtggtcacctttcgcagcaggggcgcccaggtcaagtacgtgtggcccgtccagcagggcgtggccggctttggc

SEQ ID NO: 653 - DNA, 450 bp, Chlorella sorokiniana
  unsure (1)..(450): unsure at all n locations; Clone ID: LIB3602-022-Q6-K1-A4
gtcgaagcgcgcatccaagcagcggggcccagccagggagtgctgtcccagctgtggatgctgccgcctgatggcaagtacggctcagactggccggcctctggagagattgatgtcatgggagtgatcaacgagggcctgcaggccacgcaaggaatccactatggtggcgcatggccgctaaaccaagtcaaggacgtgtccacccgtgcccccggcggccagggcttctgtgacgtttaccacgttttccgcatggactggaaactgaacaccatcaacatgtacatcgacggcgcacagacggctgcattcaacagcatcgccctcgacgccgccggctggtttgcgtcggcggcgggcacgccaaactctgctcctttcgacatccccttctctatcatactgaacgtggcggttggncggcaagtgnnggcgggtggccaaccg

SEQ ID NO: 654 - DNA, 436 bp, Chlorella sorokiniana
  Clone ID: LIB3602-022-Q6-K1-A5
gaattttggagtaccatatgccttttcgcccgcaagccactgccgccctgcttgctgtggcagcggcctgtttgtcccccagggccggtctttgtgcttgggcagcagccaatccacacagggccaagccccatgctggagtatccccacgccggcttctccttacgtaggaggcagcacagctcgcgatctctcacctgacaggcctcccttttccagaccgttgctttcattgtaggcaggccctcttcctgcctccagcgcatccgcctcgcgcctgccaaacgaatgcttccctcccctgctttggcttgcttgctgccacggcgtgacgcaccacactgccccgccgccgctgctgttgcttttcgctgcggttttgttgtctactttgaactatcgactctcaaccacgctgcccttgccctcccgctct

SEQ ID NO: 655 - DNA, 437 bp, Chlorella sorokiniana
  Clone ID: LIB3602-022-Q6-K1-A6
cccacgcgtccgggggccgtcagccgagcagcagagggaagcagcagacgatgcccgcgccactccaccccatgacccgggagccggccctgacgaccatcatgcgggcgggcaagcagatgtggcccttcgctgtgggcttcggtgtgtcggcctacatcttcatcaacgtcgcagctagcgtcactgacgaggatgttaagaacagcaagttcgccaacccccgtcactgaacttgacggagcccgcacgccaatggaatggcccggcagcggcacttagccagcatgcagcagcgccgtccggcggcggtgggagcggcagcagcagcttgggagggggctcggcgacgcgcagcctgcggcagcacagtctggcccctacccgtccgcgcctcgtcttgcaccagttgcatccggcagcccgaaatgccaggt

SEQ ID NO: 656 - DNA, 270 bp, Chlorella sorokiniana
  Clone ID: LIB3602-022-Q6-K1-A7
gggcatgcaacgtaatagtttttttatggggccaccaaaattaaattaaggggccggggtttaaaaacgtcgggacgggaaaaacccgggggtaaccaaattaaatggcttggaagaaaatccccttttcgccagtgggggaaaaagcaaaaaggcccgaaccgatggcctttccaaaaagtggcccaccctgaagggcaaaggggacgggccctgtaagggggaataaagcggggggggggggggggttacccccagggtgaccgttaa

SEQ ID NO: 657 - DNA, 461 bp, Chlorella sorokiniana
  Clone ID: LIB3602-022-Q6-K1-A9
cgcgggtggtggaggcggccagcagcccgggcagcgagtaccggcggtttgcggtgaatgacaagctgttcgaccacgacgacatcgaggtgctgattgcgctgcagcaggctccctacgagacagagccgccgctggtcaccttccgcagcatggccgcccaggtcaagtacgtctggcccatccagcaggcagtgaccgactttggctcgcagcggcagcggctcaaggaggtgcggcggtggctgggctggcgcctgctgggctgcgacctcctggagcgctatgaggagtagccggtgtgggtgtgaaacacctgcattgactgcctagcagtcatgcacccgcgtgagagtaatttctgtgcctgagagaacgaacccttgtgctgctgattctgtgtaccatgctgcttcttctgatcctgtccttccagttttccggccccttcagcacttctg

SEQ ID NO: 658 - DNA, 432 bp, Chlorella sorokiniana
  Clone ID: LIB3602-022-Q6-K1-B1
gtgggcggcctggcgcgcatcgatgtgctggagagccccggggccacgctctacctcaccgtgtttgcctcggacgagattggctgccacatgggcaagacagagacggcggaggagcggtacgctctgcatgccggcggcaagctgtccccgccgctgggcggcgccgagcggctggagggctggccggggctggtggccacggatgtggaggtggtgggcgacagctggaagggcagcagcgctgacgtggccatcgcaggcctgggctgggtgggcgtgggcgtgaacggcgctgcgtcgctgcgggtgtgggcgccccccggtgtggccatcaccactcacgatgccctggtgcccgactttgctcgtgatctggagcggcccggctttggcgccgcgctcactgacgccggcaagaacccggccggg

SEQ ID NO: 659 - DNA, 459 bp, Chlorella sorokiniana
  unsure (1)..(459): unsure at all n locations; Clone ID: LIB3602-022-Q6-K1-B10
gcgacgcggcagctgcggcccaggagcaggcggtgccgagcagtggtggcgccagcagcagcggcggcagcgtcggccccagtgcctggagcgatgacatggcgagtgtgctggttgttgattaccgggagcctagcgaatccagtgaagcggcagcaggcagctctgctgcagctgctcccgccgcggctgaggctgcacgagctgaggctgttcaagctgcgcctgcgccagctgagcctccggcttggcagcgcagcggcattgtgggcagcagctttgatatgggagacgcctcgagcagcagcagcagcggcgaagacgactggagcagccagctcagcgcgctcagcgggcgcagcggtcacagcagccagcgcagcggctcagacagtgacagtgagggccgcggcaacggcagcggcaatnggcagcgctcagnnggcggcaattggcagc

SEQ ID NO: 660 - DNA, 455 bp, Chlorella sorokiniana
  Clone ID: LIB3602-022-Q6-K1-B11
gtgaaaccagccaaaatgccgggcatcgccgtgggcctgaacaagggccaccccacgaccaagcgggagaagcaggcccgcccggcggcgcggaagggccggctctccaagcgcgtgaagctggtgcgcgacattgtgcgcgaggtggcgggccaggcgccctatgagaagcgcatcatggagctgctcaaggttggcaaggacaagcgcgccctgaaggtggccaagcggaagctgggcacccacaagcgcggcaaggccaagcgcgaggagatggccggcctgctgcgcaagatggctgccaaggcgcacaagtaaacgcctgtgcagccacagcagcagcccgcagcagcccccatcgtggcggggcggccgcagcgcagcacggcacagcacagcgcagcgcgcggcgccgcccgccttgcagcagcagcatcactgtgcctagcacctgt

SEQ ID NO: 661 - DNA, 177 bp, Chlorella sorokiniana
  Clone ID: LIB3602-022-Q6-K1-B12
ccctgccagccgtcctcccagccgcacacaggcagcgccagcggcgcttgcggcaggggaggcacccactgcagcactggtcttttcctatcaatccatttggtttcagcttgcaatgtgtatttcatcaagcaaatgcatcctgtcatagtaacaagctgtagtcactcgcgcagg

SEQ ID NO: 662 - DNA, 206 bp, Chlorella sorokiniana
  Clone ID: LIB3602-022-Q6-K1-B2
cgcacggagcgcaagcgcgtcccgcgcacagccgccaccgaagcggcctgccagcgtcgacggcagcgaggcagcaaggcgcggcctggcatgctagcagcgcgtactgcgcgccacggcgctagcagccgcaccctggaacagcatcagcagtaattcagcagcccacctgcatgccgaacgctccgctgtaacaggttctcagg

SEQ ID NO: 663 - DNA, 354 bp, Chlorella sorokiniana
  Clone ID: LIB3602-022-Q6-K1-B3
aaaaaaaaaaaaaaaaaaaaaaaaaaaaaaagaaaaaaaaaaaaaaaaaatgaaaaaaaaaaaaaaaaaataaagagagagaaaaaggaagcacttgctaaaaaaaaaaaataggggggcgggggttttgcgggttccaggttgtctcccgcttccatgcaaggtaggaggttttctttgtggctaccgatatcaaattcccgggcctccgtttaaaaacgtggtgattgggaaatccttggggttccccaatttaatggctttgcaacacatccccttttcgcctgtgggcgtaatcggaaatgggccggaacgggtcgcctttcccaacggtggcgcaacctgaatgcaaaa

SEQ ID NO: 664 - DNA, 290 bp, Chlorella sorokiniana
  Clone ID: LIB3602-022-Q6-K1-B4
tgtccaagatcaaggtggtgcgcaagggcattgcccgcgtgctgaccgtggtcaaccagaagacccgggacgctctgaaggaggcgtacaagggcaagaagtacgtgcccctggacctgcgcgtcaagaagacccgcgccatccgccgccgcctcaccaaggcgcaggccaacgccaagactgagaaggctgccaagaaggcgcgcgccttcccgcagcggaagtacgcgctcaaggcgtgaaggccttggaagcagcccgctgcagccgtgcaggcacacctctaggca

SEQ ID NO: 665 - DNA, 153 bp, Chlorella sorokiniana
  Clone ID: LIB3602-022-Q6-K1-B5
aggcgcagctaacggggggactgataaggctgtcaagattgcgcgcgccttcccgtactggaagacgcgctcttggcgtgaaggactaggaagcagcccggtgcagacgcgaagagatcgtctggctaatgtgcgagatagatgactaagcgc

SEQ ID NO: 666 - DNA, 235 bp, Chlorella sorokiniana
  Clone ID: LIB3602-022-Q6-K1-B6
caacaacttcgtgggcagcatcaacaacctgcccaacgtgattggccagtgagctgcagcgccgcaggccacgcagccgcggctcggacttaggcatgatggcggcggctgcgtggcgggggcgtgccggccggggcggccggagcccattccttccgagagaatgaaaatttacaacttgtggggcaccggcgcacgcccggcccctgtaccatgtgtaatttaacacgattcc

SEQ ID NO: 667 - DNA, 431 bp, Chlorella sorokiniana
  Clone ID: LIB3602-022-Q6-K1-B7
ggcggcgggcagcagcagcaggcagatgggcttccattcaaggtgccgccaaagtatctgttcacctgcaccgtgggccgcagcatggccagcaaggccagctactcgctgagcggcagcatggaggtggcgcagctgctgcacaagatggcgctggcagacggcatacccaccagccagctgcacctgccgggcatgagcacatcggcctcgtttgacgacctgctgcagtcgctcatgatggctgagggcagcatgtccgccagcctttagacgctagctacgccccagtagtctgtccgccagcctctggttgcctctagctgctagcgggttgaagcgtcagcccttgctgctgcaactgcggttctgttctgtcctccagcctttagcctgttgctgacatgccgcggctgctgctttcgcgttgt

SEQ ID NO: 668 - DNA, 51 bp, Chlorella sorokiniana; identical to SEQ ID NO: 160
  Clone ID: LIB3602-022-Q6-K1-B8

SEQ ID NO: 669 - DNA, 437 bp, Chlorella sorokiniana
  Clone ID: LIB3602-022-Q6-K1-B9
ggcgacgacaaggcgatggcgtacgcgggcgtgcctcaggacctgtctaagcagctgcccgctggcgagtgggtgaaggaggcgctggcgcagctgggcggcaagggcggcggcaagcccaccacagcgcagggctccggccccgacgttggcaaggtggacgacgctctggctgccgccaccaagctggccggcctcaagctctgagccggccgctactgagctggtggctgaatctaaactggccacagcagcagcagcagcggcggcggagctggcattgcccatgcacacaatgtggcatggaacggcagcgcaccgacggggcattcgttcaacgccagcacacagagttcagccatgctacccgagtatcgcagccttgatatttttacctcccttatgacgtcattccgccgtccccttctgggtcgccc

SEQ ID NO: 670 - DNA, 423 bp, Chlorella sorokiniana
  Clone ID: LIB3602-022-Q6-K1-C1
ggctgcaccgctgcacgcaacggctgatacagctggctccgctgctgcggcagcgcggctgcctgcctgaagtggcggccagtgttgttgcctgcagcggccagctcccttgctgccaaggcatgggtgaggctcggctggtgcttgttggaaccatgacgtggaacacccatgcggtggtgcggacctacttcaagccgctgtgctgcgcatgctgggacgccaagtatgcggttaagatggcgccgccggcggccagggcgggggcagcatgaggggcgtcgagcacgctgagcagtgcagatgggcaagggcgcccagggtgcctactggcctgtctgcggttagactagactagactgcccgctgctccagctgcttgccacacaattctgctgcactgcagctgtaccgttcaacatg

SEQ ID NO: 671 - DNA, 436 bp, Chlorella sorokiniana
  unsure (1)..(436): unsure at all n locations; Clone ID: LIB3602-022-Q6-K1-C10
gatgctagtggcgtctagccctgctgtgcgcgtgctggccggggccccgattgtccagctggcggcagtccgtctgcacaacagccggtgtgaatcagcacccgctcggcgcgcttgcctggcgcgcccatgcaaggcatcctatagtggcccatgtcccctttgtaccatgccataaataccgcatgacctcgccctcttttgctgccctctggctcccgttcgtttcgcactgacccaccttcccaattatgctttgagcgcgcggcgcccctcgctaacggcctgtgccggcgccgccgccgcgaaaattaagcccccaactcagaacaccgaccccttgcttgcactcgcatgccctctcgctgcttttccaaccccctcggcctcttccccagcctgccttcatcccgccatcnagtgtgncnnaccccac

SEQ ID NO: 672 - DNA, 65 bp, Chlorella sorokiniana
  Clone ID: LIB3602-022-Q6-K1-C11
aaaaaaaaaaaaaaaaaaaaaaaaaaaaaaaaaaaaaaaaaaaaaaaaaaaaaaaaaaaaaaaaa

SEQ ID NO: 673 - DNA, 456 bp, Chlorella sorokiniana
  Clone ID: LIB3602-022-Q6-K1-C12
cgccgaggggagagcacgatgcagatcttcgtgaagaccctcacgggcaagaccatcaccctcgaggtggagtcttcggacaccatcgagaatgtgaaggccaagatccaggacaaggagggcatcccccctgaccagcagcgcctgatcttcgccggcaagcagctggaggacggccgcaccctggcagactacaacatccagaaggagtcgacgctgcacctggtgctgcgcctgcgcggcggcatcattgagccgtccctgcagatcctggcccgcaagtacaaccaggacaagatgatctgccgcaagtgctacgcccgcctgcacccccgcgctgtgaactgccgcaagaagaagtgcggccacacctcgcagctgcgccccaagaagaaactcaagtaaactactcgcttcggcacgagcggaagcggcatgagcggcagcaaccgctgc

SEQ ID NO: 674 - DNA, 409 bp, Chlorella sorokiniana
  Clone ID: LIB3602-022-Q6-K1-C2
gtcctcacttacaggcttcaccgaaggaagcgtctgagtcgggacaaagatggcgaccgctatcaagcctgcccagaagccgggtgtggaggaggccgaggccgcccccatccaccgtatccgcatcaccctgacctccaagaacgtcaagagcctggagaaggtgtgcgcggacctggtgcgcggcgccaaggagaagcagctcaaggtcaagggccccgtgcgcatgcccacccgcgtgctgaagatcaccacccgcaagtccccttgcggtaacggtaccaacacctgggaccgcttcgagatgcgcctgcacaagcgcctgatcgacctgcactcccccgccgaggtggtgaagcaaatcaacttcattaacatcgagccgggagtcgaggttgaggtcaccatc

SEQ ID NO: 675 - DNA, 467 bp, Chlorella sorokiniana
  unsure (1)..(467): unsure at all n locations; Clone ID: LIB3602-022-Q6-K1-C3
cggacctgaagggggccacctgctccgacccgggcttctgctgcatggccgccttctgcagctgctgcgtgtcgtaccacctgcgcaagcgccagctgcgcggcgacatgacccgctacatctgctgcaatggcgactggccctgctccggccgctgcggcgagcagtcctcgccccagctgtgcctgtgcctggaggtgtcgtgctgctttgcgcagtcggtggcctccacccgctgggccatccaggacgagatgcacctgcagaacacgcagtgcgacaactgcatcatcggcaccatgatcgcggcgcagtacctggcctgcatctgctggctggccgcctgcatcagcggcaacgacgtgctgcaggacctggcgcagctgaccgacatgattgccgacatcctgtggtgctcggtgtgtgcctgcatgcagaccgcagcacaagggtgnncagctggacga

SEQ ID NO: 676 - DNA, 254 bp, Chlorella sorokiniana
  Clone ID: LIB3602-022-Q6-K1-C4
aaaaaaaataaaaaaaaaaactgatagacacaaacaaaaaaaaaaaataaacaatagaagaaaaaaaaagaataaagagaagaactgaaaaattgggtggggcctgcattggggttccacgcttcctgtggctttcatgcggacttatgcgttctgttatcgttatcacccaggttgtacttcccgggcgtgcgtttctgactgtaggtgctgggaaaccctgggcagttccggtctttccttcctctgggtcc

SEQ ID NO: 677 - DNA, 460 bp, Chlorella sorokiniana
  Clone ID: LIB3602-022-Q6-K1-C5
ctggcctgcaaaaggagatcacccaggagggcagcggtgccagccccaagcagggcgacaaagtgactgtgcactacacgggcaccttccccgatggccgcaaattcgacagcagccgtgaccgcgggcagccgtttgtgttcaacatcggcatgggccaggtcatccgcggctgggatgagggcgtgatggccatgaagattggcgagcgctgcaagctgacctgccctcctgactacgcctacggcgcgcgcggcgcgggcggcgtgatccctcccaatgccaccctggtgttcgatgttgagctgctgggcatcaactgagcatggcatagcaggcacggcacgcgcagcacgcccagtgagagagcagcagcagcaatgattgaccattgcactggttcacggtgtgatagcaagtctgtgggacggccatgattgacgctcgctctgtgctgtgg

SEQ ID NO: 678 - DNA, 66 bp, Chlorella sorokiniana
  Clone ID: LIB3602-022-Q6-K1-C6
aaaaaaaaaaaaaaaaaaaaaaaaaaaaaaaaaaaaaaaaaaaaaaaaaaaaaaaaaaaaaaaaaa

SEQ ID NO: 679 - DNA, 424 bp, Chlorella sorokiniana
  Clone ID: LIB3602-022-Q6-K1-C7
cgcatgcacagctacagattctgcttcttttccactgcacattgttgcccattccacaatgttcccaataagttacactgccttttgcatccgcttcattcagcagtgcaccttctctgtccgtgatttgctctctagcgtaccgccgtcgtacaacagctcagcccagcgatgcatctttgatttgcactggttgcatagcgtaccgccgttgccctttcttgctgatggtgtggcatgctggacgagcttcgccagcaaatgctgtttgtcgcgccgcggtggccatgcaactcatcccaggttgagtgtaaggtgcccgttcaaaaaaaaaaaacaaaaaaaaaaaaaaaaaaaaaaaaaaaaaaaaaaaaaaaataaacaaaaacaacacccaaaaaaaggggtccacctttaaaagaag

SEQ ID NO: 680 - DNA, 442 bp, Chlorella sorokiniana
  unsure (1)..(442): unsure at all n locations; Clone ID: LIB3602-022-Q6-K1-C8
gtcccctgtagtggagcagcccgccttcagccatgggtaagactcgcggtatgggagctggccgcaagctgcggctgcaccgcaaggacgagcgctgggcggacaaggactacaagaagtcgcacctgggctccgagtggaagaagcccttcgccggcgcttcgcacgccaagggcatcgtgctggagaagatcggcattgaggccaagcagcccaactccgctatccgcaagtgcgcgcgtgtgcagctgatcaagaacggcaagaagattgcggcgttcgtgcccaacgacggctgcctcaacttcatcgaggagaacgacgaggtgctcatcgccggtttcggccgccgcggccacgccgtgggtgatatccccggcgtgcgcttcaaggtggtgaaggtgtccggtgtgtccctgnctggcgcttcttcnncgcggca

SEQ ID NO: 681 - DNA, 264 bp, Chlorella sorokiniana
  Clone ID: LIB3602-022-Q6-K1-C9
cggacgcgtgggaaaaaaaaaaaaaaaaaaaaaaaaaaaaaaaataaaaaataaaaaaaaaaaaaaaaaaaaaaaaaaaaaaataaaaaaaaaaaaaatttataataaaaaaaaattaaattaattaaaaatgaaaatatttttaatatttaaatatttgataaaatttatggagttagaaaaatttgggggttttattataaagtataattttttagaattggttgttttgagtattttagaggtttttttgtttgggatttt

SEQ ID NO: 682 - DNA, 318 bp, Chlorella sorokiniana
  unsure (1)..(318): unsure at all n locations; Clone ID: LIB3602-022-Q6-K1-D1
ccgactcgcagtaaacgggcggctccccccgcccccaaacgggcaggcgccgagtgacactgctcgtcggcgggccgcggcgcgcgagcctccctgccatagcgcttgaggggcggcttgccatgcccgcgccgccgcccgcacctctgcttgtgtagtttcccgctgctgttctgcttccttccctctgacctctcgcacacataccgctgctccacgattcgctttggcggcgccgcgcccctgctcgccggcattcggcggcggngcgctgcactgcatgcgggcgtgccccctctgtaaggcaggcccatgccc

SEQ ID NO: 683 - DNA, 269 bp, Chlorella sorokiniana
  Clone ID: LIB3602-022-Q6-K1-D10
cggcttttcgccatccccgttcaatcccctgctctttccccctcaaccaacattttcccttccctaacctgtcgcatttcgccattttcttttcattcttgaacatgcatgttgatgcgccgcatcttgttccgctgctttgctgcgtctttgcccttctttccatgcaccacactcccatggccacgtatgctggcatgccttgccttgatatacacacgattgtttgaaagtacgacatggctatatgtttgtaacggaacaacaca

SEQ ID NO: 684 - DNA, 355 bp, Chlorella sorokiniana
  Clone ID: LIB3602-022-Q6-K1-D11
cgactggagcaatgcgcagcaagtcaatgccttccttggctggctgcaccacgagcgcctgcgccgccacgggcagcagccagcgcaggagcagcagcagcacccgggtgcggcctagccgaatgctgcaggattgagtagcgcgcaactgccaagcggcaaaccggtcctaactgccgaccattacccttaccagtgccacgcactcccttcacagccaagccagcagtctagctactcacctcatagtgtccctgacttcacactacgacccttgcttcccaggcagctttcattagactcagaacactaggtgcagcgcaggccgttcactaggcccagcagcaagggcagc

SEQ ID NO: 685 - DNA, 435 bp, Chlorella sorokiniana
  Clone ID: LIB3602-022-Q6-K1-D12
aggcgcagcacggcaagagctacaagtcggcacgcgaggcggagcgccgccgcggcatctttgccgccaacgccgccaagattgcggcccagaacgcgcgcaccgactcctcgctgcgcctcgccctcaacgagtttgccgacctcacgtgggctgagtttgcggccacccgcctgggctacaagccggcggccaagaagcagcagagcgccgccaacggccccgaccccttctcctacggcgatgtggatgtggtcgacctgccggcggccattgactggcgggacaagggcgcggtgacggaggtcaagaaccagggcatgtgcggctcctgctgggccttctccgccattggcgccgtggagggcatctccgccatccgcactggcaagctggtgtcgctgagcgagcagcagctgggtggaactggcgaca

SEQ ID NO: 686 - DNA, 304 bp, Chlorella sorokiniana
  unsure (1)..(304): unsure at all n locations; Clone ID: LIB3602-022-Q6-K1-D2
cgccctccaacatcaaggtgcccgctttcggcggcgagtcgctgttcggcgccttccatgcctccatgctggagaacctggccaacttcccccagggccctgctctggactccaacttctgggtgctcatgatcacttggcacatggggctctttgcttgcctgttttggggcctcatcggcgtgaacgcccgccgccagggctacttcgactgagcgctgccccatttggctcccagctcggattcattgctcaaacttgccgtgtacacgccatgtgccctgttgtaacgctctacgcntaa

SEQ ID NO: 687 - DNA, 309 bp, Chlorella sorokiniana
  Clone ID: LIB3602-022-Q6-K1-D3
aggacgacgaggaggagacggcggctgagaaggcggcggctgagaaggcggagcgggagggcacggacaagcccaaggagaagaagaagcaggaggcggagcatcaggagctgtagctgggcatttggagtaccattcccctagcgcgctccggtggttgcgtgtcgagcggcagacggcaccggcatgctggtgtgtttggcgcaagtgggtgccaggctgctcagctcacgccacccattcccgttcctgactgtcttcaatcagttgctatcacctctgtttgttttattgtgagagcttgcgagc

SEQ ID NO: 688 - DNA, 443 bp, Chlorella sorokiniana
  Clone ID: LIB3602-022-Q6-K1-D4
gccgcgcgtaggcgcactccctggccgagttctgaggcggcccagccaacgcctgtgcggtgcacacgctttgtgctgtgcgcacgctccagggctatgcagcacgttagagatcaccaccacagagagccgcacacgctctccttggccaagcagcagccagtagccagccgcgccgccagctgcagcgtgcacaccaccagcggcagcggcgcgcaagtagcaacagcagcagcagcagcagcagcagcagcagcagctcacagtacccccttccgattcaaattaagtgttcagcgctcctctccagttatccagtcccactcgctacagccccaggcttgtttgcgccctctgggctccacttttacggctttcccgtttgtcttcggagcctgtccgctcgcccttgacagtctacctttctttgcctgccttcccaa

SEQ ID NO: 689 - DNA, 307 bp, Chlorella sorokiniana
  unsure (1)..(307): unsure at all n locations; Clone ID: LIB3602-022-Q6-K1-D5
agctgatcaacgcggccaagggcagctccaacagctacgccatcaagaagaaggacgagatcgagcgcgtggccaaggccaaccggtaaacggctgttgcgcacccaccaaaacagcagcccgccacagccggcacccctgggcaggatgccagaccgccagtgcagcagcacggtgtggttcagctgctgttatcgtggcaggctttccaattaggcgcgggtgttaggattgtgtaacacagcgcacccaananaaaaaaaaaaaacaaaacaaaaattaaataaaaaaaaaaatttaataaaaa

SEQ ID NO: 690 - DNA, 458 bp, Chlorella sorokiniana
  Clone ID: LIB3602-022-Q6-K1-D6
caacgaggccaccaagacgctgaaccgcggcatcagcgaggtggtcgtcatggccgccgacaccgagcccatcgagatcctgctgcacctgcccctgctggcggaggacaagaacgtgccctacgtgtttgtcccgtccaaggcggcgctgggccgcgcctgcggcgtgtcccgccccgtcatcgcctgctccatcaccaccaacgagggcagccagctgaagaaccagatccagcagctcaagctggccattgagaagctgctcatctgagctggctgttgcacagcaacaccagctgcagcggcagcacgagcagtggcatgcccggcagcggcgccgcccctatgcagaggcatgggggcggcgggcagctggccccggttctctcggctggctgggtgccccgcctaggcgacagttgacacgaccgttaccctattcttttcgccccacgtac

SEQ ID NO: 691 - DNA, 395 bp, Chlorella sorokiniana
  Clone ID: LIB3602-022-Q6-K1-D7
gccggcgtgcacgagcttgaaaaggcgggcgtgcgggcggcctttattaatgcagtttactcggccacacagcgggctgatgagctggccaagctgggcgcttgagccaattttttggacgtttcagcagacacctgcagttgcagcgcttgagcagttttctttgccgcctggagcgtttctttggtgcagcacctttgcttgcggttcagcagctggacggttgtgcagcggggcgcccggcaaagctgaatatgtgagcagttgtggttggggagagaagcggctagcatggcacatgtgcagcactgtacagcgcggcaggcacggagccaccgcagactgcaattcatgcacatcccaattgctgcaacgctctgtaagactccagcctg

SEQ ID NO: 692 - DNA, 439 bp, Chlorella sorokiniana
  unsure (1)..(439): unsure at all n locations; Clone ID: LIB3602-022-Q6-K1-D8
gccggtcaccatggtgcagcgcctcacctaccgccggcgtcacagctacgccaccaagtccaacaagcagcggatcctgcggacccctggcggcaagctggtgtaccagctggccaagaagaagacctcccaccccacctgccccatctccggccagcggctcaatgggctgcccgcggtgcgccccaacagcctgcaccgcgtgaacaagagcaagaagacggtgcaccgcgcgtacggcggccacctggcggcgggcgtggtcaaggagcgcatcgtgcgcgccttcctggtggaggagcagaagatcgtgaagaaggtgctgaagctgcaggctgccaaggaggctgcgcaggccaaggccgcggcggcaggcagcaagggcaagaagaagtccaagaagtgagcggcgcacgcgagcnnggacagttnngcgccc

SEQ ID NO: 693 - DNA, 437 bp, Chlorella sorokiniana
  unsure (1)..(437): unsure at all n locations; Clone ID: LIB3602-022-Q6-K1-D9
atggtgttcgtgcggacggaccgcacgcatgtgctggacctcgcgtccacggccaccgtggccgatgtgaaggccgccatcgaggcgcgccagggcatccccgccgaggagcagcgggtgatgttcggcggcaagcagctggaggacggcctgtccctggaggcttgcggcatcagcgatgactcccagatgtacatcctgatgcgcctgctgggtggtgccaagaagcgcaagaagaagacctacaccaagccgaagaagcagaagcacaagcacaagaaggtgaagctgcgggtgctcaagttctacaaggtggacgacagcggcaaggtgcagcgcctgcgcaaggtgtgcccccagtgcggccccggcatcttcatggccacccacttcaaccgcgtgtactgcggcaagtgccacccctgacgtanncgtgt

SEQ ID NO: 694 - DNA, 456 bp, Chlorella sorokiniana
  unsure (1)..(456): unsure at all n locations; Clone ID: LIB3602-022-Q6-K1-E1
ccagggcctgccctgcattgtgccggtggctgcagctgaggcgctcttgcagcggtcgcggcacaatggcttcccagtctacgacccagcacacgtggacatgcgggccggctccttccgcaccgacggcttcatcatgcgcagccaagtggagctgctgctgcgggagcgggtgcactgcgaccggcacggccgctacctgcaggcgccgccgcagggcctggatacgctggagtgggaggaccgactggcaaccgccatggccgcccagctgcagcgccactccaactgcagcaccggcggcctgctgcgcctggccagccgcggcatggcgggcactggtggcgaagacggcagcagcggcagcgccctggggcgccctggcagcatgggcagcagtgggtcggcggcgctgctggccccgacaaccnncctcgcccttttggacccaaccag

SEQ ID NO: 695 - DNA, 346 bp, Chlorella sorokiniana
  Clone ID: LIB3602-022-Q6-K1-E10
ctcccccccaaccccttgcataaaactacccctttcatgtgcacagcacctgctggcaaaatgtgatacatagccgctgcacacgctgctctggcccccggccgctgccactcctggtgtgtggtcaactgccggcccttagctgccgtccgtacgctgccaacttgcactactactgttgtccctcccagcactgccggcctttgtcttggccgccccttgtgctctccccaacacttgcaccccctgtacacacttgcacagcagcgcaatgtaattgctgcgtgtgcaaaaaaaaaaaaaaaaaaaaaaaaaaaaaaaaaaaaaaaaaaaaacaaaaataaaa

SEQ ID NO: 696 - DNA, 324 bp, Chlorella sorokiniana
  Clone ID: LIB3602-022-Q6-K1-E11
ctccctcctaatcccttgcataaaactacccctttcatgcgctcagtacctgctggcaaaaagtgatggagtgggcgctgcacacgctgttttggccccccaccgatgccactcctggtgtgcggtcaactgccatcccttagctgccgctcgtacgctgccaacttgcactactactgttgtccctcccagtactgccagcctttttcttggacgtcccttgtgctctacccaacacttgcactcactgttcacacttgcacaccatagcaatgtaacagctgggtgtgctatatacaaacaaaatactccttgcgcattcat

SEQ ID NO: 697 - DNA, 429 bp, Chlorella sorokiniana
  Clone ID: LIB3602-022-Q6-K1-E12
attgatacactgcgccggtcagtctgtattactatgcccctgccctcccatgcaccgcatgggagcgggtggcttgctcagcgggcagcgcctgcctcccttggaggtcccttcaaagaaggtccaggcctgccgcctcagtccgtactaaacaaatcagcacctttcgttcgtcgcctttcattccgctctcgtcctccctgcctacctggtctgcctgccctagtgtgctggactggtagcaccctttgctgccccagcgtctgtctgcctctgcctccttgtgctttcatgcagctttcatgcagcttatgcagcatcgttgcggctgtcccgctgttcacccctttgcctcacctccctgcccctgctagctccttcccctccccacaaatgaacccaacagctggcctcgcttcggctttgtga

SEQ ID NO: 698 - DNA, 433 bp, Chlorella sorokiniana
  Clone ID: LIB3602-022-Q6-K1-E2
gcggcagcagctgggtgccgcagaatctgacctgtcgcccggagactacaaactgctgcgctgggacgcgctgcctgtggtgctgagcaccaccagcaacggctggtgcaagaactgggtgctgaccgggcagagcggctgcgtaggcctggcctcatcgctgcagcacctgtgggtgctgggcgcggggcagaccatctttgtggaggcagcagacgctgtgcgcgctgtgcgggatgacacgggtgtgtcggtgcgcctgggcactgacggctggctaacagtcaaggtgcctgatgccgaggtggcagccagcatgatagatgccatcaacggccgggccgccacacgagcagcgctgcggcagcgcgccggcggggccgatgcagcggcagggccaggcggagcatcattcgccggtgcctccttgcag

SEQ ID NO: 699 - DNA, 319 bp, Chlorella sorokiniana
  Clone ID: LIB3602-022-Q6-K1-E3
tccgaatcccggtcgaccccgcgtccgaaaaaaaaaaatatattaagaaaaaaatgatatgaaaaaagaaatcttcaactgaagaagaaaaaacaaattgactgttaggtccgcaccccgtggaaccctggtcctggtcctgtctgctcgccgggtggatcctttgctttcgcgctcgcctttttgttgctgtagctgttgctctgtgtcccggggctgcgcttctttctggcgtcgccccacgttgtgtgtgctctgccgtgggaggcccgtttgtcggcggggctggccgctgagttgtatcttaaatgctgctcct

SEQ ID NO: 700 - DNA, 321 bp, Chlorella sorokiniana
  Clone ID: LIB3602-022-Q6-K1-E4
cgccgtgacgctgcccgagatcaaggccctgggcacctatgatgcctctgtcaagctgcaccccgaggtcaccggcttcttcaagattgtggtgcagaaggacacctctgcgtaagcaccgcattcacggcgcccaggcggcagcgtttggccgcgcacattgtgtggccgcgtcttccgccccgaccccattgttttcagctccccttcgctttcatccctcatttctgctgccccgctgtccctaccccgctgcacatgtaacgccgtagcaccaaagaaaaaaaaaacaaagaaacaaagacaaaagtcaaaaaccaa

SEQ ID NO: 701 - DNA, 296 bp, Chlorella sorokiniana
  Clone ID: LIB3602-022-Q6-K1-E5
cgagcaacaggcaaccatgccgtcccagaagcgcttcgccatcaagaagaagctggccaagaaggccaagcagaaccggcccatccctccttggatccggttccgcaccaacaacaccatccgctacaacgccaagcgccgccactggcgccgcaccaagctgggcatctaagcgcctcccacgaggagcagctgacggcagcagccccggcacggcaggcagtgcgctggccgcgcttgcaaggcagcccgtcagtggcatgatgacagcttaagcttgtaacgatggcctagca

SEQ ID NO: 702 - DNA, 377 bp, Chlorella sorokiniana
  Clone ID: LIB3602-022-Q6-K1-E6
agcggctgcacggtattaccttgaagaagtgggtgccccgtgccattaagtagatccagaagtttgcgatcaagctgatggccaccaaggtggtgcgcgtgtacgtcaagctgaacaaggcagttaggagccagggcatgatgaacgtgctcaatggactatgcattgctttgcacctaaagcgcaacgaggacgatcgggactctgaggagatgttgtgcctggtgatcctggctgatgattaaaacaccatgttgggtgcagttgagctgcaggctttagcgcttgcctatctcattaaatgtaaattcatgttatgcgctatccgctctggatgatgctatgtaaagttcttgacaatgcgatgtagtatgttt

SEQ ID NO: 703 - DNA, 424 bp, Chlorella sorokiniana
  Clone ID: LIB3602-022-Q6-K1-E7
gccaatcattctgcagatcaacttgacctctttttatgctctattctcctgctgcccgctcgaatttttctgctgcccgctcctttattcctgctgcccacttccaccctcccgctgaatgccaagtgtgtgaaccacgctgctgcactacaaactgatgcctgcggttcaacaatgatgtcgcaaagagcacttattcaacttttttttactgtaatcaagtgacctgttaaaaaaaaaaaaaaaaaaaaaaaaaaaaaaaaaaaaaaaaaaaaaaaaaaaaaaaaaaaaaaaaaaaaaaaaaaaaaaacaaaaaaaaaaaaaaaaaaaaaaaaaaaaaaaaaaaaaaaaaaaagggggcggcccttttaaaggacccaagtttacttccccgggcttgcaaggtaaaattttttttatgggg

SEQ ID NO: 704 - DNA, 435 bp, Chlorella sorokiniana
  unsure (1)..(435): unsure at all n locations; Clone ID: LIB3602-022-Q6-K1-E8
tgagcaagtacaccgagcagcaaaagccgcgcgtgctggtcagccttgcagcagtgggcctgttcatggccgtcggctggccgctgcttgtgtactacaccggctgggcgggcttcgtcaagttctggctgatgccgtggctgggctaccacttctggatgagcaccttcaccgtggtgcaccacaccgcgccgcacatccccttcaagcccgcgggcgagtggaacgcggccaaggcacaactgtcgggcaccgtgcactgcgactacccccggtgggtggagttcctgtgcttcgacatcaacgtgcacgtgccgcaccacgtgatgtccaagatcccctggtacaacctgcgcgctgccaccgacagcctgcgccagaactggggcgactacatgacggagtgcanccttcaactggcgccatgctcaaagt

SEQ ID NO: 705 - DNA, 341 bp, Chlorella sorokiniana
  Clone ID: LIB3602-022-Q6-K1-E9
gcgcttactagctcaagcagccccatgccgtgcgctgcagctgcagacggcggggcgcacccttttttttgcaggcccaactgccagcgggacattattttagtgacttgccatacgcctgattatgccctgctgcgcaggttctcccttcatgcgtagtgcgagagaccggaaatcttttaccagggcgccggcaccccttgcgcagctggcggttttgcagcggacgcctgccatcatacccctgcaccgtttcttgcctgccatttgagcgatgggtccacgggagcggaccagcccgtgcgccccctgcttagtattggcgtggcattcttctgagt

SEQ ID NO: 706 - DNA, 452 bp, Chlorella sorokiniana
  unsure (1)..(452): unsure at all n locations; Clone ID: LIB3602-022-Q6-K1-F1
ctggaacttccccggcgcttacgccgtgcagttcatgaccgtggtgtcgtgcaccgcctgcgtgtacacttgctaccacttcctggtcaagaacccggatgtgcactttgtcaaggagctgaagcaggacgagctggcggagagcgcgcggtggtcccagcaggccaaggccgtccagggcaacgtgttccgctggctggcgcagacgcgcgacaccgccgcgggcgagcagaaggacacccgcatcttccgcgtttgagcgcccgccaggctgctgcgctaaatcggcgcgcaataccagccgctcaccgccactcgccgccgctgcgcccccctgtgcttgctctcagggcctgaggccctctgccagtcagccacctggggccggcacccccttgccgctatgatatgcgtccccaaagcttggagtgggaggcattttgcgnngaacc

SEQ ID NO: 707 - DNA, 455 bp, Chlorella sorokiniana
  Clone ID: LIB3602-022-Q6-K1-F10
gtggcagcccacggccagtgggcagcgtgcttttccctatccccagtcgtctggagcatttgattgtttgcagctcactgctcctctgcagcttcgtttgcccggccgcctttccccaaggcgcctctcttggtcattcgagaagaacccccgtctgcgttttcgcaggggagtgagggcgccaggccctgaaggcctggtgcggtgccctcctttccccaccgcccctgtcctcccaccgcccctcccctcctcaccccggccttcattcctgatgcgcctcccagcctccgtcatttcatgaggcgcttgcttgcccccctcagcccccagtggcttgttttccacttttctttcacgtggcggctcacccgccgtgctcagtgttagtttcctcacagccgacaactcaccacccctgttttctcacttactacctgtgttgcgctgcgctt

SEQ ID NO: 708 - DNA, 314 bp, Chlorella sorokiniana
  Clone ID: LIB3602-022-Q6-K1-F11
cggcgcgtcacgcagtcgctggctgtgcagtgacaacggctgtggcagtgtccagcacttgcaagctcttttgtggctcctcctcagccagccctgcattccctgcttaacgagggatgctattgatttatcaacctgctttcattgcggtatgccgcccctctgaccatccatctgtttgccaacactgtgacttcccgcccttgctgccctgcccctcctctctgttcccctcctgcctgtctctggctctgtgaaagggtgcggcaaaaaaaaaaaaaaaaaaaaaaactaaaaaaaaaaaaaaacaaaaa

SEQ ID NO: 709 - DNA, 422 bp, Chlorella sorokiniana
  Clone ID: LIB3602-022-Q6-K1-F12
aggttagacaaccaaccgagggctgcgctgtgacaactgctgccagactgtccacgaattggaaggtgtggaggtgattcatcctatgcagccctgcataacctgcctaactagaccaactcgtgcctgttgaacatggcgtaagaaccggacgcccgcctttggcacatgaattaagccgccaacgacctgaacggcaggtgcgggatgatcatttgctgatagcgcttgcgctagtaccccaacttcattgagtaaaacaagttccggtaaacgactgaacggcatccttgtggacagtgccacccactcgattgatgtcgtctttcgagacgacgcagcggcggacggtactgtcatgacgcactttcctgcctgcaaccttgattggtaacagacttggttgccaccagaaaactgtg

SEQ ID NO: 710 - DNA, 439 bp, Chlorella sorokiniana
  Clone ID: LIB3602-022-Q6-K1-F2
cagacgtacagcgagaagccggggcacaacttccagctgaacgccacctttgatgatgttaagcccgatggctacgatgggctggtgattccggggggccgcgcacccgagtatctgcggctggaccgcaaggtcattgagatggtgaagcactttgtggagacgcgcaagccgattgccgccatctgccacggcgcgcagctgctggctgccgcaggcggcgtgcagggccgcacgtgcaccgcctaccctgcttgcgggccagaggtgtcggcagcgggcggcttcatgcgagatgttgatgcatcggaagtggtggtggacggcaacctggtgacggcgcctgcctggcccgcacaccccaagtggctggcggctttcgttgatgtgcttggatactgtgtggtccgcaaggagcatgtcagcttctccattccaa

SEQ ID NO: 711 - DNA, 439 bp, Chlorella sorokiniana
  Clone ID: LIB3602-022-Q6-K1-F3
agacactcctgttggtccctcggggttaaattccttcaggatgtctaagtccgagctcgcgtgcgtttacgccgtgctggccctggccgacgatggcctggaggtcactcccgagaacatcgtgaccctgaccaaggccgccggcatcgaggtggagccttactggcccgccctgttcgccaagctgatcgagacgaagtccgtggaggacttcatcgtcaacgttggcgctggtggcggtgcccccgccgcggccgctgctgcgcccgccgccggcggcgccgcggccgcggaggagaagaaggaggagaaggttgaggaggaggaggacgaggacatgggcttctccctgttcgactgagcgcacagccggccgcggccagccaccctccagtgcctggtccgctccagttgcagcggcagctttcgattcccttcg

SEQ ID NO: 712 - DNA, 356 bp, Chlorella sorokiniana
  Clone ID: LIB3602-022-Q6-K1-F4
atttgattttgatgcaacctgagagcgcgaaaaaaaaaaaaaaaataaaaataaaaaaaaaaaaaaaaaaaaaaaatgaatgagaataaaaaaaaaaaggtgagtacgttaataagaaaatacaaagaaagagacaagcatggcggataaaaaacgagataaacaaattacaacactttaaattttaaaggggggggtcgtttatagggctccctgtttacctggtcgtggctgccctagtttgttttttttttaggggcctttgattttaatgcagggggggtgtttttaacacgttggggttgggaaaactttgggggcccctaatttaaattctttgccaaagaacacccttt

SEQ ID NO: 713 - DNA, 404 bp, Chlorella sorokiniana
  Clone ID: LIB3602-022-Q6-K1-F5
aaaaaaaaataataaaaaaaaaagagaacaaaaaaaaaaaaaaaaaaaaaaaaaaaaaaaaaaaaaaaaaaaaaaaaggggagaaaatataaaaaaaagggggtgagtttcaggggctcctttcttcttgtgcccgtcttttgggggtttcttttttttctttcgggggcctttttttaaatgcgtggggcggggtttaccccgtgggtttttgggggtaaccctggtgtatcccattttttgtggttttgcctggatccccctttatgaagcggtgtcctttgggaaggggccagaacggggcgcctttgctaggaattgtgcctcttaattggaatttggattgggcgtgtgttcgccctttttatcgcggagggttgggggtttcctggcaagggcccctt

SEQ ID NO: 714 - DNA, 458 bp, Chlorella sorokiniana
  Clone ID: LIB3602-022-Q6-K1-F6
gaaggaccccaagggcgtggtcacggtgccgggcgccacggtggtggacaacatctcctcggcccgcgagctgatggatgtgatcgaggcgggcctggcgcgccgccgcgtgtcctccacccagatgaaccgcgagtcgtcccgctcgcacctcatcatcacggtgtgcatcgagtcgaccaacctgcagacccagaacgtggcgcgcggcaagctgtcctttgtggacctggccggctccgagcgcgtcaagaagtctgggtcggtgggcgagcagctgaaggaggcgcaggccatcaacaagagcctgagcgcgctgggcaacgtcatctcggcgctggccacggagcaggggcacgtgccgtaccgcgaccacaagctcacaatgctcatgtccgactccatcggcggcaccgccaagacgctcatgtttgtcaacgtgtcgcccgtggacgcca

SEQ ID NO: 715 - DNA, 344 bp, Chlorella sorokiniana
  Clone ID: LIB3602-022-Q6-K1-F7
gccacaccatgtgtaacgacttgcccgcaaaaaaaaaaaaaaaaaaaaaaaaaaaaaaaaaggaaaatcgatataaaaaaatacagaatggggggcgggtctatgggtaccccagctttcttcggtgggggcgccccattctatttttgttgtccggcgtcatacaactgaattgactgtggcgacgtttgacgtcgccgaaattggtggaattgccggcacttcccccttttgtgagctgtgcgcaatttcgccttttcccgctctggtggactttccaaaagggcgcgccgtttctatggttcatggaacgcgccatgttgatgggcattaggctcgccccc

SEQ ID NO: 716 - DNA, 328 bp, Chlorella sorokiniana
  Clone ID: LIB3602-022-Q6-K1-F8
ccttattggttccttaccagtgccccgtaccaccccttacccaacgaccgaccgtaacacttaacaagaatagaatgccaggcaaatacacggcactgcagtccacagctgcacagagcggcgcctgtcggctaatgcgccagccagcgctggcctgtaaagccgccccgacaaaaaaaaaaaaaaaaaaaaaaaaaaaaaaaaaaaaaaaaaaaagggcagataaaaaaaaaaagccaaatctgatgcaggccaacaattaacgacaccatgtcgcttggtactaaaacttcaactgcattctccgcctcagctattcacaactggt

SEQ ID NO: 717 - DNA, 412 bp, Chlorella sorokiniana
  unsure (1)..(412): unsure at all n locations; Clone ID: LIB3602-022-Q6-K1-F9
ccgctcgctgccgcactgcggcgcaccatgctccttccccacaccgaccctgcaccttggccctcgtattgctgccgtccgtcgcctgccgtgccccgccagcccgcctcatggggcgctccatgcagctcacatccccctggcaggctggctgagcacttaggctagacagcagctgcccgttggcctccctgcacccggttttgctcccttcttgcttccacaacccgcttgcagcaacgttgctcgtgcactgctcccagcagccggtggtgctcaacgatggggtcacccggacacccgacctccgctgttgttgtttcattccagcattgcatgcccacgttgtgttgtttccagagccagtcagcctgtggaccaggcccagcctctgtaacccaagcaagcnnaa

SEQ ID NO: 718 - DNA, 458 bp, Chlorella sorokiniana
  unsure (1)..(458): unsure at all n locations; Clone ID: LIB3602-022-Q6-K1-G1
agccgctgctagtcacgctgtgtttcccggccagctgccgctggtgccctccccacctcacggggatgtaccatacatcttgcccccttgctccctccccccattccatcttgcgtccatcttggtccccttggtcctccaccgaagcaccgacccacccaccttgcacagcactccctccctgccccctgccctccatccaaccctgccctcgctgccaagcagcgccctctgacctccgtgcgcgctgccgccggcgctttgattcccctgttgacctccaggctggctgcgccagcctaccttccatgaggaccgtcccccttttccatgaacccctcttttcccctttcgaacccccaagccccttgcagcatcgtcctagctgcgccccgctgcctgaactggcggggcgaggcgcaggctcttgccaagaaacgcttttgaactcnnaaatt

SEQ ID NO: 719 - DNA, 428 bp, Chlorella sorokiniana
  Clone ID: LIB3602-022-Q6-K1-G10
gcgctgttccggcgcggcaaggcccggtttgcgctgggccagacagaggcggcggtggctgatctagaagcggcgcagcgggcggagcctggcgatggcggtatcgcacgggagctggcggcggcgcggcgggtggcaaaacaggagcgcgaggcctcggggcagctcttcaagggcttctttgagaagtccaacgaagtgctgtacgatgagccggagccggcgccagcgcagcagccgacccagcaggtcgacccagccgcggcggaagcggtggaggaggtgctacggcagatggagcggcagcagcagcaacgggccagcccgctgcatagcacgggcgtgcggctgtcactgatcgttggcctgctggccgtggtgttggcagcggctgcacgctttggcctgggctgggggccccggggggg

SEQ ID NO: 720 - DNA, 433 bp, Chlorella sorokiniana
  Clone ID: LIB3602-022-Q6-K1-G11
atcaagcagtaccttggagagacgctgcaggagatgggcgtcaagcaggatgtgatccagcacgccgccggagtggtggagtccacccgcgacgaatttgacttccccaacaactgcgcacccaactgattttcatcaacccaaccccagcctgagcgctcattccatcgattttgagcggggagcgccagttgccgagcgcgcccagggggcccaggagcctgcaaatcgtttgccagcccttgctgcattgaagagccatcagccattttcgcaccaagcccgccgagttgcctggcacttgcatttcattaccgcctgcccgacattacgcttgcccgagttgattgtacctgcatttcaatccagagacacaccgcgcctgccaatcctcgcactgccggtttagtacccttgcaaagttcttgcattg

SEQ ID NO: 721 - DNA, 432 bp, Chlorella sorokiniana
  unsure (1)..(432): unsure at all n locations; Clone ID: LIB3602-022-Q6-K1-G12
cgacggcgccgcctccccttttttcctgacttgtctctgctcccgctgcatgcctgcccgtttcccccgctgcatcagcattttggcgtctgtgccaccgcttccctgccacctgggcgcggccccagccatcttcccttcaacccctccttgtgggccggatttttgtggacccttccctcggccccacgcgtcttgtgtgccaacccccaatacccaaaagccaaaaacacgctctgcatgcgatttttctgcctggcttccctctgaactgtacgctcgattcgcccccgcgctcacccctgccgccgcgccccgcctgtgtgtgcaccaccccctgtctttcgttcccacacattcgatttttgcaagtgccattccccaaaccaaaaccttctccgcggcccgccccgcccctcccttgnncagccc

SEQ ID NO: 722 - DNA, 421 bp, Chlorella sorokiniana
  Clone ID: LIB3602-022-Q6-K1-G2
ccgagagctacattccagagggcgagacgctcatttccatgagcctgtctcatgatggccgctacctgctggtcaacctgaccagcaacaccatgcacctgtgggacctgggcagcgggccagacattcggccgcccgccatgccctgcgcgcgctttgagggccgcagcgacaagcaaagccggtttgtggtgcgctcctgcctgggcggcctggacgaccgatttgtgctcaccggctccgaggagtgcaaggtgtacgtgtaccaccggcacacaggcgagcgtctgctggagctggaggggcacagcggcaccgtgaacagcgtggcctggaacccggcagacccggccatgtttgcctccgcctcggacgacaagtccatccacatttggcagcccgccgcggtggccgccgctgc

SEQ ID NO: 723 - DNA, 446 bp, Chlorella sorokiniana
  unsure (1)..(446): unsure at all n locations; Clone ID: LIB3602-022-Q6-K1-G3
gcacggctttgcgcgcaacttggactggcagattgcctccacctctgccgacccgcagccagatgaccgggacccagaggtcacgctggtgctgactgagaatgcgtacaccaagggcatgtggccccacagcttcagggttgcctactcggtggcgctgcatggcgagctgctgcgtgcagacatgcgggtgctgaatactgggaccacatctttcgatttcactgcagcgctgcacacctacattgaggttgtggatgtggagcaggccagggttcggggcctcaagggcctcacctacctggacaagaccgtggaccccaagaacccggtgcaaaagacggaggagcgcgaggaggtgaccttcagcggccccactgacagcgtgtacctcaaagcaaaagactatgtggagctagatgtngggcacccaggcgcccagcagt

SEQ ID NO: 724 - DNA, 442 bp, Chlorella sorokiniana
  Clone ID: LIB3602-022-Q6-K1-G4
cctaaacacaaggagatgagggcaggagttgaaacgaatatatccccaggaccatggctcggtagcacatccgactgaggaggctcgggtgtgcgaagagttgaagcagagggaggcagaaaaacgccggctgcaggagactgattatgagctgcaaaggcagcagcagcagcagcagcagcagcagcagcagtgcagatggcatgagctgctcaagccccagtacctgctgcaaaagatatcgagctgcgtcaacgagcacacgagctgctggctggatgactgcttcccttcttgttgcgatgcccatcgcttcagttgtcgatgtttccacagtaacaggcagccgtcaaaaaaaaaaaaacctaaaaaaaaccaactgacagaaaaaaaaaaaaaaaaaaaaaaatataaaaagctaaaaagaagaaaaacaaagaaa

SEQ ID NO: 725 - DNA, 347 bp, Chlorella sorokiniana
  Clone ID: LIB3602-022-Q6-K1-G5
gttgatgttcttgagctctaagagtttgtgtatattagggattttatctcggaaggcggttggtaaaagagggccgcaaaggcaaaaaggggggcccaatagcccaagagggaaacccatgagggggcctgaaaaaaggaaatggggggggacggatcgggaataacccccccaaaaaaaaaaaatgggggaaaaaaaaaacaggccgggcgaaggatcgggggggaaagcctaaaagggatcttttaaggggaggggaaaccttaggatgagcaaacaaaaagggggggaaaaaaaaaggggaacaaaaaagggacggtgggggctggggggaacaaaaggtgggg

SEQ ID NO: 726 - DNA, 353 bp, Chlorella sorokiniana
  Clone ID: LIB3602-022-Q6-K1-G6
ctcagcagtgtatttacatgtgccatgcctgcatgcacgctatcgcgctaggcaggggatggcagctgagggcgaaatgaaaggcagttttttgaaaggggtgtgtcgtgtggcgttcagcgctgcatggcattattgctcgggatggaagcccgcccagggaaccccccggcgtgtgttgggcaaagtagctgctgactggcgcaatcagaggcggcagcgagttcaacaaaggctgaagtacacttgcagctgactggcggttgttgcggacagcgctactccagcctgaaaggcttgaaaggcgaggagctgtggcgagtccagctggcttaggcggccaccatttcctt

SEQ ID NO: 727 - DNA, 71 bp, Chlorella sorokiniana
  Clone ID: LIB3602-022-Q6-K1-G7
aaaaaaaaaaaaaaaaaaaaaaaaggacaaacgaaaataaaagaaacaagattacaaacacaaaaataagg

SEQ ID NO: 728 - DNA, 449 bp, Chlorella sorokiniana
  unsure (1)..(449): unsure at all n locations; Clone ID: LIB3602-022-Q6-K1-G8
acgtgaccgaccccttcggcaacaagatcaagtacgtggagctcggctaccccggctttgaccccctgtcgttctccaagaacaactttgatgagtggaagctgaaggagatcaagaacgctcgcctggccatgcttgccttcctgggcattgtggcgcagcacaacgcgcagccgggcagccccctggagcagctgggtgctcacctggccaacccctggaagaaccacttcatcaacaacggcgtgtccctgcccttcatcaacgacaccgtgcacaatattttgggcggcagcgcatgatgccttgtaatgcagcttccagcgccgatgagctgtgcgtgagcgcagcttgagagaaccgagcaggcgggcacgctgggggccctcccccctgcaagcctgcctgccgcgttgtaccccggcgtgcnnncccgcgccccaagccac

SEQ ID NO: 729 - DNA, 426 bp, Chlorella sorokiniana
  Clone ID: LIB3602-022-Q6-K1-G9
cctattgcctgtggggtctcaggagcaggatggtgaagttcctgaagcccgggaaggtggtcatccttctgtccggccgctatgccggcaagaaggcggtcatcgtgaagaactacgatgatggcaccagcagccgcccctacggccacgcgctcgtgtgcggcctgtctaaggagccccggaaggtgatcaagcggtcgtccctcaagacccaggcgcgccgctccagcctgaagaccttcatcaaggtggtcaactaccagcacatgatgcccacccgctacacgctggaggtggacctcaagggcgtggtgaccgccgagtgcgtggacaacagcaccaagaaggtggaggccaacaaggaggccaaggcgctgctggaggagaagttcaagagcggcaagaaccggtggttcttcaaccaag

SEQ ID NO: 730 - DNA, 418 bp, Chlorella sorokiniana
  unsure (1)..(418): unsure at all n locations; Clone ID: LIB3602-022-Q6-K1-H1
ntntttttttttttttttttttttgcacatgactttacagtgtagcaacttgctgtgttgcatttgctgtgccgtttgggttctaactgctctgagatatctatgccatggcacgggggaattcccgcggcagcagtgagcaaagaaaaagcagatgttcgaggggatggtcagattgtgatgtacgcatttccaacaccgtggggtcactcatctgtcagggggcggcaagcgccggctgcagggcgagatacagcgccatgtctcaaaccatcggactgtggtgccggcgcagctcgcataacttgcatgtggcacaacgctgaggacaaggtggcgcttgccatgccatgtcgtgccatgccacgtcatatgaactgtgctgtcacgtgtctgtcttggccttctggatgcccag

SEQ ID NO: 731 - DNA, 415 bp, Chlorella sorokiniana
  Clone ID: LIB3602-022-Q6-K1-H10
aaaaaaaaaaaaaaaaaaaaaaaaaaaaaaaaaaaaaaaaaaaaaaaaaaaaaaaaaaaaaaaaaaaaaaaaaaaaaaaaaaaaaaaaaaaaaaaaaaaaaaaaaaaaaaaaaaaaaaaaaaaaaaaaaaggggggggccgttttaaaggatcaaagtttacttccgcgtgcttgcaaggtattattttttttttggggcccccaaatttaatttcatgggccgggtttttaaaacgtgggaattggaaaaaccttgggtttaccaaatttaatggctttgaaaaaaatccccttttccccagttgggttaatagcaaaaaggcccgaacaaatggcctttccaaaaatttgccaaccttaattggaaaatggaaccccccttttaggggccatttaagcgcggggggtgtgggg

SEQ ID NO: 732 - DNA, 416 bp, Chlorella sorokiniana
  Clone ID: LIB3602-022-Q6-K1-H11
caggagcagcaggagcagtgcgccaacggcacagctgttcagcacaaccaagaccagcctgacacagcccctcccacctctttagatgatgacagtcgcggccccaaagcagcctcggagcctgccacctcagcacgctcgaacggcggctctgctgcaccgctgggtgtggctcctgctgctctggccgcagcaggggcggttgcgctggcgactgtggccgtggctgcgactgccctgcgcaagcggtcctgaccccctggcagtattgatgtcgaaaacaaacccaaacgaaaacggccggcggcggcacccgtgcccctccaaggcctggaatacaaacacccctactgcttccgttgaattgtccctgctttctgctcgggccccatgcatgtttcccagatggaaagata

SEQ ID NO: 733 - DNA, 420 bp, Chlorella sorokiniana
  Clone ID: LIB3602-022-Q6-K1-H12
gcgaaaaaaaaaaaaaagaaaaaaaaaaaaaaaaaaaaaaaaaaaaaaaaaaaaaaaaaaaaaaaaaaaaaaaaaaaaaaaaaaaaaaaaaaaaaaaaaaagaaaaaaaaaaaaaaaaaaaagggggggcagttttggaggttcaaatttaacggcggctttattgaaacgatatagttttttaatgggggtactaaaattaaattaagtggggggtggtttaaaaatggttttgaaggggaaaacgtgggggtaaacaaatttaaaccctttggaagaaatcccctttaagccagttgggaaaaaactgaaaaggccggaaaggattgcctttccaaaggagtgcacacatttatgggcaaagggaacgcgccttggagggggctttaaagcggggcgggggggggggttaccagaagg

SEQ ID NO: 734 - DNA, 443 bp, Chlorella sorokiniana
  unsure (1)..(443): unsure at all n locations; Clone ID: LIB3602-022-Q6-K1-H2
gccgagaactaccgccgcactgaggacggtcccgctggctacgccccgggtgtgggcaagttcgacgagtctgtgtactccaacatggacaacctgtaccccggcggccccttcgaccccctgggcctggctgacgacccggaggtgctggctgagctgaaggtgaaggagatcaagaacggccgcctggccatggtgtccttcctcggcttcgccgtgcaggcggccgtcactggcgagggaccctacgcgaactggtcgaagcatgttgctgaccccttcggctacaacctgctgaccatcctgtcctctgaggaccgcgccgccgtgctctaagcagccggccccgcctggcgcccgccgccgccccgagtgtagctctgtagtcccaccccttccctgtttccgcttgttcttgtgcttctcaagcatnnttggttgtg

SEQ ID NO: 735 - DNA, 272 bp, Chlorella sorokiniana
  Clone ID: LIB3602-022-Q6-K1-H3
ggcaccgctgtacgctgcccctcgccaacccaaaggaaccctactttttagccttcttctttgcaagccttcaacccgaccccaaaccaaccagccggccttgacatttggttagcatgtaccacgctccctgacctccagagtgcattctattcctggttccccctttcatcagcggcgcggtggaagccccgaggctcccgcctgcccgccctcggccatctttcattcaacacattgttgactcaccctggtgcccaacgattcatgtg

SEQ ID NO: 736 - DNA, 442 bp, Chlorella sorokiniana
  Clone ID: LIB3602-022-Q6-K1-H4
aggcgctgcagcagcagaccgccaagtacgacgaccccgtgctgctggccgcggacgtggagaagaaggagggcaccgtgcggcgcgtgtgcgagcccatcctgtccaagaagccgccgccgccgcccaagaaggaggagccggcgccgcaggctgtcgaggaggcgggcggcgaggagatggagacggaggcggggccgccgccgtcgcccgctgccgagggccagcccagcgacgaatctgagcccatggaggcgtgaaactggcatgagtgcccacgctgcacccccttgctgccccgagactcgcaagcttgcagacgtcgtggcagcttgatccctgctgtgctaacttttccattgttgtgagacgtgcgtgagagacttctgcctccctcccttcccctgccaacccccgagtggtgtttttctttttgcccgtc

SEQ ID NO: 737 - DNA, 415 bp, Chlorella sorokiniana
  Clone ID: LIB3602-022-Q6-K1-H6
gtgtggcctatgtgaagcgcggcaagggcgagatccgcctcaacggcgccccgctggagctggtgcagcccgagacgctgcgctggaaggcgtttgagccggtgctgctgctgggcaagcagcgcttctccaacgtggacatccgcatccgcgtcaagggcggcggccaggtgtcccagatctacgccatccgccaggccatctccaagggcattgtggccttctaccagaagtacgtggatgagcagagcaagaacgagatcaaggacatcctgctgacctacgaccgcacgctgctggtggccgaccctcgccgctgcgagcccaagaagttcggtggccacggtgcccgcgcgcggtttcagaaatcttacaggtgaaggctgccccgtgggacggttgggcgcctctggag

SEQ ID NO: 738 - DNA, 387 bp, Chlorella sorokiniana
  Clone ID: LIB3602-022-Q6-K1-H7
ggtggtggaccccatctaccccggtgaggcctttgaccccctgggcctggctgacgaccccgacaccctggctgagctcaaggtgaaggagatcaagaacggccgcctcgccatggtgtccatgtttggcttcttcatccaggccattgtgaccggcaagggccccgtgcagaacctgtccgaccacctggcctccccctccaccgacaacttctactccctgtacgccaagaccctggcgtaagcggcctgcacttgctcctgcttgagcctcgactggcggcgggcgtgaccctgtggcagtgcgctcccgcttgcgcccgctgcctgacttgacttcagctccactgttgcaccgaggggatggtgtaacatgtatgctggggc

SEQ ID NO: 739 - DNA, 285 bp, Chlorella sorokiniana
  Clone ID: LIB3602-022-Q6-K1-H8
attacaccggcatggggtaacagttatggtgaaagtgaaggggtgccagggccttttgccttgttggttgaagccctcaacagcagcagcagcagccccagcacgggatgcaagcgctgaaaaccccctgttgccctgagaaagcccccccatgtcccggaggtggaagaagcaccgaccgctttgaatacacctggcccttaggatgccggccacggggcgcccattaatcccaaaacggtggggcacagcgcatgtaaccgtgtccttgaaaaaaaatgaaaa

SEQ ID NO: 740 - DNA, 95 bp, Chlorella sorokiniana
  Clone ID: LIB3602-022-Q6-K1-H9
aaaaaaaaaaaaaaaaaaaaaaaaaaaaaaaaaaaaaaaaaaaaaaaaaaaaaaaaaaaaaaaaaaaaaaagaaaaaaaaaaaaaaaaaaaaaaa

SEQ ID NO: 741 - DNA, 496 bp, Chlorella sorokiniana
  Clone ID: LIB3602-023-Q6-K1-A1
gtgacatggaggcgcggctgcgggaggcagatgagcacggcgaggtgctgcgatacgtgggcagctacgatgcagagagcggggtgtgccaggcccacgtgcggcgcttccccaagagccacccctttgccaacctgtctggaacggagaacatcatcgccttcacaacgctgcggtacagcaacccgccgctgatagtgcgggggccgggcgctgggcccgctgtgactgcggcaggcgtgtttggcgaccttataaccctggcccgctaccttggagcgccctcgtagccgccctgacctgcagcagagcacgcttaatgccctgctgcaagctgcttgcatttgatagctgcaagctgttgtgcttcttgagatgcgccacacagagcttaccgccccctgcctgacagcaagtgtgcctgggcggcactcggttgctatttcttggacggctccgcacctgtttcattgcacgctgtaaagcccggcgcacc

SEQ ID NO: 742 - DNA, 531 bp, Chlorella sorokiniana
  Clone ID: LIB3602-023-Q6-K1-A10
gtggagcgcacgccgctgactggcacgccgcctgccgcgctgccagatgcgcagaagctggcggctctcagcactgccgccgacctcttcatcggcctgctgttcgcgctgggcctcggcgtgtcgggcatgctcaagccctccaaggtggcgggcttcctgtccgtcatcgccggcacgtttgacccctccctcatgtgcgtcatgggcggcgccctgctgctagcactccccgccttccagtgggcgttgcgccatgtgcgcagcggaggacacccgctggccaacgtctgctacgagctgcccagcaagacggcggtggatggaaacctggtctggggcgctttgctgtttggcgccggctgggggctgggcggcatctgccctggccccggcctggtcgcactcgcctcgctgcagcccaaagccttcctgttcatcgctgccatgctgctgggccagcggctggaccataccgtggataaggtggtttgcgcaaccaaataggctgccaagcacagctgtagctcg

SEQ ID NO: 743 - DNA, 434 bp, Chlorella sorokiniana
  unsure (1)..(434): unsure at all n locations; Clone ID: LIB3602-023-Q6-K1-A11
cctgggctggatggtggtcggctcgggactgctctggtttgtgctgaacagtatcactggtacggaagaccccgatgcaaagcagctggacctgtattcgtgcacctgcttgctgggctatgccctgctaccgctggttggacacgccatgctggcgctgctgctgccacggcgatccgtaccctccatggcggcagcagcgctggcggtgctgtgggcgggccagacggcatcgagcctcttctgccgccgctcgccgctgctggaccgccagcagagctgcgtgctgtacccctgcctcctcatgtactcctcattcgcgctgctgtccctctactgatggcagccatggcaccctgctgccggcgccctagagacgcagctaacgcagctctttgtgccgcagctaccctgtaacattcggttgcccanaa

SEQ ID NO: 744 - DNA, 63 bp, Chlorella sorokiniana
  Clone ID: LIB3602-023-Q6-K1-A12
aaaaaaaaaaaaaaaaaaaaaaaaaaaaaaaaaaaaaaaaaaaaaaaataaaaaaaaaaaaaa

SEQ ID NO: 745 - DNA, 460 bp, Chlorella sorokiniana
  Clone ID: LIB3602-023-Q6-K1-A2
ctggcggcagcagtcgagcagcaccggcgggagggcaagcgcattcccgaggacaaagtgtggggttacctgttgcagattgcactgggactgcagtacctgcatgctgccggcatcatccaccgcgacatcaagcccgcaaacatcctggttggagatcaggaggtgctgaagatcgccgacctgggtgtggcgggcctgctgcacatgggctccagcaagctgcagatcggtaccccgcagtacatggcccccgagatgcacgccggccgcgagtacagctatgcagcagatgtgtggagcctgggctgcctgctgtacgagctgtgcgccctggagccgctgttccaggaccgggaggaggaggtggtggcccgcaaggtgctggccctggccctgccccctgccatctctgccaagtactctccggagctgcaaatcgtggtgaaccgcatgctgc

SEQ ID NO: 746 - DNA, 523 bp, Chlorella sorokiniana
  Clone ID: LIB3602-023-Q6-K1-A3
cggacgcgtggggagcccgccatcctggacgacaagggcaacgagttggaggggccctgccagggctacctggtgatcaagcggccgtggccgtccatgatgcgcaccgtggcgggcgaccacccccgctttgagcagacctacttctcgcactacaagggctactacttcaccggcgatggtgcccgccgcgacgaggacggctactactggattctgggccgtgtggacgatgtgatcaacgtgagcggccaccgcatcggcaccgccgaggtggagagcgcgctggtgggccaccacctgtgcgccgaggcggccgtggtgcccgtggaccaccccatcaagggccaggccatctacgcctttgtgacgctcatgaacggcattgagtacccgcccgatgagactgtgcgcaaggagctggtggcccaggtgcgcaaggccattggccccattgccacccccgatgtcatccactgggcgcctggccttcccaagacccgcttcggcaagatcatgcgcc

SEQ ID NO: 747 - DNA, 535 bp, Chlorella sorokiniana
  Clone ID: LIB3602-023-Q6-K1-A4
cattcctagtggatgagaatgcgcacgccgtgcacttcttcatctccgccctgctgcagctgctggacaggtttggcagtctgtacggcgagctggcgcgctttgtgctgcggctgctgggcttcaagcccaaagacaagaaggcggcggcgcaggaggggccgccggggtcgcagctgcagcagcccaccatgcccggcacggcggcagccaccggccacccggctgccaagcaccgcctgcctggcctgcccggcgcgccggtgcggccggctgcgggagctgcgggtgcatcggggggcggccagtgggactctttgtggaagaaggatgcatgacatggaggcaaacgcatgatacaacgctttcagctccgctctgtacaaaccgctacagctcgcgcgctctctctgttacctgtttcgcgctgcccgcccctcattctggtgcatgccctcctttcatgtcatcacatggcagcatacacctgccatcacacatcagcttgtacacatagcaactgtatcacagagca

SEQ ID NO: 748 - DNA, 217 bp, Chlorella sorokiniana
  Clone ID: LIB3602-023-Q6-K1-A5
accgggtcgactgaggaggcagtacgaacacacgcactgcagttgcgatgcccagcttggccagccatgtcgcccaggttgactggcccggcgattggaggcctacgttggccaacacaagagtaaacctgcctatcagtactcctaactcgtcccactcatgagtaccacttcccctatcagcccataaactctctcttgtaacagtgtggcatgc

SEQ ID NO: 749 - DNA, 381 bp, Chlorella sorokiniana
  Clone ID: LIB3602-023-Q6-K1-A6
aatccggggggacccacgcgtccgaaaaaaaaaactaaaaaaaaaaaaaaaaaaaaaaaaaaaaaaaaaaaaaataaaaaaaaaaaaaaaaaaaaaaaggggaggaaaaaaaacaaaaaaaaaagggcctccggggccggcctttctaggggacccacgcttccgtccgcgggcttgcaaggtctttgtttttctttggggtcccctaattgcatttcccggcccggcgttttacaccgcttggcctgggaaacccctgggttaccccacttaaatggcctggcaccacatccccttttccccagttgcagtaataccgaaagggcccgccccgatcgcctttccaacaagttgcccgacttgaggggggattgggccccc

SEQ ID NO: 750 - DNA, 470 bp, Chlorella sorokiniana
  unsure (1)..(470): unsure at all n locations; Clone ID: LIB3602-023-Q6-K1-A7
accaaggacatggaccacattccgcccaaggcccgcgtctactgagtgcacagcagcagcagcagtcccggcgcctgctgctggggcacttgcctgctgttgtgtccagtggccaagtcaggccgtccggcatgccagcattgtggggctttgctctgcatgctaaacatgtgtgggtgcccgccagccgatgatagctgggctggcgcggcagccccctgccggctccgccggccggccaaggctcgttcaacctgaaactcgcctccgttttccccccacgctccccatgtttgcggcagaaagcatcaatctgaatgaatccccttgctgcatcactgcctgcggcggtgcctgccctgcatgctagcaagttgcttctgctccttttctcctgtattcaccaagcgctgctggctcctgaagagccctggccacatgatgtgtaatcgaaccatgcaaaanaaaaa

SEQ ID NO: 751 - DNA, 517 bp, Chlorella sorokiniana
  Clone ID: LIB3602-023-Q6-K1-A8
cagaaggtgaccaagggcgctgcgctggagaaggggcacttcacgtggatcacggagaaggggcgccaggagcgctgggtcgtcgcctcgtgcggcaactacaccgtgctctggaacttcaggtcggtcaagattgcggagccggaggtggtgtcgtacggcgggctgaccacggtgaccaagtaccacatggtgcgcaaggacgagcacgtggtggactcggtgttcatgcacgacaagttcaaccgcaccactcagcgcgccgacgagaccagcatggtggtcgtcaccaagacgcacgtgtatgccatgggcgacgatgacagcgatgaggagtgaagcatcagcgcagcagcaaataactagcagtagggagagcagcaggctcggcagcagcagctgcggcccgctgtgcacatgctttgttgtccgttctttgttgagccgggtcagtcatttctttcctcgtgctccttctaggacatactctttctgcgcctctccggcagccccatgt

SEQ ID NO: 752 - DNA, 62 bp, Chlorella sorokiniana
  Clone ID: LIB3602-023-Q6-K1-A9
aaaaaaaaaaaaaaaaaaaaaaaaaataaaaaaaataaaaattatttaaaaaaaaaaaaaaa

SEQ ID NO: 753 - DNA, 333 bp, Chlorella sorokiniana
  unsure (1)..(333): unsure at all n locations; Clone ID: LIB3602-023-Q6-K1-B1
gcctgccgtgccccgccagcccgcctcatggggcgctccatgcagctcacatccccctggcaggctggctgagcacttaggctagacagcagctgcccgttggcctccctgcacccggttttgctcccttcttgcttccacaacccgcttgcagcaacgttgctcgtgcactgctcccagcagccggtggtgctcaacgatggggtcacccggacacccgacctccgctgttgttgtttcattccagcattgcatgcccacgttgtgttgtttccagagccagtcagcctgtggaccaggcccagcctctgtaacccaagcaagcnngcnnna

SEQ ID NO: 754 - DNA, 167 bp, Chlorella sorokiniana
  Clone ID: LIB3602-023-Q6-K1-B10
ggacgcgccctgaatcggcacattaaccgcgccctgtgtggtgcttacacgcaccgtgaccgttacactagccagcagccctaacgcctcctcttttcagctttcttaccttcctttcttgccactttcttcggttttttcccggaagctctaaatgggtggctccc

SEQ ID NO: 755 - DNA, 510 bp, Chlorella sorokiniana
  Clone ID: LIB3602-023-Q6-K1-B11
ggccccagcatcatgcgccgctgagcgcacgctgcacagcaggtgcagcacgcacagcaggcacatgcttcatcactgggctgcaggcgggctgcaggctcaagcggtgcaaagccgcgtttgggaagccacatgcgcacgccacgtgaggcgcgtgccagataaatagaaaccttggcgcgtgagccacattgctggtcctggccgccgaaggcggccggcaatccatgcattattcgtgtacccattgcctgcaaggcaggcagcagccatgtcccagcagcggctgctggactcctcatgaccaaccaccctgtacggtttcctatgcatccattttccgctgcatccattcagtcggcatcaagccttttgccgtcgccctccactcattattcggtagcgtttctgcgcacgcatctgccccagcggcaccactgtacgatttgacatgcccctgccatggccagctgcattccgtgcgactcactctgtaaacagcctcagcgc

SEQ ID NO: 756 - DNA, 505 bp, Chlorella sorokiniana
  unsure (1)..(505): unsure at all n locations; Clone ID: LIB3602-023-Q6-K1-B12
gcaacggcgtgtgccaggacgcgggcgcttgctgctcccggtgggggcactgcggccgcggctacgattactgcagcctggacaagggctactgcgtgggcggagcgtgcgccgacctgagcaggacgccgcaggcgctggcgccgcccatcaacaatggcagctcggccgcggtgccaaagaagcctggcaggggctggcactaaacgatctgcaacaacgacccgttaccttttggcccagttgcgttccctgacgtgcagcatgttgtgcccagctgtgcctgagcagtgctgggaacaaggtcgattcttttccactttcaacgtgacttacgtccccccctgcatccctgcatcgctacttacgtctcatacatgcattgctgcgctatcagacctaagagcccagtgcccgtttgccgagcgccgattgccatcaattgagcagcactttccctgatctctctttcgagctntctatcacatgtgaacacgatgggtga

SEQ ID NO: 757 - DNA, 523 bp, Chlorella sorokiniana
  Clone ID: LIB3602-023-Q6-K1-B2
ctggacatgcaagagcagaagatgaagcaggtcaagttcatgagcttcgtgtttggcggagcagaccaatacaagggccgaagcatgtacgacgcacacgcccatctggtcaagggccacggcctggaccaccgccactttgacaagatcaagcagtaccttggagagacgctgcaggagatgggcgtcaagcaggatgtgatccagcacgccgccggagtggtggagtccacccgcgacgaatttgacttccccaacaactgcgcacccaactgattttcatcaacccaaccccagcctgagcgctcattccatcgattttgagcggggagcgccagttgccgagcgcgcccagggggcccaggagcctgcaaatcgtttgccagcccttgctgcattgaagagccatcagccattttcgcaccaagcccgccgagttgcctggcacttgcatttcattaccgcctgcccgacattacgcttgcccgagttgattgtacctgcatttcaatccagagacaca

SEQ ID NO: 758 - DNA, 532 bp, Chlorella sorokiniana
  Clone ID: LIB3602-023-Q6-K1-B3
agacccgcaaggccgtcgccgatggcgtcttctacgctgaactcaacgagctcctcatgcgggagctgggcggggagggctactctggtgttgaggtccgcgtcacccccatgcgcacggaggtcatcattcgtgccacgcgcacgcagaatgtgctgggcgtcaagggccgccgcattcgcgagttgaccagtgtggtgcagaagcgcttcaagttcccggagggctctgtggagctgtacgccgagaaggttgccaaccgtggcttgtgcgccgtggcacaggcggagtccatgcgctacaagctgctgggcggcttggctgtgcgccgtgcctgctatggcgtgctgcgcttcgtgatggagagcggcgccaagggctgcgaggtgattgtgtctggcaagctgcgtgcgcagcgcgccaagagcatgaagttcaaggatgggtacatggtgtcgagcggcaacccggtgcgggagtacatcgactcagccactcgccatgtgctgctgcgtcagggtgtgcttggcat

SEQ ID NO: 759 - DNA, 293 bp, Chlorella sorokiniana
  Clone ID: LIB3602-023-Q6-K1-B4
aaaaaaaaaaaaaaaaaaaaaaaaaaaaaaaaaaaaaaaaaaaaaaaaaaaatataaaaaaaaaaaaaaaaaaaaaaaaagggaaaatataaaaaaaaaaaaaaaaaaaataaaaaaaataaaaaaaaaaaaataaataaataaaaaaaaaaaaaaaaaggggggtttttttttaagatacccaattttttttagttggttagtgtggtaattttttttttttttgggaaatcttatttatttttatttgtgggttttttaagttattgtctgtttatagtactttgtgttat

SEQ ID NO: 760 - DNA, 528 bp, Chlorella sorokiniana
  Clone ID: LIB3602-023-Q6-K1-B5
cggacgcgtgggtgcgaatgctgccggtcgcccgcccctgcctcccggctctgccggggcagggcgcggcgcgtgctggagcatcttgctggtgtcgcggtgcgtcgcgccaacccgccgcgcccccgcgccgcgcccgccacgccccccctgcccgccctgacataaggcctgacccccgagctgcccgaggatctgtaccacctcatcaagaaggcggtggccatgcgcaagcacctggaggccaaccgcaaggacaaggacggcaagttccacctgattctggtggagtcccgcatccacatgatgaatcaccactacaagcgtaccaaaaagctgttgtccaactgaaagaacgagtccgccaccgccttcgcgctggtgcagggctgagcgctagcctcgcgcgtgagctgactgctgcagccacggctatctccaactggtgtgccagtaggcatcaccacgaatcagccgcagctctccaactggctcttcctgcgtatgcagaccctggctagatgtgct

SEQ ID NO: 761 - DNA, 486 bp, Chlorella sorokiniana
  unsure (1)..(486): unsure at all n locations; Clone ID: LIB3602-023-Q6-K1-B6
gggtggcagatgggtgaatgcccgaacattcgccggcgcgcttttgcacctgtgctcctggcccgctcaccgttccgtgcaacagcagccgtgctgcgcagcgggcaggctggtgcagcaggcagccagccgatgcagttgggctgggcagccgccagcaatgtatgatagcagcaggagcgagcatgcgggacgatcatgcatgcacattccctccacctccctgattttccatcctccccccagtgcactgtaacaactgaagcccaaaaaaaaaaaaaaaaaaaaaaaaaaaaaaaaaaaaaaaaaaaaaaaaaataaaaaaaaaaaaaaaaaaaaaaaaaaaaaaaaaaaaaaannnaaaaaaaaaaaaaaaaaaaaaaaaaaaaagggggggaaatttaaaaaaaacaatttttatgggggggttaggggaaattaaattattttttttgggggcccttatataaatttaaaggccggggt

SEQ ID NO: 762 - DNA, 227 bp, Chlorella sorokiniana
  Clone ID: LIB3602-023-Q6-K1-B7
aaaaaaaaaaaaaaaaaaaaaaaaaaaaaaaaaaaaaaaaaaaaaaaaaaaaaaaaaaaaaaaaaaaaaggggggggagataaaaaagaaaaaagagaaaagaaacgagaaaaaaaaaaaaaaaaaaaatgtaaagagtgcaaaaaaaaatgagaagggggggcgcttgtggaaagcggccaaaagggggaagcgctgaaggatggaaacataaggggacgggacaa

SEQ ID NO: 763 - DNA, 528 bp, Chlorella sorokiniana
  Clone ID: LIB3602-023-Q6-K1-B9
ggcgccgggggagagcacgagcagatcttcgtgaagaccctacgggcaagaccatcaccctcgaggtggagtcttcggacaccatcgagaatgtgaaggccaagatccaggacaaggagggcatcccccctgaccagcagcgcctgatcttcgccggcaagcagctggaggacggccgcaccctggcagactacaacatccagaaggagtcgacgctgcacctggtgctgcgcctgcgcggcggcatcattgagccgtccctgcagatcctggcccgcaagtacaaccaggacaagatgatctgccgcaagtgctacgcccgcctgcacccccgcgctgtgaactgccgcaagaagaagtgcggccacacctcgcagctgcgccccaagaagaaactcaagtaaactactcgcttcggcacgagcggaagcggcatgagcggcagcaaccgctgccccccccccgccccgccagccgggatgccatgacagcaccggctgctcagctgctgatgtgctgcatgtcaat

SEQ ID NO: 764 - DNA, 469 bp, Chlorella sorokiniana
  Clone ID: LIB3602-023-Q6-K1-C1
cggacgcgtgggcgcgggcaagcagctggaggacggccgcacgctcgccgactacaacatccagaaggagtccacgctgcacctggtgctgcgcctgcgcggcggcatgcagatctttgtcaagacgctgacgggcaagaccatcacgctggaggtggagtcgagcgacacgatcgagaacgtgaaggccaagatccaggacaaggagggcatcccccctgaccagcagcgcctcatctttgccggcaagcagctggaggatggccgcaccctggccgactacaacatccagaaggagtccacgctgcacctggtgctgcgcctgcgcggcggcaactaggcggctggggcacccacccacctgccttcacacccatcgtgtgcggtaggagcggcgcgcgcgtgcacatgtagcatcctgccctgtaccctcaccctctgtaccccacccctgtaaccgccgcgctct

SEQ ID NO: 765 - DNA, 517 bp, Chlorella sorokiniana
  Clone ID: LIB3602-023-Q6-K1-C11
gcgccagtgaaaatggtgttcgtgcggacggaccgcacgcatgtgctggacctcgcgtccacggccaccgtggccgatgtgaaggccgccatcgaggcgcgccagggcatccccgccgaggagcagcgggtgatgttcggcggcaagcagctggaggacggcctgtccctggaggcttgcggcatcagcgatgactcccagatgtacatcctgatgcgcctgctgggtggtgccaagaagcgcaagaagaagacctacaccaagccgaagaagcagaagcacaagcacaagaaggtgaagctgcgggtgctcaagttctacaaggtggacgacagcggcaaggtgcagcgcctgcgcaaggtgtgcccccagtgcggccccggcatcttcatggccacccacttcaaccgcgtgtactgcggcaagtgccacctgacgtacgtgtacgacaaggagggccagaccgcctaagcgccccgctcccccctgcggatgcacgcttagcagcagcacacgc

SEQ ID NO: 766 - DNA, 418 bp, Chlorella sorokiniana
  Clone ID: LIB3602-023-Q6-K1-C12
cgccgcaccaccgtgcgcgtgcaggctcagcaggccgcgccccgcgctcaggcccccaagccccagcagtttgctgctggcctggctgccgccttcgctgccgtgaccctggtgctggcgcccgccgccaacgctgctgaggcccgcgcggaagtgaagagcgtggtgtgcgccagcaaccccacctccaagatctgcctcaaggacagcgccaagaactgaggcgtgccagctggactgagcgagcgctgagcccttgctggccgcacctgaggcaggcagccattgctgactgccggggggcaccgggccgccacccgctgcccggcagcatgggcgaggcggcgtgagaaagagaggacttgtgcactgccacacagttttttggacacctgtgctgtaacatatacttgaggag

SEQ ID NO: 767 - DNA, 517 bp, Chlorella sorokiniana
  Clone ID: LIB3602-023-Q6-K1-C2
gcgccgcctgccgcatcaccggcatcaactggaaggtgggcaaggagaccggcggcaagaagctggaggccccccacagcctcaaggccaacgagatggctgaggtggtgttcgagccctgccagccgctggtggtggactccttcaagaactgcgagggcctgtcccgcatcgccttcctggacggcaacaccgccgtcatgctcggcaaggtggtgaagaccacccccaaggcgtgagcaccctccgcctgagacggcggtgcacgccggtgcggcagcggcggcttaggctgcctgctgccgcccggcgggcccgccagcagcagcagcgccccgtggcgctcgcgagggcgggcggggcagcaggcgggcggggcggcgccgcgcacctaggcttgcggcggcggcttgacgacggacggactcagcttttgactggcagccgcctgcaaggcgtggcgcaccccacccgcctgtaaacggcctttcggtgacttgttacaaacctcacattg

SEQ ID NO: 768 - DNA, 181 bp, Chlorella sorokiniana
  unsure (1)..(181): unsure at all n locations; Clone ID: LIB3602-023-Q6-K1-C3
aaaccaaccagcgcatcggcaaggactggcgctatatcaactgggaggacggcgcgtactctcgggtggagcttcgctttgaggagccccacccacttcactccattttgaccctcaagcagacaggcatcccggatgccgaccgntttgatcaccacgacgtggttggcactgtggagtc

SEQ ID NO: 769 - DNA, 90 bp, Chlorella sorokiniana
  Clone ID: LIB3602-023-Q6-K1-C4
aaaaaaaaaaaaaaaaaaaaaaaaaaaaaaaaaaaaaaaaaaaaaaaaaaaaaaaaaaaaaaaaaaaaaaaaaaagggggggccgtttta

SEQ ID NO: 770 - DNA, 412 bp, Chlorella sorokiniana
  Clone ID: LIB3602-023-Q6-K1-C5
gggggaaaaaaaaccaaaaaccaaacatgggcaaggaaaaaaggaagccaggagggaaaaaaaaaggggattggaagggccggaggcaaataaaaaaaaaaaaaaaggggggaatcgttccaaaaaaaaaaggaaagggggttgcaaaaaaaaaaaggggccgaaaaaaaaaaccctggagggggctgacccccaaaaaaaaaaaagcccctttgaacggggttacaaagggtgcctgcaaaacctggctgtaaagtggtttcggactgaagggtggaaaccagcgccccctgttgaacgttaaacaaaacgcgccaggtgcctgggggctgttttgaaaaatcccccaaaaacgggggggccgctttaaaaaagaaaaatttaagaacgcgggcaagaaaaggaaaaattt

SEQ ID NO: 771 - DNA, 100 bp, Chlorella sorokiniana
  Clone ID: LIB3602-023-Q6-K1-C6
aaaaaaaaaaaaaaaaaaaaaaaaaaaaaaaaaaaaaaaaaaaaaaaaaaaaaaaaaaaaaaaaaaaaaaaaaaaaaaaaaaaaaaaaaaaaaaaaaaaa

SEQ ID NO: 772 - DNA, 464 bp, Chlorella sorokiniana
  Clone ID: LIB3602-023-Q6-K1-C7
aaaaaaaaaaaaaaaaaaaaaaaaaaaaaaaaaaaaaaaaaaaaaaaaaaaaaaaaaaaaaaaaaaaaaaaaaaaaaaaaaaaaaaaaaaaaaaaaaaaaaaaaaagggggggcggttttttaggatcaaactttttttccgcgtgtttgcgaggaattatttttttttttgtgtgacctaatttaatttaattggcggcggttttaaaacaaggtgattggtaaaaacttggtgttaccaaatttattagttttgtagaaaatcccttttttttcggttggtttaaaaaaaaaaaggcctcccccaatggtttttttaaaaatttgtgcacctttattggtgattgggacgcgcctttttggggggctttataaccgtgggttgtggtggttactcccaacgttgcctttttttttttaatggcttatatctcacccttttttccttatttcctttttttttt

SEQ ID NO: 773 - DNA, 512 bp, Chlorella sorokiniana
  unsure (1)..(512): unsure at all n locations; Clone ID: LIB3602-023-Q6-K1-C8
ggttgttcccaaccagcgcatcgtcatggactggcgctttagcaactgggaggacggcgcgtactctcgggtggagcttcgctttgaggagcccgaccgcggcaacaccattgtgaccctcaagcagacaggcatcccggatgccgaccgctttggtcaccacgacgtggttggcactgtggagtctggctggcggcagcaggtgtttgaccgcatccgccgtgtctttggctacggctgctgagcggtggcgctctagcaggctgcgcagctggcgtggcggcagtcgcgactgcaaggcacgggtggcatggagcagcagcggcacggcggcggcagaacgtgtattcacccggctggtgcagccgtgccttctgttgcatagcatgctgccatttgatggaaatcttgtcaaacatcttgaaatcccaaaaaaaaaaaaaaaaannaaaaaaaaaaaaaaaaaaaccccccgcgtccggccgggagcagatggccatcgccgagtttgc

SEQ ID NO: 774 - DNA, 76 bp, Chlorella sorokiniana
  Clone ID: LIB3602-023-Q6-K1-C9
aaaaaaaaaaaaaaaaaaaaaaaaaaaaaaaaaaaaaaaaaaaaaaaaaagaaaaaaagggaaaaagaaaaaaaaa

SEQ ID NO: 775 - DNA, 106 bp, Chlorella sorokiniana
  Clone ID: LIB3602-023-Q6-K1-D1
cccacgcgtccgaaaaaaaaaaaaaaaaaaaaaaaaaaaaaaaaaaaaaaaaaaaaaaaaaaaaaaaaaaaaaaaaaaaaaaaaaaaaaaaaaggttttagatcgc

SEQ ID NO: 776 - DNA, 445 bp, Chlorella sorokiniana
  Clone ID: LIB3602-023-Q6-K1-D10
caagaagcgcggccgcaagaaggccagtgccaagaagtgaaggtgctgagctggagctcgcccgcgctgtgctgcgctgtgctgcgctgtctcgtgctgtgctgtgctgtgctgtgctgtgtcatgccgggctgctttggtatgcatgtggggtgaggcgtgcggatagccgccgcctgctctgcttaccacctggcttcgttgtcttgctgagttttcgcagtgctgccagcgacggcaagttgttttccccacataacttgcttgcattttcccaatgctgctgtcgccattcttagctgtggctgggcccgcgccatttgcggcccggcacgattgatttgctgcgtccggcgtttattctgccggctgcgacttcggccctccaggcctgtttccctgtatgtatttggctttcgctttgattgcaacatgcacactggtg

SEQ ID NO: 777 - DNA, 488 bp, Chlorella sorokiniana
  Clone ID: LIB3602-023-Q6-K1-D11
gctccaacagctacgccatcaagaagaaggacgagatcgagcgcgtggccaaggccaaccggtaaacggctgttgcgcacccaccaaaacagcagcccgccacagccggcacccctgggcaggatgccagaccgccagtgcagcagcacggtgtggttcagctgctgttatcgtggcaggctttccaattaggcgcgggtgttaggattgtgtaacacagcgcacccaaaaaaaaaaaaaaaaaaaaaaaaaaaaaaaaaaaaaaaaaaaaaaaaaaaaaaaaaaaaaaaaaaaaaaaaaaaaaaattaaaaaaaggggggtttctttttatatggggtaggtttaatttaatgtggctggcaattaaatacctttttttttaaaaaaaaaatttttaatgtaccccccattttttgaaaactggtggacttttaaaaacttggggtatttaaaataaatggggttccgaaaaaattctttttgaatg

SEQ ID NO: 778 - DNA, 415 bp, Chlorella sorokiniana
  unsure (1)..(415): unsure at all n locations; Clone ID: LIB3602-023-Q6-K1-D12
ctcgattcggtgaggagcaccaacgttatgccgaaaatgccatattaagccagcggcgcgcagaacgcgcatgccctgcgccccgcagcttgccagcacaaccagaaagcctgttttccctctttgtttctgctgtttcactacacgcacgctgtatctgcgctgtacactcctttgcgcccgttctctctgcatgcaattttcagttggaagcatgaggcacccctgttgttccacctttgtttgtttctgccgcccgggtgcgctgctgtacccctgagcatgccggccgcccttgctgcccgcctgccccttccctcggccctcagcccgcccattcacgcgacattcttcatctcaaagctcatcctcaccgctctgcaagcattataattgtaagctctggcatggcnna

SEQ ID NO: 779 - DNA, 540 bp, Chlorella sorokiniana
  Clone ID: LIB3602-023-Q6-K1-D2
aaaaaaaaaaaaaaaaaaaaaaaaagaaaaaagaaaaaaaaataaaaattaatatataaaaaaaaaaaaaataaatgggagagagaaaaaaaaaataaatataaagaaaaaaaaataaaataaaaatatttgtagttaatataaaattatttatagttaatggggggggggttttttggggtttataattttttttttggtttttttgggtgttttttttttttttttgtggagtgttattttattttggtgggctttttttttaaagggggttgttgggaaattgttggggtttgtgtttttttttgttttgggcaatttttctttttttttcgtttggtttttaggataggggggtgagggatttggctttttaaaaatttggtatcttttgttggtttttgggcacgttttttggttggtccttttatggtggggggtgtggggttgctttaggggtgtttttttttttttttgggggctttttgggcggggtttttggtttttttttttttttttggggggaatttggggggtttt

SEQ ID NO: 780 - DNA, 504 bp, Chlorella sorokiniana
  Clone ID: LIB3602-023-Q6-K1-D3
tggactgtgtgttcaagacgctacgcaccaagggccccctggagttctacaccggcttccccacgtactgcgtgcgcatctccccccacgccgcgctcaccctgatgttcgtggcgtggctgccgaagctgcaggccaaggtgggcctctaagcagccacagcgcgcagtagattgacggtgacgtagcggcggcggcgcggcgccgctgatgcggcgcgccattgcgccccggcctaactcccctcctcggtatcccttatgtgctgccgctctttgcgctggccggaattcggtccctcccgcctctgcttctctgcgttccaccgccccttccttgttgctgcctgacgacggcgaggagccaagctgcatgcacaggccagcgggccctccatttcgaagaggcacacacccccatgcatacaaaacagcactgcttttcctcgtctcccactgcccggcacgcaacacggtgcaacaatgaatccttaagagctagtcc

SEQ ID NO: 781 - DNA, 534 bp, Chlorella sorokiniana
  Clone ID: LIB3602-023-Q6-K1-D4
aggacagcggctctgcaaccatggcggagtccgtccagactttcggccgcaagaagaatgcggtggctgtggcctatgtgaagcgcggcaagggcgagatccgcctcaacggcgccccgctggagctggtgcagcccgagacgctgcgctggaaggcgtttgagccggtgctgctgctgggcaagcagcgcttctccaacgtggacatccgcatccgcgtcaagggcggcggccaggtgtcccagatctacgccatccgccaggccatctccaagggcattgtggccttctaccagaagtacgtggatgagcagagcaagaacgagatcaaggacatcctgctgacctacgaccgcacgctgctggtggccgaccctcgccgctgcgagcccaagaagttcggtggccacggtgcccgcgcgcggtttcagaaatcttacaggtgaaggctgccccgtgggacggttgggcgcctctggaggcttcttctgcgccgctggcgtggcggcagcggcgtctgcggcctaggcagct

SEQ ID NO: 782 - DNA, 531 bp, Chlorella sorokiniana
  Clone ID: LIB3602-023-Q6-K1-D5
gtcaccatgcaggccgctctcgctcagcgtctggctctggtcaagcccacccggggcgcccgcaagcaggtgacccgcgccgccgtcgagttctacggccccgaccgcgccaagtggctgggccccttctccgagggctccgtcccctcctacctgaagggcgagttccccggtgactatggctgggacaccgccggcctgtctgccgaccccgagaccttcgcgcgctaccgcgagattgaggtcatccacgcccgctgggccatgctcggcgccctgggctgcctgacccccgagctgctgcagaacaacggcgccgctgacttcggcgaggcggccgtctggttcaaagccggcgcttcgatcttcaacgaggacggcctgaactacctgggcaacccctccctgatccacgcccagtccatcgtggctgtgctgctgacccagctggtgatcatgggcgccgccgaggcgtaccgctacagcggcgagggccccgtggagaccagcggcgactccctgtaccccggc

SEQ ID NO: 783 - DNA, 529 bp, Chlorella sorokiniana
  Clone ID: LIB3602-023-Q6-K1-D6
gtggatgtgaagaaccgccaggtcaagcccaagcaggtgaccttccaccgcaagaagaacctgcagtaccacgagatctccgccaagtccaactacaactatgagaagcccttcctgtacctggcgcgcaagctggtgggcgaccccaacctgcactttgtggagcaggtcgcgctggcgccgcccgaggtgcagatcgacctgcagcagcagtaggagtacgagaagcagctgcaggaagcggccaacatgccgctgcccgacggcgacgacgacgacatcgccgagtagggcggctgacatgattgttgcggtgcagcattgcggtgcagggcggtgcaggcgcccagccggccagggcctgctagcggcggcgccagccaaggcggttgccgatcaatgcctgcctggcgagccgcctgcagtccagtcgggggccctgcgccgcaccggccgcctcagccggtgctctcggtagcttgaagcttggttgagctccttctctctggccagctcttcctcccggttc

SEQ ID NO: 784 - DNA, 258 bp, Chlorella sorokiniana
  Clone ID: LIB3602-023-Q6-K1-D7
cttctgttgcagcttgtccgccatgtgtacgctaaatccaaatttcaccccgagaagagaactcgctatgtagcacccttgtgtgaaaaaaaaaaaaaaaaaaaaaataaaaaaaaaaaaaaaaaaaaaaaaaaaatgggcgggcgctcgaaattaaaaaaacttacgtacgaaaaaaaaaaagggaataggtttaatatagtgaaacctaaaaaaagttgagttgtcagaaaatttaaaatttttaaactgggaaaa

SEQ ID NO: 785 - DNA, 327 bp, Chlorella sorokiniana
  Clone ID: LIB3602-023-Q6-K1-D8
cggctgggtccacgctcaaggatgtcggcagcaccattggctcctggtttggctgaggaatgcgccttgcaccccatcttgaagcgtccctgcacactcactttgagatgcttacccaagcaccccacgctccccagcatccctcggatgcatccccaggcaacccattttgctgccctccctgccttgcgtacttgccctgcaccctgtttccaggcctgcccgtgctctgctctctgctccctgtttgatagcgccgcctatgtataccgccctgctccctgccccctgtcctgttttggcatgatcttgtaatgcctcgccgcc

SEQ ID NO: 786 - DNA, 530 bp, Chlorella sorokiniana
  Clone ID: LIB3602-023-Q6-K1-D9
gcggccgctgtcgggcccccagacaggcaacttctgcttcccgaaatgcgaggagccatggtacgagttcaagtacgagggaaaggagggcagtgcgcagctggtggtgaccgtgctccaaaagctgggcgccaagccgggtgccaaggtggcggcgctgggcacgccggaccaggtggtgctgcgggtgggcaacttcatcaccggcacgtacctggaggaggacgacgtggtgtctgctgaggccagccagctcaacggcaacgacgtgtacgtgtacgaggtggccacgccgtacgccgcagtgccgggccaccacctggcggccttcacaaccaagggcgacctgtcctacctgtttgtggtgagcaccagcgagaagcagtggggcgcctcccaggccacgctgcgcaaggtgctgggcagcttcaaggtgtgatgacctcccagctgcggcgccaaatccaagggcctgctcccggctgcaatgtctgagcaaagcttgctgagaagcggcgtattatgtgtgt

SEQ ID NO: 787 - DNA, 533 bp, Chlorella sorokiniana
  Clone ID: LIB3602-023-Q6-K1-E1
cattccaggagacggatgagcacggcttcaagcctggctacctgttcaagcagttcttgcggtcgctgggcaacctaggctcgtacagcaacacggacaagagcgccattgtctccctatatgtgtatgggctggccgccaagaccacgatcgccgcagcagctgcccacctgctggagggaaagatgcgcctcatgactgacggactgctgctggcaccgctagggagcctgggtgcctcgctgctgccgctcctgggcatgggctacttgctcgtagccctggtgctgttcacgcagaaagatgcagcgcggcgaggtcgcctgggggcgagcaccttcaagtccctcaatgcaggcctgatgatagtgggtctggcgcacgctgcgtcgctggccacctggtggcaggcgggcatcctggcacactccaagcttgcagcagccaagatcgcggtgcacagcagcctggcggcgtttgcagcgtacaactacgcctttgcgaagaagtgacgctgagcaacagctcgcgct

SEQ ID NO: 788 - DNA, 97 bp, Chlorella sorokiniana
  Clone ID: LIB3602-023-Q6-K1-E10
gtcgtttgcggcgggctacatcgcgggcatcttctgcgcgattgtgtcccaccccgccgacaacctggtgtccaagatgaacgccgccaagggcgtg

SEQ ID NO: 789 - DNA, 509 bp, Chlorella sorokiniana
  unsure (1)..(509): unsure at all n locations; Clone ID: LIB3602-023-Q6-K1-E11
caaggacggcaaggtgatcgtgaacgagcacggcgacccggtgtatgcgcgtgcgggcgagaagggcgcccacacgctggtggaggacgccgatgggaagctggtgcccgcctacaagaaggccgccaaggcgggcgcccacaagctggtggaggacgccaatggcgacctggtgcccgcctaccagaagggcgccaacacgctggtggaagacgccaacggcgacctggtgcccgcctacatgaagggcggcatggctactgccaagaagcgcaagcagaaggctgaggccctgaggcggcggctggagggggcgaaggagtattgngcaaagcgccgtgcagccgcctaggccaagcggcgcggccagtgccgaccctgcctcacccagcactggagtaagccgtgcctcgccccgctgtactagacaatctgcactgaatgtaatatttttcccattggaaaaaaaaaaannaaaaaaaaaaaaaanannaaaaaaaaannaaaaa

SEQ ID NO: 790 - DNA, 271 bp, Chlorella sorokiniana
  Clone ID: LIB3602-023-Q6-K1-E12
cccaagggcggcatcgacaagaagcgcctgcactacatcgagggcggccaggccggcaaccgccaggagtacatcaacaacctggtgcgcgccatgaactgagcgctgagccggcgagcacagcgcagcgcgcgcagcacgcacagcgcggcgcgtgcagcagcctggacggagcggccccctgatgcctgctagccacggcactgttggccgggccagtcgtgaggccccgagcgcacccgaatgtccaagggagtgcacgggggcgggc

SEQ ID NO: 791 - DNA, 503 bp, Chlorella sorokiniana
  Clone ID: LIB3602-023-Q6-K1-E2
tccagccctccgccctgctgccgcactgcgctcaccggcacgcgtcctgctccctccccacctgccccgcagctacctggtgatcaagcggccgtggccgtccatgatgcgcaccgtggcgggcgaccacccccgctttgagcagacctacttctcgcactacaagggctactacttcaccggcgatggtgcccgccgcgacgaggacggctactactggattctgggccgtgtggacgatgtgatcaacgtgagcggccaccgcatcggcaccgccgaggtggagagcgcgctggtgggccaccacctgtgcgccgaggcggccgtggtgcccgtggaccaccccatcaagggccaggccatctacgcctttgtgacgctcatgaacggcattgagtacccgcccgatgagactgtgcgcaaggagctggtggccccagtgcgcaagggccattggccccattgccacccccgatgtcatccactgggcgcctggcctcccc

SEQ ID NO: 792 - DNA, 535 bp, Chlorella sorokiniana
  Clone ID: LIB3602-023-Q6-K1-E3
tgagactgtgcgcaaggagctggtggcccaggtgcgcaaggccattggccccattgccacccccgatgtcatccactgggcgcctggcctccccaagacccgctccggcaagatcatgcgccgcgtgctgcgcaagattgccagcaaggaggaggaccagctgggcgacacgtccaccctggccgaccccggcgtggtgcaggtgctgctggagctgcgcggcaagtaaactgcgatagtatgcacttacgcgagtgacaccggcagcccggctgcccgcccgcccaacagcgatacacagagccggccccccacgaacgggcggcggttgaacgagccacccctaacctcatgcaccctgaacccaatgcctttgcctgtttccgtttccctgccgctccgctctctgaccgctcagtctctccgggggctttgtcgcacgcactcgagttttccccagtggggggcgcggaccatgcgcccgcccctcgagccccattttgtccttcagccactgtagattccaggcccagag

SEQ ID NO: 793 - DNA, 476 bp, Chlorella sorokiniana
  Clone ID: LIB3602-023-Q6-K1-E4
ggctggctgagcgcttaggctggtcggctgctgcccgttggcctctttgctctcggttttgctccctttgcttccacaacccgcttgcagcaacgttgctcgtgcactgctcccagcagttggtggtgctcaacgatggggtcacccggacacccgacctccgctgttgttgtttcattccagcattgcatgcccacgttgtgttgtttccagagccagtcagcctgtggaccaggcccagcctctgtaacccaagcacgcaaaaaaaaaaaaaaaaaaaaaaaaaaaaaaaaaaaaaaaaaaaaaaaaaaaaaaaaaaaaaaaaagaaaaaaaaaaaaaaaaaaaaaaaaaaagaaaaaaaaaaaaaaaaaaataggggggggttttttaagggattcaattttttcttctaggtgatggggcgttaatagcttttttttaggtcccacaaaaattaattcactggccggggttt

SEQ ID NO: 794 - DNA, 475 bp, Chlorella sorokiniana
  Clone ID: LIB3602-023-Q6-K1-E5
aaaaaaaaaaaaaaaaaaaaaaaaaaaaaaaaaaaaaaaaaaaaaaaaaaaaaaaaaaaagggaaaaaaaatatagagagggaaaaaattaaaaacgggtgggtggttctacttgtcctctgctgtgcgtgcgcgtgctttcgagttcattggttttcttttgggtccccttaagtttggttaattgtttggcgttccccaagttgattaacttgggaggactttggcttttccgcctttggtggctttgctgcttttccccctttcgctagttgttgcaatagcggaaaggccctgctgtttagtgtttcccaacccttgcccggcctttttgcccatcgggtgtggcgtttattcgccgcgttaaccgttgcagttctggtggtttcgcccactgtccttgttattttttccattcctttagggccccgttctttggttttctccctttagtttttcgccggtttctccgttt

SEQ ID NO: 795 - DNA, 342 bp, Chlorella sorokiniana
  Clone ID: LIB3602-023-Q6-K1-E6
tggtgacggcgctgctgcagggcctggcggcgccgcccatggccccgccaaacggcgcgcatggcgcgcagtgaggggctatacagagagggagcagccttggctggcatgaccctggatggggcagcaaggcccggacaacaagcgcagaccgcaggctgcaggctgccatgtactgcagctgcgtccccagtgacagcagtggagcacatgcgcatcgcggtcagccatcctctgtattcgtctgcccatcaatcactatacttctccctctattgctgtcccagcatcggccacggtctgcttgttcagttgcagccagttgtaacgtgccttagcgtc

SEQ ID NO: 796 - DNA, 298 bp, Chlorella sorokiniana
  Clone ID: LIB3602-023-Q6-K1-E7
aaaaaaaaaaaaaaaaaaaaataaaaaaaaaaaaaaaatgtttaagaaaaaaattgaagaaaaatggaaaaacaaagaaaaaaaaaaaaaaaaaaaaaaagggggggtcgttttaaaggttccaagtttacgttggcgtttatgagaagaaatagtttttttattgggcaactgattttaaattaattggcggtttttttaaaagggtgtgattggaaaaactttggggttaccaaatttaattggtttgaagaaattccccttttctacagtttggtaaccctggagatggtcacgc

SEQ ID NO: 797 - DNA, 413 bp, Chlorella sorokiniana
  unsure (1)..(413): unsure at all n locations; Clone ID: LIB3602-023-Q6-K1-E8
ccgccatctccaccgaagcgcccaagctctcccgcatctctaccgagtatggcgaggtggaggggcagcccttcatctcagggctgggcatgaagcgcggcccgctgtcgccccgcgctcaggccgtcaaggaccgcctggctcgggagctggaggagtccacccgcgtcattggctagccgctcacaagtatgtacaataagcggcaagcagctgcaatatgaaccagctatgagccagtgcgcctgcgcggcaagcccagcagcaccactgcaactgcgccgacggcatgcgacgataaacaagcgacaccaagccccccacggttgatgtatgccctgtatgaacccgtgaacacgtaatgtacccctcagttgccctgatgaactcaacatgtaacaacgcatgccnna

SEQ ID NO: 798 - DNA, 285 bp, Chlorella sorokiniana
  Clone ID: LIB3602-023-Q6-K1-E9
aaaaaaaataaaaaaaaaaaaaaaaaaaaaaaaaaaaaaaaaaaaaaaaaaaaaaaaaggaaaaaaaataaaaagggaaaaaaataaaaaaggtgggaggtgatgggggggccttttttttggtgcggcgcttttttcttttcagtggttgtgtttttacaccttttttttttgtgaaagctttgttttttctgggtttagttttgtgtatttacttggggttgtaacctgatggttttgtattgaggaggtttttggcgtttcgggtttttttagattttgggg

SEQ ID NO: 799 - DNA, 534 bp, Chlorella sorokiniana
  Clone ID: LIB3602-023-Q6-K1-F1
gcggcgacttggcgggcgaggttgttgaaggcgacgaggcgggcacattcaagccgggcgaccgagtctttgcctgcaccgacagctggcggccggaggtggcatggggcacgtacgccgagctgtgctccgtgccggcagcgcacttggcgcgcattccaacggacattagctacacagatgcagcggcgctgtgcctcacagcgctcacggccttccaagcgctcaaagcagcgcgcctgcagcaggggcagcgggtgcttgtacacgcggcagcgggcggcgtgggcagcgctgccgtgcaaattgtaaaggcgcagggcctgcaggtggtggcaaccgcttcagctgccaatgccgactttgtgcgcagcctgggtgctgaccaagtgattgactacaagcagcagcggtttgagaaggtgctggccggcagccctgtggatgccgtgattgacacggttggaggagactacgagccgcgcagcctgcaggtgctgaagcgcagcggcacctttgtcaacctgtacgccc

SEQ ID NO: 800 - DNA, 529 bp, Chlorella sorokiniana
  unsure (1)..(529): unsure at all n locations; Clone ID: LIB3602-023-Q6-K1-F10
gaaaacgagtacggccacctgcgcatccacgacttctcagacaccgtcagccgcatcccgcccgaggaaatccacggcatggcgggagcagcgcagcagcagcagcaggtggacatggtggccctggaggcagagatgcgggcgctggctcagcagatccaagcgcagcccgacatgacagaggaggagctgcagcaggtgcatccactggctgccctgctgcgctccctgctgccgtgggtgaaccttgggcaggcgcccgagtatggagcagatgatgaagcagcgcagcagcagcagcagcaggagccgcagccggagggcggngagggctaggccgcagccagcagcgcggcagcagcagcagcagtagcagcagcagcagcagcagcaggacggtggagagggctgagacaagacaacgcagcaggagctgccgtggcacgatgtcggcgaacgccaggcagtgattggcggcgggatcaatgccccgtcccactccttgtgccaccgcactgcacagttgggc

SEQ ID NO: 801 - DNA, 514 bp, Chlorella sorokiniana
  unsure (1)..(514): unsure at all n locations; Clone ID: LIB3602-023-Q6-K1-F11
ggcggcggcggctgcaacacgctgacctgcacacccgacgagatccgcctgctgcgtgcgctgctgcgccgcaacgccgctgcgctgcgcgtgcccagctggcaggcctccctgctggagctgccctctgaatggaacgcctcctacctcgtgcctctctactctgatgggtggcggnccctgagcaaggggccgncctgatcagctcaatcccggacctcactgcaagcatggcagcagcgccagctggcggcgctgcgcatcccagggccggcgcgcaggcaggcgggcgcacaagaagcacggggggctgcagacgcggcaataatgcggcatggcaggacatgccagcgggcggcggcgccagtgctagtggcagcaggcggggtggcaccagcagcggcggggcttcagccctggaggcctcaacgcaacacaaggaggccggcaaccctgcgtacaagtgcctgatgatgaagcaatttgtcagccgtactgtgcaggactcaccagc

SEQ ID NO: 802 - DNA, 489 bp, Chlorella sorokiniana
  Clone ID: LIB3602-023-Q6-K1-F12
ggattcattcgatgtcgcagtgggcagcacaggattgtgctgaatggctgtaacccacacaaagtcaaaagtcttgtgtaacacacacacacacaaaaaaaaaaaaaaaaaaaaaaaaaaaaaaaaaaaaaaaaaaaaaaaaaaaaaaaaaaaaaaaaaaaaaaaaaaaacgtgcatgcaaaaaaataacttttttttagtgtaccctaatttaatttaactggccgtttttttaaaacctctgaattgaaaaaacttagtggttaccaaattaaatcgctttgaaaaacatccctttttaacaacttggtttaataagaaaaaggccccaaccaatggcccttcctaaatgttgaacaccatgaatggtaaatgggaccctcaatttcgcggtccattatgaaagggggttgtgtgggttactcgcatcgtaacccttaaatttgccagcgacttagcgcccggccttttaactttgtcactttcctt

SEQ ID NO: 803 - DNA, 534 bp, Chlorella sorokiniana
  Clone ID: LIB3602-023-Q6-K1-F2
gcagcggcggatccagtggcagcaccagcaatctgagtgtgtgggacaccatggcgccaacagccgccagctgcgtgggccggctctccagccatcaggctactgtcacagcggtgtccatgctgccaggcggctggctgctggcggcaggcgatgcagaaggcggcctgtcctgcacagacctgcgcatgattggaggcagcagcggcccgcgcctgctgtggagtgtgaaggctgcccgcggtgcgctgcgggccctagtgcccatcccgggcatcagcggcagcggaggcacgctgcgctacggcagcggcggcagtagtgcggtgcttgctacggcgggcatggacggggcggtgaggctgtggcgcggcagtgacggcaagctgctgcaaagcttggagttggcgcattacagctcgcggccaagcagtggaggcagccggcgctcaagttacgacggcgctgccccactgtccccgcgcctcatgcctggcagccatgcagtgcctgtcactgggctggcagtctgcg

SEQ ID NO: 804 - DNA, 530 bp, Chlorella sorokiniana
  Clone ID: LIB3602-023-Q6-K1-F3
aactacggcatctgggtgcgctaccagtctcgtaccggctaccacaacgcctacaaggagtaccgcaacaccaccctgaacggcgctgtggagcagatgtaccaggagatgggcagccgccaccgcgtgcgctccccctgcatccagatcatcaagaccgccacgctcacggcgtcccagtgcaagcgcgcggccacgcagcagctgcacgacagcaagatcagcttcccgctggcgcgcaaggtgctgcgcccctcgtcccgcaagttccgcaccaccttcaaggcggtgcgccccaacgtggccatctactgagcgcctcgccccaaggcggctcgcggccacactggcggcagcagcggcggcggcggcgacccagcttgtgctctggagcggcgccgctgaggaggagaaggctgcccggccggcgggcggccgccgcaggagtgcgcggcggcgccgcaggcggcagccggggggcggcggcagtgcgccccgcccccgccctgtagcccggttgggtgcaaggc

SEQ ID NO: 805 - DNA, 527 bp, Chlorella sorokiniana
  Clone ID: LIB3602-023-Q6-K1-F4
gcacgttcctggggcgcagcagcgtggcggtgctgccctactgccaggcgctgtccaagttcccctcccacatccagcaggtggccatggagtcggtgggcaagcaggtgtccatcgagggcgagccgctgcccttcaaggcgggcgagatctactttggcgagcccggcaccaacggccagcactcgttctaccagctcatacaccagggccgcgtggtgccgtgcgagttcatcggcaccatcaagtcgcagcagagcgtgtacctgaagggcgagctggtgtccaaccacgacgagctgatgtgcaacttcttcgcgcaggcggatgcgcttgccatcggcaaggacagcgtgtcgctgcgggcggagaacgtgcctgagtacctcatcccccacaagaccttctccggcaaccgcccctccacctcgctgctgctgcccagcctgagccccttccgcgtgggccagctgctggcgctgtacgaaaaccgggtggccacgcagggcttcatctggaacgtcaac

SEQ ID NO: 806 - DNA, 535 bp, Chlorella sorokiniana
  Clone ID: LIB3602-023-Q6-K1-F5
agtcggaggaggagcctggacgcaatggtgcagggcggctacaagtaccaccagtaccaggtggtgggccgccatgtgcccaccgagaaggagccggagcccaccatctaccgcatgaagctgtgggccaccgacgccgtgcgcgccaagtccaagttctggtacttcctgcgcaagctgcgcaaggtgaagaaggccaacggccagatcctggccatcaacgagatctttgagcgcaaccccaccaccgtgaagaactacggcatctgggtgcgctaccagtctcgtaccggctaccacaacgcctacaaggagtaccgcaacaccaccctgaacggcgctgtggagcagatgtaccaggagatgggcagccgccaccgcgtgcgctccccctgcatccagatcatcaagaccgccacgctcacggcgtcccagtgcaagcgcgcggccacgcagcagctgcacgacagcaagatcagcttcccgctggcgcgcaaggtgctgcgcccctcgtcccgcaagttccgcaccacct

SEQ ID NO: 807 - DNA, 520 bp, Chlorella sorokiniana
  Clone ID: LIB3602-023-Q6-K1-F6
gccgcccgcaggcagcaattacccagcacccgcagcagcagcgcagcagcagcagagtagtgcagtaccagcgtcatcagcagcagcaggtgcagcagcaggcgaggtagatgtgcgagcaatagtggcagacagcagcaagaaggcgcgcagcagcctgcagcccttcatctcccagctggaggagcagggctggcagatgagccccttcatgctcagcagcaccgagaagcagcggttcctgcggctgtgaggcggacggagtggaggcccccgcttcctgagcacaagcgcataggcaggatgcaagtggtgctgtacagcccggcatgataagtgatggcggcgaccgacaacaacgcagctcgcaatagcagtaatgcacagatacatccacaatcaattcgcccatctgacatttctcctccaattttccctcggccccagtcccagttgcctgtgctgatgttggcctgctgcgcctgcaatttggcagccgtcctgtacagcactcaccagc

SEQ ID NO: 808 - DNA, 490 bp, Chlorella sorokiniana
  Clone ID: LIB3602-023-Q6-K1-F7
gttctagatccgagcggcgccctttttttttttttttttttttttttttttttttttttttttttttttggttttttttttttttattatgttaccgaggaagggcgttaaaacgggaggggcccaaagggccgttacccccgatgcattgccgttggtttaacggccggtgtttttggcgccccccttgcccgcccccttaggcatgtttttgacagccttgccggcccccgaggccttggcctgcgccttttgcaccgctttgtcggccttggccttttgggcgctctccttgatcttacgcagccccccctcgggggaggccttgggcgcctggggcttttcgctttttttttttgggaacacctacaggttggcgccccccacggaggggggggccgccttgttaacgttgcgccgttttttgggggcaacctgcgcctccaggtccttggggggctactgggcggacagggggggccaggcaagc

SEQ ID NO: 809 - DNA, 531 bp, Chlorella sorokiniana
  Clone ID: LIB3602-023-Q6-K1-F8
tgttcctgtcgctggaggcggacagcgatgagggtcaggatctgtgcgacgtgctgggcgtggacacgctgcccagcctgcagttttggaagggcggggagaaggtgtgggagcacaagggcgtggtgcgcctgcaggaggacctgggggaaggcgtgctgtattacggcgacacggccggcaacaacgtcaaggcctcccagtacgtgaccgacctgaccagcgacgagcagctggcggccttcatcacctcccagcccgaccgagtgctgaccgtggtcaacgtctcactgctcagcgccgcgccctgtgtgcacatcttcccggcggtgctggcgctggcaaccaacttccagggctatgccgcgtttgcgcgcctgctgggtgacgaccagccggagctgctgaagaaactggatgtcacccaggtccccactttcatcttctatcgcaacggcgaggaggtggggcgccacgtgggcagcagccgcggcgacttgattgggcagatcctggcgcagcaggcgaagc

SEQ ID NO: 810 - DNA, 316 bp, Chlorella sorokiniana
  Clone ID: LIB3602-023-Q6-K1-F9
gccgcatgcagcttaccagcagggggctcagcctggtggtgctgcgctctaccctcagcaggctcagcaggcccagcaggacactgatgaggtggatgccatgctgtccctgatgggcatcggctgaccacagcatggacagcatggccacagcatggccgaggaggctggagcatggcccatggtatagcattcaccgcacatgtatgcagcctgctttgtatagacacgtaccctgccttgccacttgtttgctatccctagctgcccgctgccttcctgccgctagtcgcccatgtaacacggttgcgtgtgc

SEQ ID NO: 811 - DNA, 522 bp, Chlorella sorokiniana
  Clone ID: LIB3602-023-Q6-K1-G1
gcaaggtgcgcactgaccgcacctaccccgtgggcttcatggacgtcgtggacatccccaagactgacgagcacttccgcgtggtgtacgacgccaagggccgctttgtggtgcaccgcatcaccaaggaggaggcatcctacaagctctgcaaggtgaggcgcctggcattcggcaagggcggcatcccccacatcggcacccacgacggccgcaccgtgcgctaccccgaccccgagatcaaggtgaacgacacggtgatgctggacctggagactggcaagatcaaggacttcatcaagttcgatgtgggcaacctggccattgccaccggcggccacaacaacggccgtgtgggcaccattgtgcacaaggagaagcacaagggctccttcgacattgtgcacatcaaggacgcggccggccacacctttgccacccgcgtgaacaacgtgtttgtgattggcaagggcgacaagcccatgatctcgctgcccaagggcaagggcatccggcagagca

SEQ ID NO: 812 - DNA, 75 bp, Chlorella sorokiniana; identical to SEQ ID NO: 103
  Clone ID: LIB3602-023-Q6-K1-G10

SEQ ID NO: 813 - DNA, 75 bp, Chlorella sorokiniana; identical to SEQ ID NO: 103
  Clone ID: LIB3602-023-Q6-K1-G11

SEQ ID NO: 814 - DNA, 407 bp, Chlorella sorokiniana
  Clone ID: LIB3602-023-Q6-K1-G12
gccacccgcattggcagcgccggtgtggtgcgccgccaggctgtggatgtgtcgccgctgcgccgcgtgaaccaggccatctggctgatcaccaccggcgcgcgcgagagcgcgttccgcaacatcaagaccattgcggagtgcctggcggacgagctgatcaacgcggccaagggcagctccaacagctacgccatcaagaagaaggacgagatcgagcgcgtggccaaggccaaccggtaaacggctgttgcgcacccaccaaaacagcagcccgccacagccggcacccctgggcaggatgccagaccgccagtgcagcagcacggtgtggttcagctgctgttatcgtggcaggctttccaattaggcgcgggtgttaggattgtgtaacacagcgcacccaa

SEQ ID NO: 815 - DNA, 533 bp, Chlorella sorokiniana
  Clone ID: LIB3602-023-Q6-K1-G2
ggccagttctaccgggaggaggccgactgccaggtgtacgcgcgcgggcgggtggcgctgctgggcgacgccgcgcacctcatgacgccgttcctgggacagggctgctcgcaggcaattgaggacgctctggagctggggcgtgccgtgggcgtgcatggccccacgcccgaggcgctggcggcctaccaggctgtccgcctgcctgagtcgggcgctgtgcagcgcgagtcggtgcagctgtgcaaagacttccattccggcaagatggaccgccacgagtacgaggtgaacatcgagaatgggtttgtgaagcgcacccacgcgccgctggtgccggtgcaggtggctgtgtgagcgctgctgcgcaagccggcacggccacaagtgcggcagccacaaccgtggtgcagctagcgccacaggctacataaagtatcacaagtgccaagtacctcggtgcccttgcttatgcattatctgatgctgatccagtctgcatgaattgcttgcccctctgaattgccgatgat

SEQ ID NO: 816 - DNA, 496 bp, Chlorella sorokiniana
  Clone ID: LIB3602-023-Q6-K1-G3
cgcctcttccgcgtgtacggccacatctaccactcccacttcaggcagatagagcggctagagctagagccgcacctcaacacctgcttccgccacttcatgctcttcacgctggagttcaacctgattgatgagcgggagttggcgccgctcaaggagctgatcgaccgcatggtgcggtagcgcgacgcagcacagcacagcaggcacagcacaatggagcgtgaccgctcggcatgcccagcgtattcaagtgcacgtcgctgaaagagttgctcagcagcagccccggggctctgaattaagccctgcatcttgtactccaatctcttgacctgtaccactgcctttaccgagctctgtcgctcaactctcttgctcaagcccaactttcgcctgcgtctttgctgcatgctcattgcagcagccaccaagatcgcctgctcgacctaactgcctcgatgggcctcgtggcatggcgggtgttacacgcacg

SEQ ID NO: 817 - DNA, 521 bp, Chlorella sorokiniana
  Clone ID: LIB3602-023-Q6-K1-G4
gcaggtggcctcaccaagcctagcggcagcatacgctgctgctgcgcagctgcagatggcagcgctatcgccccctgcggccctgtccccgcctgctgcggcaccagccccggcagctgcagggccgccaccagactggcggccgctggtccctgcagccagcggcagcaccgcgcctccatgcagccctgggcagacgtccatctctcttgcccaactgctgggcacgccccaagcaggtcccgttgtgccggcagcgcttgatccttctgcgccggcaccaggggccgcagcggctgctgcatcgcctggctccatcggggccgctgcaacgcgtgcagcgctcgagcagcagcttcggcaggtgcagctgcaacgccagcagctgcgggagcgcctgcagctgcagcagggtgctgtggtgccgccggccagcgggactgcgccgcagatgcagcgcccgggtgcgcagtgattgcgcagggctgttatgatactgcatgtgtaatattcttcacctc

SEQ ID NO: 818 - DNA, 532 bp, Chlorella sorokiniana
  Clone ID: LIB3602-023-Q6-K1-G5
ccgagaccttcgcgcgctaccgcgagattgaggtcatccacgcccgctgggccatgctcggcgccctgggctgcctgacccccgagctgctgcagaacaacggcgccgctgacttcggcgaggcggccgtctggttcaaagccggcgcttcgatcttcaacgaggacggcctgaactacctgggcaacccctccctgatccacgcccagtccatcgtggctgtgctgctgacccagctggtgatcatgggcgccgccgaggcgtaccgctacagcggcgagggccccgtggagaccagcggcgactccctgtaccccggcggcttcttcgaccccctgggtctggctgacgaccccgacaccctggctgagctgaaggtgaaggagatcaagaacggccgcctcgccatgttctccatgttcggcttcttcgtgcagggcctggtgaccggcaagtcccccctggaaaacctggctgaccaccttgctgagccgtctgtgaacaacggcttcgcgtccgccaccaagttcct

SEQ ID NO: 819 - DNA, 103 bp, Chlorella sorokiniana
  Clone ID: LIB3602-023-Q6-K1-G6
aaaaaaaaaaaaaaaaaaaaaaaaaaaaaaaaaaaaaaaaaaaaaaaaaaaaaaaaaaaaaaaaaaaaaaaaaaaaaaaaaaaaaaaaaaaaaaaaaaaaagg

SEQ ID NO: 820 - DNA, 470 bp, Chlorella sorokiniana
  Clone ID: LIB3602-023-Q6-K1-G7
ggatgaggacgtgcttggagagcagttggcaagaggtgcgggcagatgcgatcagcaagccgggtgggcatacaaggaggctgccatgggttgtgacaagctcggtgactgcaccacactgagagtgcttagctaaatgacctgtatgaactggtactattgattgtacgccgtcaaagagcatgctgccgaataagcagacatacggcagacgaagcagcgccgactacccggaggcccaccgttgagtcgtgccgaccgcccgtcaacccacccgcgcggtgcggacgccccttgtcaaattattttttgccgcattgctcccttacgtcgaccctggatggctttcctgctaccctctgtatcggcagatcctcaggcctcggcgcgcattttgtccgatgccggacccctcttgcaccgcatttcatattgtgaacacaccggactacaatagacctttccaaaaa

SEQ ID NO: 821 - DNA, 310 bp, Chlorella sorokiniana
  Clone ID: LIB3602-023-Q6-K1-G8
aaaaaaaaaaaaaaaaaaaaaaaaaaaaaaaaaaaaaaaaaaaaaaaaaaaaaaaaaaaaaaaaaaaaaaagaaaagaaaaaaaaaaaaaagggggcgggcgtttttggggttaccaagtttccttttcgcgtgcttgcaacgaattactttttttttggggtcccctaaattgattggcttggccgtggttttacacttttgtgtttgggaaaaccttggcgttccccattttattggctttggagaaattccccttttggccggttggcttattaccaaaaaggcccccaccgttggcctttccaaac

SEQ ID NO: 822 - DNA, 250 bp, Chlorella sorokiniana
  Clone ID: LIB3602-023-Q6-K1-G9
cccaaacccttggcacgtgcttttgctcgctcctttcgctcccctttgttcgtccttttgcattcatactcctttctaccctacacagcaccccgcagtgccaattgcaccctgtcatcacccctgtttccattcaacgctggccggccgctcagtggccgcccgtcctctgcttcagcactcatgcgtctaccacgcttgccccacaacatccgtcacagatggaatctctagattgcaagtggaacac

SEQ ID NO: 823 - DNA, 513 bp, Chlorella sorokiniana
  Clone ID: LIB3602-023-Q6-K1-H1
gcccggctacctgaccggtgagttgcccgcagactacgggtgggacaccatgggcctgacctgcgcaccccgagaccttgaagagctgccgcaccatctaagtgatccacgcccgctggtccatgctcggcgccctgcgctgcatcttgcccgaggtgctgcagaagtacacagatcagcaggtcgcccagggccattggctgaaggctgacccccatatcttagatgaccggggactgtactacctgggcaactacgggctggagcacccccactccatacctgccactctggaggaccaggtgcatgcgacggccgctcagcagatctaccgcaccaacaggactggccaaagcggctagagcgagggcgactacaccctgtacacgtgcgcgctcattgaccgaatgcgtctgaatgaccaccctgacaccgtgcctgacatgtatgtgaaggagatcatgaacggccatgtgaccatactctccatgctgggcttattcgtgcaggcca

SEQ ID NO: 824 - DNA, 348 bp, Chlorella sorokiniana
  Clone ID: LIB3602-023-Q6-K1-H10
atgctcgccactttacccacatgcccgtgcgtcccacactaattggctgcgcttccccgcccctgattctgatccttgcactctcaagaaccccccgttgatacccccctcgtgatgcttcctatctgtattcttgcccatccagtttttcttctctcccaatcactaacacacaggggagcccgcaagattgcgctgccgggccagcgctccacacgccgctcatatctgttccgattcactcccactcagttggctctctcctggcccagatgcctgttacacaacaggatcaaaaaaaaatatggaaagaaaaaaaaaaaattggtggattatgcgaataataat

SEQ ID NO: 825 - DNA, 410 bp, Chlorella sorokiniana
  Clone ID: LIB3602-023-Q6-K1-H11
cggcgcagacaggctgcagacaggcatgcgcggtgcgttcggcaagccatttggtgtgtgcgcgcgcgtgggcatcggtcagatcctgctgtccatccgctgcaaggacacgcacgctgcggtggcggaggaggccctccgtcgtgccaagttcaagttccccgggcgccagaagatcgtggctagcaggaactggggcttcactccctacctgcgcgacgattacttggagtggaagcgtgagggccgccttgtgaacgacggtgtgaatgccaagctgcttggcaaccacggcccgctggacgcacgggagcccggccagattttcgagggtcctgcccgtctgtggcgtgtgccggtgcatgcctaacatgttgcttgggttctaaagatgtaacgaacatctgagc

SEQ ID NO: 826 - DNA, 541 bp, Chlorella sorokiniana
  Clone ID: LIB3602-023-Q6-K1-H12
tcgcctggtggcattagtcgcagcttcgttcgcgatggtgaacgtcccgaagaccaagaaggccttctgcaagggcaaggagtgccgcaagcacaccatgcacaaggtcactcagtacaagaccggcaaggcgtcgctctacgcgcagggcaagcggcgttacgaccgcaagcagtccggctatggtggccagaccaagcccgtgttccacaagaaggccaagaccaccaagaagattgtgctgcgtctggcctgcaccgtgtgcaaggcccagcacatgcacgccatcaagcgctgcaagcacttcgagatcggcggcgacaagaaggtcaaggggctatactagtaaaaaaaaggagagcggcaggcggagagcatgaccgagaaatggaggcagcggcgcccgctcaccctgggcggcctgctccccgcccggcgcctcgctttggccgcctctggccactcgtacgcctccttgtccatgcccttgtgcttcctgagctgcccaacctggcatgcaagcagcctggccgtctgtaat

SEQ ID NO: 827 - DNA, 536 bp, Chlorella sorokiniana
  Clone ID: LIB3602-023-Q6-K1-H2
attgattgggatggttttttttatgcctgcaggtttcaatttgcaatatcatgtactcattacatccatctacgctctgcgcaggggcttccacatgggccaggtggtctgggcactgaggagattggtgcgccagtggtaggcggcgagccagccagcagcagcaaaagcaagacatacagaggcgtgcggcagcgaccttggggcaagtgggcagctgaaattcgagaccctactgttggcgctcggcggtggctgggcacatttgacacggcagaggaagctgcacgcgcatacgaccaggcagcgcgtgcgatcaggggcgtgcatgccaagtgcaacttccccttgccggaggaggaggcattccaggcgcagctgctggcatcgcagcaggagacatggacaggaggccaggcctccccgccagctgcttcacaaacagcaacttcaacacaggcagcatttagccaagctgtgtccattccttgcaatgagtcccatcccgtccagccgcgcgcggcagtccagggccc

SEQ ID NO: 828 - DNA, 490 bp, Chlorella sorokiniana
  Clone ID: LIB3602-023-Q6-K1-H3
agcggatgctggcttgcccgcatctgtgcagcagaatttggtcagccggtgcgagcctgacccagcggcacccggccgcttccgcaccagctacgtccccgccgtggccgctgctctgctagaggactactgccacacagacctcggcggcctgctggaggcgccgcccgccggcctgcagctgcacctgatctatggctcgcagtcgatcatcctggaccgctgcccggaagacaaagcacggcttgaggccgccatggctgcaaagcatgagtcaggtggtggccgcagcggcggcagcgcagagcccgttcagtactggcaggtggagggcgcctcgcactttgtgccctggacgcaccccgcggagctggcggcggccattgcgcccgtcctggcgccggccctggctgatgcttgatgctgccttctctagatctgctgtctggcttgaagtgtcgcctaagaatctgtgtgaaagtagattgtg

SEQ ID NO: 829 - DNA, 479 bp, Chlorella sorokiniana
  unsure (1)..(479): unsure at all n locations; Clone ID: LIB3602-023-Q6-K1-H4
actagttctagatcgcgagcggccgcccgcgactagaactagtacagcggcgccaagaacctgtacatcatctcggtgcacggctggggcgcgcgcctgaaccgcctgcccgccgccgcccccggcgacatggtcatggcgaccgtgaagaagggcaagcccgacctgcgcaagaaggtcatgcccgcgattgtggtgcggcagcgcaaggcgttccggcggaaggacggcacctacatctactttgaggacaacgcgggcgtgattgtcaacaccaagggcgagatgaagggctccgcgatcaccggccccgtggccaaggagtgcgccgacctctggccccgtgtggcggcagcagccaacaccattgtgtagagcggcggccgtccggctgggcgtcgcggcagcgcggaccacactgcagtacccaccgcctgccgcgctcccggcgcagcatgctgtaatgcacatccagcana

SEQ ID NO: 830 - DNA, 319 bp, Chlorella sorokiniana
  unsure (1)..(319): unsure at all n locations; Clone ID: LIB3602-023-Q6-K1-H5
cacaaccagaaagcctgttttccctctttgtttctgctgtttcactacacgcacgctgtatctgcgctgtacactcctttgcgcccgttctctctgcatgcaattttcagttggaagcatgaggcacccctgttgttccacctttgtttgtttctgccgcccgggtgcgctgctgtacccctgagcatgccggccgcccttgctgcccgcctgccccttccctcggccctcagcccgcccattcacgcgacattcttcatctcaaagctcatcctcaccgctctgcaagcattataattgtaagctctggcatggcana

SEQ ID NO: 831 - DNA, 533 bp, Chlorella sorokiniana
  Clone ID: LIB3602-023-Q6-K1-H6
agtacctccgcctcatcccgctgtaccagatgacaagtaccgcaaggcgggcaaggcgggcctggagcccaagcccgagtactactccccgcgggagctggcgctgctggacgccatcctgaccgccgagaacaacctggcgccctccgccggcagccgcgtgaacaccggcttcttcaaatccggtgcctggctgatccaccccggcatgttccccgagcggtgcgctgcatttaggccaacgggggtctgcgagaatctagggatgcatccggcaaaccaccacctccattttccactgccatgcaggctgcgcacctggctgaccgccgacgccgggctggccaacaccagcaaccgcggcctgggcatcaagggccccgcccgctgcatgccaaacgggtccgtgacgtcctgcgtgttcaccgaggtgaacaacttcgacattatcagcctcagccaccctagcaagagcgacatcgattcgtggagcgaggcaaaggccgacaagtacacgttcttcaccatccacc

SEQ ID NO: 832 - DNA, 519 bp, Chlorella sorokiniana
  Clone ID: LIB3602-023-Q6-K1-H7
gcagaagatgctgtacccctacctgcccgagccgatgcgcaaccccgagacctttgagtggatgctgagcaaccccgagtaccgcacgcagctggagggcatgctgcagcagcaggtggcgtcctcgggcagccccgccatggcggagatgatgcagggcatggacatgagccccgaaaagatgcaggcgcagtttgacgctctgggcatgacccccgaccagttcattggcaaggtcatggcggaccccgacctggctggcatgatgaccaaccccaagatcatggccgccattgccgagtgcaccaagaaccccatggccatcttcaactaccagaacgacccggaggtgctgcgtgtgttcgaaaagatgagccagctgttcccccaggcggccggcgcaggcgctctgcccaccatgccccccggcatgggtatgccgcccggaatgggtggcatgccgcccggcatgccgccaatgccgcccgcccagcagtaggctggtgcgcgcaggcaagc

SEQ ID NO: 833 - DNA, 279 bp, Chlorella sorokiniana
  Clone ID: LIB3602-023-Q6-K1-H8
aaccacgcacgcgtacgattgaaattgttagcccacaactggcgctgacacaagtagattcggctcgagcaaccactttctgagcaggggcggtgcaccgtacgctacgacctggacgatcccctgcatcccttactatccatgagttttgcattattcaacacgatggcacatgtccccgactgggtacctctaggacgcacccctctgactcaacacccactgactatgtctgcatgaatactgccccgggccgccacggtttttgatgcgccccat

SEQ ID NO: 834 - DNA, 366 bp, Chlorella sorokiniana
  Clone ID: LIB3602-023-Q6-K1-H9
cacacgctgtgcgcccagtcggctggcgcctgcgccgctggcacccccatgacacccctcaagttcacgccttgagccgcccaaatcagagcttctcaaaaccaaccccaacctcttacctctcttctaaccccctaccttctcagtcccctcgctcggttttgcacgctccccctctctccagctgtacactagcgtccccacctgcttgtgcagctgcccacaccccacgccgctgctccccgctcgctccgccgttgcccaccccccgcagccgactccacagcacgcgcttgaccacacaccccaccacagcgttttccattgctgcaccatgcgaggcttcatgtaaagcgctcgcatgcc

SEQ ID NO: 835 - DNA, 415 bp, Chlorella sorokiniana
  Clone ID: LIB3602-025-Q6-K1-A1
cagccatcagctggacgctggcgccagtggtggtgcagtgaggcactgcctcgctgcctggggcgccgcctgcctgcgacatggcacagcggccccctcggtaccgcccagccctgccgcattttgtcgcctgacggctgtgccggccccagggcatacctcccccccaaccccttgcataaaactacccctttcatgtgcacagcacctgctggcaaaatgtgatacatagccgctgcacacgctgctctggcccccggccgctgccactcctggtgtgtggtcaactgccggcccttagctgccgtccgtacgctgccaacttgcactactactgttgtccctcccagcactgccggcctttgtcttggccgccccttgtgctctccccaacacttgcaccccctgtacacac

SEQ ID NO: 836 - DNA, 218 bp, Chlorella sorokiniana
  Clone ID: LIB3602-025-Q6-K1-A10
cgcagccgcccagctcccgcatgagcgccgaggagctgctggcttgggaggcagctgcgcggctggcagcaggggaggtggacgctgcaggggcgggcgagtcggacgaccccgcttacgacccgaatgcctatgactgggagggctggctggacaactgaccagccctgctgccgccttgtagcatagtgtgtacatggtgtaacatgactgccttg

SEQ ID NO: 837 - DNA, 503 bp, Chlorella sorokiniana
  Clone ID: LIB3602-025-Q6-K1-A11
gccagcagcagcggcggcagcgtcggccccagtgcctggagcgatgacatggcgagtgtgctggttgttgattaccgggagcctagcgaatccagtgaagcggcagcaggcagctctgctgcagctgctcccgccgcggctgaggctgcacgagctgaggctgttcaagctgcgcctgcgccagctgagcctccggcttggcagcgcagcggcattgtgggcagcagctttgatatgggagacgcctcgagcagcagcagcagcggcgaagacgactggagcagccagctcagcgcgctcagcgggcgcagcggtcacagcagccagcgcagcggcttagacagtgacagtgagggccgcggcaacggcagcggcaatggcagcgctcagggcggcaatggcagcgtggaggctggttttggctttgatgagcagggtgccttcgttgagacccacagcatagcaaggggcgagcagctgcagtacgatgcggcgctagagcg

SEQ ID NO: 838 - DNA, 508 bp, Chlorella sorokiniana
  Clone ID: LIB3602-025-Q6-K1-A12
ggacggcgagttcatccaggtggtgcagcagcgcggcgccgccatcatcaaggcccgcggcctgtcctccgccctctccgccgcctcttccgcctgcgaccacatccgcgactgggtgctgggcacgccagctgacggcagctacgtgtccatgggcgtgtacagcgacggcagctacgatgcgcccaagggcgtgatctactccttccccgtcacctgcaaggacggcaagtggtccatcgtgcagggcctgtccatcgacgacaagtcggccgccaagatgaaggccaccggcgacgagctggtggaggagaaggctctggccctggagtgcctggccgagtagagtgcttcagattgaacggcaccccaggcagctggcatggcacggctgctccggctgccgccggcgccatttgccgccggccgctgcacacgattctgtgcaatgaacctcctcccattggaacgcttgctgccgcggcagcgcttttggtgggcgcgtcgt

SEQ ID NO: 839 - DNA, 442 bp, Chlorella sorokiniana
  Clone ID: LIB3602-025-Q6-K1-A2
gtggccacgctgcgcggctttgggtccgccaaccgcgagaacctggcagacctgctgtgggcgttcttcgagtactgggcctggcggcacaactacacgcacgacgtagtgtccatccgcctgggcggctgcctgcacaaggacgacaaggactggacgcggcgcatcggcaacgagcggcacctggtgtgcatcgaggacccctttgagctgagccacgacctggggcgcaccgtggaccgccagacgcgggcggtgctgcacaaggagttcacgcgcgccgccacgctgctgcgcgaccgagccgaccccatgcaggagctgtttgagccgtaccgggctggccgccgatgaatgggggcggcacgcgggctgcaaggcttgcaatcctgcccccaagtgtccagctgccgcagcacacaacaatggagctgcgcaagcc

SEQ ID NO: 840 - DNA, 494 bp, Chlorella sorokiniana
  Clone ID: LIB3602-025-Q6-K1-A3
tggaggcccagcccaagctgcgattctcgcatggagcggcagagcaggactttttccactggtatttcaagtacacgggcatgcggctgccacttgagtacaacacgatggcatcagacagcctggcgggcaaccgcacgctgggcgggcgggaccctgttgtggtgcacttcacgcgcaacaagcccttccacggcccgcagcctggccggccagggcaccaattcctgtgcagactcgaagaaatggactgagggtgttgcgccagcagcggcagctgtggtggtggcgcctccagagaaccccaatttttgccctcagtaattgtactgataccacaaatgttgcccgggctcaatgacttgcaccctgtaccttagcactgcttctttcctcctctggctctgtattctgggctccctactcattacttttgtgtttcagcatggcagcatctgtggccgctgcaaatctgtgtaacattcaagaagttt

SEQ ID NO: 841 - DNA, 514 bp, Chlorella sorokiniana
  Clone ID: LIB3602-025-Q6-K1-A5
gtggacgccacgtggcacggccatcaccactcctaccagcgcacttgctctgtgttccgcgggcactgccaggcagccgacgctgacggggcggcgggcggcacagtccatctcgtcatcggccatgccggcgcaggcctcacacccaacattcgcttcttccggccccgcatcttccaagcggtgcacctcaagcacgggtacatgcgtgtggaagcaaacgccacacacatggtgcaccaagtgctctcctcctacgatggatcgctgctggacgaattcacgctggccaagccgccaggctggcgcttccagccccgcgccgctgcgcttggtaacaagaacgccagcgacggcagcagctctggcggtgcaagcctgctgggcagcgcatgggcgcggctgtatggcagggtgggtgccgatggggcgccagtggcggccgttgcttaaggagcccgctgtgctgttgctgccgttgctgcctgcctcgtgggcatctgctgcttcattt

SEQ ID NO: 842 - DNA, 377 bp, Chlorella sorokiniana
  Clone ID: LIB3602-025-Q6-K1-A6
cccgccgccacgctgcgcctggccacctgcctgctgaacgactgcgtggcgcgctgccccagctatggcactgcggcgatgcctcccgctaccgcagcagcagcagcgctgcacctgggcggccagttgtgcgggcagcaggtgcagccgcacggctggtggcgagcagcaggcatcacagacccggccctggctgccacctgcgccaccctgctggacatgctggcagcagcctaaccatcagcctgataacagcacagcggctgcctgatgaggaatggaggttggaagccgacggctcaaagctcggaggcagagaggatttacatggacggcagtcaattgtgttctgcagttgtgtaatgcaacaacgagca

SEQ ID NO: 843 - DNA, 392 bp, Chlorella sorokiniana
  unsure (1)..(392): unsure at all n locations; Clone ID: LIB3602-025-Q6-K1-A7
agcgctaccttngggggcaacacgacagctgcgcaggagatgttcaagcgcgtcagcgagcagttcacggcgatgttccgccgcaaggccttcctccactggtacacgggcgagggcatggacgagatggagttcaccgaggccgagtccaacatgaacgacctggtcagcgagtaccatcagtaccaggacgcgtacgcggaggaggagggcgagtatgacgaggaggcgtgagcgcgcccatcccagccgcggccctgagaacggcagcgggcggcggcggctcggcggcggctcctttacccccctcccctgattttccccaccccttgactggctccttgaccctgacctgattgtttgtgtaaagatatgcgcgaaacatcgcaaaa

SEQ ID NO: 844 - DNA, 444 bp, Chlorella sorokiniana
  unsure (1)..(444): unsure at all n locations; Clone ID: LIB3602-025-Q6-K1-A8
caaggcggtggcgcatgcgggctaccgactagacgcgccggcatttgatgccctgttccgcagcttcgatccagacaggaccaacacactgtgcctggcggagttcatggcgatgtgcaccttcctgcagggcgcggcacggacgttccacgccttcgacgcgcagcacaccggccgcatctccctcgacttcagccagtttgtgtacgctgccagcaacgtgctgtgagaagcgattgaccaacgagtggcgcacctgcgcctggttgccactgacatgagctcacatgggcagaccactaccatgtacctccaccctctgatttcattccgcctgtgctgccgcccgatgagcggtaatgcttgttgactcccagccatattgctgtgctgcgacggcagcatcggggcctgctgcgtctgtgagctcatcagcgcananna

SEQ ID NO: 845 - DNA, 506 bp, Chlorella sorokiniana
  Clone ID: LIB3602-025-Q6-K1-A9
ggattgggcccggcgggtggacgagacagtggcggaccggtgggaggcgctgacggacgaggagcgccagacgtggacggcaaggggcagccttactgatcgggagaagaaggcggctgaggtggaggcgcagccacgctggggccggtggctaaacgagcgcgggctgctggatggcgtgaccgactaccgagaggtggcccgcctctcggagctcatcatctcgcaagtgttggcggacccgctggagcgggaggcagcgtttgcagagatgaagggctatgcggctgaggaagcggctgccatccgccggggcgacatcccggtgcagcagcttagctgaatgcccaagcctgcggcgcggcaggatccaccccatgaatgaccttatgactgcctatttgagggcagcgcatgccgcttcatgagccggcggtggtcgctgcgccacccggcgcaggcagaagccggtggcttggcggcagtgaaaagtgcagctggcaggc

SEQ ID NO: 846 - DNA, 513 bp, Chlorella sorokiniana
  Clone ID: LIB3602-025-Q6-K1-B1
ctcccaagcctccccgcacccccatccccctcatggccaagctctcggtggttgttgcgctcctgctgctcgctgtcggtgcccgcgccggcagcgactccgacaagtgcgccctcgagttcagcgatccgtgcgagcagacctggaacgtcgaaagcggccagatcgttggacctgatggcctagacctggaagtcgcctccgcctgggcggccgacctcgccgccgcggtctccgagcgcgtgcacaaggacaaggagtgcaagatcgcctcctggaccgtgctcaaggcctgccgcatggccgacaatgccgtccacatgttcttccagcacaacatcgagtgcccggacaacaacggcttcaaggtcaagtacgagaccaagggcacgatcacctctgaggagtctgacaagctggaggacccgaacacacgctttgtctgcgtcttcgacagcaccttcgtctaggcgaacagccccccccatctgcccccggggcaacaaccggcaa

SEQ ID NO: 847 - DNA, 251 bp, Chlorella sorokiniana
  Clone ID: LIB3602-025-Q6-K1-B10
gcagccggaggcggcacgcagcctcaacacagcagcacttgcttgctgccagcgatgcgcgcactgctgccggcgctgccgcacgcgctcctccagccccgtgcatctgacttatttcaaacactgtggacagcgtacgcataactgtagtgtgtacccgccaaaaaaaaaaaaaaaaaaaaaaaaaaaataaaaagggtggacgctataaaaaaaccaaagataacttacgcgcgcataaaacctaaata

SEQ ID NO: 848 - DNA, 514 bp, Chlorella sorokiniana
  Clone ID: LIB3602-025-Q6-K1-B11
ctgcacgcgcatacgaccaggcagcgcgtgcgatcaggggcgtgcatgccaagtgcaacttccccttgccggaggaggaggcattccaggcgcagctgctggcatcgcagcaggagacatggacaggaggccaggcctccccgccagctgcttcacaaacagcaacttcaacacaggcagcatttagccaagctgtgtccattccttgcaatgagtcccatcccgtccagccgcgcgcggcagtccagggcccagagtggatggcacaatctttggggaaggacggcctcagcctgggcacatccccgatgattaggagctatgacatgggctatatcagcacgcgcatgatggagtgtgaagacgcattcagcgacatggggagcttaaaacagaatctggagctgccccctgagtatgcatatgatgatgatgatgacagcgagctggaggacgcgatgatactgggaagcacacccactttctcaaattcatttagaagttgatcgatgtc

SEQ ID NO: 849 - DNA, 74 bp, Chlorella sorokiniana
  Clone ID: LIB3602-025-Q6-K1-B12
gcccctctctcttgctcccgcgcccggggtgcatcaaccccgccgcttttcatgtgcgtaaactgcgaaccaat

SEQ ID NO: 850 - DNA, 497 bp, Chlorella sorokiniana
  Clone ID: LIB3602-025-Q6-K1-B2
cgacaccttcgctgagctgaaggttaaggagctgaagaacggccgcctggccatggtgtccatgctcggcttcggcgtgcagggcctgatcacccgcaagggccccattgagaacctggctgaccacctggcggcccccgacgccaccaacttctgggtggactacgcccccaagtccgccggcatcggctactaagctgtttccgtcgcttgactggcgccgcccgctcgcccgcccgctgagtttacggccactcgcggcaacaggcagcagcggcgtctgtactttctgactcctccggcgattgctggtggcgcaccttgcttgctttgatgcttgcttcgggggcctaggcaccctcccatgcaacacatgaacccccaccacccctgccaacccaagtcttagcctgtgtttgcgcgcggtgaaggcaatgagaagaacagacccttgtaccctgcctcgctgctgcgtttttgctgcaagacatgagcct

SEQ ID NO: 851 - DNA, 511 bp, Chlorella sorokiniana
  Clone ID: LIB3602-025-Q6-K1-B3
ccgacccccgcaccgaccaccagtcgatcaaggaggccgcgtacatgaacatccccgtgattgccttctgcgacaccgactccgacctgcagggtgtggatgtggccatccccgccaacaacaagggcaagcactccatcggcgtgctgtactacctgctgacccgcatggtgctgcagatgcgcggcaccgtgtcggccgccaacccttgggacgtgatggtggacatgttcttctaccgcgagcccgaggaggccaaggaggagggcgaggccgaggccgcccccgagtacgacgccgccgccggctttgccggcgcgccgctgcccagcggcgaggaggccgccggcttcgacgcctacggctacaacgccgctggcggctttgagaccgccgccggcttcgacgccgccaccggctttgaggctgctgctgcgcccgccgccgcccccgaggccttcgccccggccgccgcccctgagtaccccgccgccggctactgagcgggctg

SEQ ID NO: 852 - DNA, 476 bp, Chlorella sorokiniana
  unsure (1)..(476): unsure at all n locations; Clone ID: LIB3602-025-Q6-K1-B4
ttnatccttgtattttctacttttttttcaatgacgaccagtactttaactgaatcagccctgcttaagggacaggggctcggatgtgtcagagaaaggggcaaacatgcgaggtctacccctgagtgaaggactcaatatgagggctgaaatgcttggtatcggattgggttgtctttaggctgcgtagcgttgcattgcgacaagcatgtgtagaccgtggtcaaatttgcattatgcgcattgcccgtgtttttctaaagtggaaggcctcgttgatttctaaggcgccttccatggcgtgggcagatttggcggtgaaccgctggcttttacagacgattgctcttggctcttatgctgacggttgcaacgccgctggttgatttgagagcggccccgtttataagacccacatttactttcaggctgaatgctacgcccatacctcttctactagggccttccaaaccttt

SEQ ID NO: 853 - DNA, 418 bp, Chlorella sorokiniana
  Clone ID: LIB3602-025-Q6-K1-B5
aagcagcgcatcccgctcaccgacaactcggtgatcgagcaggtgctgggcgacaaggacatcatctgcgtggaggacctggtgcacgagatcttcaccgtgggccccaacttcaagcaggccaacaacttcctgtggcccttcaagctgtcctcccccaagggcggcatcgacaagaagcgcctgcactacatcgagggcggccaggccggcaaccgccaggagtacatcaacaacctggtgcgcgccatgaactgagcgctgagccggcgagcacagcgcagcgcgcgcagcacgcacagcgcggcgcgtgcagcagcctggacggagcggccccctgatgcctgctagccacggcactgttggccgggccagtcgtgaggccccgagcgcacccgaatgtccaagggagtgcacg

SEQ ID NO: 854 - DNA, 514 bp, Chlorella sorokiniana
  Clone ID: LIB3602-025-Q6-K1-B6
ggcgggcacgcactccaaggcgggcctgtttctggaggtggcatccgtgttcccagtcatgatgggagcggccttcaaccagaacaacattaattcagtgatgcaccagctgcgcccctacaaccagccggtgctggacgcgacccaggcggcagcgcgcgccatcaccattgccgtgttcctgtgcatcggagtcgccaactatgccgtgttcggaactaagctgcaggtgtgggtgctgttactttttttccttcagctgcggccaagctgtccttcctggtcaatgggctgctcacgctgccggcctgcccggtaggctgtatccgtatcagcacaacctgtgggcggcgctgccgcgccagtcgcccgagcaccgcatgaatgaccagcgctcgtttgctgctacgaacatcgcctcgctggcaggatgcacgctgatcgcggtactggtgccctccatatggaaaccgctcaagctgctgggcggtacagcagtgggctgcatggcctt

SEQ ID NO: 855 - DNA, 507 bp, Chlorella sorokiniana
  Clone ID: LIB3602-025-Q6-K1-B7
cgtgacctcattgtgccgttggccagcatcatgacacccaatcagtacgaagcggagcagctgacggggctgagcatacgatcagaggaggatgcgctggcagcctgcgcgcagctgcaccaacgggggccgcccacagtggtcatcaccagctccgacctgcccggctggcaggaccacgtgacgatcctagccagcaccacgctgccgcaagcgggcggcagcccgcagcgccttcggcttcgggtgccgcgtgtccatgcctacttcacaggcactggcgaccttttcaccgcgctgctgctgggctggctgcacaagcggccgggggagctcaaggcggctctggaagcggcagtggctggcctgcaggtggtgctgcgagacacggtcgacaagtgcggtgctgcggcggcggcagaggagcgcacagcggcagtcagcttcgcacgcgagctgcgcctcgtgcagaacgcggcgggcatcctctccccgccgctggggcag

SEQ ID NO: 856 - DNA, 510 bp, Chlorella sorokiniana
  Clone ID: LIB3602-025-Q6-K1-B9
gccgccagctgctggctgccatcctgtccaaccacatcgtgcccgcccgcactttcaaggcctccgacctgaagcagggcctgcgcttcaggaccctgcagggcggcgagatcggcatcgactccgccggcattgagcaagaggagaagtatgccggctacagctacctggacatccacatcgactccttcattgacgaggatgcggagccactgcagtgcgacctggaggcctgccaggccctggtgcacctggttgaccacatgctgatccctgggccggacacgggtgtgggccagctgctgccccaggcagacctcaagaccgttctggctgggcgctgaagaggggcaggcaggtgccgccacctgtgcggcgcaatcttccaccacccctatgctgatgctctgcgctcgtgtcagctgggagctgccctccggctggagctgatgggaaaccaaggtcgctgcactgcaacattggataggacagcatgtgtgcacgttgccc

SEQ ID NO: 857 - DNA, 467 bp, Chlorella sorokiniana
  unsure (1)..(467): unsure at all n locations; Clone ID: LIB3602-025-Q6-K1-C1
cgcacctccctctcctgagtccttcactcgaattctttgcaaggaagtgcagccttcggcagcccccctcacgctgcacgcttctgccgctgtttttccattgaagggggctggggccaccctgcagcctgtcctctctctccttgatgccacgccacctcatggggatctctctctctgcccaaacccccaagaccccttggcctgaccaccatactaccgctcacgacgttgtaaccgcactacctcaaaaaaaaaaaaaaaaaaaaaaaaaaaaaaaaaaaaaaaaaaaaaaaaaaaaaaaaaaaaaaaaaaaaaaaaaaaaaaaaannaaaaaaaaaaaaaaaaaaaaaaaaaaaaaaaaaaaaaaaaaaaaaaaaaaaaaaaaaaagggggcccctttaaaaggaccaaattttccttcccgtggcttgaaaaaaaaatttttttttttggggcccccaaaa

SEQ ID NO: 858 - DNA, 511 bp, Chlorella sorokiniana
  Clone ID: LIB3602-025-Q6-K1-C10
gcagctggcacctgtcacagtcgtaagggcacagtcgagtcaccatgactcgcgtgtcggttcttgctgatgccctgaaaactatgtacaatgccgagaagcgcggcaagaagcaggtgctgctgcgcccctcctccaaggtgctgatcaagttcctctcgctcatgatgaagcacggctacatcggcgagtttgagtttgtggacaaccaccgctcgggcaagattgtggtggagctgaacggccgcctgaacaagtgcggcgcgatctcgccccgctacgacattgcggccaaggacattgaggcgtgggtgggccgcctgctgccctcccgccagttcggccacatcatcctgaccacctcccagggcatcatggaccacgaggaggccaggcggaagaaggtgggaggcaaggtcctcggcttcttctactgagcggccttgttggatgcgccgcagcagccacggtggaccacagccgtggcggatgcagcacggccggcgcgccc

SEQ ID NO: 859 - DNA, 515 bp, Chlorella sorokiniana
  Clone ID: LIB3602-025-Q6-K1-C11
ggtgaacgtcccgaagaccaagaaggccttctgcaagggcaaggagtgccgcaagcacaccatgcacaaggtcactcagtacaagaccggcaaggcgtcgctctacgcgcagggcaagcggcgttacgaccgcaagcagtccggctatggtggccagaccaagcccgtgttccacaagaaggccaagaccaccaagaagattgtgctgcgtctggcctgcaccgtgtgcaaggcccagcacatgcacgccatcaagcgctgcaagcacttcgagatcggcggcgacaagaaggtcaaggggctatactagtaaaaaaaaggagagcggcaggcggagagcatgaccgagaaatggaggcagcggcgcccgctcaccctgggcggcctgctccccgcccggcgcctcgctttggccgcctctggccactcgtacgcctccttgtccatgcccttgtgcttcctgagctgcccaacctggcatgcaagcagcctggccgtctgtaatgccattggcg

SEQ ID NO: 860 - DNA, 72 bp, Chlorella sorokiniana
  Clone ID: LIB3602-025-Q6-K1-C2
aaaaaaaaaaaaaaaaaaaaaaaaaaaaaaaaaaaaaaaaaaaaaaaaaaaaaaaaaaaaaaaaaaaaaaaa

SEQ ID NO: 861 - DNA, 496 bp, Chlorella sorokiniana
  Clone ID: LIB3602-025-Q6-K1-C3
ggcctggaagctgctgtgggagggctttggctggcccctgcgcgccttcgccgagtacaagaacggcagcctgatggaggacgacgccaagatcaccgtctccccccggtaaattggcagcccttgtagcggcgccgcgcccatttgtgcgcgcgccagcagcagcagcagcagcagcttgtatcatgactgcggccgtgggaggaggccgcggcgggcaaaggcctgagagctaaccaaccaagctccctggttaaggcctggggagcgccggggtcggcgccgcgcagcaccccgccgctcgaacctggcggccgagcagcggagcagcaggggcgccgtcccgccgttccctagcaggccctgcctcccttccgggggcggcgggccggcgcatgtgtgtgtgtcaaacctgtgttacctagttcaaccctgagaagattcaaacacccctcacgaatcacatatgcttttttgtgtgtaaacgcaagccgcc

SEQ ID NO: 862 - DNA, 516 bp, Chlorella sorokiniana
  Clone ID: LIB3602-025-Q6-K1-C4
tgcctgccgacttccctgctgagaaggtgctggacatgaaccccgacggcgtcttcttctccaacggccccggcgacccgagcgcagtgccgtacgcggttgacaacgccaagaagatcctgggcaagaagccggcctttggcatctgcatgggccaccaggtgcttggccaggctctgggcggcaagaccttcaagctcaagttcgggcaccacggcggcaaccaccctctgcggcacacgcccaccggccgcatcgagatttcggcgcagaaccacaactttgcggtggaccccgccacgctgcctgatgaggtcgaggtgagcctgatcaacctgaatgacggcacgtgcgccggcatgctgcaccccggcctgaaggccatgactgtgcagagccaccccgaggcgtcgccgggtccccacgactcggatgtcgcctttgagcagttcattggcttcatggctgaggcccgcaagtgagcgcctccagcccagctgcagccgcgctccagcc

SEQ ID NO: 863 - DNA, 535 bp, Chlorella sorokiniana
  Clone ID: LIB3602-025-Q6-K1-C5
gcagctgcgcttgcgcaggcgctgccccagccatatgctgtgtagatgggcgaagtgatgtttgcacagatcaggaatgcatcaggaatgcttgcgcttgcttgtaagtagtggcttgaaaaaaaaaaaaaaaaaaaaaaaaaaaaaaaaaaaaaaaaaaaaaaaaaaaaaagggcaacaagaataaaaaaaccaagaattaagaacgcgctcatgctaaacaaaaaccttttatatagtgggggctcatgctcaattaacatgcgcttcatttcactacgagaatcactgttaacaccattgttgttgcccatataatagtaatttaaaaggacatgcggcttttcaaacgagtatgactcgaaaaatggaggcagcggcgccagatcaccctgggcgagactgctccccttcacgggcctaggtttaacccgctgtggccactcatacacctccttgaccatgcccttgagcttcatgagatgcccaacctgtcatgcaagcatacaagccgtcctcttattgcttttgtcct

SEQ ID NO: 864 - DNA, 335 bp, Chlorella sorokiniana
  Clone ID: LIB3602-025-Q6-K1-C6
cgattttgaccgtgttactcgccacctatacatctgctcgcacattttcccagcgtgcgcagcctctgttcccaatctattgcatcacatgccttcctgtccgcctgacctgagtggcaccgcttcagagtagccacacctgttttgtccgagtgaccgacttttgagcgagcatgcccagctgtgctgtcacccacgcgatccgcccatcaatcaacctgcctatccgcctttctcatgcgccctgtctgatctgtctgcagtccgtgcctacgaccgcttcacatatacatgtagcatgcatgcgactggttctgtacagcattcaatgcagt

SEQ ID NO: 865 - DNA, 389 bp, Chlorella sorokiniana
  Clone ID: LIB3602-025-Q6-K1-C7
cgtcaacctggagcgacctgggcatcccatattaacggcggccagccggttttggacaagcacacacaacatatgagattcccaacctccctgcgcactgcttgtaacaatcctggctccctcttgtacccttgacccgcactcgggcgtggatatgtaacgttccgcgggacaaaaaaaaaaaaaaaaaaaaaaaaaaaaaaaaaaaaaaaaaaaaaaaaaaaaaaaaaaaaaaaaaaaaaaataactaaggatcgcatgcgacgccacacctcttgtatagtgaaacctaaattcaatttactgcccgttgataaaacaaaggcgggaattggaaaaccttgtaaataccaaaattatgcgaattgcaaaagataccccttttgcca

SEQ ID NO: 866 - DNA, 513 bp, Chlorella sorokiniana
  Clone ID: LIB3602-025-Q6-K1-C9
caatcacagtgcgggccgcttccagaagcgccgcttccgcaaggcgcagtgccccatcgtggagaggctgaccaacagcctgatgatgcacggccgcaacaacggcaagaagctgatggcggccagcattgtcaagcacgcgtttgacattgtcaacctgctgaccgaccagaacccggtccaggtgctcgtggacgccatcatcaacggcggcccgcgtgaggatgccacccgcattggcagcgccggtgtggtgcgccgccaggctgtggatgtgtcgccgctgcgccgcgtgaaccaggccatctggctgatcaccaccggcgcgcgcgagagcgcgttccgcaacatcaagaccattgcggagtgcctggcggacgagctgatcaacgcggccaagggcagctccaacagctacgccatcaagaagaaggacgagatcgagcgcgtggccaaggccaaccggtaaacggctgttgcgcacccaccaaaacagcagcccgccacagccgg

SEQ ID NO: 867 - DNA, 513 bp, Chlorella sorokiniana
  Clone ID: LIB3602-025-Q6-K1-D1
gttcgccacgatcatcacacggctcgcaccaacagtcaacgtgacaccccagctactgttggctgagtgaccggagtctagtccgccccgtaaagaagacacgcgcgtgcctgactcaaacagcaggctgcaatggaccccgaccgcaaagctcgtctggcggctatgcgtgctgaggcggcagcagctggggcggcggcagacggggacgcagccgcagcccctgcagcggagcagcagcaggcagacgtgcagcagcaggaggctggagagcccgtgctgcgcttccgcaactacgctccagtggccgacgagcgcatccagcacgagaaggtggcgcccgccaaggtgcccgagtttgaggaggtcacggtggatgttgatgcggtgcttggggacgaccccgaggaggtgctgatcaacgtggcgcccaagaaggcaaactgggacctgcgccgcgacattgcgggcagcttggcgcgcctggagcggagaacacaggcagcaatgatc

SEQ ID NO: 868 - DNA, 435 bp, Chlorella sorokiniana
  Clone ID: LIB3602-025-Q6-K1-D10
cggacgcgtgggcggacgcgtgggtgagtatgcatatgatgatgatgatgacagcgagctggaggacgcgatgatactgggaagcacacccactttctcaaattcatttagaagttgatcgatgtctgtcatgttccttcgatgctccgtctgcccttgaagttcttcttgcttggtgacttgcacagtgtaagctgaaccccacaaaaaaaaaaaaaaaaaaaaaaaaaaaaaaaaaaaaaaaaaaaaaaaaaaaaaaaaaagggcgaaataaaaagggccacctttcttaacggaccgggggcgccgtactaaatgatccatatttacacccactttaattcaactgcctagcttttttttaaagaccgtaatgttaaaaaaatggggctgggaaaacaaatggattgactggaaaaacccctttgttcccca

SEQ ID NO: 869 - DNA, 169 bp, Chlorella sorokiniana
  Clone ID: LIB3602-025-Q6-K1-D11
ccaagaacctggcgtaagcacttgtcgtacgaacgtacgaggcccgcgcgcgattgtgcgccccttgagaagatcacacgaccctgtcgcaccgcactgccgcctgtacgcacccaccatgtgtatgtgctagagcctatgaagttttgtgtaagcccttgatactcct

SEQ ID NO: 870 - DNA, 512 bp, Chlorella sorokiniana
  Clone ID: LIB3602-025-Q6-K1-D12
gggcagcttcattgaggactactccaatcgggtggagattgtgcagctggacgaggcacgaggggtgatccgctccaacccagccctgtcattccagcacccctacccgcccaccaaagtgggcttcatccctgacaaggacggcacgcggcctgacctgctggccacaacaggcgacttcctgcggctgtggcgagtcagcgacgagccgggcagcgcgcagcagggcgtgcggctggaaaagctgctgaacaacaacaagggcggcgagtttgcagcaccgctcacatcgtttgattggaacgagctggacccccgccgcatcggcaccgcttcaattgataccacgtgcacggtgtgggacgtggagcgagggctggtggacacgcagctcattgcgcacgacaaagaggtctacgacattgcgtggggcggcgtgggcatctttgcatctgtctctgcagacggctcggttcgcgtgttcgacctcagggacaaggagcacagcacca

SEQ ID NO: 871 - DNA, 518 bp, Chlorella sorokiniana
  unsure (1)..(518): unsure at all n locations; Clone ID: LIB3602-025-Q6-K1-D2
cttttgagagaaagcagcggcagcggccatgctgttgcgatgcatgcgcaaaattttcgccagcccatgaattccgctagttgagcacttcaatttttgtgtcccagcctcgactaacttcgattttggtgtgtcccagggctccatttccctgacaattttggatcggtctgcatcgcatgtttgccgtcattcattccatccactgcttgtgctcccactgcacacccatcgtgacttgccaaccacgagactgctgtcccttttccacgctcttgacatgtgacattgacccagagccgcaagcgccgtattgcgctacatgtgcatgtcaagatgaacannnnaaaaaaaaaaaaaaaaaaaaaaaaaaaaaaaaaaaaaaaaaaaaaaaaaaaaaaaaaaaaaaaaaaaaaaaaaaaaaaaaaaaaaaaaaannnnaaaaaaaaaaaaaaaaaaaaaaaaaaaaaaaaaaaaaaaaaaaaaaaaaaaaaangggggggcccttttaaaggaac

SEQ ID NO: 872 - DNA, 514 bp, Chlorella sorokiniana
  Clone ID: LIB3602-025-Q6-K1-D4
accagctggagatggtgtacccgcagagcgaggaccccgactacaagtgggtgctgacggtcatgagcttctggctcaagttcttcggcggcctgctgggcctggtgctgtccgtctgctgggtgctgcagatcatcctgtacatcctcatagacccgcccgtcacgccgctgctcaacagcctcttcatcaaggccaacaacgtcttcccgctgtttggcacgctgctgttcggcgtgtttgccttctacctccagctggcggtggtcaagggcaacttcaagtttgggctcaacctgctgctgttccgggtgcaccccatgcggccgggcgccacgctcatgtcctccttcctcttcaacgtgggcctcatcctgctggccaccaccgccaccatccagttctgcgccgccgccttccagctgtatgccgacggcaccgcggtgctggacatctttggcaaccagctgacgtccatccagggcctgcgctacatctacaccgagaacatctt

SEQ ID NO: 873 - DNA, 513 bp, Chlorella sorokiniana
  unsure (1)..(513): unsure at all n locations; Clone ID: LIB3602-025-Q6-K1-D5
ctgctgcaagaaggctgaggtggacctgagcaagcgcgccggcgagctgtctgccgaggagctggagagcatcatgaccatcgtggccaaccccccggcctacaagaacccccgcttggttcttgaccaggcaaaaggacgtaaaggacggccgttactcgcaggtgacttcttccgcgctgaacaccaagctgcgcaatgacctgaaccgcctgaggagaatccgaaaccaccgngtgttgcgccatctggggccttaccgtgcgcgggcagaacaccaagaccactgggcgccgcggcaaaaccccgggcgtggctgtcaagaaaaaataaacacattcttgcgggcgcggcctgcggcacgggcggatgctggcggctgggtgacagcggctggcgccgcccgcgcagcaaccccactggcagagccggcggcagcaggtggatccacaccactcgttgcagtgctgccgtcgtgtaatgcacccttcgtcgctaaaaaaaaatctcctc

SEQ ID NO: 874 - DNA, 215 bp, Chlorella sorokiniana
  Clone ID: LIB3602-025-Q6-K1-D6
cggcaatccatgcataccatctcatctcattgcgctaccgcatctccttttccctctggcatgttcccggacacaccacagctaatcaagtgtgggagtgcttttggcagccgtcccaactggctgtcctgtcccacttttgtgttctgcgcaccgactgtgtccttgtctgccacaaccagtgcctcgaaccacccctgtaatccgcagcttgt

SEQ ID NO: 875 - DNA, 487 bp, Chlorella sorokiniana
  Clone ID: LIB3602-025-Q6-K1-D7
accacacatacggcgacctgctggaccgttcgcggaggatgaaggacaagaagtatcccgacatgccgggggaccagttcctgcgcgatgtgcttggctacaacgagcccgaggaggcgccgccgctgtcgggcgcgcggcgcatcatccgatggcagatccggcacgtgtattcggagggtgtgacagtgcgccaccccgacaaccgccgaatcaaggcatgggtgtaccttcgggacctgcaggagcagtacagcttgacagacgcggagctgcataacattgccgaggtgtgcaacccgcggtacaaccccaacaaggcctagctcaaactgaccatctaccgatatgaccaccgcgaggccaaccgcgcacacatacgtcagatgattgatgatctggttgcagaggggcaccgcatgcacccagccccgtagcagcaggcggcgcattagttgcaagcggcgcatcaggcggtattgcagca

SEQ ID NO: 876 - DNA, 337 bp, Chlorella sorokiniana
  Clone ID: LIB3602-025-Q6-K1-D8
gcaaacgtgtccaaggccgacctgcgcgagaagctggccaagatgtacgacgtgaaggacctgaactgcgtgttcgtgttcggcatgcgcacccagtttggcggcggcaagagctccggctttggcctgatctacgacaacgttgaggtggccaagaagttcgagcccaagtaccggctcgtgcggaacggcctggcggaggcggtgcagaagtcgcgcaagcagatcaaggagcgcaagaaccgctccaagcctctgcgcggcgtcaagaagtctggcaagaagtaagcagcccgaggagcgcgccacgcgcgcgacctgtaacacattgccttcg

SEQ ID NO: 877 - DNA, 506 bp, Chlorella sorokiniana
  Clone ID: LIB3602-025-Q6-K1-D9
cccaggccacgggcgccacacacggcgcggacgcgctggccgatgtgctggagatggtacgcacccaccaggtcaacatgccgggccacatctgcgccacggtggtgaccacgatggtgctggagggctggtccaaccagctggaccccaaccactccacgctgcaggaggtgaagcgcatgattgctgcctccaagggcggcctgctgggccagctgaccgaggtcatgctgcggggagagctggccgccgaccacgagatcatggagcgagtggagctgctggagcccaccctggtccgcgtgtgatgatacagcgatccccatgccaacggccagccgtctcagcccgtttggcggtgttgagtcaccatggtccgcgtttgatgaagctgtggcgctgccaaccaccagccgcctctgctcaactgcaactgctgccatctcagctggcgggcgagcgccgggtgaactctgaaccgccagttgaactcacgcgcatccagc

SEQ ID NO: 878 - DNA, 334 bp, Chlorella sorokiniana
  unsure (1)..(334): unsure at all n locations; Clone ID: LIB3602-025-Q6-K1-E1
ggtccaaccaggccancaactcgtgaggcgagcgcacacccttttctttttcttttttctttttttttgtgtatgttaccttttttgggggggattgcaacgcggcgggttacatttaatggttgcatagggataggcggactggtcgttgccccacactgcactaactacaaggacgttaatgcccaggtggagcccgctatcgccagagtcgtcctgttcgttaataagaacaaggaaaagcccatgtacttgatctacttcttctaaaacttttccttcttattttcttacgcggcattaacggtaccaaccgtggcgggcgcataataca

SEQ ID NO: 879 - DNA, 501 bp, Chlorella sorokiniana
  unsure (1)..(501): unsure at all n locations; Clone ID: LIB3602-025-Q6-K1-E10
aacaaaatgacaagaaaaatatagcaagcaaacttgaaaacttgtgcaaaggcgcatttcctgtttgggggggcagccacctacagtgctcgtgttgactgtaacatttatctgattcatctcactattcctgctttgttggaactatcgcctcttgtattgtccgtttaacttgcctatggcccttgctatcccctttttttatcccttctggctttctttatttcatgcccatgcttttctgtttaattcgaatcagctgtcaatactgttattcattgacagtcattataataacttattcatatttttttcattcctaacatactgaagctaaggcctgagcagtgcgtcatgtttgaaatggattgccgcgctgagctctgatgtgtgtgtgctctcgcccgcccatttcaaccccacccacaatcccctcaaactcanagctctgacggggatggcgctgcgcttgcgcccgcccctccctgacctcacctgcat

SEQ ID NO: 880 - DNA, 200 bp, Chlorella sorokiniana
  Clone ID: LIB3602-025-Q6-K1-E12
gtcactgcacttgccggccattgaacagggatccgccagcgctcactctccgccgcatttcattccacacatcccgcttgacctgcaacccctccatttgccattgaaccgtgcctgatgccgtgcggcctgactcgtggagccctctgttgtgtgcacatgctgtcctgctgggcgtccatgcaacaggctgaccagtt

SEQ ID NO: 881 - DNA, 512 bp, Chlorella sorokiniana
  Clone ID: LIB3602-025-Q6-K1-E2
gccatgcaggtgtggacccccctgaacaacaagttcttcgagaccttctcgtacctgccccccatgaccgacgcggagatctaccgccaggtggactacatcgtgggcaacggctggaccccctgcctcgagttcgcgggcgctgactctgcgtacaccagcaacgagaactgcgtgcgcatgcagaacaccacctgcctgtactacgacaaccgctactggaccatgtggaagctgaccatgttcggctgcaccgatggctgccaggtgctgcgcgagattcaggcgtgccgtcacgccttccccgacgcctacatccgcgtggaggtctttgaccccgtgcgccaggtgcaggtgtatggcttcctggtgaaccgccccagctatgtgcgcgactaccagggccactacacccgctccgtgtaagcggctgagcgggagctcaactgtggcctaaccactgcagcagcaacagccggcggtcaacggcggcggcatgtgcggcggcccgc

SEQ ID NO: 882 - DNA, 367 bp, Chlorella sorokiniana
  Clone ID: LIB3602-025-Q6-K1-E3
acttaaccgattggaaccgagaccgacttacgtaccaggagaggctccctggagagaactgagcggatgagaggaagaagcggctgatgagagagcaatggtggacccctatcaggacaccccgtcagcccgcagctccccactcgccgtacgttgagcggcgggggcttgaaaaccaagcccaggtccgcggttggatgacctattctttgatagaacctttcgtccccttgtgggatgcgcgcggccggggcggcggttatcgcgggcccgccccctgctgaactgcaccccgccaatcttattatccaataccgagaagaatcgatcaatattataatgacactcctgcgcgtgtgtattcaca

SEQ ID NO: 883 - DNA, 401 bp, Chlorella sorokiniana
  Clone ID: LIB3602-025-Q6-K1-E4
ctcgcacccccagcactccataccatgggcaacctgtgcagctcggccaaggccgcccagacggtggaccaagtggttgacaaagcagcagagaacaaagagaagattgtgaccggagtcaagacggctggctccaaggctggcctggaccaagcgaagacggacagcgctgccaaggcggttgatcaggctctgtctgacaaggagggcctgaagcagaagctgagctccgccctgggcgagtccgcccccgctgccaccgaggctggccctgctggcggcggcggcgagggtggccccggcggcggcgagggcggccctgccggcgctgttgaagcttaaggctgagcagtgcgttatgtttgaaatggattggcgcgcttagctctgtaatgtgtgtg

SEQ ID NO: 884 - DNA, 508 bp, Chlorella sorokiniana
  Clone ID: LIB3602-025-Q6-K1-E5
cccacgcgtccgaaaaaaaaaaaaataaaaaaaaaaaaaaaaataaaaaaaaaaaaaaaaaaaaaaaaaaagggggggggttctggtggagccgagcttacttacggttccctgccttgcgacgcgttcttctttggtgtagcctaacttaaatccactggcctgggctttactttgcaaggtttgggatgacaatagcgttgcctaacttaatttgattgcctggcttttctttttcctttgctggggtgaccccattgaggcccgggctggatctctttcccttcagatcgtttgtactaaattgaaaggggaacgcgccctgtcctgtagcatttaatttaacgcgtggggtgtgtatgatccgcgcaatgggtccccttcctttgcccgtagcttagggtcctttcgtttggttttcttcctttctttccccgtcccctgggttgccttttcaagctgtgatttgaggtgttctttcccttttccgttccagttctttgctgta

SEQ ID NO: 885 - DNA, 399 bp, Chlorella sorokiniana
  unsure (1)..(399): unsure at all n locations; Clone ID: LIB3602-025-Q6-K1-E6
cgtgttactacttgctttggctgatgggggcggctcggtgtggcgcaaccggaccggtgggcaggcagcggggctgtcctgcatcctgctggcgttgctgcctcgcctaggccacctctgtccctttctgctgtcgttgtttctgctgctcctcttcctgcctcctgcccctcgatgctcccacaaatgcgcggcctgaggccgctccctagcctgcggcgagggcggagccgtcaatacctgtaaaagctaagggccnnaaaaaaaaaaaaaaaaaaaaaaaaaaaaaaaaaaaaaaaaaaaaaaaaaaaaaaaaaaaaaagggccggccgttttaaagaaccaaagttaccttcccctgccttccaacgtataactttttttttggggcccctaaat

SEQ ID NO: 886 - DNA, 501 bp, Chlorella sorokiniana
  Clone ID: LIB3602-025-Q6-K1-E7
cactctggcagtggcgccactgctcgccggcagcgccagcgcagccaaggtgcccaagggctttgtggctgtgaaggactcgcaggacggctacgccttcctgtaccccttcggctggcaggaggtgtcggtggatggccaggacactgtgtacaaggacgtgattgagccgctggagagcgtgagcgtcagcctggtgcccaccgacaagaaggacgtggccgagtatggcgacaagatggaggtggcctacacgctagcggagaaggtgctgacctcgccctcgcaggaggtcacgctgctggcggtgaacgagcgcgtcaccgagggccgccgctactttgactttgagttcacggccaagtcgcggggctacacccgccacgccctggcctccgtcaccgtgggcaacggcaagttctacacgctgctgacgggctccaacgagaagcggtggggcaagatgaaggacaaggtgaagattgtggtggactcgttcat

SEQ ID NO: 887 - DNA, 513 bp, Chlorella sorokiniana
  Clone ID: LIB3602-025-Q6-K1-E8
gcctcgcaaggccgccattgcacccattagcgagggcacgcgtgagcgcatcatttcagcgctgtacgaagcgctgcaggccaaccccaggtactgctccgaaccgtctcgcagcgtgatgtgctgggcgcaggaggtggaggacgcgctcttcgctcgctcccactccaagcaggtgtacctggcccaggtggccaacgcggttcgcctggcgcgcacagccgagaatgtgtcggacattccgcgcatcgccgccggggagccgcgtgcagtggccgaggggcacacggcgggtgagcccacgccctacgtcaccggcctgcaagtgctcaagcccacctactgagggaggctgcatcggcactgaagaagggcccaggcgtttagagcagcgggaggaccggcagtgaatgcccagccggctttcccagccagcagacgcagcggatgggagcagccagcaatcctggctgctgtgcaaatgacacgccttacactgtcgtgaacagagca

SEQ ID NO: 888 - DNA, 287 bp, Chlorella sorokiniana
  Clone ID: LIB3602-025-Q6-K1-E9
agccagctgacaggcaggcgttgcaggcagccttggaaacaccgtgcaaaggcgcatttcctgtttgcggcgtcagccacctccagcgctcgtgatgacggcaacatttatatgatgcaacacactatccctgctctgtaggaacgattgccccctgtattgttcgtttgacttgcctccggcccttgcaatcccctttttttatccctcctggcttcctttattccatgcccatgcttggctgtgagatttgaatcagctgccaggactgttataaattgacagtc

SEQ ID NO: 889 - DNA, 503 bp, Chlorella sorokiniana
  Clone ID: LIB3602-025-Q6-K1-F1
aaaaaaaaaaaaaaaaaaaaaaaaaaaaaaaaaaaaaaaaaaaaaaaaaaaaaaaaaaaaaaaaaaaaaaaaaagggaaaaaaaaaaaaaaaaaaaaaaaagggggcgcccgttttaggggggccgccctttttggcggctcccctttttcctccccttttttgctctgggttcccttttttttatttccccgtccttccttttcccgggccgtgctttgccaccccctggcttggccaacctttggggcttcccactttttccccttttcgccacttccctttttccccacttggccttttccgttggcccccccccccgttgccccttcctaactgttgcccggcccgctccttaatggggcccctccttggcgcgggcctttaggcccccccgctgtggggcttccccccttggggcccctttcactccccggcgttttggcccctccccttttttttttgcccctttccttggttgcccctttcggggtttttcccggg

SEQ ID NO: 890 - DNA, 510 bp, Chlorella sorokiniana
  Clone ID: LIB3602-025-Q6-K1-F10
gcacctgctgcatggcagtgcggcccagccatgctgtgcagctgtcatgcgcagcctggcctgccaagcggcatgccatggtgcaagcttttgtcgctgggacttgctctattccgacgcgccctgcgtctgcatcgccccaccagtgcagacgtcaatggcgctcttcgtgcggggcttgcagcggcggtgtggatcaaccggaacggcgagcgacctgtgcccacggggctgcgcccagcggccatcctgagcagcgtgctggagctgccgtcggcgctggagcagctgcagctgctgccgaagcaggaggcgtagcaggtagagcagctgggcaggcgggcggatcatcgctgccggctcggcttcaccaaaactgcaccaccgaaactgatgagcgctgcagaaatgaataacgtgggacgacccgccatttcccctttcattgatattgcttcaaaatttggtttgtttagtcctgttattttccgccggtatgtaatccagtgc

SEQ ID NO: 891 - DNA, 514 bp, Chlorella sorokiniana
  Clone ID: LIB3602-025-Q6-K1-F11
cggacgcgtgggggagcaggagcccgcaagcatggccgctcagctgggcttccgcgcgagtggcttcatcggcagtggccgggcgattcagccgcggcggcaggtggcggcgccatgccgagcaatgccggtgcaggcggccgtgattggccctggcaagaagtgggagcacactgagacgaaccagaacggcaagccggtgcgcgtgtccatgcacgtgcggaagggcgacaccgtgaaggtgattgccggcggcgacaagggcaaggtgggcacggtgctggacatcaacaccaagcgcggcgaggtggtggtcgagggtgtgaacatcaagaccaagcacgtgaagccggcggcgcagggcgaggagggccagattctgaagaaggagttccctgtgcaccactccaacgtggcggtctactccacggcgcagcagacgcactcccgcgtgggcttcaaggtggtggacggcaagaaggttcgctacctgaagaagacgggcgaggtcctt

SEQ ID NO: 892 - DNA, 432 bp, Chlorella sorokiniana
  Clone ID: LIB3602-025-Q6-K1-F12
ggttggagccaattacacccgcacacgcttagtaaaaaagtcagcaggagaagggccttattaggggggattcgcgcagtcaggcaaaaactacagtcggggcgagaggggggacagatgcaagctacacctaggggtggtcaagccttgtgccttggcttgcacacacaccccctaaaacaacaagaaaggggcacgggactggggacaagggatgcagggggcgacaaaaaccaagaaagaaggggggctattacatgggcaaaagcaccgaaggggcgagacaacaccaaactaatgtgctaaggcagtcaggagtgggggctacggaagcaaacgcctgtaccggtcaatttaacccaggggcaacaaaacctggaatgaaaggaagggaggggcgcaagcctgccccactgtatatgcaggggtggg

SEQ ID NO: 893 - DNA, 423 bp, Chlorella sorokiniana
  unsure (1)..(423): unsure at all n locations; Clone ID: LIB3602-025-Q6-K1-F2
ggccgcacggccgcagcggcgcggtgcgcccgccggcgcgccgcccgcccggcacgaccgccggcagcgtggggcggtccttngtccgcccccgtcgccggtgctaccctgttagatgtccccctcacagactgacacaccaccaataaactgctcttttatcaaggtctccgtgcccattcctagcactaagaattcaaaccacctgtaggaaataaccacactgctaacttggccggtaagcgataactatgttgcttagcatcatctgttgtagcacacactgtgcaggactataccaggagcgcttgctctagtcaatcaagttaagctgttgccctgttaagagaaaaatgtttgtaacagactctcaaaaatttatttaaaatattaaatttttttttttatttaattatttttatt

SEQ ID NO: 894 - DNA, 401 bp, Chlorella sorokiniana
  unsure (1)..(401): unsure at all n locations; Clone ID: LIB3602-025-Q6-K1-F3
gcagcagctgctgaggcaggggctacagcccgctgcggcaagcagcagcaggcagctacttgctgcaacggctgaggctggtgcggcagccacaccggcaggcagcttgcaaggcagcggcggctggcgcacagcagccaagtgctgggcccttcggttagccaagcggatgggcggcgatgctgctgtgctgagggcacagcgatgggtcctgtgatctgcaggcacctctttcggtgcaagcagtttggaggttgtgacttgcatgcattcttcctgacttgcatgcattcttccttgccacgacgcttctgtatcccgcccatgtgtggcacacgtcatattcatatatatcttacagcagtactgcttgctgctttggtaacaagcggcgcacanaa

SEQ ID NO: 895 - DNA, 516 bp, Chlorella sorokiniana
  Clone ID: LIB3602-025-Q6-K1-F4
gagctgctgaagccggacaacttccacgtggccaccaccgagatctttgggcccttccaagtggtgacgcagtacggcgaccatgacgtgcctcacgtgctggaggcctgcgagcgcatggaggcccacctcactgccgcagtggtgtccaacgacgtgcgctttgtgcagcacatcctgggcagcacggtcaacggcaccacatacgcaggcatccgcgcccgcaccacaggtgccccgcaaaaccactggtttgggccggcaggcgacccgcgtgccgcaggcatcggcactccagaggccatccgcctggtgtggtccacccacagggaggtcatcctagactacggcccagtgccgcacggcctgcagctgacgcagagctgagcagcaggcagccgctgacgcagagctgacgcgacagccgctgacgcagagctgacgcgacagcagcagttgcggcagagctggcctctagagctggtacacaacaccccacgatgacacatgcataca

SEQ ID NO: 896 - DNA, 456 bp, Chlorella sorokiniana
  Clone ID: LIB3602-025-Q6-K1-F6
ctcggagacctggccagcggcatcttgtagcagcagcaaccgatcacccaagcaggagcggcagcagcacaagcgggagcagcagcagcagcaggcaggatgtcgcagcaacagaaggtggccagccccgagatgcagcagttcattctgcagcagcaggccaaggcgcagctacagcagacggtttcgcggctcacggaggagtgctggggcaagtgcatgggcaacccgggcaactacatgacgagcaaggagcaggcgtgcatggacaactgcgcgcgccgcttcctcgagtccacccagttcgtggtcaagtacttccagtccaaggccaaccagggcggccagcacagcgacttctgaggcacctgggtagcggccacggctgtggcagctccacggcggcagcggcagtgcagttgttaacagccgcaagggtcccaagtgcatgtgtgc

SEQ ID NO: 897 - DNA, 513 bp, Chlorella sorokiniana
  Clone ID: LIB3602-025-Q6-K1-F7
atagcagccgactaccctctcctagccccggcagcgcgacccgcgcgacagttcgcgcaccggcgcccgcagaaccggcagtgcagccccggcaacgccggcgggctcccccaagatgggcaacgccatacgcaagctgtttgacatgttcggaagccgggaaatgcgtgtggtcatgctcggcctggacgcggccggcaagaccaccatcctctacaagctgcacatcggcgaggtgctcagcacggtgcccacgattggcttcaacgtggagaaggtgcaatacaaaaacgtggtgttcacagtgtgggacgtgggcggccaggagaagctgcggccgctgtggcggcactacttcaacaacacagatgcgctgatctacgtggtcgactgctgcgaccgcgagcgcatccagcgtgcagcctcggagttcaagcaaatagtagacgacccgctgatgcggcacagcgccatcctggtgtttgccaacaagcaggacctgaagaatgcgct

SEQ ID NO: 898 - DNA, 464 bp, Chlorella sorokiniana
  Clone ID: LIB3602-025-Q6-K1-F8
caagtactctcgggacaaccgccccaccggcccgcgcgcccagctgttcaccgaccagcgctacaaggatgtggaggtcctgcttgactgcatgcgggccgtggctgcggagcagggcggcaagacgctggggcaggtggccatcaactggacgctgtgcaagggcgcggtgcccattcctggcgccaagaatgcaaagcaggtggaggagattgcgggggcgctgagctggcggctgagcgatgctgaggtggcggagctggatgccgtgagcgccaaggtgccgcgcagcaccggagcgccctttgagaactggtgatcgaggcgagcggcgaggggtgtaacgaatttgttctgcatgaaatgctctgacgtccatatctggaacattctgatgacactggaaccttttaatagcattgatatctcggctgatttcattttggttgtaaatatgcgccacg

SEQ ID NO: 899 - DNA, 511 bp, Chlorella sorokiniana
  Clone ID: LIB3602-025-Q6-K1-F9
acgcaggcttctgatgtcgtcgactgcccacgggactggcagggccagacccgccaccgcctgtatctcaacgtctcctgcgaggagtctgctcgtgaggtgattgtgaacctggaggtggacgccctgggcgcagctgacggcaccgtgcggggcattgacgtagatatcgagcgcgtcactgttgatggccagcggattggcgacgacctggaggacctgtttggcgatgatgacccgcgggaggacaccatggagacgctggaggaccgcattgaggacctgttcggcgacgatgatgacaatggggacgacattggcgacgataatggcgatgacaatggcgacgacaacgacgacgacaactgaatccgttgatatgctcgctctggccgcctgctggccccagccttgcgcgcctggggacaaccccccttcagcgtttgtactgccccctacgtacagagcccttctgcactttctgactgtcaactcttttgcccaccagttg

SEQ ID NO: 900 - DNA, 467 bp, Chlorella sorokiniana
  Clone ID: LIB3602-025-Q6-K1-G1
ccggtgacatggcggcagcggtggcctttttggccagcgaggacgcggcctacatcactggagaagcgattgtggtggcaggcggcatgcagagccgactgtgaggcacccggctgtgatttttccagcgtgcctcgtttgctacctgctccgtactccatctgtgcgccgccaagttgtagctccttctgctgcttcgtcccctgtacatctttgttctgcgcctttccagctacccggattttccctacagcctcttctccctctctgctgtgcgcctcgactgctgttcagaccgcttgcaatactcctcgctaacactcaagcatgctcaaaacgcacgtgcatgaaacaaaggacaacacgtgtttgcagtgtttctgtgcattgcggctgcattttgcgacccccatggctttcaagtcatgcctcgcatccactgccctcagctgtaatgtagctcagac

SEQ ID NO: 901 - DNA, 456 bp, Chlorella sorokiniana
  Clone ID: LIB3602-025-Q6-K1-G10
accagaagcagcagcagcacgggcgcctgaagcagagaagccggtgctgctgcgaatggagccgctggagggctgcttgaccacctgcgaagcagtggcgcggtcgctcggtgcgctggaggggcctcggggggcggctgtgagggaggccatcctgcagccggtggctcagctcgctcacttgcaggcgcagtggaacccctgattggcggcgcgcctggagagcggaagcggctacagccaaacgcggcgtcgcatgggcctgagcagggtcggcgacctggccgacattgcctagcgcctgtaagcacctgtggctttcacctgtggcgctaactaagcacagctgtgggtgggaggcatgccccctggagcaccaaacctgctgagtgtgagcccaatcctgtaattcgcatgttggcgcccctgctgcacctgctgagtaataacagactg

SEQ ID NO: 902 - DNA, 471 bp, Chlorella sorokiniana
  unsure (1)..(471): unsure at all n locations; Clone ID: LIB3602-025-Q6-K1-G12
agaatgtgaaggccaagatccaggacaaggagggcatcccccctgaccagcagcgcctgatcttcgccggcaagcagctggaggacggccgcaccctggcagactacaacatccagaaggagtcgacgctgcacctggtgctgcgcctgccccggggcatcattgaacccgccctgcagattctggcccgcaagtacaaccaagacaagaagatctggccgaagtgctacgcccgcctgcacccccgcgctgtgaactggcgcaagaagaaatgcggccacacctcgcagctgcgccccaagaagaaactcaagtaaactactcgcttcggcacgagcggaagcggcatgagcggcagcaaccgctgccccccccccgccccgccagccgggatgccatgacagcaccggctgctcagctgctgatgtgctgcatgtcaattgctgctgcggaaatgtaacggtggtngcg

SEQ ID NO: 903 - DNA, 79 bp, Chlorella sorokiniana
  Clone ID: LIB3602-025-Q6-K1-G2
aaaaaaaaaaaaaaaaaaaaaaaaaaaaaaaaaaaaaaaaaaaaaaaaaaaaaaaaaaaaaaaaaaaaaaaaaaaaaaa

SEQ ID NO: 904 - DNA, 434 bp, Chlorella sorokiniana
  unsure (1)..(434): unsure at all n locations; Clone ID: LIB3602-025-Q6-K1-G3
ggcctccgactcggtgatcaagcagatcccccgtctgttgggcccgggcctcaacaaggccggcaagttccccaccctcatcacccacaacgactcgctggagaacaaggcgaacgagatccgctcgtccgtcaagtaccagctgaagaaggtgctgtgcctgggtgtggctgtgggcaacgtgtccatgaccgaccgcgagctgtacgtcaacatccagatgtccatcaacttcctggtgtcgctgctgaagaagaactggcnnaacgtgaagagcctgtacatcaagagctccatgggcaagccctaccgcctgtactgagcgcgcaggccgccctggctgcctccacagtgcagcaggccgcacggccgcagcggcgcggtgcgcccgccggcgcgccgcccgcccggcacgaccgccggcagcgtgggcg

SEQ ID NO: 905 - DNA, 354 bp, Chlorella sorokiniana
  Clone ID: LIB3602-025-Q6-K1-G4
gcttggctgcccgaccgcccactgctggccccgctctcttgcacccaacgcatgcctgtatgtacccaacgctcctgtgccatactgtccgcttctgccacgctgcttgcgcccttgcaagcagtctctgcctgcctgcccttgctgcccctccattgtttcccaacccccctgcctgcccctgcatgcctaccgcaatgcttcgctgccatgcctatctgctgtgacacttggtcgtgcaacagagcgcaggcaaaaaaaaaaaaaaaaaaaaaaaaaaaaaaaaaaaaaataaaaaaaaaaaaactaccaaaatgaactgagcgcgcaggccaggggggcgtgcgttctaag

SEQ ID NO: 906 - DNA, 518 bp, Chlorella sorokiniana
  Clone ID: LIB3602-025-Q6-K1-G5
ccgacagctttggcacggtcagccacatgcctccggagctgctggatgggggccacctgaccggcgctgccgatgtctactccctggggatactgtgctgggagatgttctgcgctgcgcatgcctggtccggcttgcgcctgccccaaatcatccaccgcaaggtggtggggcacgagcggctgcacctgccggacgactgcaacgccgccttcaaggcattggtggatggctgcatggcggacgatcctgcagagcggcccagtgcgcgacaagtgctggagacgttggattctatgttgttgagcgagcagtaacaagttcaagttgtgcatgacccaatatgatctgattgcatgtgtttgactggagagtgcctgctgggtgcccggctggcagccgctcttcagccgcgcgagggcagttgctgaccaaccatgcagtgtgtttgcgtgtgactctgttctaccccttgagaatacacatagttatataatgcatgctatgcatgacatgca

SEQ ID NO: 907 - DNA, 509 bp, Chlorella sorokiniana
  Clone ID: LIB3602-025-Q6-K1-G6
gcgccttgggcagcttgctgcaagcgctccttcaccatggccgtggaccagctgcccaggaggatcatcaaggagacgcagcggctgctgagcgagcccgtgccaggcatcagcgcagcgccgagcgaggagaacctgcgctattttaatgtgatcattttgggccctgattcctcgccgtatcaaggcggcgtgtttaagcttgagctgttcctgcctgaagactaccccatggctgctcccaaggtgcgcttcctcaccaagatctaccaccccaacgtcgacaagctgggccgcatctgcctggatatcctgaaggacaagtggagccccgcgctgcaaatccgcacagtgctgctcagcatccaggcgctgatgagcgcacccaaccctgacgacccgctggacgagaatgtggctcgccactggaagacaaacgaggtggatgccatgaacacggcgcggcagtggacagcggcgcacgcgcagccagcgtgaggtggcacccg

SEQ ID NO: 908 - DNA, 516 bp, Chlorella sorokiniana
  Clone ID: LIB3602-025-Q6-K1-G7
agtagggcttgggccagatggtgctcaagacccagacctgccgcttcagcggcctcaggatctaccctggcaagggtgtgctgttcatccgcgtggatggccagcaattcctgttcctgaagcagaagtgccgctcgctgttcaaccagcgcaagcggcccgccaagcttgcctggaccaccctgtaccgcaagcagcaccgcaaggacctggaggcgcaggttgcccgcaagaagcggcgcaacgtgaacaaggcggccacccgctccgtggcgggcgccagcctggaggtgatccagaagaagaagagcgagaagcccgaggcgcgcaaggcctcccgcgaggcggcgctgcgtgagatcaaggagcgcgccaagaaggccaaggccgacaaggcggtgcagaaggcgcaggccaaggcctcgggcgccggcaaggctgtcaagaacatgcctaagggcgcgggcaagggcggcgccaagagcaccggccgctaagccagcggcaatgcagcgg

SEQ ID NO: 909 - DNA, 480 bp, Chlorella sorokiniana
  Clone ID: LIB3602-025-Q6-K1-G8
gcactctgttccccccatgcatgcatacccaccagcgcccattttgcacctcccgtaccaacgccatcaacgttttgacacgccgccccattgcgtcccgatctgctctgacccatcatccaatgaacacacccgttagcgcgtagcgcccccctccctgcctttttcccaccccatgcctcacgcctcgaattgagcagccctcccgcattttccgcagcgcatgcctgcgcagccgggagggccctactgttccctttcgttgccgggtctggcccctgttccacaaacacatgccccctgtctagtcgcgtagcgtgcgtagcgtccgcctgccctctcccaccacgctcgcctggccattgtttcagtgcccagcccgagcccgtagcgtctgcctgtctgtgggtcacatttgtagcatccccatgcgcccctctgagcctcagctgtctgcctcagcacctcttagtagtcggt

SEQ ID NO: 910 - DNA, 422 bp, Chlorella sorokiniana
  Clone ID: LIB3602-025-Q6-K1-G9
accagaagcagcagcagcaggggcgccagaagcagagaagccggtgctgctgcgaatggagccgctggagggctgcttgaccacctgcgaagcagtggcgcgggcgctcggtgcgctggaggggcctcggggggcggctgtgagggaggccatcctgcagccgctggctcagctcgctcacttccaggcgcagtggaacccctcattggcggcgcgcctggagagcggcagcggctacagccaagcgcggcgccgcatgggcctgagcagggtcggcgacctggccgccattgcctagcgcctgtcagcacctgtggctttcacctgtcgcgctagctaggcacagctgtgggtggcaggcatcccccctggagcaccaaacctgctgattgtgagcccaatcctgtaattcgcatgttgcc

SEQ ID NO: 911 - DNA, 464 bp, Chlorella sorokiniana
  Clone ID: LIB3602-025-Q6-K1-H1
gcgccaacaaatgcacctcgccgccgctcgccggcgattgccccccttccggtttttcgtcctcggtagcttattaagtcaggcccgctagatcattgatttttcgtcccctggttgcctctcccctcccttcttccccgccgctggcgctcaaattttttcgctagcacgtgcatggcggcagcgggcgcgcccggtttgggcgcgggcgcctcgccgccgcaggcgcactcgattggccggggcggtgcacggcgctgcaggctgacctgccgccggccgccccagccgctgtactaacaacattggtcattttagctgcgtggcgcctccgatcccgccccactgtttcccggccgcgtacctcctcattcataacgggcgctaggtgccctccttgtccagttgagtaggatcctcttcatacagcgatgctcgagcgaagtcgtgtaaggacctcactt

SEQ ID NO: 912 - DNA, 301 bp, Chlorella sorokiniana
  unsure (1)..(301): unsure at all n locations; Clone ID: LIB3602-025-Q6-K1-H11
gcgtcaggaggtggggtccagcatcgcagcggagcacagcggcgcaggcgagctccccagctccgatgcggcggcaattgcggcgtggcgagaccagcagctagcactgcctgagaccggggcacatagcacaaacatgctcggttggggatttgcccgggcggcccctttttgggcttggcgggcggggcccccgagggctctgttattcgggaccatggccttatcgagatccaacccgactcgcccgcaccttcgggagacggcctgccaaccgntgttttttgtgacacaggcgccg

SEQ ID NO: 913 - DNA, 495 bp, Chlorella sorokiniana
  unsure (1)..(495): unsure at all n locations; Clone ID: LIB3602-025-Q6-K1-H12
gaactacctgggcaacccctccctgatccacgcccagtccatcgtggctgtgctgctgacccagctggtgatcatgggcgccgccgaggcgtaccgctacagcggcgagggccccgtggagaccagcggcgactccctgtaccccggcggcttcttcgaccccctgggtctggctgacgaccccgacaccctggctgagctgaaggtgaaggagatcaagaacggccgcctcgccatgttctccatgttcggcttcttcgtgcagggcctggtgaccggcaagtcccccctggaaaacctggctgaccaccttgctgagccgtctgtgaacaacggcttcgcgtccgccaccaagttcctgcccctggcctgaacgccgtcgtcaacctggagcgacctgggcatcccatattaacggcggccagccggttntggacaagcacacacaacatatgagattcccaacctccctgcgcactgcttgtaacaatcctg

SEQ ID NO: 914 - DNA, 101 bp, Chlorella sorokiniana
  Clone ID: LIB3602-025-Q6-K1-H2
aaaaaaaaaaaaaaaaaaaaaaaaaaaaaaaaaaaaaaaaaaaaaaaaaaaaaaaaaaaaaaaaaaaaaaaaaaaaaaaaaaaaaaaaaaaaaaaaaaagg

SEQ ID NO: 915 - DNA, 515 bp, Chlorella sorokiniana
  Clone ID: LIB3602-025-Q6-K1-H3
cgtccaccgcagcggctgcgcccgccgcagctcccgccggcggcagcggcagccgccagacggccgcggcagaggcggcggaagcggctgaggcggcggcagcagccaacgaggcggcagcagcccaggaggcggcggcagccaaggaagcgctggcagcaaagtcgactctggagcagccgctgcggggcaaccttgccgccggctttgctgtgcctgatgccaagccccaggctgcagcgcagccctccagccctggtgtggacttggacgccctggcggcggcgggtgccgctcgcattcagcagcgtggcgcggcggtgcgggagcctccccagcagcagcgcggtctgaagcagcgcaacggcctgttcgccattttggacgcggtcagcgggctgttcagcatgttcaaaaagtgaggcagatagtgggctggcagtgggctgagcgggcagccggcagcctagccggcactcgcaagccacctttgatcccctcgatgtgattgaacc

SEQ ID NO: 916 - DNA, 504 bp, Chlorella sorokiniana
  Clone ID: LIB3602-025-Q6-K1-H4
cgtccaccgcagcggctgcgcccgccgcagctcccgccggcggcagcggcagccgccagacggccgcggcagaggcggcggaagcggctgaggcggcggcagcagccaacgaggcggcagcagcccaggaggcggcggcagccaaggaagcgctggcagcaaagtcgactctggagcagccgctgcggggcaaccttgccgccggctttgctgtgcctgatgccaagccccaggctgcagcgcagccctccagccctggtgtggacttggacgccctggcggcggcgggtgccgctcgcattcagcagcgtggcgcggcggtgcgggagcctccccagcagcagcgcggtctgaagcagcgcaacggcctgttcgccattttggacgcggtcagcgggctgttcaacatgttcaaaaagtggagcaaatagtgggctggcaaggggctgaacgggcaagccgcaagctaacccgcactcgcaagccacctttgatcccctcgat

SEQ ID NO: 917 - DNA, 522 bp, Chlorella sorokiniana
  Clone ID: LIB3602-025-Q6-K1-H5
gcaggaggtggggtccagcatcgcagcggagcacagcggcgcaggcgagctccccagctccgatgcggcggcaattgcggcgtggcgagaccagcagctagcactgcctgagaccggggcacagagcacagacgtgctggttgtggtgtggccgggcgggcgcatcctgcgcctgccgcgcggagccaccgcaggctctgtcattcgggaccatggcctcatcgagatccaacccgactcgcccgcaccttcgggagacggcctgccaaccgctgctgctgcggacacaggcgccgggcccagtggcaacgggagcgtgccaagcagcagcctgctggtcaatgtgaacaaccggctggtgcccgaggagacccccctgtcggacggcgactacgtggtgctggctcgcgaccgagtcaggatttagcaagccttttgggcagcccccctctgatgagccagcagtaagcagatggccaggtggccggcccctgctatcccggctggcctctgcccccctgg

SEQ ID NO: 918 - DNA, 169 bp, Chlorella sorokiniana
  Clone ID: LIB3602-025-Q6-K1-H6
aaaaaaaaaaaaaaaaaaaaaaaaaaaaaaaaaaaaaaaaaaaaaaaaaagggcagaagaataaaaagagaaaaaaagaataaggagcgcgaggaggcaaagagatagctctgcttgagggcggggcaaagagaatagacgggccggtggtggagagggcggggggggg

SEQ ID NO: 919 - DNA, 76 bp, Chlorella sorokiniana
  Clone ID: LIB3602-025-Q6-K1-H7
aaaaaaaaaaaaaaaaaaaaaaaaaaaaaaaaaaaaaaaaaaaaaaaaaagaaaaaaaatgtaaaaaaaaacaagg

SEQ ID NO: 920 - DNA, 225 bp, Chlorella sorokiniana
  Clone ID: LIB3602-025-Q6-K1-H8
gccgctctttgcgctggccggaattcggtccctcccgcctctgcttctctgcgttccaccgccccttccttgttgctgcctgacgacggcgaggagccaagctgcatgcacaggccagcgggccctccatttcgaagaggcacacacccccatgcatacaaaacagcactgcttttcctcgtctcccactgcccggcacgcaacacggtgcaacaatgaatcctt

SEQ ID NO: 921 - DNA, 90 bp, Chlorella sorokiniana
  Clone ID: LIB3602-025-Q6-K1-H9
aatgtgtaacagcaaacgcgcagcagaacatgggcaaggtggaacagcacacgcgcaacatagaacggacatagatcaagagctaggcca

SEQ ID NO: 922 - DNA, 470 bp, Chlorella sorokiniana
  unsure (1)..(470): unsure at all n locations; Clone ID: LIB3602-026-Q6-K1-A1
ggcgacctcggcccatgtggacctccagctgctgctggctgaggccacaaagggcctgtgagaaggaagaggctaggcctggctcacgtgccactcgcaaggaccacattgcctttggctgttggtgtggttggctcccaatggaccgacacacaaaaaagccaagttggcgggccggcaccttcgccgtggctgatctccatcggccgacccacctgcctgtgcttgacagcctgatttggcctaggaatgcagcagcgctgtgtcgggagcaggtggctggccatatgacgccggcggcgcaacggcagctgccctgccgccggctgaacccccctgtgccagcgcctgatgcccgtgctgcgctgctgctgcccgcctttcatgaccttgccccgtccgtttctgaattcagctccaattatgagcattactgtgcgccttgtgcgtttgtaagccgaataagttna

SEQ ID NO: 923 - DNA, 528 bp, Chlorella sorokiniana
  unsure (1)..(528): unsure at all n locations; Clone ID: LIB3602-026-Q6-K1-A10
gccgcgatcaaggcgtccgcaaaacgcgtgctgggctgagactgcgggtgccaggtggtgccagcagctgcacttagagataggagggtgcagcacggcacgtgtggcgcctgcagccacggctgcgtgacacggcgcggtgcagccggcagctcctggagtgcaggagctggaggcagctggctgcaggagctgcagcaaactatgcggagcatcaggctgcagagttcatttcccctgctttgccttgtgcccggcgtgctgcccttctgcacttgcatgtgacggatgacaatgatggaatgtggacccattgcaacagacgcaaacgcnnannanaaaaaaaaaaaaaaaaaaaaaaaaaaaaaaaaaaaaaaaaaaaaaaaaaaaaaaaaaaaaaaaaaaaaaaaaaaaaaaaaaaaaaaaaaaaaaaaaaaaaaaaaaaaaaaaaaaaaaaaaaaaaaaaaaaaaaaaaaaaaaaaaaggggggggcgttttaaaagatccaaatttatctacccggggaag

SEQ ID NO: 924 - DNA, 367 bp, Chlorella sorokiniana
  Clone ID: LIB3602-026-Q6-K1-A11
aaaaaaaaaaaaaaaaaaaaaaaaaaaaaaaaaaaaaaaaaaaaaaaaaaaaaaaaaaaaaaaaaaaaaaaaaaaaaaaaaaaaaaaaaaaaaaaaaaaaaaaggggggggggttttgggggttcaaggtttacgttcgcgtgcttgcgatggcatagttttttttttgttttacctaatttaaattaattggccgtggttttacattcgcgggattgggaaagccaatgcgttgcccaacttaattttatttgcagtagatccccttttccctttttggggttgtagaaaaggggcccaggccgatcgcttttcccattatttacacatccttaattgtgaatgggaacggccccttgtccttgga

SEQ ID NO: 925 - DNA, 404 bp, Chlorella sorokiniana
  Clone ID: LIB3602-026-Q6-K1-A12
cggacgcgtgggggagcagaagtcgaaggaggcgaaggcgcttgccgccgccaactccagcaagggcaagaagaagaaatggtccaagggcaagctgaaggagaaggtgaacaacctggtcctcttcgacaaggccacctatgagaagctgctcactgaggtgcccaagtacaagatgatcactccctcggtgctgtccgaccgcctgcggatcaacggcagcctggcgcgcgccgccatcaaggagctgctgggcaaggggctgattaaggaggtggccaagagccgcgcgcagcagatttacacccgcgcgacggcagccgccagctaagcagccacccagcagtttggcagcatgctagtgcactcgttgtgcttgccaatctggtaacaggtccctcgca

SEQ ID NO: 926 - DNA, 207 bp, Chlorella sorokiniana
  Clone ID: LIB3602-026-Q6-K1-A2
ccgggactgaattgccggacccacgcgtgcgctccagatccaattcgatccccaacgaacgccccatgctgcctgctcttctctcgatgccctgctcctagcttgctccaacgtccccactgctgcctgtacatgcccgcagtttgctcaatttttcacatgccagcgagggctcacaagcaagccccgcctgtaaatcaagccaac

SEQ ID NO: 927 - DNA, 393 bp, Chlorella sorokiniana
  Clone ID: LIB3602-026-Q6-K1-A3
ggacaaaaaaaatgtacacagggggccggggatcaattatttattaacagagtacaaaagggggcaggccgccgggggccgggcaggggttgttttgcccagggccaagtttaaccagcctagcgcagggagttgaggaacaacacggggattgggggaatggcaataaacacgggcgcaatggacacaaggtaaagcgctccgtaccccattcagtcagggaggggggtttgtaaggttggaaggcgcctaaaaggggtcgggtccaatggggggccgaacctcgggttgttgccgcgcccccgccgccgttttctttgccgccggggaaaaaacgttggcctggggggttgggtccaattcgcctttgggcaccggtttggggcgctgccc

SEQ ID NO: 928 - DNA, 521 bp, Chlorella sorokiniana
  Clone ID: LIB3602-026-Q6-K1-A4
gcgcaaggtgcagtcagagatgcacatgcgggacgtgaccatctgctacggcatgactgaaacatcacccgtctccttccagacctgcactgaagactcggaggagcggcgtgtgtcgaccgtgggccgcatccacccccacctggaggcgagagtggttgacccgcggacagggcgcacgctgccgcgcgggcaggtgggcgagctgtgcgtacggggctacagtgtgatgctgggatactggggtgaccacgcagccacagcaagcgcgattgacgagggccgctggatgcacaccggggaccttgcaatcatagatggccagggctactgctccattgtgggccgcatcaaagacatggtcatccgtggcggagagaatgtgtaccctcgagaggtggaggagttcattcaccggcacccggcagtggcagaagtgcaggtgtttggtgtgccggatgccaagtggggcgaggagctgtgtgcgtgggtgcgcctcagggagggcgccggtggggcct

SEQ ID NO: 929 - DNA, 408 bp, Chlorella sorokiniana
  Clone ID: LIB3602-026-Q6-K1-A5
gcaagatggcccctaaggagcagaagtcgaaggaggcgaaggcgcttgccgccgccaactccagcaagggcaagaagaagaaatggtccaagggcaagctgaaggagaaggtgaacaacctggtcctcttcgacaaggccacctatgagaagctgctcactgaggtgcccaagtacaagatgatcactccctcggtgctgtccgaccgcctgcggatcaacggcagcctggcgcgcgccgccatcaaggagctgctgggcaaggggctgattaaggaggtggccaagagccgcgcgcagcagatttacacccgcgcgacggcagccgccagctaagcagccacccagcagtttggcagcatgctagtgcactcgttgtgcttgccaatctggtaacaggtccctcgca

SEQ ID NO: 930 - DNA, 454 bp, Chlorella sorokiniana
  unsure (1)..(454): unsure at all n locations; Clone ID: LIB3602-026-Q6-K1-A6
atgggnagacccacccgtncgnccacacgtcccctaaggaacataagtccaacgaggcaaacgctcttttcgtcgccaactccagcaagggcaggagtaataaatggtccaaggtcgagctcaaggagagccgcaacatgcttgacgtgagcgaggaggtcctgtaggacatgttgccaattgaccagcacaagggccgcatgatccttaagtagcgggacgatgccatcaaccctggcttcgcctggctgctccagaacgtaatgatccacgtagtcggcaactcgttcgatgacgacgtgaactacactgaggctgaccatatggactgctaaacaactggcgcccgcagtggaacaaaactgaccggcattttgacgtggtactgatcacagagcgattacactttgcctatagccatattttgtcatatgcccttcctgtaacgcctcac

SEQ ID NO: 931 - DNA, 547 bp, Chlorella sorokiniana
  Clone ID: LIB3602-026-Q6-K1-A7
cggaattactggccggatcgacgccacgcgttcgatgtggaccgaccccaaggcgcccggctacccggctggctacttgaaggagaatgtcgtcaaggcccgggacggcctgacggcagtcatgtcatactggaaccagaaccgcgccaacgtgccgcgcacgacggtgatgtacctgagcggccagcgtggcgtgaaggatgtgggcatggcctgggagggcgtgctgtgcgagtggtacgagacgcgcaacgaaaactgggcctacggcttcttgagcaacctgaagggcgacttcaagtggaatggcaaccaggctaacaacccgattgccgtgacctgggacccgttcaatttcgcacatgagttgggcccacacttttgccagcagccacacccacgatttctgcggcgacaaggcatggggtgaccccaacccgatagactactgcattgagaccgacaccaattgcgtgcaaccttgggtggccgtgctgcccaggtgcactgcgccggttactgcctttggcggcggcgcaggcaccat

SEQ ID NO: 932 - DNA, 419 bp, Chlorella sorokiniana
  Clone ID: LIB3602-026-Q6-K1-A9
gcagcggcacctaacaccgcatgccatgcaccctgtacctcgctctcttatcctgtttctatttcgtacactatcaatccccatctgcatgcttcaggccctctctgttcagttgctctttttcccgtttgcttccggccaaacaaatcgatggcctcgccctgttgtcttctggtgccctgctctctttctggtgggctctccctctccccccctcagctcaagtttgcttacatgctgaaattcggcttcataccatgtcatccattgcttgctgaaaacagaacctgaccatggcggaggacgatgtgaaggaaaaaaagccccgagccccaaaatctacaaaggtgtcgcaacaacggctgggccgttgatcctgcggcctgcctcgtggtggaggacagcaccatcggtctggc

SEQ ID NO: 933 - DNA, 515 bp, Chlorella sorokiniana
  Clone ID: LIB3602-026-Q6-K1-B1
accagcgggcgggtgcttacggcgctccagaaggcgcgtgcggtgcgctgctgcatgagcgacgcaggcagcagcggccagcgcaccaccgtctatccagacctggttgccatcactagggagattctgtaccaccacagcctgctggagccagaggagtgacctgcacctgctgagtacggtacctgcacagcctgctggagactacgtagcgaaatgcttcaagtttagtaccaccgcaaatgctttccctgtagcaggagcagtgacgtgttttcacacgccggctgctgcactgtttgatgtttcacccaacttgctctttgccctggcttgggccagccaacgcatggttttactgcttttcctttttgcctggcttaagcagccaacacataaatgtactgctttccctttttgcctggctccaggagccaacacatgactatactgcttgttcagaatactgttaagctgtgccgttgctgtgcaggaaggttcacttgtgttttcat

SEQ ID NO: 934 - DNA, 522 bp, Chlorella sorokiniana
  unsure (1)..(522): unsure at all n locations; Clone ID: LIB3602-026-Q6-K1-B10
cgcagccgccccgtccccttggtgcagcagcagcgcagccaacatgggtcgcgtgcgcaccaagacggtgaagaaggcctctcgggtcatcatcgagaagtactaccagcggctgacgctggacttcgacaccaacaagcgcatctgcgaggaggtggcgatcatccagtccaagcgcctgcgcaacaagattgccggcttcaccactcacctgatgaagcggatccagcgcggccccgtgcgcggcatctccctcaagctgcaggaggaggagcgcgagcgccgcatggacttcatccccgacgagtcggccatcaacaccgaggccattgaggtggacaaggacaccatggacatgctgcgcggcatgaacatggcgggcctgccgggcgtgtccgtccagcaggtgggccgcggcgacttccagaagcccggcggcttccagcagcgccctccccgccagtgagcgtaccccaggaggagcgncgtggcgcggcggcggcagcccacccgcggcagcag

SEQ ID NO: 935 - DNA, 110 bp, Chlorella sorokiniana
  Clone ID: LIB3602-026-Q6-K1-B11
aaaaaaaaaaaaaaaaaaaaaaaaaaaaaaaaaaaaaaaaaaaaaaaaaaaaaaaaaaaaaaaaaaaaaaaaaaaaaaaaaaaaaaaaaaaaaaaaaaaaaaaaaaaaaa

SEQ ID NO: 936 - DNA, 494 bp, Chlorella sorokiniana
  Clone ID: LIB3602-026-Q6-K1-B2
aaaaaaaaaaaaaaaaaaaaaaaaaaaaaaaaaaaaaaaaaaaaaaaataaaaaaaataaaaaattaaaaacacataaataggaaaaacaatattattgtttccagtttcctaaaacgggggcgcccgtttttgggtttccaattttttttctgtccccttccctcgccttccctttttttttggcccccctacttttatttctttggccgggtttttccaacgtggggtttgggaaacccttgtttttccccatttttttcgctttgcagaacttccccttttccccccttgtcattttaccttaaagccccctcccgtttgccttttcccccaattttcccccctttttttgccatttggccccccccttttcctgtccttttatcccctttgtttttgggttttccccccggttttccctttccttttttaatttcttttcccccttttttttttttttttccctttttttttcccccagttccccggttt

SEQ ID NO: 937 - DNA, 477 bp, Chlorella sorokiniana
  Clone ID: LIB3602-026-Q6-K1-B3
cagcgacgtgctgtcccagctggcgcacttcgaggtgtacaccgcggtgatgtgcggcaccagcctgctgttcacgctctaccacacagtcaagtttgcaggggacctgcgcaggcacctgcagagcgaggcccgtgctgactggcgcgcgctgctgcgctacgcctggaacgctctcttctgggccggctttgtgtgctggtacgccgcaccgccagtcacctccatcgtcgactatacaggcggcccgggcgccgtgatgtgcctgtttggagcggcgctggcggtggcggctgcactgcaggcgggcatgttcagcttcatgggcttcgccttggttgccgcgccgcctgcagacgggcggcgtgtacgcgctgctgcgccaccccccaggcgctggggcaacatgaatgttcctggatagggctttctccattcggccggcgggcgccgcctgtggggcccagccctgggtgt

SEQ ID NO: 938 - DNA, 523 bp, Chlorella sorokiniana
  Clone ID: LIB3602-026-Q6-K1-B5
gtggtctccagcctgtccgccctgcagtcggccgccgccagcggctccgccgccgacgccaagcgcggctttgtggcgactgtgtcggccctcaagggctggaccgccgccgccaatgtggccgccgacctcaagggcctttgagcggcttcgatttgaagaacctttttgcggccaattggaagccgctttggttcggccagtctgaaaggcctgtggttgggctgggccctgatggctgggcggccactgctcggctccaattcgagggccaatggtcagccggctttatgggtctaggattggcaggcagatgagtctgtgatggccccacgctgacggcgggtcggccggcacccctgagcagcctgtgatgggcagcctcgaaggccagcttggtccccgtgctgccggcttgctcgcccgcgcctcagcaccctggagagattttgccacgtgcacttgccccaccccgagaagaaacaattttgcttgcattgactgctgcgattcatcacgtctg

SEQ ID NO: 939 - DNA, 524 bp, Chlorella sorokiniana
  Clone ID: LIB3602-026-Q6-K1-B6
tcgagaagtatgcggacatctttacaagccgcgtgtccaacttcctgcgctacacgcccttcgagtacttccgctccccagctcagctgctggtgcacgaccgccccacagccgaccccctggtgctctccagcggagcgctgtcctcatgcgaccacgacaccggcacagtgcccaccaacggcggcagccaggcggatggattcagctcctatggtgcgccgcgagtgcccttcagcaacgggtccaatggcggcatgcagtggccgaggtccgcaggcaagcctgtgcggccgccgtactgagtggcgcctggccgcacctgatgctccgcctgctagcctgcttggcggctgacactcagcggcaggcgctcactgggccccgccagtaaccacccctcctctcctcgttcccctaagccagcacttctgtactgcactgctcaagccgccactccccgccgcgcttgatgtgccaacacttcatttcatgtgtattaatggacgatagtctgtcactcc

SEQ ID NO: 940 - DNA, 480 bp, Chlorella sorokiniana
  Clone ID: LIB3602-026-Q6-K1-B8
cgcaggcgcagcaggaggagcaggaacggcagcaggatggcgcagcggcgcccgcacagaacggccagctgaatggcggcgtgcacagcgcggatagcagcgatggcagcagcgatgatgaggcaatggccgatgcagaaacgccagcagcagaggcgccgccggcgacacggcagcagcggcggcggaggcaggtggaggaggcaccagccgaggcggcagcgcagcaggaggcagacgagcaggaggaagaggagcagccagccaagacgcccaagacgcgcaagaaggcggctgcaggcgcagctggcacggcggccaaggccaaccggtcgcaaaaagccgccagcaacggcaggcaaggccacggcggcggcagcggcggcaaagcagaggaagaagcggcgtgtatcggcttgagccctagtgccgtttcatgtcttgttgtaggcatgccaacacctgtaaacagctcacaca

SEQ ID NO: 941 - DNA, 455 bp, Chlorella sorokiniana
  unsure (1)..(455): unsure at all n locations; Clone ID: LIB3602-026-Q6-K1-B9
tgaagagggtgctcatcgtgggcatcgagacgcacgtgtgcgtgctgcagacgacgctggacctgctggagcgcggctacgaggtgcacgtgctggtggatggcgtgagcagccagcgcctgggcgaccgctccgtggcgctgcagcgcctggctcagtcgggcgccttcctggccacctctgaaatggtcatgttccaaatgatggtcaacacggcgcaccccgccttcaaggccgtgtctgccatctgcaaggaggagcggccagagcagctgccagcgcactgagcggctgtggcggcggcgtggacgcgtgtgcacccaagtgcccccggccgcatgtgtcggccgtcccgcatgcgttgcgctgcctgaatgtacatcctgttgacctgtgccccgtgtccttgcgaccctgcctgtgagcgagcgggtgttgtaaatgtgtgctgtnca

SEQ ID NO: 942 - DNA, 521 bp, Chlorella sorokiniana
  Clone ID: LIB3602-026-Q6-K1-C1
agagggcagtgcccagctgacccgccccaacagctcatccctagtcaaggtgaaggtgaagagcaacaactggtggaccttcaatgtcgggtgtgcccgcaccccctgaacccatgcaccgcccagctggccgctggtgcaatggctgcagcggctgcagcaagcttcccccgccgcattccccgcccccgccaaacctccagccaacagcagcaactacaatggctgcggcccctccccatcccatggccgcatccccaccctcaactaactgccgccacccgcccaccgcctcaccctcacccatcccccaaccatactccctccaccttttcaaccggtcaaacacccatcacgccctcgctcatcacccatcaactgtatgttgtgcctgacttttgcgccatgtcgatcggtcgacatgacccacccctgccttttcatgcctgcctttgcacccttgtgttttcatgccgtgcccctttatgacatgcccctttgactggaccccttaggctcgg

SEQ ID NO: 943 - DNA, 504 bp, Chlorella sorokiniana
  unsure (1)..(504): unsure at all n locations; Clone ID: LIB3602-026-Q6-K1-C10
aagaaggtgtaccgcatcggtgtgaagggcgaggccagccacgccgccaccaccgagcacgacgtgacggtgaaggacattacccccatgggcggcttcccccactacggcgtggtcaaggaggactatgtgatgatcaagggcgcctgccccggcgtcaagcgccgcgtcatcaccctgcgcaagagcctgttcccccagaccagccgcaaggcgctggaagatatccgcctgaaattcatcgatacgtccagcaagttcggcaacggccgcttccagacctcggaggagaaggccaagatcctgggccgcctcaaggcctgagccccagaaggcgtgctgagcggggagcgcancgcgcacagcacgccgcccgcccgccggcggcggcggcgctctgcgcccgcccagctagattgcggcgcaagcgtaagcggctgggccgctgcgccggccgcctgagtgccctgcaacagctgtgcatgcatgcctgggaggagcatg

SEQ ID NO: 944 - DNA, 441 bp, Chlorella sorokiniana
  Clone ID: LIB3602-026-Q6-K1-C11
gccacaagctcctgctctccgttgcactgcgctgacatgccccaattgaactcaagctgtggccctctgcattcccgtggcccgcacccttccttccccaggccaagctcgccgtgctgcatttttgcactagaagcgcctgcaccaccgccatacccccttgatgcctttctctgctccctgctccctacgcccggctgtctttttccatgcccccgcccctgctgcgcccgccgctgttgctgcagtgcgcccttcagcgaagagccggcagggtctctgcctattacatacagcctcttccacctactcactctcacgccggtataaaacccctctgcttgctcgtgacaccagcaccctgccaaggcggcgcgcagcgcaaagtgccgcgccgccgtgctagaacctggtagtccaccatgtaatagactagcaacc

SEQ ID NO: 945 - DNA, 525 bp, Chlorella sorokiniana
  Clone ID: LIB3602-026-Q6-K1-C12
aaaaaaaaaaaaaaaaaaaaaaaaaaaaaaaaaaaaaaaaaaaaaaaaaaaaaaaaaaaaaaaaaaaaaaaaaaaaaaaaaaaaaaaaaaaaaaaaaaaaaaaaaaaaaaaaaaaaaaaaaaaaaaaaaaaaaaaaaaaaaaaggggggggcctttttaggggtccaagttttccttcccggggttggcaagtttttattttttttttggggcccccaaattaaatttcttggcccgttttttaaaaccgtggggtggggaaaaccctgggggtccccaattttattccttttgaaaaaattccctttttccccggttgggttttttccaaaagggccccccccgtttcccttttccaaaagtttgccccccttaatgggaaatgggacccccccttttacgggccttttaggcgggggggggggggggtttccccccagggggccctttccttttgccggccctttagccccggttttttgggttttttcccttttttttttccccagtttggcggtttttccc

SEQ ID NO: 946 - DNA, 157 bp, Chlorella sorokiniana
  Clone ID: LIB3602-026-Q6-K1-C2
gctggaggcagtagtggagggagaggaccctgatgttgaggatgagcagcaaagcgagcagcagcccagcggcagtgaggagatggaggggccggcggagcaggagtgaaccaggcattggcctatttagatgccgtgtcaaggccacgtgtgaccg

SEQ ID NO: 947 - DNA, 516 bp, Chlorella sorokiniana
  Clone ID: LIB3602-026-Q6-K1-C4
caactatgtgtccacgctgcgcggcatgaccaagggccgcgcgcagtacaccatgcagctggagaagtacgaggtggtgcccaaccacatccaggagaagattgtggcggacgccaagggcaaggtggaggcgtaaaccggctctacttgcaaggcaccaacttgcaagctggaggcctgagcccgcaagaaggcagccggcctgcagcccggcctgccgctcgcctgccccgctgtgttccaccccacgctttgttcgttcgtattctttcctgccgcttatgtgctgtgcttcccccactccccaccgacagcccttccccaaagcatgacgcagcgccggtaactattccctatcgcaccacctgtctcccccctctcaccgccaccgtgcccaattgggcattaccgcatttgattcgcactcccctcggctcgagttttgattgggcggcgccccttcctcagtcccccgcccgccgttggggcgcccacagctgtaacacctcaggtagc

SEQ ID NO: 948 - DNA, 528 bp, Chlorella sorokiniana
  Clone ID: LIB3602-026-Q6-K1-C5
cggacgcgtgggcgagcggggtacacccctaccgactatcccagcgaagcggagtgggcagctcgggtgctggtggagcgctgcgatgcctacaagtgccccactgtggcttaccagctggcgggggccaagaagatccagcaggatctggcgagggccaggggtggggaaccaataccccgcctcccttgccgatgaccagttgttgggccgttttttttgggggacagggggcctgaaggactttgttgaccccacaccaccggtttgggggggcgcgccctttttaaaacacacacaacacattcttaataaaaacaccggaggggggggggaacaacttttactgtgcggcgcttgctgagcggctgaggcagggcggcgccggcctggccgcttacatcctcatgcagcgcatacagccgccacctcagcgcgccatcatggtgcggcgcggccaggcggccgaagctgacacactctctgagctgggcgtgtatagcacgtacgtgcggcgcggcagccagg

SEQ ID NO: 949 - DNA, 324 bp, Chlorella sorokiniana
  Clone ID: LIB3602-026-Q6-K1-C6
tgcacatcaacattggccacctggacgagagcggcgtgtacaccaactcgttctccaccttcgcgctctgcggccaggtccgcgtcaagggcgaggctgacagcgctctggaccatctgtgggccaagaagcgggctgagatcggccagtgaagcgctgctgagttctagccgccagccggctgggctacacagctgccagccggcggtgggccagccagccttgggtcggccagtgatgcgctgcgaagcaaagtgctgagcgggcgggcgctccggcgcgccgccgccagccacgcagtgcaagctgtaacgcgccttcttg

SEQ ID NO: 950 - DNA, 516 bp, Chlorella sorokiniana
  Clone ID: LIB3602-026-Q6-K1-C7
ctgaccattttgcacgcacgccagcatcccccagccgaccgagtgaggctcacaggcagacatggtctggcggtggactctgatcaaggcgctgaggccctaccgacaggccgagttgaagtatttcaagcccaagccggatttctacccgctgctgactgtggtgggcgtggcggcttccactgtggtctactgctcctaccgagccctggcacacaaccccgacgtgcacctgagcaagatccacaagcacgacgagctgagcgagagcgcggagcacatggagcgcgccgaaaagtactggcacagcatcttccgcaaggcgtggcttaaccgggtgcacgacggggacgtggtggacgcccgcatgatgcgcgtctaggcagtcgagacgcgtctaggcctggaggcagccccccgcctctgtgccacaccatgccaatgttaattgaaccccgccaacatacagcaacttcgagcgagccactcacaacaagacggcagcagctggagcgc

SEQ ID NO: 951 - DNA, 89 bp, Chlorella sorokiniana
  Clone ID: LIB3602-026-Q6-K1-C8
aacgaaaacacagaaaaaaaaaaaccacaaactataaagaaaaaaagaataagaagatacaaaacaaacaatagaacactagacaaaac

SEQ ID NO: 952 - DNA, 518 bp, Chlorella sorokiniana
  Clone ID: LIB3602-026-Q6-K1-C9
cgccaacgcaggcctggcggtggcccgcgacctgctggagccggtgaagcaaaagttcccctggatctcctactccgacctgtggaccctggcgggcgccaccgccatcgaggccatgggcggcccccacatcccctggcgccccggccgctccgactacgctcccgagcagtttgtggcgctgcccgacggccgcctgcccgacggagacaaggacgccaagcacatccgagacatcttctaccggatgggcttcaacgaccaggagattacggcactgatgggcgcgcacacgctgggccgctgccactccgaccgctccgggttcctgggggccctggaccaacgcccccaccaccttctccaacctgtactttgtggagctgaccgagaacaagtggcacaagaagaagtggaaggggcccctgcagtacgaggacaagagtggccagctgatgatgctcaacacggacatgtggatgctctgggacaagaagttcaagccctacacgctggag

SEQ ID NO: 953 - DNA, 519 bp, Chlorella sorokiniana
  Clone ID: LIB3602-026-Q6-K1-D1
gcggtgggaggaggtgaaaggagagccgcagcaggcgcaggcggtgctgtcgtggggcggcccccctgtgcgggccaccttcacattcgaccgctggggtcgcgtggcgcgctgcagctcccacgacttcttgcggcgcctgccggacggcagctttgagcagggggaatggcaggtggcgtactcgggccacatgctgtttgggctcagcccgcagggccccgtcatgcaagaggagattgccacacacgccggcgtgtttgtgcccacaaatgtggaggcagcctgggtcatgccagacagcagccgctgggtgtatgcacagatgacggtcaacaagggtgactgccagcatttgatctgcatttcgaggcgctgtgcagcgggcgggctgctcgaccgccgtgtccacgcccttccagccacgcagcggcttgcagcacacagctgcttgcgtaagcgagggtttcaggtgccggctggccagctagggggcaggcgtgccccctgttcgcaatc

SEQ ID NO: 954 - DNA, 409 bp, Chlorella sorokiniana
  Clone ID: LIB3602-026-Q6-K1-D11
ggggggaaaggaaaaaaaaaggggggtgcccccaaaatttgggggggggcaggggggggaaaagggggttgcaaaaaaatgcccgggggaccaaaaaaatgggggggccccaacccggaaggggggggaaggggccccaatttgaattcagggggggggggggtttgggggtttaaaaaaagggtgccaattgccccccccggggccggttgggggtgggccccttaacccggttggaaagggcccgggtggacggcactaaacgtaccgaccatggtgtaatgctaccctgcccggggtcccaagggcgggaacccgaaggccaacgtttttggttggttggcaaccgggggtgcaaggagggggggcgtccaaacttaattggggggggggcccatggggttgaggg

SEQ ID NO: 955 - DNA, 524 bp, Chlorella sorokiniana
  Clone ID: LIB3602-026-Q6-K1-D12
cccacgcgtccggcgacctgctggaccgcgcgcggcggctgaaggacgagaagtatcccgacatgccggtggaccagttcctgcgcgatgtgcttggctacaacgagcccgaggaggcgccgccgcggccgggcgcgcggcgcatcatccgctggcagatccggcacgtgtattcggtgggtgtgacggcgcgccaccccgccaaccgccgcgtcaaggcatgggtgtaccttcgggacctgcaggagcagtacggcttgacagacgcggcgctgcagcacattgccgcggtgtgcggcccgcggtacaaccccaacaagggcgagctcaagctgaccagcgaccggtatgaccaccgcgaggccaaccgcgcacacatccgccagatgattgatgatctggttgcggaggggcaccgcaagcacccagccccgcagcagcaggcggcgcagcagcagcaggcggcgcagcaggcggcatcgcagcagcagcagacggcagcatagggcagggatgagacggca

SEQ ID NO: 956 - DNA, 227 bp, Chlorella sorokiniana
  Clone ID: LIB3602-026-Q6-K1-D2
aaaaaaaaaaaaaaaaaaaaaaaaaaaaaaaaaaaaaaaaaaaaaaaaaaaaaaaaaaaaaaaaaaaaaaaaaaaaaaaaaaaaaaaaaaaaaaaaaaaaaaaaaaaaaaaaaaaaaaaaaaaaaaaaaaaaaaaaaaaaaaaaaaaaaaaaaaagggggggggcgtttttaggggtccaattttttttccccgtttttggcacgttttttttttttttttggggcc

SEQ ID NO: 957 - DNA, 522 bp, Chlorella sorokiniana
  Clone ID: LIB3602-026-Q6-K1-D3
gcctgacatcccatccagcagctttccagccactcggcacttgcccccagcccaacacacagctgcaaccatggtgatggcatccttctccaaggtcatgtccgtgatcggccccgtggctgcggtgagcgccggcctgtactacattcagcgcggcatctggcccctgggccgcaccctgaacaacgagtggtttgcggccagcgagagcctgatgagcgccatgccccgccagggcagcgccacgccggtgcgcatgaaccccatgtcggagaagatcaacatgaagagcgtcacgtactgagcgcctcgctggcagcccccatggtctgaggccggcccgctggcagcggcaggggcctgaggccccacaccccgcagccgcgtgcgcctcggctgggcgggccagaatcgctgcccctcttactacactgagttttcgactcaaatttatgtcctatgcactcacccctttggttaaccctgtagcgcttgcctcgcacccccgcccgccggggaagc

SEQ ID NO: 958 - DNA, 61 bp, Chlorella sorokiniana
  Clone ID: LIB3602-026-Q6-K1-D4
aaaaaaaaaaaaaaaaaaaaaaaaaaaaaaaaaaaaaaaaaaaaaaaaaaaaaaaaaaaaa

SEQ ID NO: 959 - DNA, 526 bp, Chlorella sorokiniana
  Clone ID: LIB3602-026-Q6-K1-D5
gtccacctccctgctgggcctggacgagcagaccaaggcgctgctcacggcgggcatcctgctggtgggcgtgattggcacggtggtgggcacgcaggtgctggtggacaccatggcggcgcgcctcaaggccggcgcctccaagctggccaccctgggcgccttctgggtcgctgtcttcctggccgccaagtttgtgctcgagtcgtgagcgcacacaggcgtgcaagcaccaagcatgcaagcacgcacgctcaagtaggcgtgcaagttgccggcgccgccgcggcgccgcgccgccctctcccggttttgttggggcgccgccgccccccgttctctctgacgcaatgaatatgccgctgtcacctgatttcatcctctcacgccgccccactgagaagaaccctctctctgtacccgcgcgccagccccacagcccgcccacagggaccggggcggcggcacccatccccttaatttcgtagacccccacattgctatgctccttacggccccccaaacc

SEQ ID NO: 960 - DNA, 345 bp, Chlorella sorokiniana
  Clone ID: LIB3602-026-Q6-K1-D6
gctgaagcctgtggctgcgccgcatcaggcgcagcaggctgcgccatgccaggaagagcagcagcaacagcagcagcaggaacaggagcagcagcagcagagcggatcaaaggaggagaggagcagcctgagagcgtggggcagcagcagagcgaggagcagcagagcggcgagcagcagagcggcgagcagcaggacgaggacgaggacttgtgatgcatttgtgagccacaggctgcaagactgcgatgagaaaaaaaaaaaaaaaaaaaaaaaaaaaaaaaaaaaggcgcccggcctaaaggatgccgggcttcctaccgagtcccatgcccacgggcctag

SEQ ID NO: 961 - DNA, 63 bp, Chlorella sorokiniana
  Clone ID: LIB3602-026-Q6-K1-D7
aaaaaaaaaaaaaaaaaaaaaaaaaaaaaaaaaaaaaaaaaaaaaaaaaaaaaaaaaaaaaaa

SEQ ID NO: 962 - DNA, 92 bp, Chlorella sorokiniana
  Clone ID: LIB3602-026-Q6-K1-D8
aacaaaaacacaaaaaagaaaaaacccaaaactataaaaaaaaaaagaataaaatgaagaaaaacaaacaatagaacacagaaaaaaacaag

SEQ ID NO: 963 - DNA, 519 bp, Chlorella sorokiniana
  Clone ID: LIB3602-026-Q6-K1-D9
ggctaacggtggaaaggaggagcagtgggcaggctgcgacgtgtcgaggttgtgtggcgcctcggctgcggccgcccatgcctgcaccgtgcgcgtgtcagcttgtcaactatttagtgtcgcttcacccctgctctcaccccaccaccctgcctccctgccgcagtcaccaagtactgcacgcaccactgcaagcagccgctggtcgtgctccactgatggcagcccagcctgctgtagcacatgtgcgcctgctgtcaaccgccccacgtgcctgccgacactgcaagcccggccccgcggactgctccgccggccagctgtagtgccgacgttgttggccgcgtccccctatattgtatgcccacccatggactgccgcctcttggatgccacgtcataaacaacccatgcgccctctcccctcagcactgccaggttttccctgtcgccctccttgctttcccctccctactgccgcccgttcaggcatgcacaggtcaccccatcgcatgacaa

SEQ ID NO: 964 - DNA, 519 bp, Chlorella sorokiniana
  Clone ID: LIB3602-026-Q6-K1-E1
cccacgcgtccgttttttttttttttttttttttttttttttttttttttttttttttttttttttttttttttttttttttttttttttttttttttttttttttaacccacccggccgaaattggccctggggggaaccggggaagggggccggggaaaaaaagggggggcaaaaggaacggggggggttggagggggggcaaaaaacgggaaacccaagttggggggcatagggcccccccggccatgaccacccccggttttgggggggggggcttttatgcccaccgggcggccccggggaaaggggcccctttaaaaaaaaaaaaaaaaaaaaagggggggggcgttaaaaaggaccaaagtttacgagcgggggcaggaaaaaaaaaaccttttttttggggcccccaaaattaaattcacgggccgggggttaaaaaagggggggggggaaaaacccgggggcccccaaaaaaaagggcctggaaaaaaaaccccctttcgcaaggggggg

SEQ ID NO: 965 - DNA, 243 bp, Chlorella sorokiniana
  Clone ID: LIB3602-026-Q6-K1-E10
ccctctttttttttttttttttttttttttttttttttttttttttttttttttttgttggggaaacggggacagaaagggggggagggggacagtaagggacaggaaagtaaaaaaatggggagaaagaaattagttaaaaggtgtaaaaattaaaaaaaagatggggaaaccaagcaaaaaacgatgtccaagcaaggccactaccagccaggtcgaaacgctgcacccgaaccgcaggcc

SEQ ID NO: 966 - DNA, 523 bp, Chlorella sorokiniana
  Clone ID: LIB3602-026-Q6-K1-E11
gcacttgtgctctctgaagacaacctcaacgggctgccgcacccgctgcccagcctgacaaacctgcgcagcctggtggtggacaacaaccgctttgggatggaggcaggagtgctggccgaagacaacacatccctgggcttgtccctgcttccacagcttacgcagctggaggagctcaacttgtcgagctgcatgctacgtggcgctcctcgcgagctctcggccctgcgccagctacgcatcctgtacctgcatggcattgcgtacggtgaagagcccatggcacctcaagactttgagccgctgcgcgcctgcaccgccctggcgttcctctccatttccagcaacctactcagagagctgccgcccgctgtggccgacatgccgcacctgcaggcgctgcactgcgaagagaacaacttcgcggccctgcccgtggcgccttacctcacaaaccttcgcgaactgctggtggattggcgcacactgctggccagcccgggcttcctggggtctgcca

SEQ ID NO: 967 - DNA, 524 bp, Chlorella sorokiniana
  Clone ID: LIB3602-026-Q6-K1-E12
gggctgcgtcgtgcccgagctgctggacggcaccaaccacattgcctggttcaaggccggcgccgagatcttcggcgacgacggcatccagtacctgggcatccccggcctgatcaacgccaagtccatcgtggcgaccctgatcgtgcaggtggtgctcatgtcgtatgttgagggctaccgcgtcaacggcggcccggccggcaccggcctggacgctgtctaccccggcggcaacttcgaccccctgggcctggctgacgaccccgacaccctggctgagctgaaggtgaaggagatcaagaacggccgccttgccatgctgtccatgttcggcttcttcatccaggccatcgtgaccggcgagggccccatcaagaacctgaacgaccacctggctgacgcctcggctaacaacttctacgccctgtacgccaagaacctggcgtaagcacttgtcgtacgaacgtacgaggcccgcgcgcgattgtgcgccccttgagaagatcacacgaccctgtcgc

SEQ ID NO: 968 - DNA, 421 bp, Chlorella sorokiniana
  Clone ID: LIB3602-026-Q6-K1-E2
tccagggagcagccagctcacctggcttgctgcgctgcggccgtcggcctgccacagccctgacgcccaggggctttcatgttgcctccgctgtgcatccaacataggacacacgcggcgccacaggcaatagataatgcccgcaacactccaagcaggcatgccacaagtaacctacccgtgcccactttctgcgttcacccaccttttcacccctgttgtacctttgcccccgtcctttgcaccccgcctatgactttgaacaaacgcaacgactctgcacctgtccccgcctttgcaaaacgaacgacgccaacctactccaaagccttgtggtcccccccttctctgcccgagcttttccccctgttgcttcacacctcagtttgctgccagcagccttctgtcacattgatccaat

SEQ ID NO: 969 - DNA, 530 bp, Chlorella sorokiniana
  Clone ID: LIB3602-026-Q6-K1-E3
aaaaaaaaaaaaaaaaaaaaaaaaaaaaaaaaaaaaaaaaaaaaaaaaaaaaaaaaaaaaaaaaaaaaaaaaaaaaaaaaaaaaaaaaaaaaaaaaaaaaaaaaaaaaaaaaaaaaaaaaaaaaaaaaaaaaaaaaaaaaaaaaagggggggggcctttttaggggatcaagttttctttccgggtttttgggacgtttttttttttttttggggccccaaaattaaatttcctgggccgggttttaaaaccttggggatgggaaaaccttggggtttcccaattttattggtttggcaaaaattcccttttttcccagttgggtatataacaaaaagggccgaaccgattcccttttccaaaagtttgccaaccttaatgggaaaggggacccccctttttaggggcctttaaagggggggggggggggggtttcccccaaggggaccctttaattttgcaggggccttaggcccggttttttgggttttttcccttttttttttgccccttttgggggtttttcccgg

SEQ ID NO: 970 - DNA, 528 bp, Chlorella sorokiniana
  Clone ID: LIB3602-026-Q6-K1-E4
gcggccgggaggcaactcccgggccgccccagcagcagcagcacggctggcagcagcgcgagagcgcgattggcgcccgccagtgcggcggcgctgggctgccaagccgccacacgcacagctgctccacgttgcatcgaggcgacattggcagcaattctaggcttgtaaaagcacgaaaataaaaaaaaaaaaaaaaaaaaaaaaaaaaaaaaaaaaaaaaaaaaaaaagaagataaaaaaaaaggaaccaaaaaaaaaaaagaaaaaaaaaaaaaaaaaaaaaaaacaaaagggggggccctttttaaaggatccaactcttttttacccgggctggcgacttaaaaattcttttttggggcccctaaaattaatttcccgggccgccgttttaaaaggtgggggtgggaaaaacctgggggtccccaaactaaattccttgcaaacaaatcccctttttgcaaggtggcttaaacccaaaaaggcccgccccattggcctttccaaacgtggggccaccctgaa

SEQ ID NO: 971 - DNA, 535 bp, Chlorella sorokiniana
  unsure (1)..(535): unsure at all n locations; Clone ID: LIB3602-026-Q6-K1-E5
aaaaaaaaaaaaaaaaaaaaaaaaaaaaaaaaaaaaaaaaaaaaaaaaaaaaaaaaaaaaaaaaaaaaaaaaaaaaaaaaaaaaaaaaaaaaaaaaaaaaaaaaaaaaaaaaaaaaaaaaaaaaaaaaaaaaaaaaaaaaaaaaaataaaaaaaaaaaataagggggggggctttttaggggccccaatttttttttggggggtttggggaatttttttttttttttgggggcccctaaatttatttttggggggggttttttacctgggtgggtttgggaaaacctgggggttccccaattttatgccttttgaaaaaatttccttttttcccgggggggttattaaaaaaggggcccccccctgttcttttttcaaaattttgccccttttttgggggaaatgggcccccccttttttggggtttttaaacgggggtgggtggggtgttcccccccgtttgcccgtttttttttgcaggctttttggggcttgttttttnntttttttccttttttttttttccagtttgggg

SEQ ID NO: 972 - DNA, 494 bp, Chlorella sorokiniana
  Clone ID: LIB3602-026-Q6-K1-E6
cccacgcgtccggcagccgcagagctacaaggacagcgtgctgctgcccgaggtgaaggcccgcgtgtctgtggaggccggcagcacatacggctggcagaagtgggtgggcgacaagggcaagtccatcggcattgacgagttcggcgcctccgcccccggccccctgctgtacgagaagtacggcatcaccgtggacgccgtggtggacgccgccaagcagtcgatggccgcgtaagcagccatccggcagccgcagcagcgccgcctccccggcggcccaccgttgagtcgtgccaaccgcccgccagcccccccgcgcggtgcggacgcccctcgtcgaattattttttgccgcattgctcccttccgccgcccctggatggctttcctgctcccctctgtctcgtcggttcctcaggcctcggggcgcattttgtccgatgccgggcccctcttgcaccgcatttcatcttgtgaacacaccggactac

SEQ ID NO: 973 - DNA, 398 bp, Chlorella sorokiniana
  Clone ID: LIB3602-026-Q6-K1-E8
cgggggggcttgaaacaataatggggttccagggcaataccgcccgcgggtgggctaacgatggaaaattacgtattcaaccatgggagccagacgctcttcattttggcgcgcgggcgttataaaggaaccaagtttatacaccggtgcaagtgaaaaaatactttttttattggagcacataaatttaattgaatggccgcctttttacaactggcggaatgggaaaaaacggtgggatccccaacttaatccaattggagcacaaccccctttgccaaagggacgaaaaatgaaaaagggcattaaccgtggcctttttcaaaatttggccaatcttaatgggtaaagggacccgccctgtaacgccccattaaaccgggggggtggggtggtta

SEQ ID NO: 974 - DNA, 511 bp, Chlorella sorokiniana
  Clone ID: LIB3602-026-Q6-K1-E9
aaaaaaaaaaaaaaaaaaaaaaaaaaaaaaaaaaaaaaaaaaaaaaaaaaaaaaaaaaaaaaaaaaaaaaaaagaattttttttgtgggggggggggttttaaaggttttaaattttcgtgggcgggcttgtgagtatttatttttttttttgtgtgcttgttttttttttttgggggtggttttccacggctttgcttgggggacccttgtttttccccctttttttgggtttgcgctttttccccttttttttgggtggggtgttagggaaggggctttttttgttttcttttttaaccattggggccccctggttggggatttgggcccccctttttttgggggtttttttggggggggtggtgttgttttcccccttagggtccgtttttttttggggcccctttttgcgggttttttttttttttttccttttttttttcgcgcctttggcgggttttctctgcttggttttatatgtgggggtcttttttggggggctttttatt

SEQ ID NO: 975 - DNA, 69 bp, Chlorella sorokiniana
  Clone ID: LIB3602-026-Q6-K1-F1
cccacgcgtccgaaaaaaaaaaaaaaaaaaaaaaaaaaaaaaaaaaaaaaaaaggacggacgataataa

SEQ ID NO: 976 - DNA, 524 bp, Chlorella sorokiniana
  Clone ID: LIB3602-026-Q6-K1-F10
gcggcgcccgctgcactgccgctcgagattttggcacagggagaattcgagccgctgtatcgctccactctggacgtgcgcagcggagagctgccggtgctgccgctcagcatttatggcgcagtggcgatggcacacctgccagacagctctgccggctacgtgagcggcctgaacttcttcatctacaaattcgaccggcagcaagcgggcctggcggggctcagcttcgacgagggcgagtttggcgtgtgcggctacattgtgcagggcctggatgcggtcagcaagctggagagcggggaccgaatcgtggcagcaaaagtggtctccggactggacaagctgactgccacatgacgcagcagccgcagcggatactagctggggcctccgcagcaacactccgaccgtgcaactgcatttttgtcaatgctgtggggctaactgtcttgtgcgcatgccactgtgttagcatgagccgctcccagacttgccgctggctttctttcttgttgcatgaa

SEQ ID NO: 977 - DNA, 415 bp, Chlorella sorokiniana
  Clone ID: LIB3602-026-Q6-K1-F11
aaaaaaaaaaaaaaaaaaaaaaaaaaaaaaaaaaaaaaaaaaaaaaaaaaaaaaaaaaaaaaaaaaaaaaaaaaaaaaaaaaaaaaaaaaaaaaaaaagggggggggggcctttgggccccaagctcccccgcccgggtgcgggttggcgtaactgttctaaaccgggccccccattcaatgcagtggggggcgtttaccggggccctgtttgtttaccctatgggcaccttttttggggtcggggggctaatccgcccgtttcccctggatagggtcacggacaatttgactgcgccggtcttccttgccatcactttcacaatttgaatgggaactggcacccaccttgccccaagggatcgatccctgggcccgggttttttccgcccccccaaaccttttttgttgcaaaa

SEQ ID NO: 978 - DNA, 526 bp, Chlorella sorokiniana
  Clone ID: LIB3602-026-Q6-K1-F12
cccctctttttttttttttttttttttttttttttttttttttttttttttttttttttttttttttttttttttttttttgggaaaccgggcttacaaaattgctcccccgggcaggggcgggggccaattttgaaaagctttggcggggggggatctagcgggggggggctgggccctacccagggggccataaacagggggggcaggaaaagccgcggcaagagggcgaccccggccggggcaaaaaaaaaaccccgggaaaggggggcaaaggccccaatgacccccccgggaaaagccaaccgctcccaattggagggggggccccggggaccttcgttgggcgggggcccccccccctcacgaggcacaaaaatcactggtgcagcgcaggggccctgtcacacagggggatgattggggggtgccatttaggccccatggaacggggcaattgcgtcatgccccccccgcgggggtagcggcctaccggcccaggggtttaacaaccacaggatcgggg

SEQ ID NO: 979 - DNA, 55 bp, Chlorella sorokiniana
  Clone ID: LIB3602-026-Q6-K1-F2
aaaaaaaaaaaaaaaaaaaaaaaaaaaaaaaaaaaaaaaaaaaaaaaaaaaaaaa

SEQ ID NO: 980 - DNA, 376 bp, Chlorella sorokiniana
  Clone ID: LIB3602-026-Q6-K1-F3
aaaaaaaaaaaaaaaaaaaaaaaaaaaaaaaaaaaaaaggaaaaaagaaaaaaaagaaaaaaaaatggccgacgggtatatgggggcgggcgttctttcggttccaatcttacgtcctagttcttgggacgggatacctaatttatagtgactggtaaatccattacattgcccggcttgttacaccggtgggactgccaaatttatgcggttggcaaaataactccctttgccgaactggcctcttttcccagcgggcgtaatagctaaaaggcccaagcggttcgcccttctgaatggtattaggcactgactgtgtaatggtacatcacactgtggcgggttataatgctccgcgcattgggaccttatcctt

SEQ ID NO: 981 - DNA, 535 bp, Chlorella sorokiniana
  Clone ID: LIB3602-026-Q6-K1-F4
aaaaaaaaaaaaaaaaaaaaaaaaaaaaaaaaaaaaaaaaaaaaaaataaaaaaaaaaaaaaaaaaaaaaacaagaaaaaagaaaaaaaaaaaaataatataaaagaaaaaaaaaaaaaatataatgtgaggaaaatttaaaaaaaaaaaaagggggggggcgtttttggggtccccattttttttcccgggggttggtatcccttttttttttttttggggcccttaatttgatttccggggggggggtttttccacggtgtggtggggaaaatctggggtttgcccaatttttttgttttggcatatttccccttttttgcggtgtgggtacacgcaggggggcccacacttttcgccttttcaaagggggggcccctttgtgtgggcaatgggctctccctttttgggggctttttacccgggggggtgtgggggttcccccccctttacgggtttcctttggagggctcttgggccccggccttttaatttttttcctttttttttgggccccgtttggcgggttttcccc

SEQ ID NO: 982 - DNA, 528 bp, Chlorella sorokiniana
  Clone ID: LIB3602-026-Q6-K1-F5
gcggtgtggagcgccgccaggctgtggatgtgatgccgttgcgccgcgtgaaccagtccatgtggctgatcaccaccggggcgcgcgagagcgcgttacgcaacatcaagaccattgcggagtgcctggcggacgagctgatcaacgcggccaagggcagatccaacagctactgccattaagaagaaggactagatcgagcgcgtggccaaagctcaaccggcaaacggctgatgagcacccaccaaaacagcagcccagcacagccggtacccgtgggcaggatgccagaccggcagtgcagtagcacggtgtgggtcagctgatgctatcgaggcaagctgtccaattatgcgcggctgttaggattgggtctcacagcgcccctactggaccatgtggaagctgcccatgttcggctgcaccgatggcggccaggtgctgcgcgaggtgcaggcgtgccgacgcgccttccctgacggctgcctcctctaggggatctatgatcccgtgcgccacgtgcaagtg

SEQ ID NO: 983 - DNA, 370 bp, Chlorella sorokiniana
  Clone ID: LIB3602-026-Q6-K1-F6
ggtaaagtctcaccatgggcaagtgcggcaagggcacgggcagctttggcctgcgccacaccaagacgcacacgctgtgccgccgctgcggccgccgctccttccacatccagaagagcacctgcggctcgtgcggctaccccgcggccaagatccggaagtacaactggagcgtgaaggccatcggccgcaagaccaccggcaccggccgcatgcgccacctgaagaacgtgcagcgccgcttccgcaacggcttccgcgagggctctgctgccaagaagatcgctgcctaaacagctggtgtctgcagctacgcggcagcacgttgagccagctgtgtagcaggatgtaacaccgcgacacatattat

SEQ ID NO: 984 - DNA, 306 bp, Chlorella sorokiniana
  Clone ID: LIB3602-026-Q6-K1-F7
gctgagcccttgctggccgcacctgaggcaggcagccattgctgactgccggggggcaccgggccgccacccgctgcccggcagcatgggcgaggcggcgtgagaaagagaggacttgtgcactgccacacagttttttggacacctgtgctgtaacatatacttgaggaaaaaaaaaaaaaaaaaaaaaaaaaaaaaaaaaaaaaaaaaaaaaaaaaaaaaaaaaaaaaaaaaaaaaaaaaaaataaaaaaaaaaataaaaaaaaataaataaaaataaaatgaacgtaaatttacaaacgtaaa

SEQ ID NO: 985 - DNA, 519 bp, Chlorella sorokiniana
  Clone ID: LIB3602-026-Q6-K1-F8
ctactacgagatcctcaactcgccagagcgcgcgtgccacctggccaagcaggcgtttgacgaggcgattgctgagctggacacgctgggcgaggagagctacaaggacagcacgctcatcatgcagctgctgcgcgacaacctcacgctctggacctccgacatgcaggacgccgagcagggccgggaggcgggcggcgagggcgagatgaaggaccaggagtaagggcggcccccgcacggtgcgccctcatgggctcaccgccgctgtcggccgcagctgcacagccccgcaccgccggcgcggcccgccatcccgctgcgcgggcgcgcggagggaatgccttcccacaccacgacaacacttgagtcacgcaatgtacagcggcggccggtctggcggcgaggcagctccagctgacatgccgctccgctcgttgcatgcttgctcccctctctcagcagctgcagttcctgcctgacgctgcctaggttacactgctcccttgctttctggat

SEQ ID NO: 986 - DNA, 535 bp, Chlorella sorokiniana
  Clone ID: LIB3602-026-Q6-K1-F9
gaaaaatgagaaaacaaagtaaaaaaagcgagcgggacaacttaacaaacaagagatagaaaaaagcgagggaaaataaaaaacaagatgagagaaaaaaaaaaaaaaagacggcacaatttttcccgcaaatattgcgcgtcaacactctcgctatggaccattgacagggagaaaaacacccaaagacaaaaaggaaaacggacgggatatttatgaaaaaccaaaagtgaggacgtttacccgcacccgaaattaaaaaaaaatcaccccttgtataaaaacggaggtgaaaaaaaaaaaccccacatgagcggccccgacaaaaaaataaaaaaagggggggccgtttttagggttcccacttttcgtccccgctgttggcacgcaaaagatcttttttttggggcccttaaattaaaatacctggcgctgatttaaacactgcggtagtgggaaaacccttgggttctcccaattaatgccgttggagaaaaacccttttttcgcaacgggggttaatagaaaaagggcc

SEQ ID NO: 987 - DNA, 520 bp, Chlorella sorokiniana
  Clone ID: LIB3602-026-Q6-K1-G1
gtgctgcattttttcgcacaagaggggcgtgaggacactttccccatcagtatcgacgctgatgacaccttcgctgtatcggttgtttactcaactagccagatcacctgatccctccctcgcacacgcgtattgtgtgagcttgctgctgccttgctatcacacatgtgcatgccccgccgtcgccgccgcccgcctggcctgcctgcaagcaacatgcactgtgcgcaagcttggtcgatgatgacacaacatagatgacgagtcagacacacaccatgttgacatgatttggcatttgtcgtagaccgcttgtttctttgtttgttgctcattgggacacactcggcaggtcaggtggcttgccgttcatcccgcccgctcaccccgcctgctctcctgcactcggtcgccttgcaggaacccatcaaacgcctgctggctggccagcagctggagcacctcggaggcagagacaaagagaagttggatacagcgagaagcagagcagcagggactt

SEQ ID NO: 988 - DNA, 528 bp, Chlorella sorokiniana
  unsure (1)..(528): unsure at all n locations; Clone ID: LIB3602-026-Q6-K1-G10
gttgcctactcgtccgctgcgctggcaggcgtgctgggggcgctgtgcctgtggcgcggcttccgcaacaacgatgacgatgccaaggagctgtgagcttcaacacaatttctgacaccttttgtgtttgatgcgttgcacaactgatgggaacaatgagcaggacgcccaggcatgtggagacgggggctaaagggcagttgggggatgccgagctgcagcaggaggcagctggcggacagcaaacagcctgactctgaatgatttttgtgcacagcagggacgaggcgcttgtgcatcgccctgccctggcacacgctcctgacgcccttttggctttgatccgttgcatagcgcaaattcgactagcgttgctgtactgtaatcgtatggacacanaaaaaaaaaaaaaaaaaaaaaaaaaaaaaaaaaaaaaaaaaaaaaaaaaaaaaaaaaaaaaaaaaaaaaaaaaaaaaaaaaaaaaaaaaaaaaaaaaaaaaaaaaaaaaaaggggggggccgttttaaa

SEQ ID NO: 989 - DNA, 523 bp, Chlorella sorokiniana
  Clone ID: LIB3602-026-Q6-K1-G11
ccttcgcccgctaccgcgagctggaggtgatccacgcccgctgggccatgctcggcgccctgggctgcgtgacccccgagctgctgcagcgcaacggcgtcgccaacttcggcgaggctgtgtggttcaaggctggcgcccagatcttccaggagggcggccttgactacctgggcaacccctccctgatccacgctcagtccatcgtggccatcctgctgacccagctggtgctcatgggcctgattgagggctaccgcgtcaacggcggcccggccggcgagggcctggatgccctgtaccccggtgaggccttcgaccccctgggcctggctgacgaccccgacaccttcgctgagctgaaggttaaggagctgaagaacggccgcctggccatggtgtccatgctcggcttcggcgtgcagggcctgatcacccgcaagggccccattgagaacctggctgaccacctggcggcccccgacgccaccaacttctgggtggactacgcccccaagtccgc

SEQ ID NO: 990 - DNA, 222 bp, Chlorella sorokiniana
  Clone ID: LIB3602-026-Q6-K1-G2
gcgggcgtgattgtcaacaccaagggcgagatgaagggctccgcgatcaccggccccgtggccaaggagtgcgccgacctctggccccgtgtggcggcagcagccaacaccattgtgtagagcggcggccgtccggctgggcgtcgcggcagcgcggaccacactgcagtacccaccgcctgccgcgctcccggcgcagcatgctgtaatgcacatccagcg

SEQ ID NO: 991 - DNA, 524 bp, Chlorella sorokiniana
  Clone ID: LIB3602-026-Q6-K1-G3
catgcagctgtacatgcgcatcgcgcccgagctctacctcaagatgctggtggtgggcggcctggaccgcgtgtacgagatcggcaagcagttccgcaatgagggcattgacctgacccacaaccccgagttcacgacctgcgagttctaccaggcgtacgcggactataatgacctgatccgcatgaccgaggagatgatcagcgggctggtgctggccatcaaggggtcctacaagatcacctaccaccctgatggacccgagggccgggcggtggacattgacttcacgccgcccttccgccgcatctcgatgtgcgcgggcctggaggaggctctcaacgtgaagctgcccgccgacctggacagcgaggaagcgcgcctcttcctggtcgacctgtgcaagaagcacaacgtggactgcagcccgccgcagacgaccgcccgcctgctggacaagctggtgggagagttcattgagagccagtgcgtcaaccccaccttcatttgcgaccacccccaga

SEQ ID NO: 992 - DNA, 537 bp, Chlorella sorokiniana
  Clone ID: LIB3602-026-Q6-K1-G4
gtacgccaagaccctggcgtaagcggcctgcacttgctcctgcttgagcctcgactggcggcgggcgtgaccctgtggcagtgcgctcccgcttgcgcccgctgcctgacttgacttcagctccactgttgcaccgaggggatggtgtaacatgtatgctggggaaaaaaaaaaaaaaaaaaaaaaaaaaaaaaaaaaaaaaaaaaaaaaaaaaaaaaaaaaaaaaaaaaaaaaaaaaaggaaaaaaaaaaaaaaaaaaaaaaaaaaaaaaaacgcgaaaaaacaaaaagggggggccgttttaaagaaccaatatttccaaccccgggccgggaagtaaaaaatttttttattgggaacacaatgaaattacccggccgggggttttaaaacaacatgccggtaaaacccgtgggtttaccaaaaaaaaagccttgaaaaaaaaaccctttttaaccagttggggaaaataaaaaaaaagcgggacccaatctgttttccaaaaataaccccacctgaatgggagattacaccccc

SEQ ID NO: 993 - DNA, 308 bp, Chlorella sorokiniana
  Clone ID: LIB3602-026-Q6-K1-G5
cggacgcgtgggcaagctcatgaccctggacctgcccgccggcgtggatgtggaggtcaagctctgagcggagtgatgcatgtttgagcgcggggagcacagcacaatgcagccacccccggcaacatgacgcacagcgggcgggatcagcgggcttgctgcggctcggtaccacaatgcacatggcggcgcccgcctgccccgcccaccctccctttcctttcctagtttcagctgccttctgctagtttctcgggctgcattcacgcccaatgcccttcacgcacctctgtaaactgcccattcgc

SEQ ID NO: 994 - DNA, 528 bp, Chlorella sorokiniana
  Clone ID: LIB3602-026-Q6-K1-G6
atcgtgactggggaggacaccgccgcccagctggacgcgctgctgaagcacaacggcggcggggccgctccggagcttagcagcgatgatgcatgggacctgccccgctcccacacgcagcgcctggtggcgcctgtcaccggcctggtgggctgagcaatgagctgtcctgaaaaatctgtcgctggcctgttgggctgaccggctgaacaggggagcggctgagcgatcagctggcccctgcagagctgcaaagattggccgggtcggagcggcgtgccggcgctttgccagggcaccctgttgcgaccttgctaattgtgatggtcaaatgttggcctgcaggcagctgccttccaacacccccagtgttatattatctaactagtacccgccactgagcattttgtgtgccaacctcagcggattgcagtaagtgcatgcgtatttaagcaaccctccttacaacgcctgataccattgccgtccatgccctgctgcgtgtgcattgccattttgccattacgg

SEQ ID NO: 995 - DNA, 521 bp, Chlorella sorokiniana
  Clone ID: LIB3602-026-Q6-K1-G7
gccggaggcagcggatagcgatgatgatggggcggggcgggacgagcacgtacgccagctggtgcagcagtacaaggcagcggcggcgcatggcgaggagcctagtgaagaggagctgccgggctcgctggtggatgagctagaggagcgggtgtcgccggagcagcgccactttgccgccttccaggcgcgggtgggcaaggagccgtcgcagtgcctgcggtactgctttgacgccgccgcccgccccctgtggcccagctgcaagcgcatccccgcagcaggcgacatcccgccgtgcgagcactgcggcgcgccccgcaagtttgagtttcaggtcatgccgcagctgattgtgcacctgggcgtgcccgccgacgacccctccgcccctgactggggcaccattgccgtctactcctgctcagcctcctgctccagtggggtgacgcctggggccagcccgcccgatgagtcggcatatctggaggagtttgtgtgggtgcaggggccggtgtgag

SEQ ID NO: 996 - DNA, 521 bp, Chlorella sorokiniana
  unsure (1)..(521): unsure at all n locations; Clone ID: LIB3602-026-Q6-K1-G8
ggcgcagggagtggagttgccgccgcaaccgaccgtggccagcgaggcgactgaggctgctgcaccgtccagcacgccgtcggcggccagcagccgccgcggctcggcgcggctggccaggcagggatcaatggcatcggtggcctcctcagcaggtggtcgtgccaagcagagccgaggcccctctcgggcggccaaggaggcagcaacgtgacggggagggtccaagcatcgctggcggcagcggcagcagcagcggcggcggcagggctgggatgtgcgcttgcgaatgctcccagaacagggatgtgcttctgtcacaagtctctagtgtaacagcgcaccacgcanaanaaaaaaaaaaaaaaaaaaaaaaaaaaaaaaaaaaaaaaaaaaaaaaaaaaaaaaaaaaaaaaaaaaaaaaaaaaaaaaaaaggggcggccgttttaaaagaaccaaaagtggcgcccgcttaaaaggaaccaattattcttcctgtggggtccccaaaattaatttt

SEQ ID NO: 997 - DNA, 523 bp, Chlorella sorokiniana
  Clone ID: LIB3602-026-Q6-K1-G9
cgcccctgctgcaggcaagcagctcaactacctgaccggggtggtggtcaagcccgtgaaggagcctgtgcagtgggtgggcaaggcggctgagaccaccagcagcacggtgagcaccgtgagcggcacggtgcagagcgtgaccaccaccagcatccgcaaggttgtggacgacatcaagacgctggcaaacgcgctcaaccccaccatcacccaagtgcgcgagcgcctgggcctggagtttagcagcagctcggcaggcggcaagaagctggcggcagcggtggcaggcggcaccaacggcaatgcgccagtgtcgcgggcagccgtggtggcggcacaggccgaggcggcggcacgtgaggtgggcgtcagcaggcggcaggcggacgcgcagcagtggattgccgcctggcgctcgcgcacgcgaggcaacaagaaggcggcggcagcggtggaggcccagcgggtcggcagcaacggagagattgaccagcagcggctggagcagatgggccagatg

SEQ ID NO: 998 - DNA, 523 bp, Chlorella sorokiniana
  Clone ID: LIB3602-026-Q6-K1-H1
cggcaagattgtgagcgtggagaccatcaccggccccaaggcgaccggcgagacctgccacatcatcatccagaccgacaagaagatcccctttgtggagggccagtcctatggcgtgatcccccccggcaccaagatcaactccaagggcaaggaggtgccccacggcacccgcctctactccatcgcctccacccgctacggtgacaactacgacggcaacaccgcctccctgtgcgtgcgccgcgccgtgtacgtggaccccgagaccggcaaggaggaccccgccaagaagggcatctgctccaacttcctgtgcgacgccaaaccccggccaggagatcaccatgaccggccccaccggcaaggtgctgctgctgcccgaggaccccaacgccgtcatcatctgcgtggccaccggcaccggcattgcgcccttccgcaccttctaccgccgcatgttcatggagaacgtgcccaactacaagttcacaggcctgttctggatgttcatgggtgtggc

SEQ ID NO: 999 - DNA, 524 bp, Chlorella sorokiniana
  Clone ID: LIB3602-026-Q6-K1-H10
cccacgcgtccgcccacgcgtccggctcagcgcaagggtgtggagctcaacgcattcaagctggaggactacggcatcaagtatggctacagcccggtgctgctggcccaccccgacgcgctcagcacccaggcggagaccgtcaaggccttcatggcagccagcgctgagggcttccgctacgcggcggcgcaccctgcggaggcagccaagctgtttgtgcaggccgccaatgcggcgcaccccgacctgaaggagccgctggaggagggcatgtgcgccgacagcatccagtatgtggcgccgcacctgctggctgccgacgggcgctggggcgtgatggaggagcagcgctggtccgccttcctggactggctgtctgacaacggcctgctgaccaccaaggtgcagagccgcacagagcaggacggcgtgaccaccacgctggacggcctgcggcgcggcgacgcgggcgagcccatcccccgcgacagcgtgcccgccgcctcgctgttcaccaacga

SEQ ID NO: 1000 - DNA, 525 bp, Chlorella sorokiniana
  Clone ID: LIB3602-026-Q6-K1-H11
gccaggtgctgtccgatgtgcgcagcatcatcgccgagcagctgggcactgacctcgacaaggtcactgctgagagcaagttcgtggacctgggcgccgactccctggacaccgtggagatcatgatggccctggaggagaagttcgacatccagctggacgaggagggtgctgagaagatctccactgtgcaggaggcggctgacctgatcgcggcccagatggacaagtaagcggagcgctcccacggctccggctgcggcggtgcggcgccggcatgcgcccgcccgctgcccgcgcgccccatgcagccacacctcatagagcgggcgccggcggcgcggcgtggcgcgccccccatgcacaggccggcccgcagtcaccccgcccctgctgtaccaccccttgcttgcttgttcaccgccccacactgctttgccacacgcacacacttcttcccgcacacccaaacctgaacagactgcggagggtttcccgagcgtctcgccactctgttgccctgcc

SEQ ID NO: 1001 - DNA, 524 bp, Chlorella sorokiniana
  Clone ID: LIB3602-026-Q6-K1-H12
cttgaacctgctggcagcaatcgatcgacggcagcccggaaaccggcagcaaaagcagcttccgcgcgctcgcactgcccccttctctggccgacccgaagccgccgcaggccgtgatggacgcctggctggccttccccgctccggtggcccagcccggcctctgggccgctgtgctggttgtgctgggcggcgccacgctggcctggtgccgcaacacctttgaccagcagcagagcagccgccagccgtcggccctggcccagctcaagcactcgcggcgcacccgctccgccaaccgcctggggcgggcggcaggatgggtggcggagattgagcggcactcggagatgaccatgaacgcggaaatgctgattgaatccagccaccccatcctggaagatgaccacatgtttagtgcgctgctacagcaggggctgctggaggatctggagggcttctacaaccacagcacgcagacgttcagcgccgtcgtctcgctgggccgcaacacagcgggccat

SEQ ID NO: 1002 - DNA, 524 bp, Chlorella sorokiniana
  Clone ID: LIB3602-026-Q6-K1-H2
cgcgtcctgggacggtcagcttgggtcgccgcccacaggcattgctccgcatcaaggcttgtagccagagcgcaccgccagcagtggcgccgacggcagcaggaggcagcggcaggcaggcagcggcagatggcgggctacaattggaagcgggcagaggcgtggcgggcgcacccgctgctgaacaacaccatgcggcactccatgcccggccttggcctcggcctggcggcctttgcggtttatgtggcctatgaccagcttgttgtgaagggccagagcggcgccaaggggcaccactgagctttcggcttagctgcccaggcacgccaagctgcggcatgctgttgtagcagcaccctgctgcgctgatgctcggttctttccattgtggcatgcttgatgagtagcacccgcaccacccctccctcgcatgagcttccccctcgtccccgcttccttcactgcgcttcccactgatggcctgaggccaccctgcaagctttccccgcttcctttgcgct

SEQ ID NO: 1003 - DNA, 530 bp, Chlorella sorokiniana
  Clone ID: LIB3602-026-Q6-K1-H4
gcgaaaggccgacccagctgctaccgatcgccgcgggctgacggctgcacagatgtgcaaagatgaggagctgaaggcggtgctgcaggaggctttcgaagcgcgccaggcctccactgccggcaacgctgtggatgccgaaaagcagcacaagaagcagcggaacttgaagaaggctcgcgatgaggagggccgcccgcagcagctggcagctgcagcacctgccgccgcgccagagcgtgcgcagcaggaggctcagcgggcggcggcgggcgacgggcaggacgaggaagaggaggaggcagcagcgcctgcaattggcgctgagctgccccctgaagtggcggcacgcctggctcgcgaggcggcagaaggggatgcagcagctgcagcggcgcagcagggagcggcagccggcggcgacgaggggcaggcggcggcagggggagctgcagcggcggctggggcagcagcagaggcgcgcccagccaagaagccgcgggttgtgctggcttgtgaggacgaggatt

SEQ ID NO: 1004 - DNA, 509 bp, Chlorella sorokiniana
  Clone ID: LIB3602-026-Q6-K1-H5
gcggtggagcacagtgcggtcctggcgctgccatgtcgacaccacggtgctgcactgcaccagcctgccatggaagtgcctagcagaggaggggacggccttgtgctgtggcctgtggtccattgctgtgcgctgggccgtgggcagccgcccccagccggcgctacccccgccagtgcaccacagcgggcgcagctgtgatcccgctcttatctgctgttttgctgctgctttgctgcgctctgtcatgtcgtctgtcacatttctgtactcaccgccccttcacaacgcctcagccgccttccttcggaactgtgaccacccaccaatagtgcattcattaatctgcgtctctccttgatatgccgggctcgaagcttcttttcgttggtcagtgaagcggtgtaagcactctgtatgggtcaaaaaaaaaaaaaaaaaaaaaaaaaaaaaaaaaaaaaaaaaaaaaaaaaaaaaaaaaaaaaaaaaaaaaaagaaaaaaaaaagag

SEQ ID NO: 1005 - DNA, 505 bp, Chlorella sorokiniana
  Clone ID: LIB3602-026-Q6-K1-H6
cttgaacctgctggcagcaatcgatcgacggcagcccggaaaccggcagcaaaagcagcttccgcgcgctcgcactgcccccttctctggccgacccgaagccggcgcaggccgtgatggacgcctggctggccttccccgctccggtggcccagcccggcctctgggccgctgtgctggttgtgctggggggcgccacgcttaaatgttgccgcaacacctttgaccagcagcagagcagccgccagccgtcggccctggcccagctcaagcactcgcggagcacccgctccgccaaccgcctggggcgggcggcaggatgggtggcggagattgagcggcactcggagatgaccatgagcgcggaaatgctggtggttgtggtgcttaccttaaggggaacgtttaccgttgttacccgccaaaccccaaatcgttgggtttctttacgtttctttttgacagctttagggggcttccccccaaaaactttaaatcggggggc

SEQ ID NO: 1006 - DNA, 522 bp, Chlorella sorokiniana
  Clone ID: LIB3602-026-Q6-K1-H7
aaaaaaaaaaaaaaaaaaaaaaaaaaaaaaaaaaaaaaaaaaaaaaaaaaaaaaaaaaataaaaaaaaaaagaataaaaaaaaaaaaaatataaaataagaaaaaaatatataaaattaaaataaaaaagggtgggtggtttttaggtttgcaaattttcttgggggggccttagcttggtttgactttttttttatgcccctttaaccatatttcgttgtcccgttttggcccgcactgttttggcttaacccctgttgttccccttgtatggggaatggaacgtgacctgtttttggccatttgtcttggcggatatggggcttaccccgatgggtgtttcttacaattgcccccgccttattgccagttggttcgccttttttcccttccttttttgccctgtgtttctggtgttcccctcaagctctactctttttgttttctttaggttgccgccttagtgttttattttttttcctcttttacaccttagtttggggttttttttcaggtagtgtt

SEQ ID NO: 1007 - DNA, 518 bp, Chlorella sorokiniana
  Clone ID: LIB3602-026-Q6-K1-H8
gtgctggctgcccagtgctaccaccgcatggcttctgacgagccggagggaggaaagggcgacctgaagccgctgctgcgggagggcccagtgaagggcgccatcgcggcagtgcacaccaagctgtgaggcggctcagccgcagcagcggcagccagcgggccggcagccagcgggcgtgattgctgtcccgcggcggttgcaaggctgctgattggcgcggccgtccttgtgcgggctgcgcgccctgcgggaggcgcttccatacccaccctggcagcgcttgcttgctaggcttgtaccaacaccttgacctgaccagcgttgtgctggcacctcggcggcccgtgttgttggctgccccaattcccctgcctttttgcctccctgccgatagccctgaatagcccttactaccctttgtttctctccctctgctggtgtgcagcagctttttcattttgtggccgccgcagcgccaagctgttgcagccaccacagtgcatgctgaagccgaa

SEQ ID NO: 1008 - DNA, 422 bp, Chlorella sorokiniana
  Clone ID: LIB3602-026-Q6-K1-H9
accccgaccgcatctccttcatccaggagcagaccttcactacagtggagggcccccgcgtgccgctgcccttcaagcgcagcaattgagacggatcacttgtctgccgctggcgcaacgcctgagctggccgcgctcagctctggctggcctcctgtaacaaaaaatctgcaaaaaaaaaaaaaaaaaaaaaaaaaaaaaaaaaaaaaaaaaaaaggaaaaggccgtacaagatcaaagattcccgccctgggcgtggcacgtccaaacccatccttagtgcaatcgaaagctaaatttgtagccaacagttgaaatgacaggagttggatagcattaccgtagccaattaatcgcattgcacaatatccccctttttctatctgcctgaagatagaaaaggatagcaccgactacccttt

SEQ ID NO: 1009 - DNA, 478 bp, Chlorella sorokiniana
  unsure (1)..(478): unsure at all n locations; Clone ID: LIB3602-028-Q6-K1-A1
caaggatgcatgaggtggacaaagcatgccgccagatccaactgctgctagacaccctgcaaccactcgcggcagctgaggcagacgcagggaaacctgccacgccgggcagccaccaagaccggttcaatgccgcatgggtgcacttcatgcaattgctgcacgagagttcggccatccaaaaccgtcttgatgcccagcgcaagggcggctccctgcccatgccgcttcccaccccacccttccgcctgccgccgctgcgggagccggaaacacaaggcgcacccgagccggaggcagcatgcggagtgcaacccgccacacctgtncgcagcggcagcgcccgcaggggccagccaggcgatggcagcaatagcgaggaggctgctgatgccggtaacgcgggtagtgaggctgtgccgctgcttgcagcggngagcagcagtctgccgccgggcctttcgcggcggcagggcca

SEQ ID NO: 1010 - DNA, 521 bp, Chlorella sorokiniana
  Clone ID: LIB3602-028-Q6-K1-A10
gagcagcttgcaaagcacttgcaaacttacacgtgcgcacttgcgcagcgtcgcctcgcaccgcgcgcacgagcttccgcgagacagtcctactacagtgggttgcccccaattgatccctcctttgaagccggccttccgcgaccttcatatgccgtcgcgcgctcttccccatcagcaggcgaccgcctttcgagcagcaacaacctactaccagggatgcaggcatgtgtgcgcttcttccagaaaatccaggacggctgctcgcgcgtctttgagaagttccgcagctggtacaagcggaacagccactgggtccagcccacctgcaagacggcactgattgttggtgtcaccgtggccgtggtgggcaccgcctttgttgcgccaccgctcgtctttgttggcgcagcagtggccactgtggctgctgcgatcaacctggctgatgtcgtggcatttcgtgacaactccaagccgccgcggcctgtgcgcagcctgcgggacgcctggcaggactt

SEQ ID NO: 1011 - DNA, 384 bp, Chlorella sorokiniana
  Clone ID: LIB3602-028-Q6-K1-A12
cttcatctacaaattcgaccggcagcaagcgggcctggcggggctcagcttcgacgagggcgagtttggcgtgtgcggctacattgtgcagggcctggatgcggtcagcaagctggagagcggggaccgaatcgtggcagcaaaagtggtctccggactggacaagctgactgccacatgacgcagcagccgcagcggatactagctggggcctccgcagcaacactccgaccgtgcaactgcatttttgtcaatgctgtggggctaactgtcttgtgcgcatgccactgtgttagcatgagccgctcccagacttgccgctggctttctttcttgttgcatgaacctccaatgaccttgagattggtaacatgcgcaattgct

SEQ ID NO: 1012 - DNA, 259 bp, Chlorella sorokiniana
  Clone ID: LIB3602-028-Q6-K1-A2
ttttattgagatctttgagtgcatccttaccaccttcacgggctgggttatatgagggcgcataccaggctcctacgggatatcaccccaccggcagttggcgcttaacaaccttggttggctgccgatttgagtgaagcaccaaattcgggaatgccaaatgatgcccgtttgaacctctccctgggatgaacacgccccacagtttctttgtccatagccgcttttgggcggcggccccctatgggggtgcggaacc

SEQ ID NO: 1013 - DNA, 515 bp, Chlorella sorokiniana
  Clone ID: LIB3602-028-Q6-K1-A3
gccgcagcggggccagcaggggaggccagcagcgctgctgcagcggttattgctgtgcagcaagaggggcagcaggagggacagcagcagcagcctcagcggcatcaccggcatgcctcctgggatgctgaccgcggccgcctgccaaacgactggtggcagcgccggctgccccagtggcggcagcaatacgaagcggtgctcatggattttggcagcgcacggcacatgccgattgcggtgcgcaatcgctcgcaagccatggcggcacaagaggatgctgagcgccactgcaccgcgcccttccgcgcaccagagctgtgggatgttccctcctcgtgcaccctggacgagcgggtggatgtgtggagcctgggctgcctgctctactttttactgtgcgggcagagcccctttgagcgggcggctggcgaggcgggcggcagcctgatgctggcggtcgtcaatggccgcgtgagctggccggaagatgtggcgccaggctgcccggagag

SEQ ID NO: 1014 - DNA, 504 bp, Chlorella sorokiniana
  Clone ID: LIB3602-028-Q6-K1-A4
actagttctagatcgcgagcggcctcccttttttttttttttttttttttttttttttttttttattttttttatttttttatttttttttttttttgttttatttttattttttctttcttgttttttttttttttccaaatcaaaaaacggaagcggcctcttttaaggaaccaaactaaacaacccgggcgaaaaacatgaaattttttattttaggccacataaaaaaaattcacctgccgccagtttaaaaacatggggaaaaaaaaaaacctggcgtccccaaattaattgccttagcggcaaaccccattgtgaaaggtgctgtaacagcaaaagagcaccagcgggtggggctttcacaacatatgctgaccgctatacgttaaaggggaccccccccagcgcgtgcaataaccgcgggggatgtgggggtaaagccagagggtacccctaaaaaatgcaaaaccgaaaggcccggataatgtgattatttacctt

SEQ ID NO: 1015 - DNA, 389 bp, Chlorella sorokiniana
  Clone ID: LIB3602-028-Q6-K1-A5
gctggatgagctgtcgcttgaagtgacagctgacaaggcggctgcggagggagagggcagcgatgggcccacagtggagcagcggcggaggggggaggaggcggcccgcagcctgctgccgctgctggagcctgcgcttgagcagctgctggagcgctgccggcagaagtgagcagagcggcaggcaggccctggctggctggctgttgcagcgtggcgaatgcacattgcgccgcgcaaggctgggttcagcagcggcggggcacttcgttcgattccccacctgcgcctgccacccagtaatttcattcatcactaattttcaaacttgaaacttgcaaagcactgcatgcagctgcttcatacagcaatgtaagaagtgacagcca

SEQ ID NO: 1016 - DNA, 427 bp, Chlorella sorokiniana
  Clone ID: LIB3602-028-Q6-K1-A6
gcggctgcggcagccagccagtagtaacgggccgcagcccttaggagcaggaggacgctagtggctgatccacctacacacgctctcccggggagcacgatagctcgtaaggcaccacagtgtgcgcggtccgtgcacagcagccgcagtggcatggccttggtagccagccccagaccgtgttgtacgattggccagccagcagggcagcaacagcccgtgtacctcttaacttaatccaattttatgactcagaaccccccgaccccttctcacttaccaatctcagtcccccgtgtaaggccagttgctcttcacacgcagccagctgtgccgtgccgtggcgttacagcagcggccattgcctttgcatgcaaggctgtgcaaggagtagggactatcatggctgatagggcatcaattcgag

SEQ ID NO: 1017 - DNA, 428 bp, Chlorella sorokiniana
  Clone ID: LIB3602-028-Q6-K1-A7
gaagaaggccaacggccagatcctggccatcaacgagatctttgagcgcaaccccaccaccgtgaagaactacggcatctgggtgcgctaccagtctcgtaccggctaccacaacgcctacaaggagtaccgcaacaccaccctgaacggcgctgtggagcagatgtaccaggagatgggcagccgccaccgcgtgcgctccccctgcatccagatcatcaagaccgccacgctcacggcgtcccagtgcaagcgcgcggccacgcagcagctgcacgacagcaagatcagctttccgctggcgcgcaaggtgctgcgcccctcgtcccgcaagttccgcaccaccttcaaggcggtgcgccccaacgtggccatctactgagcgcctcgccccaaggcggctcgcggccacactggcggcagcagcg

SEQ ID NO: 1018 - DNA, 484 bp, Chlorella sorokiniana
  Clone ID: LIB3602-028-Q6-K1-A8
gaaattacgccagcgatgaccagccagctggacgcggacgcggatgaaaaaggaaagtacgcgcggcggcagggcggcttgcagcgcacgatgaagcgagtgtttcccggcctcttccagggcagcttgcccgtcaccaccaaggacgcaagcagcagcggcaacccgctcagcccagcggtggagcaagtgcggcggcgcatccggcggcggcgacgcagctgcgccgacccccgcaacctgctagtcctgttcaccctcatctcttgcttgggcaccgtgctgtttgtttactcacggacagccgcccacctgccctaaggctgagggtagtcgtgctgcagcctgccgctgtggcggcgccggtgccccccttttcccgcccactgctgctcgcttcccgctcctctgctgcctctgctactcgcaacctgcacttgttttattgcacacaccactggaccagcactgtgacacatgagag

SEQ ID NO: 1019 - DNA, 499 bp, Chlorella sorokiniana
  Clone ID: LIB3602-028-Q6-K1-A9
gcagcagcagcgcgccgcgcccgagcagcaggcgcagcaggcacagcaggcgcagcaggctcagcaggcgctgcctgtggatgatgcggtgtccatgctgctcaattgcttccctgctccagccggcggtaccggcggcgccgccctcggcggcgacttgcaagcgctgggcagcgatttgcaagccctgctgaaatcatctggatctgattctggagacagcttactgggctcgctgctgaaggctgcgggcgggcagcctggtgtggacgacttggcagccatgctgtcctcgctctagccttctcaaaactggcctgctaaaacgctgcttgccacctccagttggctgtgtcgattgccggccgctgcttgctgacagcccacacgccggctgcagactgtagactgcacgcaaagcatgccggtcgcagccaatccgccctctatccgtaccacatctgtctaccgtcaccatcgtttgattcgaccctaagac

SEQ ID NO: 1020 - DNA, 510 bp, Chlorella sorokiniana
  Clone ID: LIB3602-028-Q6-K1-B1
gatgtgctccgcttcctcctccgcgtgaggtgctgggagtaccgccagctgcccggcattgtgcgcctcacgcgccccagccgccccgacaaggcgcgccgcatgggcttcaaggccaagcagggctacgttgtctatcgcgtgcgcgtgcgccgcggcggccgcaagaagcccgtgtccaagggtattgtgtacggcaagcctgtgcaccagggtgtgacgcagttgaagccgacccgcaacctgcgcaacgttgctgaggagcgggtgggccgcaagtgcggcggcctgcgcgtcctgaactcgtactgggtgaaccaggacgctgtgtacaagtactttgaggtgatcctggttgaccccgcccacaaggccatccgcaaggacgcgcgcgtcaactggatctgcaaccccgtgcacaagcaccgagagctgcgcggcctgacctcggccggcaagaagttccgcggcctgcagggcaagggccacctgcacaccaaggcgcgcccc

SEQ ID NO: 1021 - DNA, 522 bp, Chlorella sorokiniana
  Clone ID: LIB3602-028-Q6-K1-B11
ccgagaaggagccggagcccaccatctaccgcatgaagctgtgggccaccgacgccgtgcgcgccaagtccaagttctggtacttcctgcgcaagctgcgcaaggtgaagaaggccaacggccagatcctggccatcaacgagatctttgagcgcaaccccaccaccgtgaagaactacggcatctgggtgcgctaccagtctcgtaccggctaccacaacgcctacaaggagtaccgcaacaccaccctgaacggcgctgtggagcagatgtaccaggagatgggcagccgccaccgcgtgcgctccccctgcatccagatcatcaagaccgccacgctcacggcgtcccagtgcaagcgcgcggccacgcagcagctgcacgacagcaagatcagcttcccgctggcgcgcaaggtgctgcgcccctcgtcccgcaagttccgcaccaccttcaaggcggtgcgccccaacgtggccatctactgagcgcctcgccccaaggcggctcgcggccacactg

SEQ ID NO: 1022 - DNA, 484 bp, Chlorella sorokiniana
  Clone ID: LIB3602-028-Q6-K1-B12
accacgcgtacgaaggcgcacaagaagaatcagcgcaagaatgagcgcaacacctttgtcaggagctagctggaggcacacgttgcactggaccttgcactgcagacagccaaccagacagccacgctggatacgctgttcaagatgctgaacacggtgctataaacctgtttatcatatgggctgattcattcagatgctgctccactctctcaacataaatttcaagagaaatttccactgctgttccttgtgcttaagctgctgaacaagatcatgcatctgatcattatcgacttcatagaggacattgcactagagcttcgactgatggtgctcacaactgagctaccactgcaggaactcctgactgtgctgaacaccgcggagaatattgtgcagaaccaaggtggcaccgatgaaggctagcatgacggattgtactccgaactgtacgacataatgaagcacatcatgttggagg

SEQ ID NO: 1023 - DNA, 474 bp, Chlorella sorokiniana
  Clone ID: LIB3602-028-Q6-K1-B2
ccggcatcacggtcggcctggtcaacacacactactgctacctgcccatcccactcatcatccaggcgccgcggcgggtggaccctaacggcgagctgtggaaccggctgcgctccagctgcgggcagcccaacttcagcaaggcgtgagccgcctcgcgcacaggccgaggagcctgtctgcttgctggcgggacgctgccccactggggctgccccagccgaccgcttgataccgcggcacagccagcctttttgctgcggtagctgctctagatcgcttctggggacacgtattgctactcatcactgttcactgacctctgcccttgctgtttgatgctgctccccgctcaccttgctacggcttttgctcccgcccagttttttcatgtgtaccaaccagccatgccttatatgtattatccgtgtgtttcgcctttgtttgctgctgcctgctcctcggtaacaacag

SEQ ID NO: 1024 - DNA, 521 bp, Chlorella sorokiniana
  Clone ID: LIB3602-028-Q6-K1-B3
cgagcacatggaggaggagcgctgggaccgacgcttcctggcctacgacatggtcatgtgcaacgggcactcgctggtggaccgcccctggatggagcgctacaagctgattgacagtgaggtgattgcgccgcgcaagctggagcagcacaagatccagacggggcagtggcagtaccactaccagtacgaaaaggaggcgttccacgtgcggcgcaaggagttctggccgctgaccaaggcaggcagcctgatcaacaagttcatcccgcagctgtgccacgaggcggacgggctgatcttccaggccacgcaggacccgtatgtgccgggcacgtgccaggagctgctcaagtggaagtttgcgcacctgaacagtgtggacttccggctgcgacggcacccgcagcgcggctggatgctggagctgctggagacgcgcaagggcagggcgctgcccgagggcaggcggccgggataccacgagctggagggtgcacaagtggagttcccagcgggcg

SEQ ID NO: 1025 - DNA, 239 bp, Chlorella sorokiniana
  Clone ID: LIB3602-028-Q6-K1-B4
ttggctagccgctcacaagtatgtacaataagcggcaagcagctgcaatatgaaccagctatgagccagtgcgcctgcgcggcaagcccagcagcaccactgcaactgcgccgacggcatgcgacgataaacaagcgacaccaagccccccacggttgatgtatgccctgtatgaacccgtgaacacgtaatgtacccctcagttgccctgatgaactcaacatgtaacaacgcatgcc

SEQ ID NO: 1026 - DNA, 164 bp, Chlorella sorokiniana
  unsure (1)..(164): unsure at all n locations; Clone ID: LIB3602-028-Q6-K1-B5
caccaccgtgaagaactacggcatctgggtgcgctaccagtctcgtaccggctaccacaacgcctacaaggagtaccgcaacaccaccctgaacggcgctgtggagcanatgtaccaggagatgggcagccgccaccgcgtgcgctccccctgcattcagatca

SEQ ID NO: 1027 - DNA, 525 bp, Chlorella sorokiniana
  Clone ID: LIB3602-028-Q6-K1-B6
ccctctccctgcggcacaacaccctctctcgcgctcggcgtgccagccgcgccacgatcgccacccgcgccaccagcgaggattctgtcgtcgagaaggccaagggagccctcaactctgccaaggaagccgtgggcgacatgactcagaaggttaaggagagcctgtcccctgctgccgaccatgtcaaggaggctgcccgcgaggtgggcactgccgtgaaggaggacgccaccaccgccaaggacaaggtggctgatgccgccaccgccgccggcgattccgcaaaggccaaggcagaggccgccaagcagcgcatgtcggaggctgcggagggagctaaggacggcgccgccgacatgatggagcgcgccaaagagaagggcaaggacatggccaacaccgccgccgacaaggcggaggacatgattgaaaagatccggccctaaaccaagggctataccttgctggctgtggcggcaacaaaaccgagcccaccaaacagccagcggcctatgccggcag

SEQ ID NO: 1028 - DNA, 496 bp, Chlorella sorokiniana
  unsure (1)..(496): unsure at all n locations; Clone ID: LIB3602-028-Q6-K1-B7
cgccatcatggacttttacgccagcggcgagccgctgttctacgagagcgaggcgggcgggccgcacgctgagcacgtcatcaccgaggatgacgatgaggtggtggccatgatcaaggagctgctggagacgcgcatccggccagcggtgcaggaggacggcggcgacattgtgttccgcacctgggaccccgacacaggggtggtcacgctcaaaatgatgggcgcatgcagcggctgcccctcgtccgcggtcacgctgaagagcggcattgagaacatgctgatgcactacatcccagaggtgcgggcggtggaggaggctcctnccgatgagcacgagaacgaggggctcaaggccttccacaagctggagcagcacctgtcaccctgatagtgcggcaacaggatagtgcggcaactaacatcagaggggccctgcccggcaggagccgcacacgcccgtcaaacaagccagccgttttgcagcttggat

SEQ ID NO: 1029 - DNA, 511 bp, Chlorella sorokiniana
  Clone ID: LIB3602-028-Q6-K1-B8
gccgaagcggattgtcgactaccgtaaccaatacgtaccatgcttgaggcagcattatgaccgtctgctggacctgccacagcacctgcccatccgaattttgtttcccagtcaagggttttggcgtgattacctgggagatacaacattccctgagctagataaccctgcaggccagtccgacacattcaggcggttctacggaacgtgcgcctggccctcagacgtgttcgggcacgcatggaagacctttgatgcacattggccgcaagattatttgcgagacatgtcgaagaatgtgagtgcgcacgacactttccctgagtgcgacaagcactacaccctggaagatgagctggccatggcgcaggcatgctgcttcacattgtaccccggctgcgcaaagcccgatggcagcaaccgctgccatggcccgcactgccccaagaaccccttgtggtggcaccccaactgcacctccattcccaccatggctgcgcccttgaattga

SEQ ID NO: 1030 - DNA, 518 bp, Chlorella sorokiniana
  Clone ID: LIB3602-028-Q6-K1-C10
cctgaagatgctgcgccgccgcgtgccccccgccgtgcccggcatcatgttcctgtctggcggccagtctgagctggagtccaccctgaacctgaacgccatgaaccagagccccaacccctggcacgtgtcgttctcgtacgctcgcgcgctgcagaacaccgtgctgaagacctggaagggtgaggagggcaacgtgcaggtggcccaggcggcgctgctgaagcgcgccaaggccaacagcgaagcgcagcagggcaagtacgaccccagcaacgaggacgctgcggctaaggagggcatgttccaggcagggtacacttactgatcaatcaaccccacagctgagcggcgccgccacggtcgcccgcgggtggagcgctgcccacagccgtgcgccgactccgccgccagcagcgcccgattctttccgctcccctcggtcccctgtctcaccccagcccctcccccctcgtgtgcggtctgtgtacccccgccggcagcacagtgtgtcggtc

SEQ ID NO: 1031 - DNA, 518 bp, Chlorella sorokiniana
  Clone ID: LIB3602-028-Q6-K1-C11
gacagcgcctattttttcctgtgggacttgaattctgcttgcttgctcccctgtgcttatctagttctttcgcccttccgcagcagaccgagcagcatgctgagctgccctgcgtacacttttttttgcctcgcctcacctgccaagctgagcaactccaagctgctctccctactgcttgccgccgccaatgcatgcgctgtgcattgcgcctctactcgtgttcgggttgcaatcaactctcctccccgcccaacaaatgacatgctcccttgattttgaacccgcactcgcccctgaaccgccctagttgcgcactgctttggcctctgggcccatcagtttcaaggcttacataccatccacacaccctccctcttcataccagctggcgcactgcccgcgccagcaagcggctgtccgatcccctgtgtagctccttgaatagagcgccccgacattttttaattcccttgtgctccggcgcaagccacatgacgcaccgcaagccgcttttt

SEQ ID NO: 1032 - DNA, 57 bp, Chlorella sorokiniana
  Clone ID: LIB3602-028-Q6-K1-C12
aaaaaaaaaaaaaaaaaaaaaaaaaaaaaaaaaaaaaaaaaaaaaaaaaaaaaaaaa

SEQ ID NO: 1033 - DNA, 523 bp, Chlorella sorokiniana
  Clone ID: LIB3602-028-Q6-K1-C2
caggtttgcctgctttgcccagctgcacacctggcgagccgccggatcctgcagaccccaaccgtgcaactgctgccaacagctgcggctcggggccccaactgccacctgctgcatccccgccctgagcaagagcccgcttcgccccgctccctgccgccaacccgcactacagccatcaaaaccccgtacctgcccaacggcaagtttgacctggaggcttacgaccagatggtggagcaccagatccagaatggcgtggagggcctgatcattggcggcaccaccggcgaggggcagctgatgtcctgggatgagcacatcatgctgattgcgcacacagtcaaccagtttggacggcagctcaaggtgattggcaacaccggcagtaacagcacgcgcgaggcgctgcacgccaccgagcagggctttgcggtgggcatggatgccgcgctgcagatcaacccgtactatggcaagacctcgatgacgggcctgcgggagcacttcaaggcggtgctgg

SEQ ID NO: 1034 - DNA, 65 bp, Chlorella sorokiniana
  Clone ID: LIB3602-028-Q6-K1-C3
aaaaaaaaaaaaaataaaaaaaaaaaaaaaaaaaaaaaaaaaaaaaaaaaaaaaaaaaaaaaagg

SEQ ID NO: 1035 - DNA, 519 bp, Chlorella sorokiniana
  Clone ID: LIB3602-028-Q6-K1-C4
gcaactcgcagcaggatgcaggccactttcacccagaaggcggcggtcgccgctcgccccgtgcaggcccgcacccagcgccgcgtgcaggcccgccgcgtggctgtggccgccaagtacggcgaggagagccgctacttcgacctgaaggacctggagaacaccgtgggcagctgggacatgtacggccaggaggacaagagccgctacaacggcctgcagtccgagttctttgagcgcgcggccaacggcctgtcccgccgcgagtacatcctgggcctggtggccatcggcggcgccggcatcctggcttggggcggcaaaggcgcagcagacgtccgcttgcccatcactgtcggcccccagcagcccgcccaggtgggcccccgcggccgcctgtgagcggcgccagctcagcgggcgggcgaccgctagccggtacggcggcccaccagccatgccagcctagcagccagccgccctagcccccttgttggctcccagcccggccctcacccc

SEQ ID NO: 1036 - DNA, 371 bp, Chlorella sorokiniana
  Clone ID: LIB3602-028-Q6-K1-C6
aagcagcaccgcagggacctggaggcgcaggttgcccgcaagaagcggcgcaacgtgaacaaggcggccacccgctccgtggcgggcgccagcctggaggtgatccagaagaagaagagcgagaagcccgaggcgcgcaaggcctcccgcgaggcggcgctgcgtgagatcaaggagcgcgccaagaaggccaaggccgacaaggcggtgcagaaggcgcaggccaaggcctcgggcgccggcaaggctgtcaagaacatgcctaagggcgcgggcaagggcggcgccaagagcaccggccgctaagccagcggcaatgcagcgggcgtagcggcctgctgggccgctgccgttgtaacgcacttcctcgg

SEQ ID NO: 1037 - DNA, 166 bp, Chlorella sorokiniana
  Clone ID: LIB3602-028-Q6-K1-C7
gggagagcagcggctggcggcctgagccggagcgcacgtgtgaaaacaccactgcttgcctagcatacgaattttgaatgcacactgcagcttgcctgcccagtctaatgatggatgaatcaacgatagcgctggatcttggactgagatgtaaatgcgcagcatc

SEQ ID NO: 1038 - DNA, 489 bp, Chlorella sorokiniana
  unsure (1)..(489): unsure at all n locations; Clone ID: LIB3602-028-Q6-K1-C9
ggcacatgctgggcggcatcagcatcatgcgcagggtgtcatcagcgtgaccagcaatgtcatcccgggcctgatgtcaagcctcatgaacgggcgtgacgatgcaacggcagagagcctcaaggagcttattgcctggctgttctgcgagcccaaccctatcccgctgaacaccgcgctggccatgtgtgggcttgttcgcccgattttccggctgccctacgttcctctgtcgcgtgagcagcgcgagcatggtgccaagctgctgcgggcagtgcagcaccacatcccaggctgcaaggaagtccgcgtcatggatgacgaggagttcatcctgatccactctgctggctattgaccgtgtgaccctctttgacagagaaggggaggttgaaagtccaccgccgctgctgctagcactgtcacgctttgccacagtaatgtacagctcataagtgccacatgtaactctggaaggacagcnnnnna

SEQ ID NO: 1039 - DNA, 407 bp, Chlorella sorokiniana
  unsure (1)..(407): unsure at all n locations; Clone ID: LIB3602-028-Q6-K1-D1
ggcgggggctggattacatgaatggcacaaaatacatgcaaatggatcaaaacaactgtggctggcccaaaggcaggctggtggggaaaggggcaaggggctacggggctgcggcatgctgagtgtgcccaacagggcttaatggcgggtggagagtgatgaccaacaggtaaggggggcggtgccataagatggcaagctggtgggttggtgagggccaagattaaggatggctgggcaacacggcancattgccgttaaagggttcattgctgcaatggcgattgggttctttaagggttcacttgaaaggggggccccgacttttcccaactggaaaggctcaaaatccctgcttaaaggcggaaccggggagtgggggaaattgccaaccccggccgttttaa

SEQ ID NO: 1040 - DNA, 227 bp, Chlorella sorokiniana
  Clone ID: LIB3602-028-Q6-K1-D10
gtgggtgaaaaaagggaggggaagttaaaaaggaataaaaggaaaaaaaaaggggaggggggggaaaaagggaaaaaaaaaaaaacaaggggaaatagaaaggaccaagtgtaaaaaagaggggaaagggaaaaaaggggcggggggaagaagaaaacaccatgcgggaggaaaaagaagggccaaaggaaaaagaagagaagaagggcgaaaaggagcgccgtttg

SEQ ID NO: 1041 - DNA, 211 bp, Chlorella sorokiniana
  Clone ID: LIB3602-028-Q6-K1-D11
ttctattgtttttttatgtttttcctatatatctatgctctttaagttatcttcaccatcttttttcaaggtggtacgttgttcctccgcgacagtgtgccgcacatgactcagccgaccgccccacctttgtcagacatcataccatagctacatatcattttgagcccacaccgtgcgggatcgcggccaccacagcattgatgacggg

SEQ ID NO: 1042 - DNA, 515 bp, Chlorella sorokiniana
  Clone ID: LIB3602-028-Q6-K1-D12
cacctggtcagctgggagaaggagaacatctcgtccgaggcgctggaggcggcccgcatcgcggccaacaagtacatggtgaagaacgcgggcaaggacgccttccacctgcgcgtccgtgtgcaccccttccacgtgctgcgcatcaacaagatgctttcgtgcgccggcgcagacaggctgcagacaggcatgcgcggtgcgttcggcaagccatttggtgtgtgcgcgcgcgtgggcatcggtcagatcctgctgtccatccgctgcaaggacacgcacgctgcggtggcggaggaggccctccgtcgtgccaagttcaagttccccgggcgccagaagatcgtggctagcaggaactggggcttcactccctacctgcgcgacgattacttggagtggaagcgtgagggccgccttgtgaacgacggtgtgaatgccaagctgcttggcaaccacggcccgctggacgcacgggagcccggccagattttcgagggtcctgcccgtctgtg

SEQ ID NO: 1043 - DNA, 468 bp, Chlorella sorokiniana
  Clone ID: LIB3602-028-Q6-K1-D2
gcgctttgccaacggctccgccaagcacactctgccgagcggcgccagcctgacgcgctttgccaacggggacgtgaaaaaggtgctcccaggcggcaccgtggagtacttttttgcagaggtggccagctggcaggtgacgcacacctcgggcgtggacgtcttcttcttccactcaggccaggtggaggcgcaccaccctggcggcgtcaaggaggtgctgttcccagatggcgcggtgcgcaagttgctgcctgacgggcgagagctggcaatcagtgcggcgcacctctcccgcgaaatccaggctgccgagcccgttgcagcgctggagtgaagcagcaatggggtggcggcagcctgagcagcggctggggcagtggggttttggctaatcttctgggttttgctgcttgattgctatatctgcctgatctgaagctgacatttcaagtaaaatgacaactg

SEQ ID NO: 1044 - DNA, 186 bp, Chlorella sorokiniana
  Clone ID: LIB3602-028-Q6-K1-D3
ctgcactcaatcgcattttccatcagcgagcatttcccgtcggcgcttttcccctctgcatctatcggaaccaaccaaacatgcctccccatgatccatacccctgactactcccttgatacactgcccgtgaggctgctgttgcactggcaaacacgtgtcctcccctgtaatccagtgtgcctg

SEQ ID NO: 1045 - DNA, 517 bp, Chlorella sorokiniana
  unsure (1)..(517): unsure at all n locations; Clone ID: LIB3602-028-Q6-K1-D4
cgcttgcagcatcaatcagcgctgccgcaagcccggtcgtgtgccccgccgctgcaccccgacaccagctctcagcaacagtggcagcttaccttgcaagcctgggttgagcagcaccatgccagcatttcagggctgctgcgcccacgaccacgactgcgaagcccaggactgcagcagcgcttggtccttatacaaacatatagacaccgcgcatgtgcggtgcttgaacgaggcggtggatggttcctgccgcaaggtcttcaagccctggcacctgcggcaggaggctcccagcggcgaacccggcgcgcagctagacagtgaagaggacgaccctgagctgctgctgcacatccccttcaacggctccgtcaagctgacaggcatcacagtggtgggcggccccgatggagcatcgccagccaagctcaaggtgttcatcaaccgggacgacctcgactntagtgcggccgccgacctgcccgcggtgcaggagtgggacctgctggagaac

SEQ ID NO: 1046 - DNA, 398 bp, Chlorella sorokiniana
  Clone ID: LIB3602-028-Q6-K1-D5
ggctggggcgcgcgcctgaaccgcctgcccgccgccgcccccggcgacatggtcatggcgaccgtgaagaagggcaagcccgacctgcgcaagaaggtcatgcccgcgattgtggtgcggcagcgcaaggcgttccggcggaaggacggcacctacatctactttgaggacaacgcgggcgtgattgtcaacaccaagggcgagatgaagggctccgcgatcaccggccccgtggccaaggagtgcgccgacctctggccccgtgtggcggcagcagccaacaccattgtgtagagcggcggccgtccggctgggcgtcgcggcagcgcggaccacactgcagtacccaccgcctgccgcgctcccggcgcagcatgctgtaatgcacatccagcgaa

SEQ ID NO: 1047 - DNA, 520 bp, Chlorella sorokiniana
  Clone ID: LIB3602-028-Q6-K1-D6
gcgcctcagcaagctggagcacctgtcactggaggccaatgcgctgtgcgcgctgcccccagcgctgtgcacgctgccggcgctgcgccacctggacctgagctgcaaccagctggcgtggctgccgcccggcctctacctgcgcaccctagagacgctgctgctgtccgccaaccgcctggcacaggtgccgccagtgctggcagaggccgccagcctcgaagtgctggacctcagcagcaatcccgcactggagctgagccgccacgacgtgacagctgtcctttcccgcatgcctcgcctctcgctgctgctgctgggcaagcaggcggcgctagacctgccgctcggggcaggcatcacggctgcaggcatgcatggcctcgagtggcgcacaccctcagtggctgcactggtagccctggggcaggcgctgccgcagctgcagattgactttgaacataccgcgaaggagtacgaggggatctaacctgaaatttgagaccattgtccagacatt

SEQ ID NO: 1048 - DNA, 473 bp, Chlorella sorokiniana
  unsure (1)..(473): unsure at all n locations; Clone ID: LIB3602-028-Q6-K1-D7
gcctctgagcctacagggagcacaggggcaaccatgaccaagaagcggaggaacggagggctcaacaagcacaggcgcgggcacatcaagcgcgtgcgctgcgagtcgcccgccgccatggtgcccaaggacaaggccatcaagcgcttcatggtgcgcaacatggaggacgccttggccatccgtgatctgcaggacgcctgcgccatcgactgctatcctgccagactaccgaggctatactggtgttgcgcatccacttcaaatgtgcgcgtgcctcgtaaggaccgcgaccgaagctcgccgcgcacggttgggtcgccaagcgcagtgagcgttgaatggcgcatagcagctgaccgtgaagagcattgagggcggggctctgcagccgcgcctcgtcctgcgatgaagtagcaccgcggggccgcccggcgcacggnacgccacccggcaagcagcttatttatgtg

SEQ ID NO: 1049 - DNA, 483 bp, Chlorella sorokiniana
  Clone ID: LIB3602-028-Q6-K1-D9
atcccatccagcagctttccagccactcggcacttgcccccagcccaacacacagctgcaaccatggtgatggcatccttctccaaggtcatgtccgtgatcggccccgtggctgcggtgagcgccggcctgtactacattcagcgcggcatctggcccctgggccgcaccctgaacaacgagtggtttgcggccagcgagagcctgatgagcgccatgccccgccagggcagcgccacgccggtgcgcatgaaccccatgtcggagaagatcaacatgaagagcgtcacgtactgagcgcctcgctggcagcccccatggtctgaggcggcccgctggcagcggcaggggcctgaggccccacaccccgcagccgcgtgcgcctcggctgggcgggccagaatcgctgcccctcttactacactgagttttcgactcaaatttatgtcctatgcactcacccctttggttaaccctgtagcg

SEQ ID NO: 1050 - DNA, 496 bp, Chlorella sorokiniana
  Clone ID: LIB3602-028-Q6-K1-E1
ctgaggtcaagctgttcgggaagtggagcttcgaggatgtggaggtgaacgacatctccctggaggactacattgcggtcaagcccaagtatgcgcgcttcaccaatcacagtgcgggccgcttccagaagcgccgcttccgcaaggcgcagtgccccatcgtggagaggctgaccaacagcctgatgatgcacggccgcaacaacggcaagaagctgatggcggccagcattgtcaagcacgcgtttgacattgtcaacctgctgaccgaccagaacccggtccaggtgctcgtggacgccatcatcaacggcggcccgcgtgaggatgccacccgtattggcagcgccggtgtggtgcgccgccaggctgtggatgtgtcgccgctgcgccgcgtgaaccaggccatctggctgatcaccaccggcgcgcgcgagagcgcgttccgcaacatcaagaccattgcggagtgcctggcggacgagctgatcaacgc

SEQ ID NO: 1051 - DNA, 241 bp, Chlorella sorokiniana
  unsure (1)..(241): unsure at all n locations; Clone ID: LIB3602-028-Q6-K1-E10
caaggagctggaggaggtggcctcccccctgtttgccaagctgtaccagcagggcggcggcgcgcccggcggcatgcccgacatgggcggcatgcccggcggcggccccgccgccggccccaccgtcgaggaggtcgactaagctggcactcctttgccggccctgctccgcatgggcggcgcccccaccgccttgcgctgcttcgtccgggcccgggggggcggcggnncnctgcgcaca

SEQ ID NO: 1052 - DNA, 263 bp, Chlorella sorokiniana
  Clone ID: LIB3602-028-Q6-K1-E11
gagctcaaactgtcgatgcccccagcttgtcaccccactgcttgggtgtctctggcggctgcatgcccctgtgatgcagctgctactgctttgctagttctgtgtgttgctgcccttgtcgtattatcgctcctctgattcgccattgctgcttttgaaactgtgacgccttggcaaaaaaaaaaaaaaaaaaaaaaaaaaaaaaaaaaaaaaaaaaaaaaaaaaaaaaaaaaaaaaaaaaaaaattaatcctatgctccaaa

SEQ ID NO: 1053 - DNA, 514 bp, Chlorella sorokiniana
  Clone ID: LIB3602-028-Q6-K1-E12
aaggacatggccaacaccgccgccgacaaggcggaggacatgattgaaaagatccggccctaaaccaagggctataccttgctggctgtggcggcaacaaaaccgagcccaccaaacagccagcggcctatgccggcagccctcgtggccgtgccggcggccggcactgccgcagctagccgtcggcgccagcagcccagctgaacgactcatctgtgcggccgctgggccgctgtgattcatttgcatcggcccatgagcggctgccttgcacgcatggtgcggcacggcctgctctgcggcccttcatacctttgtacctttctgtatcatcttgcagcaatggcagccggctgcatctttctaacatcgtcaccggcccactcgtttgtgccatgcccacctgcctccaacgtcacccttcatcaaccctcacccaacccatccacctgccacccatccactcaccttccctccgccacaacctctgccacccactcaccacccatcaccc

SEQ ID NO: 1054 - DNA, 253 bp, Chlorella sorokiniana
  unsure (1)..(253): unsure at all n locations; Clone ID: LIB3602-028-Q6-K1-E2
gcgagccacggcaggctgccccctttgatctctaaaccccctcctaccccgacatcccccctcactttcatgctgtgctgccctgtaccaacagccatccatgtgattgcccaattgtacgagcgccgctcagcaacggacccgtgtatttccttcccccagcctgcctgaatttttctgcacagtctcgtctatcggttgatccatccagcattctcatgacatgggtatgttacattaacaacagttgcng

SEQ ID NO: 1055 - DNA, 361 bp, Chlorella sorokiniana
  Clone ID: LIB3602-028-Q6-K1-E3
aaaaaaaaaaaaaaaaaaaaaaaaaaaaaaaaaaaaaaaaaaaaaaaaagggcggccgataataaaggacacaagctaacaaacacttgcatgcggcggcacatctattctatagcagtctcctaaattcaataaactggccgctgttttacgggggggggccctggaaaaaccctgccttgccccaccttattcgccttgcagctcttttttttttggcccgctacagatattatcggggtggccggtaccaaccgttcttccagggaaaaccccaccctcactgcccaatgggactctccttgaaacggctctttaagcccggtgggtgaaggggaaacgcccccggggaccgtttctt

SEQ ID NO: 1056 - DNA, 523 bp, Chlorella sorokiniana
  Clone ID: LIB3602-028-Q6-K1-E4
cgcttgcggccagcacagccgcccaagacgacgctgagtgtgcactggccgccatggccccgcacgccggctgccagcagctggagttggacttgaaagaacgtccctaccacttcaagttcaagcctagcaagcagctgcccagcctgccgcacgtgcggcgcatgcgtgtgcggctgcagaagaacggccaagctcgcttctccctgcccatgccccgcctggagcagctgaccctgcctgaggctccgtcgatgcctgcacctgaagtgtcatattctgtggtgctacagcaagcccccatgacacgccaccaaccgttccccgcgctgcggcgcctcagcgtggccacaaaatacctcagctgggacatctccacaacgccggtactggagcacctgggcatcaagctgtactaccctcatgcgctcctgaatgttgtgcttcccgactcagggaccgcgccctcctccctgacctctctggacctggatgcttcaactgtgcacaccatccaattgat

SEQ ID NO: 1057 - DNA, 424 bp, Chlorella sorokiniana
  unsure (1)..(424): unsure at all n locations; Clone ID: LIB3602-028-Q6-K1-E5
cttgcgtttccactgtctgtgccggtctgcgctgattgtgtgatgtgcctgctatgcccgcgcgcccgggcccaacagtgatccctcctaccctacccagctgtgctcctttctttctttgcctttcgttgtttttccaaacccaccctccccaaggacccactctccccccgctcccccgctaggaaacgccccatatcacagccctaatggaaaccaccaccagaccgctttgtttccctcttccgcccctggccggccccttcctcgctcccatgccggcctcgtgatctccttccctgccattttacccttccttccccagccgtagccccgggccatccctgcctagcgttgattcaaccttgctgttccaacttgctctgctgttgagaggactgattgtcaatgattccgcagcana

SEQ ID NO: 1058 - DNA, 517 bp, Chlorella sorokiniana
  Clone ID: LIB3602-028-Q6-K1-E6
ggcccgcgggtccgacctgcgcgtccacttcaagaacacgcgtgaggccgccttcgctctgcgcaacatggacctgaccaaggccaaggcgtacatgcaggcggtgattgaccacaagcgctgcgtgcctttcctgcgctacaacggcggcgtgggccgcacctcccaggccaagaacgagggcaactcgattggccagggccggtggcccaagaagtcggccgagttcctgctgggcctgctgaccaacgcggagagcaacgccgagagcaagggcctggacgtggatgcgctgtacgtgagccacatccaggtcaacaaggcgcagaagggccgccgccggacttaccgcgcgcacggccgcatcaacgcctacatgtccagcccctgccacattgagctgatcctggcggagcgcgggcaggcggtgaaggccgaggcggaggacaagcgccgcaagctgagcaagaaggagctggccaagaagctgcgcagcggcaccaccagcaagagcagc

SEQ ID NO: 1059 - DNA, 509 bp, Chlorella sorokiniana
  Clone ID: LIB3602-028-Q6-K1-E7
gctggtgccacggcatcgaagctctggggagccgcggtcgatacatgcaagtatgggccgccggtggtcaagggttgcaccaagccggacaccatcccctgcgagtccatcatcggcgggccgggctgcctagacacccgtgaatgctgtggcgcgcgcgagatcttttcgagctactcggaaaggttgctccttggctactggtgcaagtcgttcaaagtgatatgcttcttcgacttccagtggggcaaatatccgccctgcgactgcattcctcctccttgacctactcacggcgggcagcactggtagagtactcccctggctagcatatgccattagcatttgccgaagctccgcttgccatcggtttgtcccctgctgccacttgtgtagagcctctcggcccggaatttgcgttgatgtttttttacctctcacccactagcaatccccttgcccccctgctcacgtgtttgcgtcgatgtgtgcaactagctgcaagcagc

SEQ ID NO: 1060 - DNA, 516 bp, Chlorella sorokiniana
  Clone ID: LIB3602-028-Q6-K1-E8
ctcgagggcagaaaaggcagtggacagcgaggcggcgggcgcagctgcaacatcagcgccggaaggcagccaacaccgccacaacggcggcgcctcctgcgccacctcctgctggaccctggccggctccctctctcatgcctgcaccaggtgcccccactgcacgcgcggccgctgtcgaagcgtcggcggctgcggcggtggcatgggcctctgctgccacgggcatcgaggcggctgcccatgccgcagcaaagcgggccgacacacagcctgctgcgcacgctacatcggcggcagcacagtgggaccgcgctgcggctgcctggcgggcggcatacgattcgttggaggcggcttcccaggctgaccctggctcagagactgtgcagcaggcggcggcggcggtggaggcggcccgtggcttcagccgccagctgcttggtgagcaggactgaccatcgcccgcaccgtcccctcaaattctgctgtatcctagccgctgagagtatgtgc

SEQ ID NO: 1061 - DNA, 515 bp, Chlorella sorokiniana
  Clone ID: LIB3602-028-Q6-K1-E9
aaaaaaaaaaaaaaaaaaaaaaaaaaaaaaaaaaaaaaaaaaaaaaaaaaaaaaaaaaaaaaaaaaaaaaaaaaaaaaaaaaaaaaaaaaaaaaaaaaaaaaaaaaaaaaaaaaaaataaaaaaaaaaaaaaaaaagggggggggcgtttttaggggttcaaattttggttccgcgtttttgtaagggtttattttttttttggggtccctaaatttaatttaatgggcgggttttttaaaccgtttggtttggaaaacctttgggtttcccaactttattcgctttggaaaaattccctttttcccaagttggcgaattagaaaagggtcccccccggttgccctttccaaatttttgcccactttaatgggcaattggaccccccttttttgggtttttttaagcgggggggttgtggggtttccccccttttaaccggttattttttcaagggctttaaggccgttttttttggtttttttccttttttttattgcatttttggcggttttt

SEQ ID NO: 1062 - DNA, 468 bp, Chlorella sorokiniana
  unsure (1)..(468): unsure at all n locations; Clone ID: LIB3602-028-Q6-K1-F1
agcgtgccctgtggccgccgttacacgacccatccgcctgccgcaccatccactcaccttccctccgccacaacctctgccacccactcaccacccatcacccgctcaacgccctccatgcaccatcctccccatccaccaaatctgccaccccaaacgcacgtccgccgctgcaccacctgccgccccctcacccgcacccatcttccacccgccacctttcctgccgctcaccgccgcacatcctacctcccacacctcactccatgtacacccttcacccgcgcttcacacagcggctgctgccatgcaaagctgctgccaaacccatccatcatgctcgcacacccactcacccacacgtccaacgtatccagacccattttcaaggcccgactgtacagtgcctttttgcgtccttatgccgatctggtaccaggacttaatgtgtaacaaatggtntgttta

SEQ ID NO: 1063 - DNA, 239 bp, Chlorella sorokiniana
  Clone ID: LIB3602-028-Q6-K1-F10
attcgacattctttggttgttgcccaccgagaggcatgcacgtgtacgtgcatcggagcgctgttattgccccactggagtttgcatctgccgatgcaccagcctgcgcccccaaccgcccatccccatgccacgcctgcctttcagaggctggttaaacccatgagagcatgccctggctggccgctcactcggctgcgtttgctcccagctgcgcctgatgtaactgctccaatgat

SEQ ID NO: 1064 - DNA, 239 bp, Chlorella sorokiniana
  Clone ID: LIB3602-028-Q6-K1-F11
cggacgcgtgggcgcatactcggcagcgctgggtgcacgatgcgtcagtccgtgtgaggatcaccatggccccgctggagtaaaccattgcgcatgctccagcctgcgcccccaaccgcccatccccatgccacgcctgcctttgagaggctggttacacccatgatagcatgctctgcatgtgagcccactccgattcgcgggttgccccttccttctgatgttactgctccaatgat

SEQ ID NO: 1065 - DNA, 503 bp, Chlorella sorokiniana
  Clone ID: LIB3602-028-Q6-K1-F2
aggagatgctgcagcgccacgtgtccacgggcgccgaggccaccatcctggtcaccaaggtcagcgacccctccaagtacggcgtggtggtgatggacgagcagatgaaggtggagcgcttcgtggagaagccgcagacgtttgtgggcgacaagatcaacgccggcatctactgcctgtcgccttccatcctcaaccgcattgagccgcggcccacctctatcgagaaggagatcttccctgcggtggcggcggacggcaagctgtttgccatggcgctggatggctactggatggatgtggggcagcccaaggactacctcacagggctggggctgcacctggagtccctgcggcagaagcaccccgagcagctggcagatgggccgggcattcagggcaacgccatcatcgacgacaccgccaagattggcaaggactgcgtgattggccccaacgtggccatcggcaagttctgcgagattggcgacggcgtgcggctg

SEQ ID NO: 1066 - DNA, 162 bp, Chlorella sorokiniana
  unsure (1)..(162): unsure at all n locations; Clone ID: LIB3602-028-Q6-K1-F4
cggacgcgtgggcggacgcgtgggagcggagcccgcacgttgcagtagaggtggcggcacgagcgcagcagtgcgcagcgctcacgcccgcgccggcggagcatcggcggcggcagccggccccagctgcggcgctgcacgccatgtaacgcacacgttngc

SEQ ID NO: 1067 - DNA, 475 bp, Chlorella sorokiniana
  Clone ID: LIB3602-028-Q6-K1-F5
ggagaaggggcgccaggagcgctgggtcgtcgcctcgtgcggcaactacaccgtgctctggaacttcaggtcggtcaagattgcggagccggaggtggtgtcgtacggcgggctgaccacggtgaccaagtaccacatggtgcgcaaggacgagcacgtggtggactcggtgttcatgcacgacaagttcaaccgcaccactcagcgcgccgacgagaccagcatggtggtcgtcaccaagacgcacgtgtatgccatgggcgacgatgacagcgatgaggagtgaagcatcagcgcagcagcaaataactagcagtagggagagcagcaggctcggcagcagcagctgcggcccgctgtgcacatgctttgttgtccgttctttgttgagccgggtcagtcatttctttcctcgtgctccttctaggacatactctttctgcgcctctccggcagccccatgtaaccttagcct

SEQ ID NO: 1068 - DNA, 295 bp, Chlorella sorokiniana
  Clone ID: LIB3602-028-Q6-K1-F6
cgcttataacgagtcgctccagtttgctaatgagtttgcctccacgtggctgcactgtacccatctgtcctcactcctcctgtcatccccactcctcattcttcacccattgagcctcggagccctgccccttctgcagcctgccatcaacctgcgctgtgctcggaatctaatcgctctgcagctgagcccgcacccattcgcggcttgcgcctgccctgctgaacttcgatgataattgacagcaaacgaggcagcggcgccaagtcgcaagcttgaaaaaacaagtgcatac

SEQ ID NO: 1069 - DNA, 515 bp, Chlorella sorokiniana
  Clone ID: LIB3602-028-Q6-K1-F7
tgggcccctacagcacgaacttcgtgcccagctacctgaccggcgagttccccggtgactacggctgggatacctctggcctgtcggccgaccccgccaccttcgctcgctaccgcgagatcgaggtcatccatgcccgctgggccatgctcggcgccctgggctgcgtcgtgcccgagctgctggacggcaccaaccacattgcctggttcaaggccggcgccgagatcttcggcgacgacggcatccagtacctgggcatccccggcctgatcaacgccaagtccatcgtggcgaccctgatcgtgcaggtggtgctcatgtcgtatgttgagggctaccgcgtcaacggcggcccggccggcaccggcctggacgctgtctaccccggcggcaacttcgaccccctgggcctggctgacgaccccgacaccctggctgagctgaaggtgaaggagatcaagaacggccgccttgccatgctgtccatgttcggcttcttcatccaggccatc

SEQ ID NO: 1070 - DNA, 503 bp, Chlorella sorokiniana
  Clone ID: LIB3602-028-Q6-K1-F8
cttctcttgtagcatatactttgccgccgcatgtgcgtgctcgctgtatgaacattcacgtttcattgcccataccaacgaatgccgttgcttcccctcagccttcttgaaccctccccccctggccccctgcaccgatttcaaagcttctcctccacctgcccctctctgcgtgccctcaccggcgtgcaacccccctcccagctgcaccctccctgagggtgcgctggacctctccagttttgctaagccccacgcgagtcgacactcccaacacgtcatgacacacaagtctttgccgtgctgcctgccaggcttttcgcacgcggtgcattgcccctgcttcccgccatgtgtaagtgcagcacccgcttactgtaacattttccagcgccttaacccccaaatcctttagatttttcccttccttttctaaacaggttgcgcgcttttccccgccaagttctaaattggcggctccttttagggaaccgggggggggc

SEQ ID NO: 1071 - DNA, 522 bp, Chlorella sorokiniana
  Clone ID: LIB3602-028-Q6-K1-F9
cctcctggctgaagatcacccccggcgaggtgtctgacaccatcgccaagatggccaagaagggcatgaccccctcccagatcggcgtgatcctgcgcgacagccacggcatcgcccaggtcaagtccgtgaccggctccaagatcctgcgcatcctcaagggccagggcctggcccccgagctgcccgaggatctgtaccacctcatcaagaaggcggtggccatgcgcaagcacctggaggccaaccgcaaggacaaggacggcaagttccacctgattctggtggagtcccgcatccaccgcctggctcggtactacaagcgtaccaaaaagctgccgcccaactggaagtacgagtccgccaccgcctccgcgctggtgcagggctgagcgctcgcctcgcgcgtgagctgacggctgcagccacggctatctccaactggtgtgccagcaggcatcaccacgaagcagccgcagctctccagctggctctgcctgcgtttgcagcccctggcttgat

SEQ ID NO: 1072 - DNA, 522 bp, Chlorella sorokiniana
  Clone ID: LIB3602-028-Q6-K1-G1
catgtgcgcacaccctggttacccctggcacatgcaaccaaatcatatttatttccactgcaagttttgccctgtttgcaccttgctgtggtggcatgctcaccactgccgccatgcatctcctgccctgcacgctgccctgcagctcctgcctttctgttgcttgccacactcctgccttgagtgccttgcttggccttacaccgcccgccccctccccacgtcgcactgcctcacagtgggctttgagtcggacttgatgcgatcggcatttgtgattgaggccaaccccaacgccgcgtcctcctgcggctgcggctccagctttgtggccaagtgaggcggccacgtcagctggggaagccaggccagcccaggccagcccctgcagcacccatggcacagcaccaaatggaacacttagcagccatccaggaataacctcaaagcttctgtgttgagcgttggtcggcgcgctggagcgagtcagctgcccctcctgtttcatgtgtgcccaaatga

SEQ ID NO: 1073 - DNA, 390 bp, Chlorella sorokiniana
  Clone ID: LIB3602-028-Q6-K1-G10
gattgcggacggctaccccgcccaggagatcctgctgcagctgcaggcggtgctgctggaggatgggcaggcgcccgactcagccaagggcaagatcctgggcgcgctggcggaggtggacaaaaacctggtggacggatcggacgagtttctgcagctgctcagcgcagcatcgtatgcgcagcgcgtgctcaccggcgccgcgtgaagcgccactcggcggcgcatgcagggcagcaggcagcgcccagcgacagcgcctgggcgtgggcggcagcatggcgggcagcagatgattggcacgtttgcattgcggccatagtgcctgctgatcccctgctgagacatgttctgtggtcgtcgcaagttgcagccagcttgggcaactgt

SEQ ID NO: 1074 - DNA, 183 bp, Chlorella sorokiniana
  Clone ID: LIB3602-028-Q6-K1-G12
ctcctttctaccctacacagcaccccgcagtgccaattgcaccctgtcatcacccctgtttccattcaacgctggccggccgctcagtggccgcccgtcctctgcttcagcactcatgcgtctaccacgcttgccccacaacatccgtcacagatggaatctctagattgcaagtggaacaca

SEQ ID NO: 1075 - DNA, 153 bp, Chlorella sorokiniana
  Clone ID: LIB3602-028-Q6-K1-G2
aaaaaaaaaaaaaaaaaaaaaaaaaaaaaaaaaaaaaaaaaaaaaaaaaaaaaaaaaaaaaaaaaaaaaaaaaaaaaaaaaaaaaaaaaaaaaaaaaaaaaaaaaaaaagaaggaaaaaaaaaataaaaaaaaaatgaacggagtggtcaaag

SEQ ID NO: 1076 - DNA, 513 bp, Chlorella sorokiniana
  Clone ID: LIB3602-028-Q6-K1-G3
cctactgcacctggctgctggtggtgcgccagcgctttggcaagttcccttaccccatcctcaacaacctgcccttcccgctgggctttgcctcctttgtgctgctcggctttgttgtcgtactcttcgcattccagctgggcaaggcggtcaagacactgctgggcggcggcagcagcagcggcagcggcaagagcagtgcgccgcgccggcggcgctccagcggcggtggcgagaaacctaaggaccagtgagggcagtgaaacaggcgcctgtgcctcgcccacccctgtatcagtttgctctgctcccgctgtagcgctgctgcgcatgctctgctctgctgtcatcaagtctcgctcacacttgcgcacactcgctcccgctctgtacccttttgccccatccctactgcctcccacttttgtccatgccgcactggtttggttgatgctgccccacgagcattcctgcctggttgagagagacggctgggcccctgtttcgttgatg

SEQ ID NO: 1077 - DNA, 181 bp, Chlorella sorokiniana
  Clone ID: LIB3602-028-Q6-K1-G4
ccaggacgcgctgctggagggcatttgatggccttccagtgccgatgcaatctgacccaattcatccacccaactctgccgcacggccgcagcaccatgacctcattacgagcgctggatcctgctgagcatgcctgtgttgcaaggccatgtaaacagcgcccactgggggccaacttag

SEQ ID NO: 1078 - DNA, 488 bp, Chlorella sorokiniana
  unsure (1)..(488): unsure at all n locations; Clone ID: LIB3602-028-Q6-K1-G6
gcgacgcccagactaccttgcaaaaaaaagaacttgcccgcccctttttccgatgcccctgccccccgcccatgccgtacacgccacctgcggcgctgctgttcgtgcagcgccccgccggcgccccatccttcatgcatcatgatgcccagttttgacgccttttgcccagccccataccatacccgtacaaacacagctctttcatgcatgctctctgccccatgcgttaccgcctgtcaccactgctctggtctccccaatgccctccctgataccacgttccgctacactcctcgcaaggccggcagcatgcgccgctcccctgtgccacagccgccatctgctccttccagcccccgccttttcctccatcaagccccgcgctcctttgaaggaattccctgtgcaccatatgctccaaaccactgcatggtgaaggacgtaacgcnaanaaaaaaaaaaaaaaaaaaaaaaaaaaggcggcg

SEQ ID NO: 1079 - DNA, 293 bp, Chlorella sorokiniana
  Clone ID: LIB3602-028-Q6-K1-G8
gcagggcgcgccgtggccaacatctccacggagctggcggtcatcgcgtacgaggaggtggaggagcttgttgaggcggcggaggccaaggcgtattatggactggccaccaactacaacgcgctgaccgccctggccaaggagctgatggagcaggagagcatgacggggcgggaggtccgcgcactgctggagcgggaaggcgtgaagcgcttcgacgacaccgacactggaggctacgggtggaacaaggacggggggcttaactggcccggcaaagacaccaagggcct

SEQ ID NO: 1080 - DNA, 521 bp, Chlorella sorokiniana
  Clone ID: LIB3602-028-Q6-K1-G9
acaagatcggcaaggtgcacaccgtgcccaccaaggtcaccggcgagtgcggcagcgtgaccgtgcggctgatccccgccccccgcggtgccggcattgtggcggcccgcacccccaagaaggtgctgcagatggctggcattgaggactgctacacctgctcccgcggctccacccgcaccctgggcaactttgtgaaggccaccttctacgccctggccaacacctacggcttcctcacccccgacctctggcgcgagaccgtgttcaccaagagcccgctgcaggagtactccgacttcctggccaagccggtggttggcaaggcctactgagcggcctccccatgcccgccgccccgcgcgccgcggcggcaggagcagcagcgtaacagcagcgccctgacgcgaggatagatgagagttgggaccccagtggccgctggggcgctgcgctggcagggcaagccggcgccccggcacacacctcacaccctggtgttgcattgggagacccgtgta

SEQ ID NO: 1081 - DNA, 519 bp, Chlorella sorokiniana
  unsure (1)..(519): unsure at all n locations; Clone ID: LIB3602-028-Q6-K1-H1
gaacctgcagcagaagatcgacaacagcgtgaagaagatcgccaccgaggcgtacgagcaggcgctgacccacatccgcgacaaccgtgcggccatggaccgcatcgtggaggtgctgcttgagaaggagagcatgacgggcgacgagttccgcgcactgctctcccagtttgcgcagatcccccaggagaacgtggacgccgtggcgcgccagaagcagccggatgccgacctgcagctggcgtgagcgagggccggatgccgcccaacccagccgcgcctcccagcctggcaagaacatccgctgccgctggctggtgctccgggctggccgcacccctccccgcattggcactggtatgatgttttccctccggatcgactgcatcccatttgattttctccctgcgtaccctgngggccgcctgacactaaacggacgattggatctgccccaccccacctctctgcctctttttatgcttgtccctcctgccgcggnggcctgcggcgaggtac

SEQ ID NO: 1082 - DNA, 404 bp, Chlorella sorokiniana
  unsure (1)..(404): unsure at all n locations; Clone ID: LIB3602-028-Q6-K1-H10
ttatcaggtgcactgcaacatgatgcgcctgatgcgggagcatcccatgcgggggggcggaccacagccgggcggcatggcgccgttgacgaccccactaacggccgcgctgccgatgcatggcagaggacgcggttgctatccaccggtggcgcttcagattgatccgaggacgtagatgacaaaggaggaggcacaagcgcagctcgccacggcaacagttgtgatagcgattgccctcaancccgagctgaccatgatagagcggcagcatacctgaccccaacccacactgaacgcaaccagcatctgcncccgtgcaccatgaacgttagatttcttcccacttgcccaacgcccacgatgtgtgtttgcactgctctcatgcttgaagacagtaattt

SEQ ID NO: 1083 - DNA, 464 bp, Chlorella sorokiniana
  Clone ID: LIB3602-028-Q6-K1-H11
ccaacctggagtttgtggcccccaccgccgcctacgtggtggtcaacggcgtgaagacccacgtcgacctgtccgccgtgccgcccctgacgccgtgccagaccaagctgatcaacggcacccccgacctggcggtgaaccagggcggcgcgggcgtgctgatggaggagcagcccgacttcagctacgactccaaggaggcgcgccgcacgcagcgcgaccgcctgcagaagtacctgcgcatcatgaagcaggacgaccttgagggcgtggcgggcgtgacctcccccacctggcaggccaagatcgtgaccgcggcgcccgcccgcgccgagtccgacaactccaccttcatcgaccagcagttcagccagaacaaggagctggctgacctgcaggccaagctgcaggccaagtacaccatgcccgccaactaagcagccacgtggcaacacgcgccagca

SEQ ID NO: 1084 - DNA, 510 bp, Chlorella sorokiniana
  unsure (1)..(510): unsure at all n locations; Clone ID: LIB3602-028-Q6-K1-H12
gctggagacacatacatgcgcccaactctcgtcacgttgctcagcttctgcgcgttggcttcctgcatgttgggcggcttcaagcccgtggacaacgtgtccaacaacgagggcgtggagaaggccagggctgcagtggaggcacacctgaagcaggggcccgtggaagtggtgtcggcggcgacgcaagtggtggcaggcaccaactacctgctgacagtcaaggcggggggcaaggagtacgaggccaaagtctgggagaagctgcctgcatacggaggtgcatttgaggtgacggacgtgaagatgaagggggaaccaggccgtgctggcgcangggcggatgagtggcatgagaacccagaggtggacgatgccgcggcctatgcggtgcagcagctgagctctcagagcaactcgctctacccctttagcctgaagaaggtgctgtccgccaagctggcgcgcancgagagcggcggcgtggtgcaccacctgaagctggtgctg

SEQ ID NO: 1085 - DNA, 472 bp, Chlorella sorokiniana
  Clone ID: LIB3602-028-Q6-K1-H2
gaggcgggcatgctggcgctacggcgggatgccacacaggtgaaccacgaggactttaatgaggccatcactgaggtgcaggccaagaagaaggcgtcgctgcagtactatgcgtagcggcggagcagggcagcgcggcagacagcttgcaacatcacgcggcgcaccatgcagcagcaactgcagccgcgtttgtgcagctgccggtgcaagcgttgctgctctcttgcctttgacttctgctccctctgtaccatgcgtgaaacttgtcagattgacacacgcgaatgcaccagggttgagcaaggcggcggtagctttccattgcgaggcactgccttctgtgcaccctgatgccccatcccaaccttcacatatatgaagcagctgaagccacaaccctcattcctctcctatccaaggccttctctgctggctcaagcggattcagtcaggtgtaacaagcgctggc

SEQ ID NO: 1086 - DNA, 525 bp, Chlorella sorokiniana
  Clone ID: LIB3602-028-Q6-K1-H3
ggctaccacaacgcctacaaggagtaccgcaacaccaccctgaacggcgctgtggagcagatgtaccaggagatgggcagccgccaccgcgtgcgctccccctgcatccagatcatcaagaccgccacgctcacggcgtcccagtgcaagcgcgcggccacgcagcagctgcacgacagcaagatcagcttcccgctggcgcgcaaggtgctgcgcccctcgtcccgcaagttccgcaccaccttcaaggcggtgcgccccaacgtggccatctactgagcgcctcgccccaaggcggctcgcggccacactggcggcagcagcggcggcggcggcgacccagcttgtgctctggagcggcgccgctgaggaggagaaggctgcccggccggcgggcggccgccgcaggagtgcgcggcggcgccgcaggcggcagccggggggcggcggcagtgcgccccgcccccgccctgtagcccggttgggtgcaaggctgcaggcgcgtgtaaacacccgctagcaaaa

SEQ ID NO: 1087 - DNA, 496 bp, Chlorella sorokiniana
  Clone ID: LIB3602-028-Q6-K1-H4
cccacgcgtccggggacgcagcggacagagcagccggtcaccatggtgcagcgcctcacctaccgccggcgtcacagctacgccaccaagtccaacaagcagcggatcctgcggacccctggcggcaagctggtgtaccagctggccaagaagaagacctcccaccccacctgccccatctccggccagcggctcaatgggctgcccgcggtgcgccccaacagcctgcaccgcgtgaacaagagcaagaagacggtgcaccgcgcgtacggcggccacctggcggcgggcgtggtcaaggagcgcatcgtgcgcgccttcctggtggaggagcagaagatcgtgaagaaggtgctgaagctgcaggctgccaaggaggctgcgcaggccaaggccgcggcggcaggcagcaagggcaagaagaagtccaagaagtgagcggcgcacgcgagcggacagttgcgccccatgctcccgctgtaatgcaccctcgatg

SEQ ID NO: 1088 - DNA, 313 bp, Chlorella sorokiniana
  Clone ID: LIB3602-028-Q6-K1-H5
ggccgccgcgcgccccgcggtgaagaaggtgtccaaggccttctacagcaccatgatcaccgactcggactacgtgggcgaggactacgaggtgttcagcagctggctgggcaccacccagtgagcgccccggccggagtagctccccagaggaggcgagcgcggcgcggcggcgccgcccgccgcgggcggcggagggtcaccggcccgcggcggcggccgctgcgcgcgcgccgccccgagcgttgacagagaggcccgcccagttgagggcgcacagaagtacacgcacccgtgtaacacgcacacacgc

SEQ ID NO: 1089 - DNA, 517 bp, Chlorella sorokiniana
  Clone ID: LIB3602-028-Q6-K1-H6
ggcgccgcaggagggtaaagagcaaagatgccggcgggccagggctaccgcgcgcgtacgcgccacatgttcagccgcggcttcaggcagaagggcttcatcccgctgtccacctacctgaccaactacaagctgggtgactatgtggacatcaaggtcaacgccgcggtgcacaagggcatgccccacaagttctaccacggcaagactggctgcgtgtggaatgtgaccaagcgcgccgtgggcgtggagctgctcaagcaggtcaacgggcggtacatcaagaagcgcatccacgtgcgcatcgagcacgtgacccccagccgctgccacgaggagttcctgcgccgctgcaaggagaacgacgcggcgcggcacgcggccaaggtggagggcaagccgctgccggtgctcaagcgccagcccaagggcccccgcaccgaggccatcatgctggagaacgtgaagatggagaccatcacggccatcccctacgatatcctcaaggagggcgtgc

SEQ ID NO: 1090 - DNA, 520 bp, Chlorella sorokiniana
  Clone ID: LIB3602-028-Q6-K1-H7
aaggactccatccgctacgagaacacggtggaggtggagaagaaggtgtttgagaacgtggcgctgttcaagcgcgagacggagagcggcaagcccaagaaggagggcgaccagctgttcgagtgctttgacgcccaggacctcaacacgcggctcaaggacctcatggacggactgtcggtcaaggtgttccgtacctacaacgcctccatcacgctcgacacgctgctggcggagccgtcgcccgaggagacggtggaggggcgcaaggcggagtacgaccgcgccaacaaggaggtggccattctgtgcaaccaccagcggtcggtgcccaaggggcaccaggggcagatggagaagctgcaggagaagctggcggccatccaggaagagatcgatgagctggagaaggagctgaagctggccaaggccggcaagcccggcaaggacggaaaggtgaagagcgcggactcggtgcgcgccaagctggaccgcaagcgcgagcagatgtccaagacgg

SEQ ID NO: 1091 - DNA, 315 bp, Chlorella sorokiniana
  unsure (1)..(315): unsure at all n locations; Clone ID: LIB3602-028-Q6-K1-H8
gggctgcaattttctgcgtccacacccggcacatgccgctgtctggagtggacgtgcaagacctggcccacaggacggaagggtttacaggcgcagccatagcagcatgttgcaaagaggcagcactttgtgctctgcaagaagacttgaatgcctcttccgtaatgactcgccattttgatacagctatcagcatgcttacctctcgcctacaactgttgtgatgtgaatgtggcacgctatgcgccacgtatccgtcagtgtttgttaatcaacgagctgaaagtgccgttatgtcaacattgcagcgcnnaa

SEQ ID NO: 1092 - DNA, 521 bp, Chlorella sorokiniana
  Clone ID: LIB3602-028-Q6-K1-H9
gcgagaaggagctggcaatccaccagctgcactgcaacatgatgcgcctgatgcgggagcatcccatgcggtcgggcgggccacagccgggcggcatggcgccgctgccggcggcactgccggcggcgctgccgctgcatggcggcggccccgggtgctatccaccgctggcgcttcagattgatccgaggccgcagatgacaaaagaggaggcgcaagcgcagcttgccacggcagcagttgtgatggccattgccctcaagcacgagctggcgatggcagagcggcagcagccctgaccccaacccacactgaacgcagccggcatctgcacccgtgcaccctgaacgtttgatttcttcccacttgcccaacgcccacgatgtgtgtttgcactgctctcatgcttgaagacagttttttttccatgaatgcatcttatgtacgcttttcaatcttttggcattttttccacgttgttctgccaccagatcttgcttcacgcccaatcctgcacctga

SEQ ID NO: 1093 - DNA, 517 bp, Chlorella sorokiniana
  Clone ID: LIB3602-029-Q6-K1-A1
acttgctgccgcccagcagcagcagcagcagcagcagcagcagcagcagcagcagcaggaaacagaagcagcctgctgcccagacagcagcagcgatgactgccacgcatgttggagcagccacgctagcagcagcgctgcaagcgaggatgcagtttggacgctgggcggttgcgcccacagcggcgacgtgtggtgcctgctgcagctggcgctgcactgctcgcaccaagcagctgcggccgcccgccccaagcggcggcaccgcctctacatgcaggctctgcggctcatgcggcaagcggcggcagaggtgcacgccgctgcgccagactgggacgtgtttctgcgcggcggcgccagtgcagcgttgggcagctttgtggcgctgggcagcagcggcaccggcggggcggccgaggcggctcgccagcttgacagcgtggcgcgcattgtgactgatgctgcggcggaggagggaggcattgagctatgggcactgcaggatctgcttcag

SEQ ID NO: 1094 - DNA, 518 bp, Chlorella sorokiniana
  Clone ID: LIB3602-029-Q6-K1-A10
gctggtggtggtgcagcagctgctggccggcggcagcgagggcggcgctgcgcatgctgagctggcagacatccagctgttctcattccgtgccatcccctctgccaagcgcctcgacatccgccttgacaagctgacaggtgcggaacaggttgggctggaggcatgtggggctgctggctgcgtgtgggcgctgtgctgtctgctggctcagcgcgtgtacgcagctgcttgttgccatcaggcatagtgtgtctgttacactcgctgcagaccagtacggctcgccatccctggacgacgtggccgccttctcccgcctcttcaacgaggcctatggagcggcagtgggcgaggcggtggcgggagacgttgaggtggaggtctcctctccggtgggcagctgtttgggaagggtgaaagttcacagcatttctgggagagtggacagcacgcatgatgcggttgcagaacacagtctgctcaaccgctggtggatactggggcagcatatcctg

SEQ ID NO: 1095 - DNA, 519 bp, Chlorella sorokiniana
  Clone ID: LIB3602-029-Q6-K1-A11
ctccagccctctccgcagcaaccaccccgccaccatgcaggcagctctgagcagcaaggccgccatcgcggtccgccccagcggcgtggccccccgccaggcccgccaggccgccggcatgaaggtgatggcctacaaggtcaccctgaagaccccctccggcgagcaggtgattgagtgcgccgaggacacctacatcctggacgccgctgaggaggccggcattgacctgccctacagctgccgcgcgggcgcctgctccagctgcgccggcaaggtggaggccggctctgtggaccagagcgaccagtccttcctggacgacgaccagatgggcaagggcttcgtgctgacctgcgtggcctaccccacctccgatgtgaccatcgccacccaccaggaagagtcgctgtactgagctcaattcttgggcctcggtcagtgtttggtctccaaacctggtcgctctgcgcacctgacgtcgtgcggcgtgcggccgcttgctaggcgaattgcatg

SEQ ID NO: 1096 - DNA, 447 bp, Chlorella sorokiniana
  unsure (1)..(447): unsure at all n locations; Clone ID: LIB3602-029-Q6-K1-A12
gtgcggatccttttacatcagcctcgggggcggcactggaagcccagcccgcccccgggatccacacagggcggagcaaaggcggggcggggcggggggcacnctctctcctaggacacctacatcctgcacgccgctgaggatgccgatattgacctgccctacagctgccgagcgggcgcctgctccagctgcgccggcaaggtggaggccggctctgtggaccacagcgaccagtccttcctggacgaccaccagatgggcaagggctttgtgctgacctgcatgggctacccaacctccgatgtgaccattgtcacccaccaagaagagtcgctgtactgagctcaattattgagccttggtcagtgtttggtttccaaacctggtcgctctgcgcacctgacgtcatgcggtgtgcggccccttgctaagcgaattgcatgg

SEQ ID NO: 1097 - DNA, 510 bp, Chlorella sorokiniana
  unsure (1)..(510): unsure at all n locations; Clone ID: LIB3602-029-Q6-K1-A2
gcctcttagcctacagcgagcacaggggcaaccatgaccaagaagcggaggaacggagggcgcaacaagcacggccgcggccacgtcaagcgcgtgcgctgcgagtcgtccgccgccatggtgcccaaggacaaggccatcaagcgcttcatcgtgcgcaacatggtggacgcctcggccatccgcgatctgcaggacgcctgcgccatcgacggctatgcgctgcccaagatctaccgcaaggtctactactgcgtgtctgccgccatccactccaagattgtgcgcgtgcgctccgtcaaggaccgccgcaaccgcgagccgncccgccgccccggctttggcgcccgccccgagcgcaagtgagcgtcggcatggccgcagcagcagcagccgctgaggagcagtgagggcggcgctctgcagccgcgcctcgtcctgcgatgagtcagcaccgcggggccgcccggcgcacggnacgccacccggcaggcagcttatttatgtgcg

SEQ ID NO: 1098 - DNA, 511 bp, Chlorella sorokiniana
  unsure (1)..(511): unsure at all n locations; Clone ID: LIB3602-029-Q6-K1-A3
ctttctctttttaaaaaaaaaaatttttaaaaaaataaaaaaaaaatttttttttttttttttttaaaatatatattttttgtttttttttaatttttgtttttaaatttttnnnnnnnnggtgggggnggttttgggtcctctttttttcctccccctttcctcccccgtccttcccctttttttgttttttctttgggtcccctccntttccccttctctttcctccttttttccctcgtctacccttggcacccccctcctttcccccctttatcccttccccttttttccccttttctccttttcgaatagtcccccccgggcccccctttcccccctttttcccactttttttccccttttttccccccttttccccccctttttcgcccccttttaccccgtttttcccccgagttttccccctttttttcccttcctttttcccgccccctanttcccgttttttttcctttttttccctccctttccccccctttcccccttt

SEQ ID NO: 1099 - DNA, 520 bp, Chlorella sorokiniana
  Clone ID: LIB3602-029-Q6-K1-A4
cggacgcgtgggcggacgcgtggggggctacctgccggggcagctgtacaacctgaacagccagtacggcaatgagcaggagctgcgggagctgaaccgcaagctgcgggaggcgggcatccggccagtggccgatattgtgatcaaccaccgctgcgccgacaagcaggacgagaacggggtgtggaacaagtacggtgacgatatcgaccacaacgggcggcccatcaactgggacaagtgggccatcaccagcgatgatccaaagttccgaggcacgggcaacaaggacagcggcgacgactacgaagcagcgccagacctggaccaccacaacccgcagctgcgcgagagcctcatcgactggctcaactggctgaagaccgacatcggctttgagggctggcgctttgacttcatccgcggctacgccccggagtactgccgagagtattgccagaacacgctggggggcgacacgttctacgtgggagaatactttgtggacctgcactggaat

SEQ ID NO: 1100 - DNA, 510 bp, Chlorella sorokiniana
  Clone ID: LIB3602-029-Q6-K1-A5
tttctcgaccctgtacgctcccctgatccgcgatggccgcatggagaagttctactggaaccccacccgcgaggaccgcatcggcgtgtgcacgggcatcttccagcacgacaacgtgaaccgcgcggacgtggagacgctggtggacgccttccccggccagtccatcgacttcttcggcgcgctgcgtgcccgcgtctacgacgacaaggtccgcgagtggatcggcggcattggcgtggagaacatgggcaagcggctggtgaacagcaaggagggcaaggttgagtttgacaagcccgccatgcccctggccaccctcatgcactacggcaacctgctggtggaggagcaggagaacgtgaagcgcgtgcagctggcggacgagtacctgagcggcgcggcgctggcgggcgcctccggcagcagcctgcccgagggctaccaggcccggtaaacggcggcgcgtgcagccgtgcgggccgcgctggcagccgcagatgaggcacc

SEQ ID NO: 1101 - DNA, 81 bp, Chlorella sorokiniana
  Clone ID: LIB3602-029-Q6-K1-A8
gcgtcttttataaaaaaaaaaaaacaggggcaaaaatatacaaaaaaaattttttaaaaaagggcgcaaaaagcacggggg

SEQ ID NO: 1102 - DNA, 435 bp, Chlorella sorokiniana
  Clone ID: LIB3602-029-Q6-K1-A9
cccacgcgtccgcggacgcgtgggcgagtgcggctgtgggatgcggccacctacaagcaccggctggtgcactatccgggcgccttcaaccgcgccagccgggcgcgccagctggcggtcagcgatgactcctccacactcttccacccctcgggctctgtggtgcagatgtttgatgtgcagagcgggcggctggtgcgcacgctgggtggcggccactttgacgccatcaactgctgcaagtggaacccagcggcggaggagctgtacagcggcagcagcgactccaacatagtggtgtggtgtcctgcacgggaggcggtgactgcagagcgggacggctggcagggccgcgacagcgacggcgacgactggagcgattgaatgccattgccattgctgttgcagtgatcagcgtgtaaatctgcacagctg

SEQ ID NO: 1103 - DNA, 502 bp, Chlorella sorokiniana
  Clone ID: LIB3602-029-Q6-K1-B1
cgcgtgctgctggcttggcgggatgccaccggcggctgcctgcccccgctcgacctctccagcctgcctacccctccagccgccactcctccgctgctggcataagccaagccagctcagctagctgagcctctgtacccaactcaagcttgtgccagcttttgtgatgtgttctggctagctccgcattagcgttgccgccgccgcgccccatcttgtttgccaccgcatttcttcgcctcaacgaacaaacgaaccccgcaacacgctatgctccccatccctcatttgttcgccgcacttgcctgtaccccagaagcccagccccttaccgagtcatctgtgcattaccccattcaccctgtgcccccgctctctgctctgcactcccgtctagagagattcatccccctgctttcgttgctagagcgctctcgcgtatcatgcattagagctgcctcctgcttttgagatgccacgcccttggttgagggctagccct

SEQ ID NO: 1104 - DNA, 382 bp, Chlorella sorokiniana
  unsure (1)..(382): unsure at all n locations; Clone ID: LIB3602-029-Q6-K1-B10
agaacggccgcctcgccatgttctccatgttcggcttcttcgtgcagggcctggtgaccggcaagtcccccctggaaaacctggctgaccaccttgctgagccgtctgtgaacaacggcttcgcgtccgccaccaagttcctgcccctggcctgaacgccgtcgtcaacctggagcgacctgggcatcccatattaacggcggccagccggttttggacaagcacacacaacatatgagattcccaacctccctgcgcactgcttgtaacaatcctggctccctcttgtacccttgacccgcactcgggcgtggatatgtaacgttccgcgggaaaaaaaaannnnnnnnannnnnnnnnnnnnnnnnnnnnnnnnnnnnna

SEQ ID NO: 1105 - DNA, 365 bp, Chlorella sorokiniana
  unsure (1)..(365): unsure at all n locations; Clone ID: LIB3602-029-Q6-K1-B11
cgaagtgcctttttgaggtttctgcctggagttaccggagcactgcccaccctcccatgcctaaagatgtccattcagggcgcactccttgcaaaacacccgcccactgctgaaaaagaatgaccactgccgaaggccaagtcaaacccttgactgagcctgagcactgagtgcctccccccaacgcatgccccctttgctcctgtgctgctgcctcctggcgcagccagtcttgcccccattcattaagagctgagctgagccaatgagatatgtaaggcttacgtaccccaaaaaaaaaaaaaaaaaaaaaaaaaaaaaaaaaaaaaaaaaaaaaaaaaaaaaaaaaaaaaaaannnaannna

SEQ ID NO: 1106 - DNA, 418 bp, Chlorella sorokiniana
  Clone ID: LIB3602-029-Q6-K1-B12
cagcgggctacctgcgggcagcagcggcaccatggatacgcccgtgaagctcgctatcgtgatgaaggttatgggccgcaccggctcccgcggccaggtgacgcaagtgcgcgtcaagttcctggatgatcagaaccgcctgatcatgcgcaacgtcaagggccccgtgcgcgagggtgacatcctgaccctgctggagtctgagcgcgaggcccgccgcctgcgctaagcggcagtgccgcccagccgcgtcgcacgggagagcggcgtgcgccagcatggcagccgcggcagcgagttagccacgtgttgcagctggtggcccgccctgtgggcgtctgcagcagcagcccgggtggcaggtgtcccgtctggggcgaccagcccccgacccattgggatgtaacacatctgaccg

SEQ ID NO: 1107 - DNA, 513 bp, Chlorella sorokiniana
  Clone ID: LIB3602-029-Q6-K1-B2
ctcgacatatcgaggtcccacggccctccagccggctgcacggctctggtctcgcttggctttgcagtttcccagcctggcagcacgccctggccccttccaacgccccaggatcagcaccgtgcgtggtcggcgatgggcgtgagcgccgcagacgtggaggcgcgcctgcgcagcgagctggcggccacagacgtgcaagtgcaggacattgcaggctgcggcactagctttgaggtgcacgttgtgtcgccgcagtttgagggcaagcggctgctggagcggcacaagctggtgaacgcagcgctggcgccgctgatgcctgagatccatgccctttcaatcaagaaggccaagtctcccgcggaggctgcagcacagtagttttcttaaacttcagcatgacaccagctgcgactttgccgccggcccctgttgccgtcatctcgtggcgcattggtttgcattgcgccgctgtgtgttcgccacatcacactgcctggttgctcgctg

SEQ ID NO: 1108 - DNA, 534 bp, Chlorella sorokiniana
  unsure (1)..(534): unsure at all n locations; Clone ID: LIB3602-029-Q6-K1-B3
cggaccggaattgccgacccaagccaccgctccacatatcacctggcgaccgccctccagccggctgtacggctgttgactaccttgcgtgagcagcttcggaggacggcttcgcgtccgccaccaagttcctgccccaggatcagcaccgtgcgtggactgcgagcgacctgagcatcccatattaacggcggccagccggttttggacaagcacacacaacatatgaagtgcnngacattgctggctgtggtagtaacaatgacggctacctctgtccccttagccgaagacaagcagatgctggagcggcacaagctgttgaacccagccctggcgccgctaatgcgtgcgatccgggcccttttcagtcactagggccatgtcttcccccgccgctgtacaagatgtacttgcttatacttcagcatgacaccagctgccactttgccgacggtccctgtagccgtcatgtaatggcgcattgattagcattgcgccggtgagtgtcctccacagaagactgcctgggtg

SEQ ID NO: 1109 - DNA, 371 bp, Chlorella sorokiniana
  Clone ID: LIB3602-029-Q6-K1-B4
gcggagcgcagcctgccgcggccggccatggcggcggccgctgcgcgcgctgcccagctggcgccgcatgaggctgagctggacgctgagctggacgaggcggcagaggagatcaaggctgcgatgcgggagcagttccgtccggaggacttggcccagtttgcgattgcaggagatgccgatttcgagggcgcggtgggcggcgccgccgcgctgcgctccggcggccttgtcactgtgaagggagacaagaagcgggcggcggatggcggcggcagcggcaagaaggatggggggcgcaaggagcggcagcagcagcagcagggcggcggcgggcgtaagcacaaggccggcggcagcagcggggcagg

SEQ ID NO: 1110 - DNA, 312 bp, Chlorella sorokiniana
  unsure (1)..(312): unsure at all n locations; Clone ID: LIB3602-029-Q6-K1-B5
cacagaccccttattcctgggcagggatgatggccgctttccgtcgccatcctgctgccgcggcgccgagtgtgcgcaggagcgcacggggcgcgtggcggtgctgacgtacttgcagggagaggcgtacctgccgctgctgcagcagctggagtgcacgctgcgcaggagcaaccctgggctggaactgggggtgatgctggtgcggngcgagcagcagagccccacggtgctgagctggctggaccgcaaacgcatcagccgcgtccaggttgagccgcttagttacaccaatcatttcgacgccaggta

SEQ ID NO: 1111 - DNA, 424 bp, Chlorella sorokiniana
  unsure (1)..(424): unsure at all n locations; Clone ID: LIB3602-029-Q6-K1-B6
ggcagcagcgagcgcgacacataacttctgagcgctttgacttgtttgtgatccattttttcctcaatccacttttccgggctttttgtacctttgcgctgttgcacagccactgcccctgtactactcttcgcactctcgcggcctgacgcccgcgcctgtccaccatcccagcacccgtgccccgtctgcttctctgcagaattttctggccggcgcatgctttcatgcctccactcacccctgctcccccaaacacaaatcagaacgaattctgcatatcgtgctgcaacgcaagaagaggggcaaaaaaaaaaaaaaaaaaaaaaaaaaaaaaaaaaaaaaaaaaaaaaaannaanannaaaaaaannnaannnnagggggggcgggctaaagaaaacaaaaataaggacggggggggcc

SEQ ID NO: 1112 - DNA, 512 bp, Chlorella sorokiniana
  Clone ID: LIB3602-029-Q6-K1-B7
gcggccgctcgcgatctagaactagcccacgcgtccggcccagtccatcgtggctgtgctgctgacccagctggtgatcatgggcgccgccgaggcgtaccgctacagcggcgagggccccgtggagaccagcggcgactccctgtaccccggcggcttcttcgaccccctgggtctggctgacgaccccgacaccctggctgagctgaaggtgaaggagatcaagaacggccgcctcgccatgttctccatgttcggcttcttcgtgcagggcctggtgaccggcaagtcccccctggaaaacctggctgaccaccttgctgagccgtctgtgaacaacggcttcgcgtccgccaccaagttcctgcccctggcctgaacgccgtcgtcaacctggagcgacctgggcatcccatattaacggcggccagccggttttggacaagcacacacaacatatgagattcccaacctccctgcgcactgcttgtaacaatcctggctccctcttg

SEQ ID NO: 1113 - DNA, 291 bp, Chlorella sorokiniana
  Clone ID: LIB3602-029-Q6-K1-B8
tgcagggcctggtgaccggcaagtcccccctggaaaacctggctgaccaccttgctgagccgtctgtgaacaacggcttcgcgtccgccaccaagttcctgcccctggcctgaacgccgtcgtcaacctggagcgacctgggcatcccatattaacggcggccagccggttttggacaagcacacacaacatatgagattcccaacctccctgcgcactgcttgtaacaatcctggctccctcttgtacccttgacccgcactcgggcgtggatatgtaacgttccgcggg

SEQ ID NO: 1114 - DNA, 519 bp, Chlorella sorokiniana
  Clone ID: LIB3602-029-Q6-K1-B9
gcgcccatgaccaccaacctcagcaaggcgctcaaggcgttccagcagcgccaggcgcgctacctgccctcaggagcggcgcatgcagcgcgcaaggcgccctcgctggcgacccgcggcaccgcagcagccagccagtccaagcgcagcgccctgacgcactcgcggcccaccaagacggcaggagctgccaagagcggcggcagcagcagcagcaaccttagcaaggcgacgctgcccttggacaaggggcggacgaccgcaggggcaggcctgggctcacgagctccctccgcctcccgcctcgcctccgcgttgcagcagcaccagcaacagcagcagcagcaggcggggctgtgaacccgctgcaggcaacagggcagcaagttgataataaacagcccacctgcgtcctgcgtgcgtgttgagcgtgtagtgtagcactagtgagtgtgcagcaagtggtcgggcgattgccgcggccttgagagccctctgtcaagcctttcatttgatgtc

SEQ ID NO: 1115 - DNA, 520 bp, Chlorella sorokiniana
  unsure (1)..(520): unsure at all n locations; Clone ID: LIB3602-029-Q6-K1-C1
gtcacgattaagtcatgatcgatttcgattgctgcaacgcattgcgcaccgagcacgcatgtgctgagccacgctggccgctacacccggtactgcaccggagaccgccgttaggcaccgctatcgccgcaaggcaccgctacccgccgcaaggcaccgctgattgccgctcctggctttgcccctgctggcacccctgccctggcacccctccctgctgttgcattgcagcaaacccccatcgccctctgcagcatgatgcacttgctggaagctgcatgcgccaccctccatccatcactcgagcatgagcatttcgcgatcgtgtggagcctcccctncccncttcctgtccctcccttcctgtccctcccctcccgtccccttccatcccctcccctcccctccctctgctcccctccctgctcctccccctccctgccctccctaggctaccgcacatgacgccctcccactgaccggctgagctcggcccagcaacccccacgggctcccatgc

SEQ ID NO: 1116 - DNA, 516 bp, Chlorella sorokiniana
  Clone ID: LIB3602-029-Q6-K1-C10
gggccaggccgtgcgggctgcgccccgccccgccgccgcgcgctccgctcgccgctccgtggcgccccgcgccatgctggagacccagcgcatggccaccagcttcgatggcttcaagtttgagcccatccgcgagtcgcagatctcgcgcgccatgacggctcgctacatgaaggacatgcacgagcatgccgaggtggacatcgtgattgtgggtgctggctctgccggtctggctgccgcctacgagctcagcaagcaccccgatgtcaaggttgccatcattgagcagggcgtggcgcctggtggcggctcctggctgggcggccagctcttcagtgccatgtgcatccgcaagcccgcggacaagttcctggacgagctgcaggtgccctacgaggacgagggctcctttgtggtggtgcgccatgccgccctcatgacctccaccctgctgtccaaggtgctggccgcccccaacatcaagctgttcaacgccaccgccgccgaggacct

SEQ ID NO: 1117 - DNA, 315 bp, Chlorella sorokiniana
  Clone ID: LIB3602-029-Q6-K1-C12
cccacgcgtccgcggacgcgtgggcgccgccaacgctgctgaggcccgcgcggaagtgaagagcgtggtgtgcgccagcaaccccacctccaagatctgcctcaaggacagcgccaagaactgaggcgtgccagctggactgagcgagcgctgagcccttgctggccgcacctgaggcaggcagccattgctgactgccggggggcaccgggccgccacccgctgcccggcagcatgggcgaggcggcgtgagaaagagaggacttgtgcactgccacacagttttttggacacctgtgctgtaacatatacttg

SEQ ID NO: 1118 - DNA, 365 bp, Chlorella sorokiniana
  Clone ID: LIB3602-029-Q6-K1-C2
gcgtgggcaagggcagcgtggcggtgggggaggtggccgacaacatcgaggccgacctggtggtgctgtccaccgcggcaatccacgagaagcacgtggacggcaacctgctggcagaatttgtcccctgccccgtgctgctactgccttgagcggccaacatggcgtaaagaatacggtggcgggctgtggcgcgtgtactcgcagcagcgagcgcggcagccagccttatgtgtattttagtccttcagttttcatgaccatcaacgtgatgagatcaatgtgtatcatcaagcaataacccgggcatgcacgtagagctggccggcttgctgctattccagtttgtaagtttgaacccttca

SEQ ID NO: 1119 - DNA, 514 bp, Chlorella sorokiniana
  Clone ID: LIB3602-029-Q6-K1-C3
ggccgaagaatgatgctgcctcagcgctgcttttgacggcgcagcatgcacagccacccctcctctgtaaaactgaaatcgttaaaaaaaaaaaaaaaaaaaaaaaaaaaaaaaaaaaaaaaaaaaaaaaaaaaaaaaaaaaaaaaaaaaaaaaaaaaaaaaaaaaaaaaaaaaaaaaaaaaaaaaaaaaaaaaaaaaaaaaaaaaaaaaaaaaagggggggcccttttaaaagaaccaaatttaacttcccggggatgggaaattaaaattttttttatggggaaaccaaaattaaatccctgggccgtcgttaaaaaacacgtgaattggaaaaacctttggtaaaacaaaaataaatcgcttgaaaaaaaatccccttttaccaggtggggaaaaaaaaaaaaaggcccaaaccaattgcctttcaaaaaattggccaaccttaaagggaaaagggaaccccccttgaaccgcacaaaaaagcgggggggggggggggtttaccccaaggg

SEQ ID NO: 1120 - DNA, 510 bp, Chlorella sorokiniana
  Clone ID: LIB3602-029-Q6-K1-C4
catcaacgccgcatccgccggcggcagcaggctgcagccgggcggccaggaggtgcagcccacccaggcatccgacccaccgtttgagggctgggacggcgtgggcggcggggtggacgagtatgtgcctggatcgattgccgagattgggttggaccatctgggcggtgtggtgcttctggatgcagaaggcttcgccctgcccatccccgtgccagttggcatgagcgatgcagcgcagcttttccacaccgcaggccccgagttccgccgcccatccaccctggctctgtgggtgcacagcttgcaagcggcgggcgcgtctgtggatcgagtgctcatcacgcgcctagtgggaacgaccgtctatgctcgcgtcgttctgaggctggcgggagggcagcagagcagcctggatgcccgccctgcagatgcaatatcgctggccattcaatccgccagccctatctacatcagccgtcgcctggcggcctcgcagcagccagggtc

SEQ ID NO: 1121 - DNA, 493 bp, Chlorella sorokiniana
  Clone ID: LIB3602-029-Q6-K1-C5
cggacgcgtgggtttgagttcaatatacttgctccacaccatgtaattatgtttcattgcaaaaaaaaaaaaaaaaaaaaaaaaaaaaaaaaaaaaaaaaaaaaaaaaaaaaaaaaaaaagaggaaaaaaaaaaaaaaaaaaaaaaaaaaaaaaaaaaaaaaaaaaaaaaaaaaaaaaatataaaaaaaaaaaaaaaaaaaaaaaagggggggggcccttaaaaaaaaaccaagataaaagcaccccggttggaaaaaaaaatttttttttgagggacgccaaaaatgaaagccggggcgggcattaaaaaaactgggaaggggaaaaaccctgggtaaaaaaaaaaaaaataacgtgaagaaaaacaccttttgccgagggggggaaaaaaaaaaaggggcagggaggtaacccccaaaaaaaaggaggccaaccctgaaggaaaaaggaccccccccattaaagcccaaaaaactgtgggggggggggggg

SEQ ID NO: 1122 - DNA, 493 bp, Chlorella sorokiniana
  Clone ID: LIB3602-029-Q6-K1-C6
cgggttcggccgacttcaagacggagctgagccagtcggacatgtttgacccgcgcctgcaggcggtggtgcttgcagtggtggatgtctcctacggcggcgagaacggcttcaaccaggccattgagctgtcggcggagacgctagccaacgtcaagtttgtgcaggagaagcggctgatcagcagcttcttcgaccagatcagccaggacacgggcaagtttgtgtttggagtgaaggacacgctggcatgcctggagatgggcgctgtggagacgctgattgtgtgggagaacctggacatcaaccgatacgtgttcaccaacccatccacgggcgttcaggacatcaagttcttgaacaaggagcaggagagcgaggccaagcacttcaaggaccccgccaccaacgtggacctggacgtgaccgacaagcaacccatgctggagtggctggccaacaactacaagaagtttggctgcgtgctcgagtt

SEQ ID NO: 1123 - DNA, 439 bp, Chlorella sorokiniana
  unsure (1)..(439): unsure at all n locations; Clone ID: LIB3602-029-Q6-K1-C7
caggtatttaaccttccgatatgacaacgtggtggaccaggcgccagcggtgggcatccaccatgccccccgcgcccgtgtggacgactgcctctacgtcccagcgcccatgcagcaccgcgcggcggggtggaccccggagtggggcaaggcctggataggctatggcgcaccacggtacggcctgtgaggcagcccattttgtggctgctgcgagcggcggcagcgggcggcgatggatcgccacggtcgccgcggcgccttgcaggccctcctgatatttgccctttgcttcagtaactgcaagagctttttgacgctcaataaagctattcctccctgcccgcatctctcgtgctttccacctgcacttcgtggncctcgagcgccctggggcactggggcagcctccaggcctnnttatcctgtannagcttat

SEQ ID NO: 1124 - DNA, 515 bp, Chlorella sorokiniana
  Clone ID: LIB3602-029-Q6-K1-C8
catgacggttgatcggatgcccctgagccatcctgcctgccggtatcaagtggttgccactttcatgcgggccctcgcagcctgtacgtgcaagacccgcatgacctgatgctttactacgatagctactaccgcccagcctccatgctgtggctgcccctcaaggggctgaacctctccgccggagcgccagcccaggtggtcaacgcggtgtggctgccgcccaacgtgacgggcgacgccacgcagctgctgcacccagcacccgcaccgtttgagatcctggtgggcgcgctcccgccgccctgcgccactggctgacgcaggtccaggaatggagcagcgtgctgctgctgcacagatgcagctgactggcgcggtgcgaatggccagcagcggcagcggcttgcaagatgtcccatttggccccgccgcaatgcagatcatgcgtcgccgctgcaaacggcggttgtttgtcggaagtgttggacagttttctcgcattataaatttat

SEQ ID NO: 1125 - DNA, 283 bp, Chlorella sorokiniana
  Clone ID: LIB3602-029-Q6-K1-C9
atgctcctggctgcacccatgcctgctgtatgggctgccccatgtacctacctagcgcctgccccttttgcctagcctgccacctgtagcgtcccttctgccccctgtgtattatatgagctgacttctgcacccgcccccctttcgatggggcctgtttttccctctggcacaatgctcgcataagaccccagccatgctattccacactggcacgcctcctcacattccatgattttccagtcggcaattcagcaacatcagtgtaacttcattcaacaca

SEQ ID NO: 1126 - DNA, 451 bp, Chlorella sorokiniana
  unsure (1)..(451): unsure at all n locations; Clone ID: LIB3602-029-Q6-K1-D1
cggacgcgtgggcggacgcgtgggccctgttccacagtcagccacccgtgcaatgataacacacgcaaaaaaaaaaaaaaaaaaaaaaaaaaaaaaaannntataaaaaaaaaaaaaaaatataaagatgnnttaaaaaaaaaaaataaaaaaaaaaaaaaataaaaaatataaaaatataatatattatattttttaatgttaaaaattttatagtgggtttatgtttttaagttttaaaatttttaaagttgttaaaaaatttaattttttttttttttgtggaatttaaaaatatttgggttttggggtattaaaaaaatatggaaataggaaataacctttgtaaactaaaaattaattgtgattggaaaattggatttttggatgtggttttttattgaaaaaatttggggtgtaaaggtttatttttataaaaaaagtttaaatt

SEQ ID NO: 1127 - DNA, 517 bp, Chlorella sorokiniana
  Clone ID: LIB3602-029-Q6-K1-D10
gcagcgcggcggctgccgatgccgccggcagcagcagctcagccccggcggcagcgccccgcagccccttccaagtcaactcctcgcaagcggacaagacgtttgtgagccccttcggtcccagcagcagcagcggcagcagcagcccctttggcagccccggcggcgtggccaagcggccgttcgctgagccggcgggtctgtcgcccaacatgccgacccccaagcaggactcgactccctggtggaccaaggtcacgctcacacaagtggtcatcgtgctgtccttcacaaccatcatcggcctcatgatctcaaccttcttcttcgttctgtccaccggggccatccacttcaacgagtgatgcgagttatgaatgcaatcgtctggaaccaggcagcagcgagcagcacatggcggcaaaaggccgacggcggctgtgtgtgcttccggctgcgctgcttgttcgccgaacactgagcttgcctcgtcgtgtaagtctttagttcgtaaaaa

SEQ ID NO: 1128 - DNA, 445 bp, Chlorella sorokiniana
  Clone ID: LIB3602-029-Q6-K1-D11
catgttgaatgttttactgatgattgcagccgccgtgagggcagcgctccttctcaagcaagcaaatcactacacggcaaggaagggtttcgcggcagcgcacccgcgatggagtgcgatgcctgctggaacacagcatgacacgggcgagaatggaacatgcgcacgaaaacgaaggtggggagcaggagggacacaccctaggcggtgtgccacccagaacaatcaagaggtggccgcaaaaccgggcgtcctggccgcccagcccaagggcacccaaggccctgccttcctcctgccgcatttgctggccagagtggccgccaacaggggtcattggccccttgcaccggctaccgcaccgcctactgaggcggtggataatagccgtagtaaccataggcagcggcagcgccggttggcggcgcgcccgccgccggcatct

SEQ ID NO: 1129 - DNA, 389 bp, Chlorella sorokiniana
  Clone ID: LIB3602-029-Q6-K1-D12
attattataaaaaaaatttttttttttagtgtttttttaaaggaaagagaaaaaaaaaagaagaagggggggaaaaaaaaaaatggaaaaaaagaggaaaaaggggggggggaaaaaaaaaaaaacattttaaaaaaaggggggggaggggggaaaaaaaaaaagaaaaaaaaattttatttaaaaaaaaaaggcaaaaaaaaacaacccgcctggttggtgaaaaaaaaatgtgttgagcagaaaaaaaaagaggaggggtaataagaaaaaaaggagggaaacctctttggctagtggggggggggttgtaaaaaagcctaaccaaaggaaaaggttaaaaaaaaaaaaaattcttttaaaatcaacataaaaaaagaaacaatttt

SEQ ID NO: 1130 - DNA, 495 bp, Chlorella sorokiniana
  unsure (1)..(495): unsure at all n locations; Clone ID: LIB3602-029-Q6-K1-D2
aaaaaaaaaaaaaaaaaaaaaaaaaaaaaaaaaaaaaaaacaataaatgataaaaaaaaaaaaaaaaaaaaaataagaaagaaaaaaaaaataaaaaaaatggaagaaaaaaaaagtatttaattttaaaggatttggtcttctttgaataaagtttgaaaattgattgtnatttttaaaatttaaaatttttttttttttcttggggggggggttttttttttgggttctactttttccccctgtgatcttgaacaattttttttttttgttctccatgtttgaattattcccgcgggccctgtttaccgccttgttctttgtgaaaaacctntgtttgaccattttttttggtttttgggacaccctttttttggggggggggtttatttttggggggtgtcttttaccggggcttttttttcattttttttctccccctttttttgggttttttgggcctttttttttgggggggggaaaattgtggggggg

SEQ ID NO: 1131 - DNA, 417 bp, Chlorella sorokiniana
  unsure (1)..(417): unsure at all n locations; Clone ID: LIB3602-029-Q6-K1-D3
ggggagncattaatgttacaggggggaggatacaacgggggggcgcacaattggcacccccctgaggagtgcaaacaaaagcggacgtgatgaggatcaagtcgaggcggggcccattggaaaaggggcccacaaccaaccaaatgggcgatcccaaaggagcgagcaggggcttggcgttatgcttaactttcaaaaggtactctgaagggcaactgaaagggtgggggtgcaaccaaatgcctttgtgggccccgtggcttgtgggttgggtgaagatgggggcaagaaaaaaacgggtcggcaggggggctgaaggggtacacaaatgggcaggaaacagggaaaacaggtgcaatttgggggcccgtggctggccaacaacctagggagtcatgcaaaatgggcggggagccc

SEQ ID NO: 1132 - DNA, 524 bp, Chlorella sorokiniana
  Clone ID: LIB3602-029-Q6-K1-D4
agcggagcagggagcaagcgccatggctcccgcagacaagagcaaggccgccaaggccgccaaggcggtcaagaagagctccttcaagaagacgaagaagccccgctacagcgtggtgttccaccgccccaagaccctcgttcgcagccgggaccccaagttcccccgcgtcagcgcgccccgccaggcccgcctggatgagcactccgtgatcaagtaccccctgaccactgagtccgccatgaagaagattgaggacaacaacaccctggtcttcatcgtggacgtgcgcgccgacaagaaggcgatcaagaaggctgtggcccgcctgtacgacatccagaccaagaagatcaacaccctcatccggcccgacggccagaagaaggcgtacgtgcggctgaccgccgactacgatgcgctggatgtggccaacaagattggcgtgatctaaagcgtgcggctggagcggggcggttcccgcccctcccaacccacccttggcctggtgcccaggcgccggc

SEQ ID NO: 1133 - DNA, 477 bp, Chlorella sorokiniana
  Clone ID: LIB3602-029-Q6-K1-D5
tgctgggcggcatcagcatcatgcgcagggtgtcatcagcgtgaccagcaatgtcatcccgggcctgatgtcaagcctcatgaacgggcgtgacgatgcaacggcagagagcctcaaggagcttattgcctggctgttctgcgagcccaaccctatcccgctgaacaccgcgctggccatgtgtgggcttgttcgcccgattttccggctgccctacgttcctctgtcgcgtgagcagcgcgagcatggtgccaagctgctgcgggcagtgcagcaccacatcccaggctgcaaggaagtccgcgtcatggatgacgaggagttcatcctgatccactctgctggctattgaccgtgtgaccctctttgacagagaaggggaggttgaaagtccaccgccgctgctgctagcactgtcacgctttgccacagtaatgtacagctcataagtgccacatgtaactctggaaggacagc

SEQ ID NO: 1134 - DNA, 327 bp, Chlorella sorokiniana
  Clone ID: LIB3602-029-Q6-K1-D6
gcgctccgactggtcccagcacaaggcggcgtgcaaggaggctgcgcgcggagagggcacaggtgccgccaagtgacgggtggtcagcttccagcaggcggaacaaccatggcgcttctgtgctgcaagactgttggcattgtcgcctcatactcgcacagcttgtcaaatccatgccctatactttgagcaccacaaaacagccgccacaagctgcatgcattggccctgcacctggccgcttatgccacccaacacactccactgttctggcctcgtccctgtcattgctgtttgtatttttgcaatataaggatctccgtgggc

SEQ ID NO: 1135 - DNA, 68 bp, Chlorella sorokiniana
  unsure (1)..(68): unsure at all n locations; Clone ID: LIB3602-029-Q6-K1-D7
cttcaacgaggacggcctgaactacctggngcannacccctccctgnnatccnnacgcccnnagtcca

SEQ ID NO: 1136 - DNA, 187 bp, Chlorella sorokiniana
  Clone ID: LIB3602-029-Q6-K1-D8
cccgtacagttatctgttcatgcatgccgccacgcatgccactgcttcctgctacttccctgcttttcgcacacctgcagtctgcactgcctgcaacttgaactcaactcccattgttgcaccgtttccaccaagagcacctctgcttacctgttcatgccctctgcttcagtaattacagctgagc

SEQ ID NO: 1137 - DNA, 518 bp, Chlorella sorokiniana
  Clone ID: LIB3602-029-Q6-K1-D9
ccctattgcctgtggggtctcaggagcaggatggtgaagttcctgaagcccgggaaggtggtcatccttctgtccggccgctatgccggcaagaaggcggtcatcgtgaagaactacgatgatggcaccagcagccgcccctacggccacgcgctcgtgtgcggcctgtctaaggagccccggaaggtgatcaagcggtcgtccctcaagacccaggcgcgccgctccagcctgaagaccttcatcaaggtggtcaactaccagcacatgatgcccacccgctacacgctggaggtggacctcaagggcgtggtgaccgccgagtgcgtggacaacagcaccaagaaagtggaggccaacaaggaggccaaggcgctgctggaggagaagttcaagagcggcaagaaccggtggttcttcaccaagctccgcttctgagggagtttcttggagagcctaggttgcagcagccgtgacgtgacgtgctccttgccccgagacgccatgtaacgtcacac

SEQ ID NO: 1138 - DNA, 308 bp, Chlorella sorokiniana
  Clone ID: LIB3602-029-Q6-K1-E1
gctcgagcaaggtccgccagcagctgactgcactgctggacagcgtgtgaaccctgcccagcgggccctgcctcgatccttttaccgtaccatgtagcatatactacttgccctcgcgcttttgcctctggcccgccccgcttcctttctttctgctgcaagacaacttgttcactgtggggtttgccgacccgcttgtgttgcaccgaccgcggcgcccccgccgccctgcgccgcctgaccattcgttgtgcacactgacccatccgctgtattcgtccacgaccacgtgtatactactaattgtg

SEQ ID NO: 1139 - DNA, 76 bp, Chlorella sorokiniana
  Clone ID: LIB3602-029-Q6-K1-E10
aaaaaaaaaaaaaaaaaaaaaaaaaaaaaaaaaaaaaaaaaaaaaaaaaaaaaaaaataaaattgaaactaaaggg

SEQ ID NO: 1140 - DNA, 503 bp, Chlorella sorokiniana
  Clone ID: LIB3602-029-Q6-K1-E11
cggaggacgacgagggatggtctggcctggaggatgagccagtgtttgtggacgccaccggcgagcaggtggtgggccctgacgaggaccccctggaggagctggagctgtccctgcgccgcaagatcctgagcaccctcaacgccatcgtgctcaccgacttccccacagccgagcaccccgagcaccccaactggctccacgcccacgagtcctggcccaagaagagcacgccggctgaccacgccaagtacctccgcctcatcccgctgtaccagatgacaagtaccgcaaggcgggcaaggcgggcctggagcccaagcccgagtactactccccgcgggagctggcgctgctggacgccatcctgaccgccgagaacaacctggcgccctccgccggcagccgcgtgaacaccggcttcttcaaatccggtgcctggctgatccaccccggcatgttccccgagcggctgcgcacctggctgaccgccgacgccgggc

SEQ ID NO: 1141 - DNA, 505 bp, Chlorella sorokiniana
  Clone ID: LIB3602-029-Q6-K1-E12
tgcagctgcttccgcaccgcagcccgaggccccgcagcagcaggcgtctgcgccgccgcccccgccgccgcccgcggcgccagcggcgccgccgcggcaggctgcggctgcgccagcgccagcggcagcccccgccgctgaggctcatcgcatgcccagcattcgcttcccgccgcggcgcacacctgagggagatcagatctcagcactgccccgcacggaggcagagcgcatgatggcacaggtgctgagcggcggcgcgcaacaggcgcagcaagcgcaacgggagccaattccagcggagtacaagaacatgattgcagtgcccattgtgggcggttccatgcccatcctgcgcggaatggaggtaccctgcggaccgcccggtcctgcccggcgcaccatgactgatgccgagatggaagccatcatgctgggaggcgcagacccctgaggcggcaggctgtgctgtgctgcgtggcacgctgagctgtgcgtgcgcact

SEQ ID NO: 1142 - DNA, 411 bp, Chlorella sorokiniana
  unsure (1)..(411): unsure at all n locations; Clone ID: LIB3602-029-Q6-K1-E2
ctgggcctggacagcctggacaccgtggagctggtgatggcgctggaggaggagtttgccatcgagatccccgactccgaggcagacaagatcctcagctgcgccgacgccatctcctacatcgcctccaaccccatggcgaggtgaagcgcgcgctgaggcgcacggcgcggtgacgccgcctgccggcccgtgcccgcccctccccgctccaaaccagccttgccatgtacagcacttgtgtctgctccgtctgccagacagggtgcggcagtgctgggaagcgctgatgcgcgctcagcatgccgcgcggccgtgccctcaccacatgccggccggcacacccctgtcctgatttgttgccgctctcctttcagttcgctccgctgttgtaagttccatcactccnna

SEQ ID NO: 1143 - DNA, 513 bp, Chlorella sorokiniana
  unsure (1)..(513): unsure at all n locations; Clone ID: LIB3602-029-Q6-K1-E3
gggaagcctgttgtttcattcgcgtgggcccaaacctgcctctgcgttattattgctgcatgcctcagcctgccactgtcatgtgttcatgcccggggctggccatcgccagcccagcatggttccttttgattatgcaggcaggccgccttttttgtttgcacagccaccttggcggccctccacgcaaaccatgctttttccctcccgcattgaagggctgctgccaaagaggcagcaaggactgcactctctaaccctgcatccccctctgcatcacttctgccggccctcctgctgcttcgctgcatttgcatctgtaaatagagaagctgcaaaaaaaaaaaaaaaannnnaaaaaaaaaaaaaaaaaaaaaaaaaaaaaaaaaaaaaaaaaaaaaaaaaaaaaaaaaaaaaaaaaaaanaaanannnnaaaaaaaaaaaaaaaannaaaaaaaaaaaaaaaaaaaaaaaaaaaaaaaaaaaaaaanaananaaagggggggcccctt

SEQ ID NO: 1144 - DNA, 515 bp, Chlorella sorokiniana
  Clone ID: LIB3602-029-Q6-K1-E4
gtcaaggactgggccagtggcgtggaggcgctggtggacaaggtggtgtcgggcgaggctgggctggagctggtggacaacatggacaagtacgtcagcggcttcatctccagctttgagcgtcgctactccaagctggagcgcgtcatcaagcacactgtgagccgcacgctgctgccctcgccagacaagaagaaaggtgcgggcagcagcggcgggcagaaagcagccaagggcaaggcgcccgcagtgcgcagggcagctggcaaggcagcaaaggcgtgaagagctgagctggctactctgctgcgctggaaacaatttgtcttacctagtaccgcacgtttgttgcatagtgcgcagcggcgcacccgacacaacacatgaccctgaccctgctactttgctgcctcgtttgctgcccctgttcctcccttgcctgctcgtgtctttttcctagcgcactgcctgcctgtgccccttgccgccgcagccagccaagccttcgatgggct

SEQ ID NO: 1145 - DNA, 506 bp, Chlorella sorokiniana
  Clone ID: LIB3602-029-Q6-K1-E5
gtgtggtaggcgggagcacagtcggtcgtgaaacacgcgcctccccacaatggccggcgagcgtgtgcggctctacgtcacgggccagttcctgggctacaagaggagcaaggccaaccagtacaaccacaccgcgctggtgaaggttgagggcgtgaacagcaaggaggagaccgagttctacctcggcaagcgcctggcgtacgtgtacaaggcgaagaccgagaagaagggcagcaagtaccgcgtgatctggggcaaggtgacccgcgcccacggcagcgtcggcaccatccgggccaagttccagaagaacctgccccctgcggccatcggcagcaagatccgcgtgatgctgtacccctcccgcgtgtgagggtcggttgcttcccggagcagcagcggtgcggcacggcgcggcggtgacgagtcgtggcagtgcgaccccgctcggcacggccgcccgggtggcgccgccgtcgcctccatgtaacccttgattagcc

SEQ ID NO: 1146 - DNA, 344 bp, Chlorella sorokiniana
  Clone ID: LIB3602-029-Q6-K1-E6
gccatgcacaccggtcctgccttcattgtgcagcttttcaatcaaccccgacattcgtgggcactcaccctgttctgcacatgtgtccttctccgcagcgatgtttacatttcttttgttcgccttgaacagaccggctgctcagttctgtgtttgattgttcattgtgtcgcgttcttctaatacccctggcaattctcgccccaacatcagcacccttcaccatccagcaacgggctgagccgaccatcggcgcccctttctctttggaagcccctccctaccatttgctctagctgctgtagcgcaacttcaggactgccgcgtaaccaagcggcaggggt

SEQ ID NO: 1147 - DNA, 515 bp, Chlorella sorokiniana
  Clone ID: LIB3602-029-Q6-K1-E7
ggcggagcatcatccatcgtgacgtgaaaagccccaatctgctggtggacgagcactttcgcgtcaaggtggcagacttcaacctgtccaagctgctggagggggcgcggcccgaggccagcctcaccagtgcagcggccaccaaccctatctggctggcccctgaagtgctgtccggcggcagcgcaacggcagccagcgatgtgtacagctttggcatggttttgtttgagctgctgacctggcgcttgccctggacgtttgcccagatgtcacccatccagattggtgccacagtcaggcagggcgggcggccggaggtgctgccgcgtgaagcgctgcccggcccccgacactgccagctgggccggcttggacgcctacatgcagctgatgcgggactgctgggcacagcgacctggggaccgccccgcattcgacgaggttgtgggccgcctgcggcgcctgctggccgagaccgccggcagctgacgccgtgcgacgacctgaggggc

SEQ ID NO: 1148 - DNA, 517 bp, Chlorella sorokiniana
  Clone ID: LIB3602-029-Q6-K1-E8
agggcttccaaatcgcggtggccgagctgcagaccaagtatggcaaggcggcgcagcggcgctacgtcctgctggcactgtggatggcgcggcacggcgccggcgtgctgcccggcaagatgattgtcgactcggcccgccgcctgcgcatctcctccgacctggagtttgagatggaccgcttcaccgaggcgctggccgcggtgcactccaagtacacgtacatggagcggccccgcggcaccccgcagcagcaggcggacgtggcagtcgatgccctggcacggctggtctggggcctgaaggacggccagccaatcccggaggaggattggcagctgctggaggactgcgttgtgggcgggttctgggataccccgaccttccgtgaagccgccaagcgcagcatcgcggagcggcagcagcgggctagcgcgtacctgtgagcgagtgcgcggcaagagtgtaacattggctcgtctgcgcaacatgagtgcaagcttgagaagctgggcag

SEQ ID NO: 1149 - DNA, 487 bp, Chlorella sorokiniana
  Clone ID: LIB3602-029-Q6-K1-E9
cagaaacgaaaaaaaaaaaaaaaaaaaaaaaaaaaaaaaaaaaaaaaaaaaaaaaaaaaaaaaaaaaaaagggaggaaaattatgaggggggcgagatgttgttcggtttcttgcttaccgtacgtgtgtttgctggggcctttcttttttttttgggttggctgatttttttttggggggtgtctttttttttcgttggggtttggccattgtttttggcgttgttgttttttttcgtttgggtgggggttttctttgcggtgggggccgttttgatggtttggccggtgggtttttccctttgtttggcttttggtatgtgccttggaacgggcctttttcctggaggggtgtttttggtgcggggggggtggcggttccctttaccggggcctttgcgcttgctggtttggtggcctcccctcttttggttgttttcttttccgtttttgccgggtgtgttgtttttcggggtctgcttttggg

SEQ ID NO: 1150 - DNA, 509 bp, Chlorella sorokiniana
  unsure (1)..(509): unsure at all n locations; Clone ID: LIB3602-029-Q6-K1-F1
agcagatctacctgttctccctggcggtgaaggagtaccagattgtggacttcttcctgggcggctccctcaaggacgaggtgatgaagatcatgcccgtgcagaagcagacccgtgccggtcagcgcacccgcttcaaggcgtttgtggtggtgggcgactacaacggccactgcggcctgggcgtgaagtgcgccaaggaggtggccaccgccatccgcggcgccatcatcctggccaagatggccactgtgccggtgcgccgcggctactggggtaacaagatcggcaaggtgcacaccgtgcccaccaaggtcaccggcgagtgcggcagcgtgaccgtgcggctgatccccgccccccgcggtgccggcattgtggcggcccgcacccccaagaaggtgctgcagatggctggcattgaggactgctacacctgctcccgcggctccacccgcaccctgggcaactntgtgaaggccaccttctacgccctggccaacacctac

SEQ ID NO: 1151 - DNA, 514 bp, Chlorella sorokiniana
  Clone ID: LIB3602-029-Q6-K1-F10
ggttccaaatcaagcagatcaagggcacagatgttgatgcaaagctgaagcctgggaccacggtccacctgcctggctgtgaccacagccaaggctgggacgaaggctgggacggcatggggtgggagaactctgagcggcgggcggcttaggcgggtgtcgtccacgggtcaagcctcgcttatgccccgcatgttgatgttgcagccgtccttccagcctgcccgaccagcttgtgagagcagttcggtcgttgtagcaccttacctttgcatgactctgccccctgacactggaaagcatgcccccgcgctatgcattgctcataccgcaatgcatcctgccgttccccgccctcacctgtcttcctctgtcgtcccctcgacttttcttcccacccccggccgctcgctcttttcctgtttgcctcctttccccgtcgtgctcaccgcaacgcatgacgccccaccaacgcctgaactgaccatcgcactgcatcccccactgctagagt

SEQ ID NO: 1152 - DNA, 519 bp, Chlorella sorokiniana
  unsure (1)..(519): unsure at all n locations; Clone ID: LIB3602-029-Q6-K1-F11
ggcggaggccatgcgggatgcggccgcctagcgccgccgctgctgcggcaacgtggcgtcatggcaggccctgcacatgcatcggcaggtgctgctcccagtgccgcttcgtttttccccgtgccacgtgttgtgcatgtttgcagcctgcctgccttctgggacgctttgcagccgtgtgcaatggcatttatttgttagcgttgaatgcaacagtgcgagtacaaaaaaaaaaaaaaaaaaaaaaaaaaaaaaaaaaaaaaaaaaaaaaaaaaaaaaaaagaaaaataaaaaaaaaaaaaaaaaaaaaaaaaaaatgaataaaaaaaaaaaataatgaaataatgaagttaaaatgaaattaaatttatttnntttggggggggcccctttttaaagaaaaaaatttttggcgctgggtataataaatttattttttttttatggggcccaaaaaaaaaaaacacgggacgggtttttcaacgcttggactggggaaaaacctgggtttccccaatt

SEQ ID NO: 1153 - DNA, 518 bp, Chlorella sorokiniana
  Clone ID: LIB3602-029-Q6-K1-F12
gcgcagtggagcgaggcccaggagcaccatggtgtcgctcaagctgcagaagaggctggcggcctctgtgctgggctgcggcctgcgcaaggtctggctggaccccaatgaggtcaacgatatctccatggcgaactcccgccagaacgtgcgcaagctggtgaaggacggcttcatcatccgcaagcccgagaagatccactcgcgccaccgcgcccgcaccgcagcagaggccaaggccaagggccggcacaccggctacggtaagcgccgcggtacgcgcgaggcgcgcctgcccaccaagatcctgtggatccgccgcatgcgcgtgctgcgccgcctgctcaagaagtaccgggacagcaagaagattgaccgccacctgtaccacgagctctacctcaaggtgaagggtaacgtgtacaagaacaagcgcgtgctcatggaggccatccacaagcagaaggcggagaagatccgcgagaagaacattgcggaccagctggaggcgcggcgcg

SEQ ID NO: 1154 - DNA, 518 bp, Chlorella sorokiniana
  Clone ID: LIB3602-029-Q6-K1-F2
ggcgcctgccggcctgcaccaggcattgcctgcttatattagagacttgtggttgtctccctgtcgcgcccactccacccaccacaccgctaggctaggccgtaggctgcgccgagagtgtgaggcatttttgtcgttctgccctagccacaggttttggtttttgtgcccagtagctccgcctgctaagtgccaggcaggcccgccgcattgcaatgcatatacctgcaatgcccatttgttcggccgcctgcttgccgtccgctgccacgtgagctgccggcatctttgtttcttgccaccctgactttgctgctatccaagagtaccacccgttgactggcgctctcattgctcttttgaggcgccgttgactccctcacgctcccagcatcagcaggaaacgtaccacttagcactaatttactcagattagacagcatgccgtccaacagccgcctgtctaccgctctgtcccggccatgcttcgcttacacgcattccttccaatttgtacc

SEQ ID NO: 1155 - DNA, 482 bp, Chlorella sorokiniana
  unsure (1)..(482): unsure at all n locations; Clone ID: LIB3602-029-Q6-K1-F3
ggcctttagggcgcacaagatgagaactttgatggcagccaatgcgcagcaggcagccaatgcgcagcaggcggcggcggctgctcagcaggcagccattgctcaggaggcggccaatccgggcgttccccagcagctggaggtggatgctgcgcaggcggctgcacaggttcaagctgagttcgaggcgcactggccgattgatccgctgcgccagctgccacctcgccggctcgatgcactgcacatcgacgcggatttcacgcagttcgggctgcgtgcaggcttgctgtttggcgcagcagccagcctgaccgtggcacgcggcggcgccatgcagctgctgctgncagtcccagcgcagcccacacccgccatggcgcaggtgctgcagcaggttgcagctgccgcagacgcgcaacagggggcaactcccttggtcaacgcatgcgccgatgcgctgctggacgcctttcgagcaa

SEQ ID NO: 1156 - DNA, 521 bp, Chlorella sorokiniana
  Clone ID: LIB3602-029-Q6-K1-F4
gtccagcagcagttagcagccatgcaggccaccttcgccggctctaagctgcagcttggcgcgcgcgtcagccgcaagagcgtgaacaccaccgtggtggcctccagcggcaagaagatcgacatcagcaagcagggcctgaactccatccagaatgagaccgtgaagctcaacctgatgggcaagtccaagaccatggagagcaaggactgggtggacccccagggccgcaagggcaagggctacggcgtgtaccgcttcgccaacaagtacggcgccaacgtggacggctacagcccgatctacacccccgacacctggtccgagtctggcgactcttacaagctgggcaccaagggccttattgcttgggccggcctgattgtggtgctgctgggcgtgggcatcaacctggtgatctccacctctgccctgggccagtaaatggcgacgccccccgcgtcggcagcagcagcagcagccagcagcattcccttgcagctaccccccgagaagacaaa

SEQ ID NO: 1157 - DNA, 524 bp, Chlorella sorokiniana
  Clone ID: LIB3602-029-Q6-K1-F5
gtccaacagcagataacagaccatgcaggccaccttcgccggctctaagctgcagcttggcgcgcgcgtcatccgcgggagcgtcatcgccagcggggtggtctcaaacggcttgaagatcgacattagcaagcagggcccatgtttgcagcctagcctgacttctgggactcatcctgatgggcaagtccaagaccatggatgttagcgttgaatgcaacagtgcgagtccaaaggacaaagactacagttgtgtaccgattgggcaacaagtacggggccaacgtggacggctacatcccgatctacaccaccgacacctggtccgagtctggcgactgttacaggctgtgcaccaagggccttattgcttgggccggcctgattgtggtgctgctgggcgtgggcatcaacctggtgatctccacctgtgccctgtgctcagtaatggcgacgccccccgcgtcgtcagcagctgcagcagccagcagcatttcattgcagctacccccgcgagaagacaa

SEQ ID NO: 1158 - DNA, 118 bp, Chlorella sorokiniana
  Clone ID: LIB3602-029-Q6-K1-F6
gggagacccggctgaacgcgtccccgctgaagacgaccaagccagaaacactacgctagaaggacactgagccgcagctgatggtgctcaagcagcgcgtatccaacttggacatcct

SEQ ID NO: 1159 - DNA, 242 bp, Chlorella sorokiniana
  Clone ID: LIB3602-029-Q6-K1-F7
ggccggtctggcggcgaggcagctccagctgacatgccgctccgctcgttgcatgcttgctcccctctctcagcagctgcagttcctgtctgacgctgcctaggttacactgctcccttgctttctggatcacccgtcctttccgtctccctcactcacctccgttcctgtcctttggtgctggagctgcccaatgctcctggccgctgtctcactgacaacatgctgtaacagttttagac

SEQ ID NO: 1160 - DNA, 140 bp, Chlorella sorokiniana
  Clone ID: LIB3602-029-Q6-K1-F8
ggaacgcttgctgccgcggcagcgcttttggtgggcgcgtcgtggcgcctggcgggttttaccgtctgtacgctggcacatgtgccgcccgccctttttgctgcaacaccttgcaccccaatgatgttagacctcttcag

SEQ ID NO: 1161 - DNA, 514 bp, Chlorella sorokiniana
  Clone ID: LIB3602-029-Q6-K1-F9
gcgaggctggccaggaggttgagaagaagaagcctgtggtggtcaagtacggcatcaaccacatcacgcagctggtggagagcggcaaggcgcagtgcgtggtgattgcgcacgacgtggaccccattgagattgtggtgtggctgcccgcgctgtgcaagaagatgggcgtgccctactgcatcgtcaagggcaaggcgcggctgggcaccgtggtgcacaagaagacggccaccgcgctggcgctgacggcggtgaagaacgaggaccagcgcgagttcgccaagctggtcgagtccttcaagaccatgtacaacgacggcccccgcgtcagctggggcggcggcatcatgggccccaagagccaggcggcgcagaagaagaaggagcgggctctggccaaggacgccggcctccgcgtgtaagcgggcagcacccacctgccgctcaccgcgcgccgggccgggacagcccggccagcagggtcggcgtgccgcgcgtgggcgcgggcgcc

SEQ ID NO: 1162 - DNA, 521 bp, Chlorella sorokiniana
  Clone ID: LIB3602-029-Q6-K1-G1
ggcgccgaggggagagcacgatgcagatcttcgtgaagaccctcacgggcaagaccatcaccctcgaggtggagtcttcggacaccatcgagaatgtgaaggccaagatccaggacaaggagggcatcccccctgaccagcagcgcctgatcttcgccggcaagcagctggaggacggccgcaccctggcagactacaacatccagaaggagtcgacgctgcacctggtgctgcgcctgcgcggcggcatcattgagccgtccctgcagatcctggcccgcaagtacaaccaggacaagatgatctgccgcaagtgctacgcccgcctgcacccccgcgctgtgaactgccgcaagaagaagtgcggccacacctcgcagctgcgccccaagaagaaactcaagtaaactactcgcttcggcacgagcggaagcggcatgagcggcagcaaccgctgccccccccccgccccgccagccgggatgccatgacagcaccggctgctcagctgctgatgtgct

SEQ ID NO: 1163 - DNA, 517 bp, Chlorella sorokiniana
  Clone ID: LIB3602-029-Q6-K1-G10
gcgtgcctggcgcagctggccgtcaccgccggcagcgacgcgcagtggaagccgctcaaccaccaggtgctgatgatgactcgctcgctggagccgcgcacgcgcctgctggccctggagaccgtggctcagctggttggccgcctgtcggaggagtacctggcgctgctgcctgagacgctgcccttcctggcggagctgctggaggacgctgagctggcggtggaggcgcgggcgcagcagctggtgcgtgcgctggaggcgctgtcgggcgagtcgctggagcagtacctgcgctaagaagcgcctgcacaccagaaggggctcctgcctgggcctgccatcagcccacctgcagcccagcccatgggatgtggcccaaatttggcgctccctgctggtcaaatgacagaccattttttcagtccatgcttgcgttaacgctcttgctgacctctctttgcttcgtctggtttggaaagttccgattttgaacgctgccatcatgcaatacacc

SEQ ID NO: 1164 - DNA, 517 bp, Chlorella sorokiniana
  Clone ID: LIB3602-029-Q6-K1-G11
gctggccagcctgcagaccgctttcctcacgctggacgaggccatcaagaccaccaaccggcgtgtgaacgcgctggagcacgtggtgaagcccaggctggagaacaccatcgcctacatcaagggcgagctggacgagctggagcgcgaggagttcttccggctgaagaaggtgcagggcaacaagaagaagcacgccgaggcggcggccgccaaggaggcggaggaggcggcggcggcggcggcgcagggcagcggcacggtagccaacggctcgggggcggcgggagcgcagcagcagcagcagcagggcgatatcctgggcgtgcaggatgcagatatcatcttctaatgccacagcttcctccatttttgttgccggcctgccgcgcctgccggccatgtgtttcttactcctgtccggccgaccgcggcagactttctagccgcaagcactagctgctccgctgcttcccctgtatgctccgctctacgtgccataaccgttttgtacaac

SEQ ID NO: 1165 - DNA, 357 bp, Chlorella sorokiniana
  unsure (1)..(357): unsure at all n locations; Clone ID: LIB3602-029-Q6-K1-G12
ggtcagcacaatggcaaggagcagtgtgtgctgaggcggcctggcgcagcagccggcagcggttctgcccacacatgtgcgcacaccgtgcaggcagctgcttgccatattagcacctggtttgtcatagtgcagtgcctgcacgcccagcagccagcgagtagctgattagggcaggcagatgttggcaggcagcagggcaggcatgcgtaggcagacttacgcaggctagcacgtaggcagcaaggcgctgcccctttgtatccagacgtggggcggcttccatttcatgccccttttagtgtacacccttcgtcaatgccccgcaactgtttgtaacaagccacattcnnnnna

SEQ ID NO: 1166 - DNA, 507 bp, Chlorella sorokiniana
  unsure (1)..(507): unsure at all n locations; Clone ID: LIB3602-029-Q6-K1-G2
ggctcaagtttgataattcctatttccgcgatatttacgagcaaaaaaatgcagacctgctggtgctgcccaccgacgcctgcatctttgaggacgaggccttcaagccctttgccgagaagtacctggccagccaggacgccttcttccaggactatgtggcggcgcacctcaagctgtctgagctgggcgtggagtgggatggcgagcccgtgaccctgaccgcctaagcggcacagcttgtgacgccagggacacccagctctgagcgcgattgagatacatcccattgctgcggagctgccagtggtgcagcattgccctccgcccctgcactgcaaaccaacctgcctattcagttccacatccacccaccgacgccatttcatctgttccttttctgctgatggccacattttgcatattcgcgcatgcgtgcaccccattccttgcattctcatatggcaggaatataaacatgtaacggngtgcaagcnnnnnanaaaa

SEQ ID NO: 1167 - DNA, 520 bp, Chlorella sorokiniana
  Clone ID: LIB3602-029-Q6-K1-G3
gccagaccgtcaagtacaacatgaagaagcgggctggccgcggcttcaccctggaggagctcaaggaggcgggcatcccctccaagctggcgcgctccatcggcattgccgtggaccaccgccgccgcaaccgcagcctggagagcctgcaggagaacgccaaccggctcaaggcctacaaggccaacctggtggtgttcccccgccgcgccggcaagcccaaggcgggcgacgcctcggccgaggagctggcgaccgtgcagcagctcaagggcaagctgctgcctctggccaagccggcggcggcgctggagaaggtggcgatcactgcggagatgaagaaggagagcgcgtacggcaagctgcgtgtggagcggatgaacgcccgcatggtgggcgtccgcgccaagcgcgccgccgaggctgctgctgccgagaaggacgcgtaagcgccctgcgcgcagccgcgactggcagccgcctgtgcggccgggggcgcggtggcggccggcgacgcggc

SEQ ID NO: 1168 - DNA, 498 bp, Chlorella sorokiniana
  Clone ID: LIB3602-029-Q6-K1-G4
aaaaaaaaaaaaaaaaaaaaaaaaaaaaaaaaaaaaaaaaaaaaaaaaaaaaaaaaaaaaaaaaaaaaaaaaaaaaaaaaaaaaaaaaaaagggggggccgctttaagagatccaattttggggccgcgtgttttaaaggtccaagtttttttatggggccacctaaattcaattcattggcttggggttcccaaaattaatgtctgggaaacccttttttttacccaatttattggaattcccggacatccccctttttaaagctgtttaaaaaaaaaacagtttcgcccgtttggcttttacaaaaaatggcccaccctaattgccttttgaaacgtgccctgtaccgaaatataaaacgcgacgcttcttgtggttccccttaacgcgcccgttacttttgtcaaccccttagggcccccttttttttttttttccccttagtttctggccatgtgggttggttttcccctttaagctcaaaatggggggttttt

SEQ ID NO: 1169 - DNA, 179 bp, Chlorella sorokiniana
  Clone ID: LIB3602-029-Q6-K1-G5
gcaaaaaaaaaaaaaaaaaaaaaaaaaaaaaaaaaaaaaaaaaaaaaaaaaaaaaaaaaaaaaaaaaaaaaaaaaaaaaaagggaaaaaaaaaaaaaaagatttggggggcggcccttttagaggacccaactttccgtgcgcgggctggcaaggtattactttttttttgggggccct

SEQ ID NO: 1170 - DNA, 440 bp, Chlorella sorokiniana
  Clone ID: LIB3602-029-Q6-K1-G6
agccgagacgggcctcctttactttgagacgagcgccaagaccaacatcaacgtgacgcagctgttcgaggaggtggccgacaagctgcccaaggcggcggcgccgcagcagccggcgggcggcatccaactgagcgagcagccaacgcctgctccccgcaaggcagccgcctgctgctcgtgagctcactcatctgctgagcctgctgtgcagcctgctggcagcctggcagaccctccgggcacggcgctgctgctgcccgggcacgcaatcgcacagataccatctgcaatgctgtaccatctgcaatgctgcaactgtttctccctccgctgcatgctgcgtgtaaagtagcaccttcgcacctgctccgttaccttgctgcgaatattgaatgtttgctttgggcatcctccatcagctgtaaacagcttgtgct

SEQ ID NO: 1171 - DNA, 325 bp, Chlorella sorokiniana
  unsure (1)..(325): unsure at all n locations; Clone ID: LIB3602-029-Q6-K1-G7
cggacgcgtggggctcgccgcacggcagttgcggcacgccgactgcagccagccgcacagatcctccgaaacccaacggcatgcacatgcgcccaacgcccagcagggctggccagccagtgtctgctgtcctggggcaggccacacagtgctgcatatatattttgtccaggccgagcggcggttgctgcatgatgatgatgatgatgcgttttcccaactgattgatgctatctatcaaacactggctattttccgcaccaagctagtttgtttgccaacccaagtggataatactttggtgaatgtaaactgcgacatcnaa

SEQ ID NO: 1172 - DNA, 516 bp, Chlorella sorokiniana
  Clone ID: LIB3602-029-Q6-K1-G8
gctggagggccacccactgagcgagcgcaagctgaaggaggtgctgggacacacgccccgccaggtgtatgctggcctggtgctgggcatcctgattggcctactcatgcctgtgttctgagcggcctgacttagaccttgggcctggctcttcagccctaaggccagggtggcacgccttgctccaaggcgcacctggggcccatctgtggcatgccatggcgtggtgcacgcacacttgcgctcgagccgtgtcgctgggctggtgcggctgcatctgcccggcacagaggcctgctgccatttcatcccttttcaagctgtttgccccgctcttcatcaccgcagctgctcactgtttttcctcccctgtttccccacttcctctcactgccgcccccactgctgttccttctgtatctaaggcagactgggccttttgctgccgcctgctgccccccagcgtgtcccacattgctgcgcagccgctctgattgtgtgagcgagcttacatgc

SEQ ID NO: 1173 - DNA, 521 bp, Chlorella sorokiniana
  Clone ID: LIB3602-029-Q6-K1-G9
ggatgagcccaccaactacctggaccgcgagtccctgggcgccatggcctccgccatcaaggagtacggcggcggtgtggtgattgtgtcgcatcaccacgagtttgtgaaccaggtgtgccaggagaagtggaccgtgggcggcggcaagctggaggtgaccggccagtccgcggccgctttggaggccgccaagctggagtggaagcgccaggaggagaccaccgacgccttcggcaacaccatcaagatcaaggcccccaagaaggagctgtcgcgcaaggagaagaaggccaaggccaaggccaacgccgcccgccgcgcgcgcggcgaagaggtgtctgacgacgaggatgactactgaggcggcgctttgccgctgcaaacctctcggtttctgtagcgccacgaccccaagtcactgctagccctttggaccgccttttgattgacccctccccctttgattgccaaccctgcctcccctgtaactcgaccgcatctgcttgtaagcctacaca

SEQ ID NO: 1174 - DNA, 245 bp, Chlorella sorokiniana
  Clone ID: LIB3602-029-Q6-K1-H1
agcgatgctgctaaatccacgccatgcttatatcaacccaccctaccataccctgtgctctcctcagcacaccacaccctgtcgtgcctgcccgactgccctctgccgcagcccatggccagccctcttctgccacctgccatcctccaggcattcagcgtaccctctgttgccctagcttgtgcccttttcgccaacacatgatcctgcggcgcgcctgcagccgatgtaagagacctttgtgc

SEQ ID NO: 1175 - DNA, 153 bp, Chlorella sorokiniana
  Clone ID: LIB3602-029-Q6-K1-H10
cgcctcccccgcccgtgcgctctctgcatcggtcgttctgtttgcctgcgggcgcgcttgctcccgggcgccccgcagattttgcatctgctcgctcgtgtgctgtcaggagtcagcggttgtatgatttcctgttgtaattcgtaacgttcc

SEQ ID NO: 1176 - DNA, 517 bp, Chlorella sorokiniana
  Clone ID: LIB3602-029-Q6-K1-H11
ggccaagatggccactgtgccggtgcgccgcggctactggggtaacaagatcggcaaggtgcacaccgtgcccaccaaggtcaccggcgagtgcggcagcgtgaccgtgcggctgatccccgccccccgcggtgccggcattgtggcggcccgcacccccaagaaggtgctgcagatggctggcattgaggactgctacacctgctcccgcggctccacccgcaccctgggcaactttgtgaaggccaccttctacgccctggccaacacctacggcttcctcacccccgacctctggcgcgagaccgtgttcaccaagagcccgctgcaggagtactccgacttcctggccaagccggtggttggcaaggcctactgagcggcctccccatgcccgccgccccgcgcgccgcggcggcaggagcagcagcgtaacagcagcgccctgacgcgaggatagatgagagttgggaccccagtggccgctggggcgctgcgctggcagggcaagccggcg

SEQ ID NO: 1177 - DNA, 457 bp, Chlorella sorokiniana
  Clone ID: LIB3602-029-Q6-K1-H12
ggatatgccagtttattacagcttgaactatgagcattgaggtgcacttgaactctgtgcgggtcttgcacacaagcaaacatgctgaggccacaagtaatgtacaggctagcgcagtgaggcgcgagtggagaaatgtgttgatttagcaaaatggagcatacagattggcaacacaggtgccgcacaaatcgccgacagcgcacagcgggcttccgctctcattcagccactgctgtacatgcagcccagagcaggccagcctactcatcatcgctgctgctgtcctcctctgactccgactcttcctcagacgaggagccctcagaatcatcaaccacctccatttcatcattgaaagcaatccggtttccgtgccgccgctgcccctcgccaccatcgccgctcagcgcctgctgaatgctgtccacgctcggcagatgttttgcagcaacgc

SEQ ID NO: 1178 - DNA, 522 bp, Chlorella sorokiniana
  Clone ID: LIB3602-029-Q6-K1-H2
gccgagcatcttcatcgccatcatctacctgatgggcgggctgcgccacggcggctacttcttcctcaattggctcaccgtgctgctgtccacgctggtggcgcagactctgggcctgctgatcggagccacagtgatggtcgtcaagactgcgcagacagtggcagccgtgctgatgctcacattcatgctagtgggcggcttttatgtgaccaacatccccgtgtggattgcctggatcaagtggctgtccttcctcacgtacaccttcagcctgctgctcaagattgagtttgcggggcgggacctgtgggactgcagcattggcagcgatgagaacttcaacccatccgacccctggaactatgtggcctctgggcagtgcgagccggtcaaggacctgaacgacagcttcaacacatcggtggccctggactccccgccctgggaggcagcggtgctggtgggcatgctgctcgcattccgattggcggtttacattgccctccgcaagaagacgca

SEQ ID NO: 1179 - DNA, 520 bp, Chlorella sorokiniana
  Clone ID: LIB3602-029-Q6-K1-H3
cttcaaggaccccaagcgcttcactggggagcagctgaagcggtcctcctacatgatgatgatgctctccagcgtggccgagtcgcacatccgcaacagtgacttccgtgaggtggagcgcatgctggtggaggctccattcggcgcccgccgcgcaggcaccttctcgcagcaggacattgaccgcgtgaaggcggcgcttgcccgccccggctccctgactggcggcctcaactactaccgggcagcgattgctcagggcaccaagtggcggctggaggctgccgagaggatttacgacaccccggtggtggcgcccaccctgctgatgtgggccgaccaggacctcgccttcctgccccagatgttccaggcatgtgcagcagctggtgctgctgtatccagcttctgcatgcatgtgcgatcgccagccagctaactgcacgaggcctaccggttggcattcacgtgcgcctgcagcaaggcgaagacaagctggttgagcagctgacggtggtgt

SEQ ID NO: 1180 - DNA, 519 bp, Chlorella sorokiniana
  Clone ID: LIB3602-029-Q6-K1-H5
cggacgcgtggggccccaccactcctagcagcagcaaatcgccaccatgtccgagaaggctgcgatcaaggagggcggcaagaagggcgtggaccttcagggtgtgaacgccatgggcggcgtggtgttcttcaacctggcggtggatgttcccaatggcgacatggcgctgctggagaaggtgatggagggcgccaacgcccccgtggacgaggctgctgaggagcgcaagggtggcgctggcgacctggccaagtgcttcctgtccgcgggcgacaagcagctggccatgttcttccacctgcccaagcagctggcggctgacaagggcgtgaccctgaaggagtgggccgcggcggtgctggcacccgtggagggccaccaggtggttgaggagagcgaggagttcctgaaagtcgtctcgccactggaccaggagaagggccgcttcccccttaagcagcgcgacgatgccatcaacgctggcttcggctggttccgcgagaagggcctgatccc

SEQ ID NO: 1181 - DNA, 122 bp, Chlorella sorokiniana
  unsure (1)..(122): unsure at all n locations; Clone ID: LIB3602-029-Q6-K1-H6
ntaaaaaataaaaataaaaaaaaaaacaaaaaaaaaaaaaaattaaaaatataaaaaaaaaaaaaaaaaaaaaaaaggcggaggagaatgaactataaatataaaaaagcacttgggcggtg

SEQ ID NO: 1182 - DNA, 516 bp, Chlorella sorokiniana
  Clone ID: LIB3602-029-Q6-K1-H7
ctttgctctggctgtgctggaaaggctgatcaagagatggaaggtctcggacacacggcggcagcagtttgagctgcagcaggaggttgcacacctgcagcgccaggctgcggcgctcaaccaccccgacacatttgcacaggtgcggcagcattgtggctctttcggcaatgaccacgtctgcctagaattcaaggcctacactgtgtcagttcccagctgttgctatgctttcctgccttggcatgccgcactgccgccccattgcctgcccggtgtccttgcgccgcagagcgccaaggcggaacggaaggcgattgcactttcaaaggagctagcaaaaatgcaggagcagtcgcaggtgccggctggcgcacgcttcttgctgcggctgcccggactgctgcggcttgcgctgctagcttggctcgtgtatcagtcgtctgctgtgccggtggtggcgcacctgcggcctgaaaccgtgtggccgctggggcgctggctcagcatcggtgc

SEQ ID NO: 1183 - DNA, 318 bp, Chlorella sorokiniana
  Clone ID: LIB3602-029-Q6-K1-H8
cggacgcgtgggaaaaaaaaaaaaaaaaaaaaaagaaaaaaaataaaaaaggaaaaaagtaaaaaaaaaagggagggggaaaaaaaatgaatagaaaaatagaaaaaaatggggttggttttttgggtttcaggtttccttcgcgggggtgggtgcgtgtttcgttttttttttttttggcggacttcttttttttgttgcgtgttttcattcgtctttcttgggagaggcctgtgctttcacccttagtctgtttgccgtggcttcccttttctcttttggttttttaaagataagccccctccccctttcgtttct

SEQ ID NO: 1184 - DNA, 508 bp, Chlorella sorokiniana
  Clone ID: LIB3602-029-Q6-K1-H9
gcctatgaagttttgtgtaagcccttgatactcctaacactgcgctgaaaaaaaaaaaaaaaaaaaaaagaaagaaaaaaaaaaaaaaaaagaaaaaaataaaaagaaaaaaaaaaaaaaaaaatgaagaaaaaaaaaagagatgaaaaaaaagaaaaaaaaagaacaaaataaaaaaaagagcgcatataaagggggggggacctttgagggagaatactataatgctggtggtgcagcgcctgaaggattttttttagcgcccctaaaaagttaaatggccgggaagcggtttcatacgcatgggctgtgaaaactccaaggaggcgcaaaatttaacctatgttggactgcatatccgtttttttgcagtttgctttattaaagaagaggggcgcggcgcgattgctatttcacaaacagtcctcccctgtatggttgaaggggacgccccctttgagggcccttaaaagccgttgggaggggaggtcactcgcatggacgcaca

SEQ ID NO: 1185 - DNA, 468 bp, Chlorella sorokiniana
  Clone ID: LIB3602-038-Q6-K1-A1
cacgcgtccggcagggcatgaacaacaccaactattgggacggcccaaagctcgctttcttccacaacatccgcgacctgcccgtggaggtcatggcgctgcccatgcccgactgcgactactacaacacgacgcacggcgacgcgctgtatgcctgcgagctggcgctgcttgttcccaagcttaacatggtcaagcgtaaggcctaccactcactagccgacaagacgcatgacttccaggcccagcattacactggaggacgagatgagccccacaaccaacgtgatgaaccagctcgcagactatgtgtgcgagatcaagcccgtgtgcaagggccacagcttactccactttcattacaggattgaccaaagcagcctgactgctagctcgcgagctgaccaaacgacacgctccagaggacgcagctgctgaaataggctctaagccacaatgcgccagaaa

SEQ ID NO: 1186 - DNA, 67 bp, Chlorella sorokiniana
  unsure (1)..(67): unsure at all n locations; Clone ID: LIB3602-038-Q6-K1-A10
nnnaaaaaaaaaaaaaaaaaaaaaaaatataaaaaaaaaaattaaaaaatataaaaaaaattattaa

SEQ ID NO: 1187 - DNA, 426 bp, Chlorella sorokiniana
  Clone ID: LIB3602-038-Q6-K1-A2
cgtccgcaactgcccaactcttgttttgttgccgctcctacgcttccgtgtgcctcttgtatgggataattgctgctacactgctgacagtgtaactctccgctgccaaaaaaaaaaaaaaaaaaaaaaaaaaaaaaaaaaaaaaaaaaaaaaaaaaaaaaaaaaaaaaaaaaaaaaaaaaaaaaaaaaaaaaaaaaaaaaaaaaaaaaaaaaaaaaaaaaaaaaaaaaaaaaaaaaaaaaaaaaaaaggggggggccgtttaaaaaaaacaaaatttaacgtccgcgggatggaaaaaaaaatcttttataagtgggcaacaaaaacaaaatagcgggcccggtaaaaaaacactgtggagggaaaacacctgggttcacaaaaaaaaggtcttgagaaaaaatccctttttcacaatgggggat

SEQ ID NO: 1188 - DNA, 457 bp, Chlorella sorokiniana
  Clone ID: LIB3602-038-Q6-K1-A3
cacgcgtccgccactgtcatgtttgacacgcccggcacctaccactttgcttgctccgtgggcggcggcgggcactgcaacaatggcatgctcatcaccttcgaggtggagccctgagcggagcttgcttggcgcaacattggcactaaatgtgagtagcctgaggctgcccttcatgcggtcgggcatcccagccccacaaggttcaggactgaatgcacctgcgcacaacacatcaacaagcatctcgcggcggaaatttccccacggtgtgtcgcccattctggacacctctttctgagcactgcacccctctctgacgatcagtgaccccacacacctgcctcccagcaatgcagtctgtgactctgctgcttttgcctttgtagcgcatccgcctccatcccggcagcacattaacatgtaacacgacgcacacgtattataaaatttaata

SEQ ID NO: 1189 - DNA, 140 bp, Chlorella sorokiniana
  unsure (1)..(140): unsure at all n locations; Clone ID: LIB3602-038-Q6-K1-A7
acccacgcgtccgctccanaggagcgcggcgcacgcagagcgcgggcggctgcgtgctcctaacggccctccgtccttcgcgtgtctccggcttggaatctgcgggcgcgctctgcgaagtaggtcaccatgactggtca

SEQ ID NO: 1190 - DNA, 542 bp, Chlorella sorokiniana
  Clone ID: LIB3602-038-Q6-K1-A9
gatgccccacgcctccacctcgccgcgcgccatcgccaccaagctgatcatcgaccagttcatgtttgcgcccacctgcacgctgctgttctactactacaaggtgctcacagaggggcggcccagcgagtacgtgcccgaaatccaggccaagtttgccgacacgatggtcgcaggctggaagctgtggatccccgcccacgtcatcaactttgcctttgtgcccaaccgccagcgcatcctgtacgccaacgtgatctcgatagcgggcacctacatcctgagccgcgcccaggccggcgacttcagcagcagcaaggcgcataagggcggcgaggcgcgcccgcaccgcggcagcacagaggtggtgtgggacggcgtggtgatgaagcaagactgaagccccccctgctgcgccaaagctcaagcctacagctgggcctgaagtccggctgccacaagcacgccggcccggtagccaacacatgcaacgcaccttagcgcagaacgaaccattggaaaccacagcagccaataagcgc

SEQ ID NO: 1191 - DNA, 326 bp, Chlorella sorokiniana
  Clone ID: LIB3602-038-Q6-K1-B1
cccacacttacagccctacttgcttatggaccggcgcggcgcgctgcaacgctgatcacactgtagagaagatggcgtagatgggatagtgtggacccaccctacaatgatcctggtacagtaaccctttttgcaaaacgaaccttttccgccacgctgcctgatccggactagggcgcggtacgatgtctgccgagaactcgcctcccattttgcatgactgcctaggctgctgacctgacacgcgccctctatctcaacctgtcttccctgattgctgcccatgtgactacccctacacacgtgctgttgatgagttttatcct

SEQ ID NO: 1192 - DNA, 479 bp, Chlorella sorokiniana
  Clone ID: LIB3602-038-Q6-K1-B10
gctcctgccagactggcgactgctcaccgccgatcacagcggctgtgtgcgggtgtggaactgccgggacttggtgggtgctgcacgccccacgctcacgctgcagggcgcattcgcacccagccgagacagctcagcggcggccctggtcgatgagcagggcgggccgccgaggccggtgggcatgcacagcgtggacgcctgcctgacgcacctggcagtggccggcagggacagcgttgagcggctgtacgcttttgagtgagcagctggcacctcttggtgcacacctcgacagggctcagctgttgcctgcggcacggtggctgctgagctaccactgcccaactgatgcggcaccggtgccttgcttatctcctcactctgatggcgaaccatcgatcaggtgctcgctgaatcttcttgcatgcactcttctgtctggcagcttgtgtacactactgtcaaatatagctgaa

SEQ ID NO: 1193 - DNA, 477 bp, Chlorella sorokiniana
  Clone ID: LIB3602-038-Q6-K1-B11
gctcctgccagactggcgactgctcaccgccgatcacagcggctgtgtgcgggtgcggaactgccgggacttggtgggtgctgcacgccccacgctcacgctgcagggcgcattcgcacccagccgagacagctcagcggcggccctggtcgatgagcagggcgggccgccgaggccggtgggcatgcacagcgtggacgcctgcctgacgcacctggcagtggccggcagggacagcgttgagcggctgtacgcttttgagtgagcagctggcagctcttggtgcacacctcgacagggctcagctgttgcctgcagcagggtggctgctaagctcccactggccagctgatgcgggaccggtgtcttgcttatctcctcactctgcttgcgtaccatcgatcaggtgctcgctgaatcttcttgctgcactcttctgtctggcagcttgtgtacactactgtgaaatatagctga

SEQ ID NO: 1194 - DNA, 489 bp, Chlorella sorokiniana
  Clone ID: LIB3602-038-Q6-K1-B12
cacgctgcgagtgcgggaggtgtggcaggacaacctggaggcggagatgaagctgatccgcgatgtggtggatgactaccctttcctggcaatggacacagagttcccgggagtggtggcgcggcccgtgggaaacttcaagaacagcggcgagtaccactaccagacgctcaggctgaacgtggacatgctcaagctgatccagctgggcctgaccttcaccgacatcgagggcaacctgccgcgcatcaacggcgagctgtgcgtgtggcagttcaacttccgcgagttccggctcagcgacgacatgtacgcgcaggaggcgatcgagctgcttaaacagtcgggcatcgactttgcgcagaacgaggcgctgcgcatcgatgtgcggcactttggagagctgttgatggtgttcggggtggtgcttgaacgaggatgtgcggtggataacctttcactcggggctacgaactttggctaccttgc

SEQ ID NO: 1195 - DNA, 81 bp, Chlorella sorokiniana
  unsure (1)..(81): unsure at all n locations; Clone ID: LIB3602-038-Q6-K1-B2
cccgtacgtncagccctacctggttaccgacctgggcctcctgctgcaactctaaccaaacgggatacaagttgcagtggg

SEQ ID NO: 1196 - DNA, 461 bp, Chlorella sorokiniana
  Clone ID: LIB3602-038-Q6-K1-B3
caactcctggaaatgttcgctgctaccttgcaccgcccaaaccaaccctgaaccccataatccccctgcctaactgtcccctcgttgcgtcgttttccgcctagcgccctctcctctttcccccctgtcctgggcactgtggcaatcgccgccctgtgttctgtgggaagccaccccacatgtcatgttgctgttgacacccgctctggcatctgctgctcagtcgctgtcagatgacatatgctgctatcccgcttctcgaaggtttttctcttcgtcctgtagcgccccttgccttcctacaaccctgcttgccttgatgtatgatcatgttatctgctgcttgctccgctagctactgacggtaggggcggtcggcacctgggtgccccacccatcttacatggtggtggggcggcgggcgtccaccggcgcccgcccacaacgtaaatgaatgaagc

SEQ ID NO: 1197 - DNA, 178 bp, Chlorella sorokiniana
  Clone ID: LIB3602-038-Q6-K1-B4
aaaaaaaaaaaaaaaaaaaaaaaaaaacttaaacaaaaccaaaccaaccataaacaaaataaaaaaaaatgcctaactggaaaatggataaataaaaaaaacgcggggcgccctcttttatgtttcccaattttcctgcccactgctgcaatcgccgtcctgtttttttagggaagcc

SEQ ID NO: 1198 - DNA, 281 bp, Chlorella sorokiniana
  Clone ID: LIB3602-038-Q6-K1-B5
aaaaaaaaaaaaaaaaaaaaaaaaaaaaaaaaaaaaaaaaaaaaaaaaaataaaaaaaaaaaaaacaccagcctaaatgaggcagggaaaaaaaaaaaaaaaggctgccgccctttttttatgttccccttctgccccccccgtgtttgcatcgtcttcctttttttttagggcacctacatctaatttcctggctctggttaacaaacggtctgtctttgggaaaccctcgcttttccccatgttgaatccttttatcaccactccctcttttgcgagtt

SEQ ID NO: 1199 - DNA, 540 bp, Chlorella sorokiniana
  Clone ID: LIB3602-038-Q6-K1-B6
tgtgtgccttgcccccgtccccgtccccccatcggcgccccacccacctgcaccctcacccaacccgcctattcctgtgagactggccttgcctcactcatgaaatgccgcttcgcgcacgcctgatacaatccacccaatgggccccgcttttccccccttttccacaccgcacaccagtccccctgcatccctgtgtacttgccccaaatcgccgcaatcccagcgtttgccaccctgtactggttgccccgcccagcccgggcggcggcctatgcgccggggccacgccacgccacaacgcaaacgaaccccggcacgccccgggccggcacgctgcgggtttatatcacgccacctgattcatttgattctttgccgctttacaagtgaagcgtgtgccccctatgccgtctgtacagcaagccttgccgggagccgcccgctgtccccgttcgagcctacctatattacttttgtgccgagcaagagacgaacttttttttccgccccgaggaagtgtaagcgattattatgagg

SEQ ID NO: 1200 - DNA, 541 bp, Chlorella sorokiniana
  Clone ID: LIB3602-038-Q6-K1-B7
ggcgacatcggcacggtgaacgagcagggctgcctcaagatcatcgaccgcaagaagaacatcttcaagctggcgcagggcgagtacatcgcggttgagttcctggagcagcagtactcttcgagcgacgcggtggagcagatctgggtctacggctcgccgcacgagagcgtgctggtggcggtggtggtgcccaagaaggcttttgccgacaagcactcggacctgggcagcaaggaggcgcagcaggccatgctggcggagctggcggccgcccagaaggccaagaagctcaagggatttgaggccatcaagggggtgatcctgttcgacgagcacttcaccatcgagaacgacctgatgacgccctccatgaagctcaagcgcccgcagctgcagcagcgcttccagccgcagatcgatgcgctgtaccgcgagctcaaggcagcccaggcagcgcgctaagcagcggcgctggtattgaacagcctgtgcctcatattgcaacagtcccggtgccacgacgcggcgaacgctgcag

SEQ ID NO: 1201 - DNA, 435 bp, Chlorella sorokiniana
  unsure (1)..(435): unsure at all n locations; Clone ID: LIB3602-038-Q6-K1-B9
gcatcaacaagatgctttcgtgcgccggcgcagacaggctgcagacaggcatgcgcggtgcgttcggcaagccatttggtgtgtgcgcgcgcgtgggcatcggtcagatcctgctgtccatccgctgcaaggacacgcacgctgcggtggcggaggaggccctccgtcgtgccaagttcaagttccccgggcgccagaagatcgtggctagcaggaactggggcttcactccctacctgcgcgacgattacttggagtggaagcgtgagggccgccttgtgaacgacggtgtgaatgccaagctgcttggcaaccacggcccgctggacgcacgggagcccggccagattttcgagggtcctgcccgtctgtggcgtgtgccggtgcatgcctaacatgttgcttgggttctaaagatgtaacgaacatctgngc

SEQ ID NO: 1202 - DNA, 284 bp, Chlorella sorokiniana
  Clone ID: LIB3602-038-Q6-K1-C10
gcagctacaacagcgatgtgcctgctgccggcacggcaggcgcagcggtcacacttggcgcagcagctggacgtggcagtgcggatggcagcggcagcagcagtggtggcagcagggaggagacgatcaaagctcaccactttgtactggttgagctttttgctggggcggtcactgcagctcggcacgtctccttatccgtgcgatcagcgacacgcaggagaagctgtagtttgaacggcagcagcacatagtgcgcaatggtgcctccgctggagcccgtc

SEQ ID NO: 1203 - DNA, 159 bp, Chlorella sorokiniana
  Clone ID: LIB3602-038-Q6-K1-C11
aaaaaaaaaacagaaaataagcctgctgacgacaacggcaggcgcgggcggtcctaaattatcccagcttatgggccgtggcattgcaaaataataacttctcttattaggtgtgcctgcattaaatttactggtccgtggttatacaattgtgcacgg

SEQ ID NO: 1204 - DNA, 53 bp, Chlorella sorokiniana
  Clone ID: LIB3602-038-Q6-K1-C12
aaaaaaaaaaaaaaccaaacagactgacctgccaaaaaaaaaaaaaaaaataa

SEQ ID NO: 1205 - DNA, 287 bp, Chlorella sorokiniana
  Clone ID: LIB3602-038-Q6-K1-C2
ggcggacgcgggcgcggcggcagcgcagcgcgactgggcgcagctgctgggaggcctgcggcagcgagtgacaggcaagaccctcaatgggcgctacttgggaacagagccggagccggaggtgcagccggccggcaaaagcgcagctacggctgcagtgtaaagcggcagcagcagctcagttgcttgctttccctcgaatgaacccttgtgatgcgatttgattgcgactatctatcgaattcagttgacgaatcttgacaccgcctttgttagtgcgtcgtgca

SEQ ID NO: 1206 - DNA, 321 bp, Chlorella sorokiniana
  Clone ID: LIB3602-038-Q6-K1-C3
gcctgcaccagagtttgccacggactgccacaagctcctgctctccgttgcactgcgctgacatgccccaattgaactcaagctgtggccctctgcattcccgtggcccgcacccttccttccccaggccaagctcgccgtgctgcatttttgcactagaagcgcctgcaccaccgccatacccccttgatgcctttctctgctccctgctccctacgcccggctgtctttttccatgcccccgcccctgctgcgcccgccgctgttgctgcagtgcgcccttcagcgaagagccggcagggtctctgcctattacataca

SEQ ID NO: 1207 - DNA, 520 bp, Chlorella sorokiniana
  Clone ID: LIB3602-038-Q6-K1-C4
ccgcaacaaggaggagatggaggcggcggccggcacgctggacggcatcgtggacaccgtgtccgccaagcacgacctcgtcacctacttgtccctcctgaagacaaacggcaagtttgtgattgtgggcgtgcccgccgagccctttgagctgccctccttcgctgttgtctttaagcgcctgaccgtgggcggctccctcatcggcggcatcaaggagacgcaggagatgctggactttgcagcggagcagggcatcctgtgcaatgctgccaccactggcacccgccgtttgctgtttccgcccacgcatcctctcccacccatgctctcccacccgtccttcccccttccccctgcccacagactttgcggcgcagcacggcattgtgtgcgacaccgaaaagatcggcatcgactacgtcaacactgccatggagcgcctggtcaagaacgatgtgcactaccggttcgtgattgacatccagggcagccttgtggcgtgaggcggcggctggac

SEQ ID NO: 1208 - DNA, 552 bp, Chlorella sorokiniana
  Clone ID: LIB3602-038-Q6-K1-C5
ccgcaacaaggaggagatggaggcggcggccggcacgctggacggcatcgtggacaccgtgtccgccaagcacgacctcgtcacctacttgtccctcctgaagacaaacggcaagtttgtgattgtgggcgtgcccgccgagccctttgagctgccctccttcgctgttgtctttaagcgcctgaccgtgggcggctccctcatcggcggcatcaaggagacgcaggagatgctggactttgcagcggagcagggcatcctgtgcaatgctgccaccactggcacccgccgtttgctgtttccgcccacgcatcctctcccacccatcctctcccacccgtccttcccccttccccctgcccacagactttgcggcgcagcacggcattgtgtgcgacaccgaaaagatcggcatcgactacgtcaacactgccatggagcgcctggtcaagaacgatgtgcactaccggttcgtgattgacatccagggcagcctggtggcgtgaggcggcggctggacagcccaggcggcagcagcggcctgcacattgg

SEQ ID NO: 1209 - DNA, 493 bp, Chlorella sorokiniana
  Clone ID: LIB3602-038-Q6-K1-C6
gcgccatgaacatcgacggcaccaacggcctggcctgcctcaccaaggtggaccgcgatgcctccaaggtcagccgcgtggcgcccctgccccacatgtttgtggtcaaggacctggtggggacatggagcaacttctacgcgcagtacaagcacatccagccgtacctgcagaccaccaagcccaagcccgatggcaaggagttcctgcagaccaaggaggatcgcgccaagctggacggcctgtacgagtgcatcctgtgcgcctgttgctccacctcctgcccctcctactggtggaatgccgacaagtacctcggccccgccgtgctgctggccgtgtacaggtggattgtggacagccgcgactacttcacggaggagcgcatccgccaggtcaacgaccagtacaagctgtaccgctgccacaccatcatgaactgcgccacggtgtgcccaaagggcctgaaccctggaaggccattgccaaggtg

SEQ ID NO: 1210 - DNA, 412 bp, Chlorella sorokiniana
  Clone ID: LIB3602-038-Q6-K1-C9
aaaaaaaaataaaaaaaaaaaaaaaaaatataaaaaaaaacaaacttatatacacagatacatacaaaaaaatagctaaggataaaatgtcatatatatgggattcactgaccttagtttggctacgtggtcactgttttacaccctgccttgggcgcaacttaattggcgttgcctcacattcctctttttccagctcgtgtcctttcgaagaggcccgctcctatcgtccttgcccacactttctcccccttcatggcgtttggcaccctccctgtttcagcgcattaaccttgtcgcgtgtggttttttacccgcggctttaccggttcacttgccagtgtcctatttcccttttcttttcccttttttttcctttccttttttggtcacgttgcttccgttttttccc

SEQ ID NO: 1211 - DNA, 329 bp, Chlorella sorokiniana
  Clone ID: LIB3602-038-Q6-K1-D1
aacaaaataaaaaatacatgaacacctacaccactacaaaaagaagaagtgctgggtgcctctgccctagacaagaaggttgcctggcaccgcctggaccagcggatggtcatggatgacaagaacaaggacgacttgattgactgcaaggagtcgtgggacctgatgcgaaagcacccctgttactgaactatacataatgcagatgcaccgaccaatccctgcaataaatgcaccgttaaacacccggccacggtcgccgttctgatagactcgtccccaagtaaactcatttgccaagccactggcgccactgcacaaaaccacgt

SEQ ID NO: 1212 - DNA, 354 bp, Chlorella sorokiniana
  Clone ID: LIB3602-038-Q6-K1-D10
accacgcgtccgtcgaaagcggaacagaacacaaaaaaaataaaaatattataaaaaaaaaaaaaaaaaaaagggtaaaaggtaataaatgggggggtggtttttttgttttcatgtttccggccccgggtttgctgcgcttggctcttcttttgtgggacttagtgggcccccaggggccggtgttttcagggtcaggattggaaaagctttggggtgttggagttaccgcgcgtagatggggatccttttttaggcagttggggtgtttgcaaagatgggctgacgggttggccctttctaatggtgtgttaagggggtttggcaattggggcaagcctctctttgtccaat

SEQ ID NO: 1213 - DNA, 446 bp, Chlorella sorokiniana
  unsure (1)..(446): unsure at all n locations; Clone ID: LIB3602-038-Q6-K1-D11
ggctggtgctggagggctgctcctgggacgacaagacgggggtgctgcaggagagccgccccaagcagctgttcacccagatgcccgtgatgctgatgaaggcggtgcccgcggagaaggagccccgggacggcgtgtatcagtgccccgtctacttcaccgagcgccggttccgtgaagaggtgttcaccgcgcagctgaagaccaagcagacgtggacgcagtgggcaacggcgggtgtggcgctgatgcttgacatttcgccttgatcctatcacgaagagatctttgatatgtgtggcaactgatctgtaacaatgcacagcacanaanaaataattgagaaatttaggtgaaaaggagctgaggttttttttgtaaataaaggggggggcggtttatttgaaggaaccatacttacttgcgcttgcaagctaatttttttt

SEQ ID NO: 1214 - DNA, 334 bp, Chlorella sorokiniana
  Clone ID: LIB3602-038-Q6-K1-D12
gcctcttgctggaggtcttcttctgggacaacaagacggtggtgctgcagcagagccgccccaagcaggggctaacgcagatgccggtgatgctgatgaaggcggtgcccgcggagaacgatcctcgggacggcgtgtttcactgccccacttacttcaccgagcgtcggttcctggaagaggtgttcacctagcagttgaagaccaagcatacgtggacgcactgagcaacagcgggtgtggcgctaatacttgacatttcacctagatcctattacgaagagatctttgatatgtgtggcaactgatctgtaacaatgcacaacacataaaa

SEQ ID NO: 1215 - DNA, 550 bp, Chlorella sorokiniana
  Clone ID: LIB3602-038-Q6-K1-D2
ctctctggtgggcagcgacaacttcacgcacattctgcgtgtgctgaacaccaacgtcgatggcaagcagaagatcatgtatgcgctgaccgccatcaaggggatcggccgccgcttctccaacatctgctgcaagaaggctgaggtggacctgagcaagcgcgccggcgagctgtctgccgaggagctggagagcatcatgaccatcgtggccaacccccgcgcctacaagatccccgactggttcctgaacaggcagaaggacgtcaaggacggccgctactcgcaggtgacctcctccgcgctggacaccaagctgcgcgatgacctggagcgcctgaagaagatccggaaccaccgcggtctgcgccactactggggcctcaccgtgcgcggccagcacaccaagaccactggccgccgcggcaagaccgtgggcgtggctggcaagaagaagtaagcagcttcttgcgggcgcggcctgcggcacgggcggatgctggcggctgggtgacggcggctggcgccgcccgcgcagcaaccccactgg

SEQ ID NO: 1216 - DNA, 554 bp, Chlorella sorokiniana
  Clone ID: LIB3602-038-Q6-K1-D3
aaataaaaaaaaaaaaaaacaacttcacacacattaataaaaaaactaaacacaaacaaaaaaagagcaaacaaaaaatcaatgtatgcgctaaccgacatcaaagggatcggccgccgcttctccaacatctgctgcaagaaggcttaggtggacctgagcaagcgcgccggcgagctgtctgccgaggagctggagagcatcatgaccatcgtggccaacccccgcgcctacaagatccctgactggttcctgaacaggcataaggacgtcaaggacggccgctactcgcaggtgacctcctccgcgctggacaccaagctgcgcgatgacctggagcgcctgaagaagatccggaaccaccgttgtctgcgccactactggggccttaccgtgcgcggccagcacaccaagaccactggccggcgcggcaagaccgtgggcgttgctggcaagaagaagtaagcagcttcttgcgggcgcggcctgcggcactggcggatgctggcggctgggtgacggctgctggcgccgcccgcgcagtaaccccactg

SEQ ID NO: 1217 - DNA, 445 bp, Chlorella sorokiniana
  unsure (1)..(445): unsure at all n locations; Clone ID: LIB3602-038-Q6-K1-D4
gctgctgggcggcttggctgtgcgccgtgcctgctatggcgtgctgcgcttcgtgatggagagcggcgccaagggctgcgaggtgattgtgtctggcaagctgcgtgcgcagcgcgccaagagcatgaagttcaaggatgggtacatggtgtcgagcggcaacccggtgcgggagtacatcgactcagccactcgccatgtgctgctgcgtcagggtgtgcttggcatcaaggttcgcatcatgaaggagtgggatccgactggcaaggttggcccccgcacccctctgccggatgtcgtcaccgtgctggcacccaaggaggaggagtatgtcagcgactccaaggaaaagcttgccaaggcttgagagctggtcgcacattagatgtactgctgcatgttaaacacccaaagcaaacaattgtaatctttgcgatgggcnnna

SEQ ID NO: 1218 - DNA, 495 bp, Chlorella sorokiniana
  unsure (1)..(495): unsure at all n locations; Clone ID: LIB3602-038-Q6-K1-D5
ggtgctcgtcggttggggttgaccattggcatagtgatggcagtgtgcacttgaccgtggacagcgaggcctgggggttggccgagtgcacacgatgagtgccaacggttgcatcgcccatgctcagagagcgtgcagtacaaagctagcctcgtatgcttgatgggcggccccgcgatggagtacatcggactcacccaatgcacatgtgctggtgcgttaagccgtgctcagcatcaaagatactataatgaatgagagacatcacattgtgacgaccggtccgcttacacctttagtggattgttgcacctggtcagcactcaacgtggatgagcattcacccattgctaggtgaacactggctgggcataacagatgctcacacatccgacggactgataattgcatgtctcgcaaacctttcagttgtaatctttgcgatgggcanaaaaaaaaaaaaaaaaaaaaaaaaaaaaataaaaaaanaannnn

SEQ ID NO: 1219 - DNA, 543 bp, Chlorella sorokiniana
  Clone ID: LIB3602-038-Q6-K1-D7
gctcccctgtccttgtcgccgcgctgctgcccatcctggtgcccctctcagcagcagccatgttctttgctgccaagggcctggacctgcccatggactcgtacctgcccaagcaggtctcccagctggaaaacttgctgcccaaaagcgaggcgctgcaagccgcggtgccaaagccccccaccccacctccctctgcctccagctccgtctctagctccacctcactcccctctgccttcagccccatctccagctccctttccagttactttaggttccgctgagcacccgtccggcttgccaggcccgctcgccgcatcgtctctgcgagcctgctgtgctgcacccctgctgagcctgctgggcctgctgcgcttgcggcccagcgcttgtcccgcgcccaagctccaagcgagcctgtgagggcgccctgcacatgaaacgcatgctaagctgcccgccgcagccaaactccacccccaccttgccaatctgaaccccccttttctttcttgttttgcatcctgccacgacacccac

SEQ ID NO: 1220 - DNA, 541 bp, Chlorella sorokiniana
  Clone ID: LIB3602-038-Q6-K1-D8
cacagctgtatgagcagcagcccgactggctgattcgtcggaaggtgccagacctggcgcagcggctgcagtttgtggagcaccgcgggcgtgacgggcagcacctcctgcgtgctgtgcttaagcaaccgcagcaagagtttttggcaaccgtgggcgccagccaggcggagtgggaggcgtgggcagcagccaacccctcggcagcctgcccgctgtatggctgggcgcagcatgcggcggcagaagaggcggctcggctggcggcggctctgccgcccgagctggcgcagtgggagcggcggcagcctcacacgcgcttccggcgcaaagctgtgcccagcagctagtatggcacacagcttcgttacgctgctgatttatcaacagccatagacctgtgcactaggatagattgtttcagttggtgctccacagttatctatgtaacctgtatgtgcccacgcattcattcgcatgcgctgcattaatttactgcgctgaactatagcgccgtctccgatgtcaacgccaaagcatc

SEQ ID NO: 1221 - DNA, 390 bp, Chlorella sorokiniana
  Clone ID: LIB3602-038-Q6-K1-D9
aaacgcacacggttaaatgcgctgggccccgccgtgtgggaaatactgggccccccggggccggaattttaggggccaggtttatccaaggggggtggtgtttttaccaccgccggcaaatggcggcttttaataaggcaaaaagggtttttgaagctcttgcatcccatcttgggctttttgtttttgttttcaagggcttaacccaccaaggcaaaaggcctttaatcaaccctttttaaaaagagccaaacccttttttggacccaaaccccggggtaaaaacccccactactttaaaccgcaccgttttgaacaggggccggtattggccaataacaacggggtcccccttttggcagcaaaagcagggtaaaatttcccccaaaa

SEQ ID NO: 1222 - DNA, 531 bp, Chlorella sorokiniana
  Clone ID: LIB3602-038-Q6-K1-E10
cggcgactccctgtaccccggcggcttcttcgaccccctgggtctggctgacgaccccgacaccctggctgagctgaaggtgaaggagatcaagaacggccgtctcgccatgttctccatgttcggcttcttcgtgcagggcctggtgaccggcaagtcccccctggaaaacctggctgaccaccttgctgagccgactgtgaacaacggcttctcgttcgccaccaagttcctgcccctggcctgaacgccgtcgtcaacctggagcgacctgggcattccatattaacggcggccagccggttttggacaagcacacacaacatatgagattcccaaccttcctgcgcactgctttgaacaatcctggctccctcttgtacccttgacccgcactcgggcgtggatatgtaacgttccgcggggaaaaaagagggaaccccattggaaccgtgcgttcgtgatgttttatcggaccgggaacgtgtccttggttgctttgccaaaggcttccacttgttttgcatttgt

SEQ ID NO: 1223 - DNA, 265 bp, Chlorella sorokiniana
  Clone ID: LIB3602-038-Q6-K1-E11
cgacgactctctgtacatgcacgacttatagctccccctgggtcagcttgaccacctgctcactgtggctggcctagaatgcgaaagggatcaagaacagccctctcgctatgttcaacatgaggcgctactcagctcaggtgctggctacctgcacatctcccttgctaaaactgcgcgaccatcgtgctgagacacatgcaacaaccgctttcggttgtggaccaagcagctgctcttgatctgaaagccagccaaaacacga

SEQ ID NO: 1224 - DNA, 146 bp, Chlorella sorokiniana
  unsure (1)..(146): unsure at all n locations; Clone ID: LIB3602-038-Q6-K1-E12
gngaagtgctctcttaatgaatgacacgcacccagcgccccccccctgccacctatgcatggccttggggtgctcgacgtgagcacgtgacattgagtagtctatcaacaatagcgagacgctgcctctatgtcgcaaaataagcg

SEQ ID NO: 1225 - DNA, 56 bp, Chlorella sorokiniana
  Clone ID: LIB3602-038-Q6-K1-E2
tcgctgaaggctgaacgagtgcgacaccctgtggaatgcagggcagttggtagcag

SEQ ID NO: 1226 - DNA, 437 bp, Chlorella sorokiniana
  Clone ID: LIB3602-038-Q6-K1-E3
gctggcgggcatgcaggtgggcataaaggcgctcgcgccctgcccgctcaagagctccaagcggcaccccggcctcaaggcggtgcgggttgtgattggcggcgtgcaaatccggccgggcgactgggtatatgctgacctggatggcgtgctggccagcaaggaacaggtcagcctttaaagcaccaagcacagtgctctgtgtagtgtaccaggcccgcaccggcatcgcaatgcgaagaagcattgcccagaaacgcacgatgctttttgttgaccattgcgtgcacctggtcgcccaccttttgcgcccaccttttgatgtcatgcaaagctggggtgggtgcctaccacaatgctctgttgaattttatcaacctttggtacattggcacgcgtgcgccatgctgagatcctgtatgtccccaccgtataag

SEQ ID NO: 1227 - DNA, 114 bp, Chlorella sorokiniana
  Clone ID: LIB3602-038-Q6-K1-E4
ggggggtggtttgttttccattgctgccaattttgcaacacaccgtatggcttgagctttgctcaacggcggcagcgcagcacaaaaaagagtaaaaggttgcacaacgactgc

SEQ ID NO: 1228 - DNA, 187 bp, Chlorella sorokiniana
  Clone ID: LIB3602-038-Q6-K1-E5
actactcctagatcgccagcgggcgccctttctttcttcgccggttggctcttacgactactgacggtcttcggcggacgggtcgcattccattgctggcaactatgtaccacaccgcatgggtggtgcatcggtcaccggcgggagggcaacactgaaaagagttgaaggggtgccaacgactgcc

SEQ ID NO: 1229 - DNA, 286 bp, Chlorella sorokiniana
  Clone ID: LIB3602-038-Q6-K1-E6
aaaaaacataaaacagacaccagacgccctataaaatacaacaacaacaaacacaaacaaaaaacagacagacagacgcgggcccgtcgaaatcgggggctgcggctctatctcccgccgcgcccgggtgctgcatcgcgtcaccggtgttgttgcatcgctgctccgggttgcttttttgtggccgactgtctcgccggcgctgccggggcaatctttgctttgccggcgtgcactcgctttgctcttcatccgcttttcgcccattggctttatcggccagagc

SEQ ID NO: 1230 - DNA, 100 bp, Chlorella sorokiniana
  Clone ID: LIB3602-038-Q6-K1-E7
gccatatatttctcgccttttgccagcccacgccgcctctgtcgcgccctccggccctacggaagccgggcgggtgttcccccggctgcgccctgtaccg

SEQ ID NO: 1231 - DNA, 544 bp, Chlorella sorokiniana
  Clone ID: LIB3602-038-Q6-K1-E9
cgagggtgctctcttcatgcagcagcgagagctgcagcagcaggagctggctcgcctgctccatgaggcaggcacagctgcggaatggggccagtgaagcgctgccgctgcgcccaacgtgaggcgcgacgcagctgggctgtaggctggctgtccatctccctccctctcagcgcgcccggcttgtttgcagcagacagcccccgcccccagctcgcttgtggcccagccagcggctcttcatcttacaggcagccaacgcacgagccggagcggcctttttgtccctgcccgtccctcaagacgacaatgctcttcaacaaatgcgttttgtgttcatttctgcatgggctgccccgatcagcagccctgcactaagattctgcagcactttgaacccgttttcccccttgctcacggttgcacaacgtttgtggtagccccattggagccgtgcgtgcgtgatgctcgatcggaccgtgaacgtatccttgcttgctttgccaagtgcctcgacttgtcttgcatttgtatccccaccaca

SEQ ID NO: 1232 - DNA, 307 bp, Chlorella sorokiniana
  unsure (1)..(307): unsure at all n locations; Clone ID: LIB3602-038-Q6-K1-F1
gccctggcccntcngaaccatcaggccaaactcacccacaatgcaggcctctctcagcagctgccagaccgccttagggcgcgcgaaccctggcggccaaggccgatcagcacttggatcctgcgggcggggctgtggtgtgcacagccaacaagaatgaacaagtggttgccggtgtgaccgcctctgccgccgcgttgctaacaaactcgattgtgtacccaggctgctcacacacccagactgaacaacctgatcggctacatggtggcggacggtatggtgctggccgccattgatgaaccaa

SEQ ID NO: 1233 - DNA, 411 bp, Chlorella sorokiniana
  Clone ID: LIB3602-038-Q6-K1-F10
agcagcggggcggaaggcaggcccttgcaggcagcctgccaggctccacaagcaagcagtgtgcagctctggtgcccctgccaccaaaagcagcacgaatgttgccgactcgtgttggttttggccggcggggctcaatgcagcaggcggcgaaccacctgcctgtccgcggcacagtcttgctgcctaccaagaaactccaataagcaatctgtttttgttgcacacttttgtactacgctagtatcatagttacttcccttccaagaggtgtgtccttctcgtccccccttcctcctatttcatgctgataataacactgtgtttgtagcaactatgtgtaccggcagctctgcagagagtggcaaacatttaatgtgtggagaacaatggcatgtaacaagccaagtc

SEQ ID NO: 1234 - DNA, 292 bp, Chlorella sorokiniana
  Clone ID: LIB3602-038-Q6-K1-F11
atcagctggccgctgaggacttctttgaggacaaggatgaggattgcacaggcaagctccggccgcgatgagagacgatgcaccaccaggatgctgacgtggcagccctcattcgcaagcacaagattcagcctgtggctgtagaaacagcaggctcacatgaggacctgcatccatctgagcttgtagatgccagcaaactccaataggaggattcatcatgatgcacactctgcagccaaggctggatcatagcgccgtcgcttccaacaggaggagcactttgagcacc

SEQ ID NO: 1235 - DNA, 296 bp, Chlorella sorokiniana
  Clone ID: LIB3602-038-Q6-K1-F12
ggcgcctaggggagagcacgatgcatatcttcgtgaagaccctcacgggcaagaccatcaccctcgaggtggagtctgcggacaccatagagaatgtgaaggccaagatccaggacaaggagggcattccccctgaccagcagcgcctgatcttcgccggcaagcagctggaggacggtctcaccctggccaactacaacattcaaaaggagtcgacgctttacctggtgctgcgcctgcgcggcggcatcattgagccgtccctgcagattctggcccgcaagtacaaccaggac

SEQ ID NO: 1236 - DNA, 316 bp, Chlorella sorokiniana
  Clone ID: LIB3602-038-Q6-K1-F2
gcggtgggtcaagctgcggatcagcaccaaggcgatgaagacgattgagaagcggggcctgcagaacatggcggaggaggcgggcatcgatctgtggaagctgccgtacgaggacgcgcgccccgagcgcctgcagtggctggccgagaacgcgggcaacccgcccatggccaaaaacaagcgggccatgaagaaccccgagaagctggcggccagcaagaagacgccgctggtggcccgctacctgcacggcaagattgcctatgtgcgcgccgactcgcagtaaacgggcggctccccccgcccccaaacgggc

SEQ ID NO: 1237 - DNA, 521 bp, Chlorella sorokiniana
  Clone ID: LIB3602-038-Q6-K1-F3
aaaaaaaaaaaagaatgaaaaacaaaaccaaagaaaaaaaaaaaaaaagaaaaacgagagactgcaaaacatggcagaggaggcgggcataaatctgtggaagctgccgtacgaggtcgctgcgccccgagcgcctgcagtggctggccgggaacgcgggctacccgcccatggccaaaaacaagcgggccatgaagaaccccgagaagctggcggtcagcaagaagacgccgctggtggcccgctacctgcacggcatgattgcctatgtgcgcgccgactcgcagtaaacgggcggctccccccgcccccaaacgggcaggcgccgaatgacactggtcgttggcgggccgcggcgcgcgagccttcctgtcatagcgcttgatgggcggcttgccttgcccgctccgccttccgtacctctgatagtgtaggttcctgctgctgttctgctttcttcccttttaccctttggacacataccgctgttacagtattcgctttggcggcttcaagcccct

SEQ ID NO: 1238 - DNA, 540 bp, Chlorella sorokiniana
  unsure (1)..(540): unsure at all n locations; Clone ID: LIB3602-038-Q6-K1-F4
tgaacgtcccgaagaccaagaaggccttctgcaagggcaaggagtgccgcaagcacaccatgcacaaggtcactcagtacaagaccggcaaggcgtcgctctacgcgcagggcaagcggcgttacgaccgcaagcagtccggctatggtggccagaccaagcccgtgttccacaagaaggccaagaccaccaagaagattgtgctgcgtctggcctgcaccgtgtgcaaggcccagcacatgcacgccatcaagcgctgcaagcacttcgagatcggcggcgacaagaaggtcaaggggctatactagtaaaaaaaaggagagcggcaggcggagagcatgaccgagaaatggaggcagcggcgcccgctcaccctgggcggcctgctccccgcccggcgcctcgctttggccgcctctggccactcgtacgcctccttgtccatgcccttgtgcttcctgagctgcccaacctggcatgcaagcagcctggccgtctgtaatgccattggcgtgtgaaaaaaaaaaaaaaaaanaaaaa

SEQ ID NO: 1239 - DNA, 551 bp, Chlorella sorokiniana
  unsure (1)..(551): unsure at all n locations; Clone ID: LIB3602-038-Q6-K1-F5
gtggaggaggagctgccgcangaggaggtgccgggcgtgctngccggctggggcacgtgggcgggccagcagcgcgagccgcagtgggtcaccgatgccaagcgcaaggcggcgcagcgcaagcaggcggcggcggcctcccgcaaggacgccaagctgcagtacgttgtcatcagcgagaagtgggacaagaagagcagcaagtacaagacgccctcggtccccttccccttcgactccaaggaaacgtacgagcgcgcgatgcggcagccgctgggccgcgagtacaacacagacgtgtcgttccgcaacttgacgcggcccgcggtgctcaaggacgcgggagtgatcatcgagcccatccgcttctcaaaggccatggcggagcacgacgagcagatccccaagaatgccaagcgggcgcccgtgatgaccattgccggcggcatgcccaagaagagccgcaagcactgagcggcagggcagtgcaacagcgcagttgggccagccctgcaacagaaacaactgcagtcaagtacaccatgagcact

SEQ ID NO: 1240 - DNA, 483 bp, Chlorella sorokiniana
  unsure (1)..(483): unsure at all n locations; Clone ID: LIB3602-038-Q6-K1-F6
ggcggagccgaaggccgccaaggcccgcgggtccgacctgcgcgtccacttcaagaacacgcgtgagggccgctttggttttggcaacatggaccttgccaaaggccaaggcgtacatgcaggcggtgattgaccacaagcgctgcgtgcctttcctgcgctacaacggcggcgtgggccgcacctcccaggccaagaacgagggcaactcgattggccagggccggtggcccaagaagtcggccgagttcctgctgcgcctgctgaccaacgctgagagcaacgccgagagcaagggcctggacgtggatgcgctgtacgtgagccacattcaggtcaacaaggcgcataagggccgncgtcggacttaccgcgcgcacgggcgtataaacgcctacatgtccagcccctgccacattgagctgatcctggcagatcgccggcaggcggtgaaagccgaagcgggagacaagcgccgcaagc

SEQ ID NO: 1241 - DNA, 100 bp, Chlorella sorokiniana
  Clone ID: LIB3602-038-Q6-K1-F7
aaaaaaaaaaaaaaaacaacaaaaacaaaagaaaaaaaaaaaaaaaaaaaataaaaaaaaaaaacaagaagaggaataagagtctgtttttgattggcgt

SEQ ID NO: 1242 - DNA, 113 bp, Chlorella sorokiniana
  Clone ID: LIB3602-038-Q6-K1-F8
atattttttttttttttatattttttttttttttttttttttcttaatttaaaaaaaaaaagagattttaaaaggagagggttctattttaggttcgcgagcgttcgttttaa

SEQ ID NO: 1243 - DNA, 327 bp, Chlorella sorokiniana
  Clone ID: LIB3602-038-Q6-K1-F9
aaaaaaaaaaaatatataaaaaaaaaaaaaaataaaaaaaaaaaaaaaaaaaaaaaaaaaaaaaaaaaaaaaaaggaaaagggccaaaaaataaaaaaggggaaactgttttgggggttccctttttcccgaccctcctttccggagctttccattcttttgtattggttcttttatggccgtaccctgatttgattgcccgcgccgtcctttctcggagctccgggtggcttccccttttcttggcctagcttaatttgccctttttcccattttcttttcctgggttggtggctcagaaggcccgtcccttcccgtctttctctc

SEQ ID NO: 1244 - DNA, 338 bp, Chlorella sorokiniana
  Clone ID: LIB3602-038-Q6-K1-G1
gaatgctacaaccccccgccgttccgccccttacatgcgatctcattttcatgtcaaatgctaaagcccaaaaaaggcgcaatgtgtaacactgaacgaccaccttaataacaacactatactaacaacttctacgccactgtaaacaaagaacctattattaagaacttggggctcccaacttaaaaggatccaagctctattacgctccctttcgacaaaatcactctattatatcgcaccccaaattcatttgatcgcccccactttaacatatgtctaacatggaaaaaccttgtctttccccaattaattctccttacaaaaaattccctttt

SEQ ID NO: 1245 - DNA, 483 bp, Chlorella sorokiniana
  Clone ID: LIB3602-038-Q6-K1-G10
gcagaacatgatcaccggcgtgaccaagggctacgagtacaagatgcgcctggtgtacgcccatttccccatcaacatcaacatcgagaacaagggcggcaaggtggagatccgcaacttcctgggcgagaagattgtgcgcgtggtggacatgctgccgggcgtgacctgcgagcgcagcgccgccgtcaaggacgagctgatcctgaccggcaacgacatcgagctggtgtcccgcagcagcgcgctgatccaccagaagtgcctggtgaagaagaaggacatccgcaagttcctggacggcatctacctcagcgagcgcggcaccctggtgaagcccgagtaagcggagcccgcacgttgcagtagaggtggcggcacgagcgcagcagtgcgcagcgctcacgcccgcgccggcggagcatcggcggcggcagccggccccagctgcggcgctgcacgccatgtaacgcacacgttagc

SEQ ID NO: 1246 - DNA, 58 bp, Chlorella sorokiniana
  Clone ID: LIB3602-038-Q6-K1-G11
aaaaaaaataatcacaaaaaaaaaccaaagactacaaaaacaaaaaagcacatgaagg

SEQ ID NO: 1247 - DNA, 60 bp, Chlorella sorokiniana
  Clone ID: LIB3602-038-Q6-K1-G12
aaaaaaaaaaaaaaaagcaacacactaaaaaactaatcaaaaaaaaaaaaaacaaaaagc

SEQ ID NO: 1248 - DNA, 541 bp, Chlorella sorokiniana
  Clone ID: LIB3602-038-Q6-K1-G2
cacaggccaaggacagcatgcccaaccgggtggccgcacacgtgctggagcggctgatgggcaacccgcccaaatatgttcgctcgggtgccaccatccccgccctggccgccttccagaagcacctcaacgccacaaccaccgtgtttgcattcggcctgcccgacggcaacctgcacgcccccgacgaaaacttgccggtgtccatgtaccgcctggcacgcaaggcttgggtggagtacctgtgtgcgctgggggatgccgccgctgtggaggctgacgccgcagccagtgcgagcgagagcctcgaggcggaggcagaggacagcagggccgcggtggcagcagaggttgatggggaggagagcgccgaggggacagccgatcgcagcgagctgtgaatggacagctgtgtgctttgtttgtatcattccttcactcgtttacaaactctgaattgaccagtacggttgtgagaactaaaaggctgacaaaaaaaaaaaatttaaatatatcaatattaatataatagtatgggtat

SEQ ID NO: 1249 - DNA, 426 bp, Chlorella sorokiniana
  Clone ID: LIB3602-038-Q6-K1-G3
ggcacggcctgctctgcggcccttcatacctttgtacctttctgtatcatcttgcagcaatggcagccggctgcatcgtttctaacatcgtcaccggcccactcgtttgtgccatgcccacctgcctccaacgtcacccttcatcaaccctcacccaacccatccacctgccacccatccactcaccttccctccgccacaacctctgccacccactcaccacccatcacccgctcaacgccctccatgcaccatcctccccatccaccaaatctgccaccccaaacgcacgtccgccgctgcaccacctgccgccccctcacccgcacccatcttccacccgccacctttcctgccgctcaccgccgcacatcctacctcccacacctcactccatgtccaccctttcaacccgcgccttcacac

SEQ ID NO: 1250 - DNA, 554 bp, Chlorella sorokiniana
  Clone ID: LIB3602-038-Q6-K1-G4
agaaagagaagaagaagaagcacaaaaaggagaagaagaagaaggacaaagacaagaagaaggacaagcagcggggcggcagcagctcggatgacagcagcgatgaggagccggagggatttgcagcagaagaggagcggggccagcgccagcagcagcagcagcagcagcatcctgctcccgaggggcgcgggctgggtgatgacggcggcgagcggggccgcgcgcggccagacagtggcagggagcaggagcggcgacagcgctcgccgccgcggcggcgcagcaggagccgcagccgctcgccgcggcggggaggtgataggcggcacgatgaaaggcggtacgatgaacgggaccgcagggctgactatgaccgcagtagggggcgggcgcgcagccacagccgcgagcggcacggccgtagccgcagccggtcgccagggcggcggcggtaggcagggggctgtgccttgcggcaggtgctgctgaatgtgtgtgcttgcatcatgtcctgccatgccggtgccctccataggttctgatgaccagtg

SEQ ID NO: 1251 - DNA, 487 bp, Chlorella sorokiniana
  Clone ID: LIB3602-038-Q6-K1-G5
gcaagatgcccggcgcgctgcacaacccgggcttggcagaagcggcgcagcaggtggctgccttccaacagatgctgtctgcgtggggcacaaagatgctgcacctctgcacctccgcttgcagagcctgccgcctgatgccctggtggagtgggtccgcttgaaggcagaggtgatgcaggcagcgtgccagcagccagtgcgcctgccgccaccctaatcataaacaggagcagcacttgtaccgcacagcctggtgcgccggcacacaaccagtcattcctcctgtacatgtgtggcagcccccaacctgtaacctgcctgccctctgccttctccgaacccaatctcatttgtacccttagactgacgtttgcactgaggttaattcgaccgccgtttcatgccgcacctctgcttgctgcccatctgtcaatctgcggagctgtgtgtattgatgtccacataccgctactgtaaggggagg

SEQ ID NO: 1252 - DNA, 554 bp, Chlorella sorokiniana
  unsure (1)..(554): unsure at all n locations; Clone ID: LIB3602-038-Q6-K1-G6
caaggaggcgctggacggcgtgagcaacaccttcacgctgatccccgccacgctgggcaagacgcccgagtcgcgcatcgacaacctggtgtccatcctggacggatacgcgggcaagggcggccaccacctcaacatcaacgtgctgcaccgcgagacgctgatcgacgcgatggagcaccccgagaagtacccccagctgaccatccgcgtgagcggctacgccgtgcacttccaccgcctgacacgcgagcagcagctggacgtcataaacaggacgttccaggctgcgctgtgagcgggcaggaagcggcacagccctctacccatccgcgatggctgctcctctgataggacaccgccttagacagcacatacagcaaccaaccccagcggcggtgagcgcccgccggcgcaaggccggccgacgtctcccaccgccgncccctgcccccaccataagaaccggaacagcacaatgaatgaagcagcgcggcggcgctgcagaagcggcgccgccgccctttgatactgccccccatcccccttttgtt

SEQ ID NO: 1253 - DNA, 440 bp, Chlorella sorokiniana
  unsure (1)..(440): unsure at all n locations; Clone ID: LIB3602-038-Q6-K1-G7
cttctatgtcgcagccggcgtggccttccggccaatgccggcgggcgccaacccttacttccagctgacggaggaggaggcgattgagctgaccaaggcggagcaggaagagaacccttgaagcggaaggccctccttctatcaagtagcccggagggcactcgggcagggcaggaagtgaccccaacgggccctgcttgggcagccgggcgcaacaccaaaaccaatcctctcgtgttcggcagtcaaggggcgggtttgcagcgccagctgtcctcccggccgcccctcacacagccgcatgttttcatactgtcccctgtttgttcctttccgacgcctgctggctcagctgtcctgcccctgattttgcgcctgtcctcaccaacagttgaagctctctctgtgctgcccttatgtaaggcgctgccaacgcanaa

SEQ ID NO: 1254 - DNA, 543 bp, Chlorella sorokiniana
  Clone ID: LIB3602-038-Q6-K1-G8
caccagctccccctgtctgcacacgccatggctcccaaggttttcagctggaacttccccggcgcttacgccgtgcagttcatgaccgtggtgtcgtgcaccgcctgcgtgtacacttgctaccacttcctggtcaagaacccggatgtgcactttgtcaaggagctgaagcaggacgagctggcggagagcgcgcggtggtcccagcaggccaaggccgtccagggcaacgtgttccgctggctggcgcagacgcgcgacaccgccgcgggcgagcagaaggacacccgcatcttccgcgtttgagcgcccgccaggctgctgcgctaaatcggcgcgcaataccagtcgttcaccgccactcgccgccgctgcgcccccctgtgcttgctctcagggcctgaggccctctgccagtcagccacctggggccggcacccccttgccgctatgatatgcgtccccaaagctggagtgaggcattgcggaacccaatgctgtttttccaccgccctgcttttaatatatctgcctcgaagcacg

SEQ ID NO: 1255 - DNA, 342 bp, Chlorella sorokiniana
  unsure (1)..(342): unsure at all n locations; Clone ID: LIB3602-038-Q6-K1-G9
gcggtgagggctgacagagcgccaccatgcggcagctcatttcttctcggaccctcgtcatccccgatgaggtgtctatcgaggtcaaggcgcggcgggttcgcgtgaagggccctcgcggcacgctgcagcgcgacttcaagcacctggctgtggacatgttcctgactgaagaggaaggcaagaaggtgctcaaggtggactgccactttggcaagcgcaagagcctggcgtncatccgcacctgcacctcgcacgtgcaaaacatgatcaccggcgtgaccaaaggctacgagtacaagatgcccctggtgtacgcccattttcccatcaacatcaaca

SEQ ID NO: 1256 - DNA, 70 bp, Chlorella sorokiniana
  Clone ID: LIB3602-038-Q6-K1-H1
cttgggagcataccacctgcttacattgggcctcttctgctcccatgttctgcacctcaatcaataaaaa

SEQ ID NO: 1257 - DNA, 157 bp, Chlorella sorokiniana
  Clone ID: LIB3602-038-Q6-K1-H10
ggtgttaccgtcaacagaataccatgtaaagaacatatgggaaaaaaaaaaaaaaaaataaaaaaaaaatacaatggtgtacaaaaaaagaaaaccatacatacacacactagtttaacaaactttataaagaaccaatagaaggtgttcaatcgtt

SEQ ID NO: 1258 - DNA, 512 bp, Chlorella sorokiniana
  Clone ID: LIB3602-038-Q6-K1-H11
acacggtcttcaagtagaacgtgataaactgaacaaatgtggtcgtggtttattaggttgtacaatcaaaccaaaatgaggtctttcagctaaaaactacggtcgtgctgtatacgaatgtttacgtggtggtcttgacttcactaaagatgatgaaaacgtaaactctcaaccattcatgcgttggagagatcgtttcttatttgtagctgaagctatttacaaatctcaagcagaaactggtgaaattaaaggtcactatttaaacgctactgcagctactgctgaagaaatgttaaaacgtgctgaatgtgctaaagatttaggtgtacctattatcatgcacgactacttaactggtggtttcacagcaaacacaagtttagctcattactggcgtgataatggtcttcttttacacattcaccgtgcgatgcacgcggttattgaccgtcaaagaaaccattggtttcactttcgtgttttagcaaaagctcttcgtttattaggtg

SEQ ID NO: 1259 - DNA, 212 bp, Chlorella sorokiniana
  unsure (1)..(212): unsure at all n locations; Clone ID: LIB3602-038-Q6-K1-H12
cccacccgtccgaaaaaaatacaataaaacctcataaactgaacaaatntggtcactttttattacgttgtacaaataaaaccaatttgttgacttttacttaaaaactacgctctctctctataccaatgttatcgtggtggtcttaactggactacaacatatttaaaccttttactcttaatcttttctgccttgtattgatctttttt

SEQ ID NO: 1260 - DNA, 314 bp, Chlorella sorokiniana
  Clone ID: LIB3602-038-Q6-K1-H2
gcggctttggcctgcccttcttcccctgctttggcgtgtaccccgtgtttgggtttggcctctacaccatctactgggttatggtgttcatggtcctggttaacgtggtgatctgttttgtgcatggctttaccaaccataagaagaagagtgagttcagcgacgacgactggttaacagtccgtcgttcttaacagctgttgggccccgtttcccggaatttggttaggtttcaaccctttccactgcctgctctggcgcgagccatatggcagattggtgcctcgccctgtgggcttctatgaccacctttt

SEQ ID NO: 1261 - DNA, 487 bp, Chlorella sorokiniana
  Clone ID: LIB3602-038-Q6-K1-H4
gtgatagagctctatctgcccgcactgtgcggccaccccggctttgcacctgaggccccgccgggagggtggacgccggatgatggcacaggcggcttgcaggacgccagtgtctaccagctgccggcagatactggagaggacgacccttacgaggatccagacgagcatgacatttacgaggggttgtgagcggcattggcagtacgagggccggttgcccgctgccacctgttgctgcccgattgactggttgaagccctggcacccggtgtaacacacaaagtttaaaaaaaaaaatataaatttaataaaaaaataaaataataaaaaaaaattatcaaaattttaaaaaaaaaggtatttgaaattataattgttgtaatatcactattataatttactttaataattaatttattatggggggcgcccttttaaaaaagacaaattttatctcccttggctgtaaactttataatttttt

SEQ ID NO: 1262 - DNA, 546 bp, Chlorella sorokiniana
  Clone ID: LIB3602-038-Q6-K1-H5
ggctatgcacagtgccacttcaacctgacatcgccccaaggcaaagaggctgcctgccgctggctggccagcgtgcacagtatgccagaagatgctgtcaagccagaaaccaaccagagatacgctgcaggcattgcccagtctttgatgtcgccggatgcacccgtgtggtccgccctggccaactgcaccgttcctgtcctgctgattgcgggtacagaggacattgtgacgccgatccgaggccagctggagctggcacagcagatccccggtgcctggctggcgcagtttccaggcacaggccacggccccatgctgcagcacccacggcaggtggcaacactggtggaagcttttcttgatggaaacggggggcagcccagcggcagttggtgccgccagtgagaaggccgaggcccctgatgcgccgcgggcggagctgtgaactcgcatttgtcgcacttttgttatttagccatgcacacgctttcgaatcacggtggactcgccgctttgttacgctggcttattactcatttgcta

SEQ ID NO: 1263 - DNA, 577 bp, Chlorella sorokiniana
  unsure (1)..(577): unsure at all n locations; Clone ID: LIB3602-038-Q6-K1-H6
ttcccgnnctaccacgcgtccgcgccgaggggagagcacgatgcagatcttcgtgaagaccctcacgggcaagaccatcaccctcgaggtggagtcttcggacaccatcgagaatgtgaaggccaagatccaggacaaggagggcatcccccctgaccagcagcgcctgatcttcgccggcaagcagctggaggacggccgcaccctggcagactacaacatccagaaggagtcgacgctgcacctggtgctgcgcctgcgcggcggcatcattgagccgtccctgcagatcctggcccgcaagtacaaccaggacaagatgatctgccgcaagtgctacgcccgcctgcacccccgcgctgtgaactgccgcaagaagaagtgcggtcacacctcgcagctgcgccccaagaagaaactcaagtaaactactcgcttcggcacgagcggaagcggcatgagcggcagcaaccggtgtcccccccccgtcccgccagccgggatgccatgacagcaccggctgctcagctgctgatgtgctgcatgtcaattgctgctgcggaaatgtaacggtggt

SEQ ID NO: 1264 - DNA, 340 bp, Chlorella sorokiniana
  unsure (1)..(340): unsure at all n locations; Clone ID: LIB3602-038-Q6-K1-H7
gaacagcaaggaatcnaccattaccatgcgcatacaacggatccctttcaagtgaagcgtgcagcgtgggcgcgcaggcaaccagcgccttgggctgacaatgacattaactagtatgctatgactgacacacgatcagacacctttatatgagcgctttaagtgctgaacaacccctcgatcatgaggctggctgtactctgctggctatgattctcacttcagccatgtcgtgcatatttgtcaatgcggatgtccgcctatccacccagagcggctgtgccatgatccacacgttctttgttgggtgcagttacagcacccagcacccaccacgtgc

SEQ ID NO: 1265 - DNA, 127 bp, Chlorella sorokiniana
  Clone ID: LIB3602-038-Q6-K1-H8
gcgctacaagccgaggagcagcggtaggcggaacagggcccatagcagcaggccgacctggccctgcgcatggaacgggccaaagcgctgcgccctctcgccaacctttacttctccacacctggca

SEQ ID NO: 1266 - DNA, 370 bp, Chlorella sorokiniana
  Clone ID: LIB3602-038-Q6-K1-H9
cggacgcgtgggtggtcatccttctgtccggccgctatgccggcaagaaggcggtcatcgtgaagaacgacgatgatggcaccagcagccggccctacggccacgcgctcgtgtgcggcctgtctaaggagccccggaaggtgatcaagcggtcgttcctcaagacccaggcgcgccgcttcagcctgaagaccttcatcaaggtggtcaactaccagcacatgatgcccaccccctacacgctggaggtggacctcaagggcgtggtgaccgccgagtgcgtggacaacagcaccaagaaggtggaggccaacaaggaggcgcaagctcttcttgaggagaagttcaagagcggccaagaaccggtggt

SEQ ID NO: 1267 - DNA, 503 bp, Chlorella sorokiniana
  unsure (1)..(503): unsure at all n locations; Clone ID: LIB3602-039-Q6-K1-A1
cggcaacagcgctgccgcctatgtcaacggcaacggcgccggcgccgccaacggcgcgcccgccaacggcaacggcgcagtcgtgaacggcaacgccaacggcattggcgctgagagcggcacggtcaaggtgcctcctgaggagctgattagcgcggcggcggccctgcggcagcgcgtgaacgcgcttgcgccagtgagcgcgccgtgcacagcatgcacagtatgcgcagcgcagcacagcggcgtcgctgctgagccggcatgcctccccagctagcagggcgagcaggagcagccaggcaagcagtcagtcagccagccagccagtcagcagggcaaggtgaaccagtttggccgcccagctgctgcgcctgctgcgcctgctgcaagccagtcagctcgctgtcactctcgagagagacctgtccttgtgtaccaatgaatgagcagcacacccttncgcagaatgaattcacctgctgcatcccattgcaccattg

SEQ ID NO: 1268 - DNA, 563 bp, Chlorella sorokiniana
  Clone ID: LIB3602-039-Q6-K1-A10
gacgcctcgagcagcgatgcctcccctgacgacaaggcccgcgccactgtgtacctgtcgcacctcaagggctacaagcgcatgggcacagcttgggtggagtgcgtggagggctgcgagtgcgagcgatcggtgctggacggcacctgggcgcagcaggccacgctcatgcagatccactccttcaaggtcacgcagcatgcccggtgcagagtgcgggtgacggtgcgcaaggagcctggagaggtgccgcagcaaggccacaaggtcaccctgatggccctcatggtgtcgcactacccgctgcgcatggaccagaacatgcggcaggccacagaggtggcccgtcaggtggtcaatgcctagtggttggcagctggcgccagaccctgtccgagtgtggcggcgcaatcggatgctcgcagcgctggccccgtggtcggcggcagcgcctcgctttgtgagaccagatagtagacagtaggaccattcatcgcatgcccattgcatcgctgttctgcacctctgcagctctctctctcctgctttcctttctcaagctt

SEQ ID NO: 1269 - DNA, 254 bp, Chlorella sorokiniana
  Clone ID: LIB3602-039-Q6-K1-A11
cgcacgaatcgcgctcccggcgcttgctgccgctgccgcgctccgcgccctggccccccttgccgtgtcctgccgaaccgcactccagcactgcatcgctcgtggcaattcagaacctgttgtgcattcctcccccggccattcctcacgattgctgtttgattggttcatcggtccctccccttgctgggcagagtagcccccgtagctcccaagcagtactctctactattggggtttaacgacattgggtt

SEQ ID NO: 1270 - DNA, 538 bp, Chlorella sorokiniana
  Clone ID: LIB3602-039-Q6-K1-A12
atctcccgtgattccctgcacaagcgccgcgccacgggcggcaagcagaaggcatggcgcaagaagcggaagtatgagctgggccgccaggccgccatgaccaagctgtcctccaacgtgtgcgtgcgccgcgtgcgcgtgcgcggcggcaactccaagttccgcgcgctgcgcctcgaccacggcaacttctcctggggctctgaggccgtgacccgcaaggtgcgcatcctggacgtgaagtacaacgcgtccaacaacgagctggtgcgcacccagaccctggtgaagggctgcatcgtggaggtggacgccgctcccttcaagcagtggtaccagcagcactacggcgcggaggtgggccagaagaagaaggccgccgccgccgcgcccgccgagggcgaggccgcctcccagagcaaccacgtgaagcggaagctcaagcagcgcaaccagggccgcaagctggaccagatgctggacgaccaattcgccaccggccgcctgtacgccgctctgtcctcccgccccggccagt

SEQ ID NO: 1271 - DNA, 609 bp, Chlorella sorokiniana
  unsure (1)..(609): unsure at all n locations; Clone ID: LIB3602-039-Q6-K1-A2
acgccaagggcctggacagcattgtggcccgcatcgaggcccgtgtgtcgaccgccacccacctgccggtatcccacgccgagaacctgcaggttctgaagtatgagcttgggcaagagtacaaggcgcactgggacacgattgaggtggctccagaggtgcagaagtcgggcatgttccagaaccagcgcacgctcacgctgctgatgtacctgactgacgtggaggagggcggagaaacttgcttcccggccggcaggtacctggatgaggctgcgcaaaagcagcccccttacacagaatgcggcagcaagggcgtggctgtgaagccgcggaaaggcgacgcgctcctctttcatagcttgcacatcgatggcaagcggaaggatgcgttcagctaccacgctggctgccccgtggtgcgaggcgtcaagtacagcgcgacgtcttgggcgcacatcgagccgttccttgcggngggtgcagcggcaaaggcggccccgcagccacccagcgcgtgccgcgacaaccacgcgtnctgcccgcaatgggcaaagatgggggagtgcgacaagaaccccgtgtacatgcagggcgaccagaatgtgc

SEQ ID NO: 1272 - DNA, 480 bp, Chlorella sorokiniana
  unsure (1)..(480): unsure at all n locations; Clone ID: LIB3602-039-Q6-K1-A3
gcctgtctgccaagtccaaggacgaccgcggcgcgtgcggcgtgctcaccaccgcctcctaccccaccaagaagggcaccaccaaccccgaggtcccctccttctgcggctactttggctggaccgagtgccccgtgcactccacctgcacctgcaactggaacctgtttggcctgctctgcctctcctggggctgcgacgccggcgcgcagtgagcaccacgcagctaggcggatgtggcacatgccacacgctctcgactgtgccgctgctgctggcgctgcagcatccacccatgtcccaccatgcacgcacagtcagctaaagcgcatggccgaggcacctttcctgttgcaacatgcaccccacctgccgncgagcttgcctgacacttgctactaagaccgtcagcagcagcctgatatccctttggcgtgccccctttcatcctcagtgtcctctgctgtaccatgcgttcat

SEQ ID NO: 1273 - DNA, 489 bp, Chlorella sorokiniana
  Clone ID: LIB3602-039-Q6-K1-A4
gttcgtgatgctgttggaatgttcagcaccacaacaattgctgcgcagccctgctgtgctcctgttgggctgttaatgtgcaccccctgccaaaacatgcttgcagggactggttcgaggagcaagccgtgcgcaaggcgtgcaagctgtctactagctgcaccgcaccacgccctccacagccccgccataccttctttgccacttgcagggactggtacgaggagcagggctactatgccgagtactccgactgagccactgctgcaaaggatgccagcaggcagccagttggaccgcttcggcatggctcgactcaggctgggcacatgcctggcccgcccctctgcgctgctgccctccaacagtgagcagccattggtcgacagcgcaacctggatgattggtgggatgtgcctccaggtcagcagccagccttcttccgccgggcgccctactcctgttgatgcaccgtctgccgcgtgcaat

SEQ ID NO: 1274 - DNA, 275 bp, Chlorella sorokiniana
  Clone ID: LIB3602-039-Q6-K1-A5
gaggagaaggttgaggaggaggaggacgaggacatgggcttctccctgttcgactgagcgcacagccggccgcggccagccaccctccagtgcctggtccgctccagttgcagcggcagctcgatccctcgcctgcggcacgtacggcgtagcgtggcggcagcggcggcggcagcctagcggcgtgtttgtctcgctgccgtcgcagctgcggcgcatgtaacgcactccttccaaaaaaaaaaaacgacatttgaataaagaaaaaaaaaata

SEQ ID NO: 1275 - DNA, 581 bp, Chlorella sorokiniana
  unsure (1)..(581): unsure at all n locations; Clone ID: LIB3602-039-Q6-K1-A6
cgggcgggcatccaggccaactccaagctggagatcctggccgccgagaaggacatgtacgtggcccgcatcaacggcaacgtgacagtgaagcttggtccccgctatgacatgggcaacctggtgccccgcaaggaggacggctgggcgatggccgcctctggaaaggactttgcagtgtgggagaagaagtgaggtgggcagccgctcagggctgctgcggtgcggcatgcacgcattgggtgcatgtgctgctgccattttcgctgccgtcagccacagctgtgtgttggaccttcgtgcccctcccttcttgctgctgcctctgctgctgcatgacgcatctccttgcctgctacccgtcttcgatgcaaccttcctagctactgttttttcgcacggctgcacccacgaccttgcccatctggcttgcgcccacctcgtttttgcgcctaccttttcccccggactgcacaccgctcggaccgtcttctgtgtatcactgccngtgcttgtggcacactgttttgcccgcacatgctgcatgcgttttgattgaggcaccgcccgtgtgcgttatg

SEQ ID NO: 1276 - DNA, 405 bp, Chlorella sorokiniana
  Clone ID: LIB3602-039-Q6-K1-A7
acgcgtagcgcgtaacagcgctgtcggctatgttaacggcaacggtgccggcgccgacaacagtgcgcccgtcaacagcaacggagcattcgtgaactgcaacgtcaactgcattggcactgagagcggcacggtcaaagtgcctgctgaggagctgattagcgcggcggcggccttgcggcagagcgtgaacgcgctgcgctagtgagcgcgctgtgctacagcatgcacaggatgcacaaactagctcaccggccgtcatgttcatgcatgatgcttcgcaaaatagcacggcttgcacaaaatgccagacagacggcctggctgtcaagcagccagaaggcagaggcacggttatctaataggtcccacatcgttgtcaacctgatggatgtgttgaaatac

SEQ ID NO: 1277 - DNA, 302 bp, Chlorella sorokiniana
  Clone ID: LIB3602-039-Q6-K1-B1
cccccaacaagctgtccaagatcaaggtggtgcgcaagggcattgcccgcgtgctgaccgtggtcaaccagaagacccgggacgctctgaaggaggcgtacaagggcaagaagtacgtgcccctggacctgcgcgtcaagaagacccgcgccatccgccgccgcctcaccaaggcgcaggccaacgccaagactgagaaggctgccaagaaggcgcgcgccttcccgcagcggaagtacgcgctcaaggcgtgaaggccttggaagcagcccgctgcagccgtgcaggcacacctctaggca

SEQ ID NO: 1278 - DNA, 624 bp, Chlorella sorokiniana
  Clone ID: LIB3602-039-Q6-K1-B10
gttgcgggcgagccaggccagcaggctcaccgcctttgctcagcaggcagcacgacatctatcgagcacagccgccgctgccgccgccgccacgccgccgccgagcgtgggccgcctgaaccacgtggcaatcgcggtcccaaatgtgcgcgaggcagcggctaaataccgagacgtgctaggcctaaaggtcagcgagccgcaggcgctgcctgctcacggcgtgacggttgcgtttgtggacctgggcaacaccaagctggagctgctggagccgctgggcgccgcctcgcccatcgccaagttcctggacaagaacgcggcgggcggcatccaccacatctgcctggaggtggaggacatacaggccagcgcggcgcacgcggcccgtggggcgcggttgctggacccgcagcccaagccgggggcgcacggcacgcccgttgtctttctgcatcccaaggacatgtgcggcgtgctgacggagctagaggaggtgaagcggtgaccctggctggaatcggtagcccttctttgtgccagtagctatgtacttcgaacccgctctgaatgcaacaccagccctccaacctatgtacaatgtatgattgtatgcacactttc

SEQ ID NO: 1279 - DNA, 430 bp, Chlorella sorokiniana
  Clone ID: LIB3602-039-Q6-K1-B11
gtcacgggccagttcctgggctacaagaggagcaaggccaaccagtacaaccacaccgcgctggtgaaggttgagggcgtgaacagcaaggaggagaccgagttctacctcggcaagcgcctggcgtacgtgtacaaggcgaagaccgagaagaagggcagcaagtaccgcgtgatctggggcaaggtgacccgcgcccacggcagcgtcggcaccatccgggccaagttccagaagaacctgccccctgcggccatcggcagcaagatccgcgtgatgctgtacccctcccgcgtgtgagggtcggttgcttcccggagcagcagcggtgcggcacggcgcggcggtgacgagtcgtggcagtgcgaccccgctcggcacggccgcccgggtggcgccgccgtcgcctccatgtaacccttgattagcc

SEQ ID NO: 1280 - DNA, 570 bp, Chlorella sorokiniana
  Clone ID: LIB3602-039-Q6-K1-B2
ctgcggcgcggcttccgccttgctgcagcccccggcggcctcattggctgctacctgcaccagagtgtggcccctggcctgggccgcattgctggcctcgtggcactggagagcagcaagccgctggcgggtgatgctgctgccactgcccaggagctggcgcacaagctggccatgcaagtggtgggcgccgggcccaagtacctggaccgctcggctgtgccctcagaggcgctgcaggccgaggcagcagtgctgcgggagcaggcactcaagtctggcaagcccgagaagattgtggacaagattgtggctggccggctggacaagttttacggcgaggtgtgcctgctggagcaggcattcatcatggactctgaccacaaggtgcaagacgtgctgaagcagaacagcaagcagcttggcagcgacctcagcatcagcggctttgtgcgggtgcaggtgggagaggggctggaggccgaggccaaggactttgcagctgaggtggcggagctggcccgtcagtagcggtggcaaacgcactgcggccaagcaatgtgcagcgat

SEQ ID NO: 1281 - DNA, 111 bp, Chlorella sorokiniana
  Clone ID: LIB3602-039-Q6-K1-B3
aaaaaaaaaaacacaaaaaaaaaaaaaaaaaaaaaaaaaaataaaaaaaagggcggacgataaaaaaaaaaaaaataggggggcggccgtttagagctccaactttgcgcc

SEQ ID NO: 1282 - DNA, 459 bp, Chlorella sorokiniana
  Clone ID: LIB3602-039-Q6-K1-B4
accgcacccatcgcaacatgctgctcgttatagcccgccctctgactgcacggaacgacccccaagagccccgccccccattgagctctgccctaccttgagaggcattgcaccccgcccccctgtacccctattgccaccctgctagagccccacccgctgcacacgccgctgaagcagcgcccctgcagccaagctgccccttttcacccggttttcgccccctccccgctccctttgctcgctactgcttttggccggcgccatttcatggccctcctgggcctcagcgctccgctccgctacctctgctgcactgcaaccgccaggcactgagtgcctgtttgcccccctcttgcacttggccccctttgcacttgattccagcccgccggccgccgctgtttttccctttgcacatgaggcacacaggcgttgtactgtaaccggctctgctgt

SEQ ID NO: 1283 - DNA, 78 bp, Chlorella sorokiniana
  unsure (1)..(78): unsure at all n locations; Clone ID: LIB3602-039-Q6-K1-B5
aaaaaaaaaaaaaaaaanaaaaaaaaaaaaaaaaaaaaaaaaggncaaaaaaaaaaaaaaaaaaaaaaaaaaaaaagg

SEQ ID NO: 1284 - DNA, 228 bp, Chlorella sorokiniana
  Clone ID: LIB3602-039-Q6-K1-B6
attgaaccttgcgcaacgtaactgttctttattgaatcgccctatccatgtacaaacctaaccaataaaagctgagggggctgtaagttccaaggttatcaacgcttagatgctcgttcgtggcacgctataccctttctatccggtctgattaaataatattcctggctctattctcatcaatcaccaaaactgggaaaaccctgactttatccaactaattgactt

SEQ ID NO: 1285 - DNA, 539 bp, Chlorella sorokiniana
  Clone ID: LIB3602-039-Q6-K1-B7
caactactccgcgctggcgtcacttggcctgtccgcgtctgcgctctctggctctaagtatgcgctccccaagctggtcaacggcatcactcgctcgctgttcctggaagatgcgcccacgctgctggaggagttccttgcttacgacgaaccggagtttgtgggtgtgtggccccgcgccacctcctgcccgccggcagccagcgcttgagcgtgtcagtggcgccctttccagctggcatggctgcttccttgcggcaggtggaacgcgatgatgcgacggcggccagctgaggagcattggtagaggctgcctccctggtgcagtgttggagcaaatcctggctgccgctgagccggcgagttccactggtatcatgcagcatgcctctgccatgccgccatagcggcactggtgtgtcccacgcatttgtctgcaatccaaatataccctcatgtacattaggcagcactgcgcacccagcattcatcattcattgaatgtcgacatttgtcaaatgcaccccctgcactgtttc

SEQ ID NO: 1286 - DNA, 432 bp, Chlorella sorokiniana
  Clone ID: LIB3602-039-Q6-K1-B8
ggcacgtgtggtcttacacaccgggcgccggcgccggctgccccgctggcgctaacgatacacagagtcctgggcggggctgccccgcggccggccgcccagcctgcaagctgcaagaacaacgcgcggcggcggggggagcacactgcgtcgcccgccgccgcggctgctgccgccgagacggagccgcttacttctggctctcggtggcggcggtcacgccctgcgcgaagcgctcctcgcggcgggccgccttgcgctcgcgcgccgccttgttcttggcgcgccgcgcctccagctggtccgcaatgttcttctcgcggatcttctccgccttctgcttgtggatggcctccatgagcacgcgcttgttcttgtacacgttacccttcaccttgaggtagagctcgtggtacaggtggcggtcaatct

SEQ ID NO: 1287 - DNA, 549 bp, Chlorella sorokiniana
  Clone ID: LIB3602-039-Q6-K1-B9
ggccacgcccacggccgacacggcaatgctgttctttgagaccaacaagttggggttcacacccgaggtgctgggccgcatcaggctggttggcgcgcttgcaagtctggtgggtgtaggcctcttcaatttcaagctgaagcacatgccgctgcggaaaatcctgttctggagtgctatcatcggcacggggctgggcctgacgcaactcatgctggtcaccggcgtgaaccggcagctgggcctgagcgaccagctgtttgcactggcggacactgcgctgctcacagtgctggggcaggtggccttcatgcccctgctggtgctggccgcccgcatctgcccagagggagtggaggccaccctgtttgccacgctcatgtcgctgctcaacagcggcacgtttgtgggctcggccctgggctccgccctcaccgcctggctgggagtcacctcagacaactttgacaacctggcgccgctggtggtgatctgcacgctgagcgcgctgctgccgctgcccctgctgcgcctgctgcccgatggggt

SEQ ID NO: 1288 - DNA, 514 bp, Chlorella sorokiniana
  Clone ID: LIB3602-039-Q6-K1-C1
ggcggccagcagtgcaggcaggagcgggacccgcacgcggcacgggcaacggcctgggcgcacatggcgggtgctatttcagacctggacagatgcagtgcggcagttgaccaacctgcagcagttgctggaccactgctccaactggcagtacaccgatcccgccacgggacaggtgcaccgtgcacaatgtggcgtgtggcctgtgacggccgcgcctgaagtgattgcagttgcgcaaatggccgatattgcaataggaacgcatggcgccaacacagccaacgccctgttcatgcggccagggtctgccttgattgagatttttcatccggactggaatcaccagtttgtgcggcactggctggagtcagatccgatgtcacaggtgcattgatggggagttgtggtggaggaccgagaggtgttttctccgggcgcccacgaacagcgcgaacggcaggagggcgggctgccatacaaagggcactggaatgcgatgatgcgcgatcgc

SEQ ID NO: 1289 - DNA, 658 bp, Chlorella sorokiniana
  unsure (1)..(658): unsure at all n locations; Clone ID: LIB3602-039-Q6-K1-C10
gtaccgtccgtattcccgntcgaccccgcgtccgaaaaaaaaaaaaaaaaaaaaaaaaaataaaaaaaaaaaaaaaaaaaaaaaaaaaaaaaaaaaaaaaaaaaagaaaaaaaaaaaaaaaataaaaaaaaaaaaaaaaaaaaaaaaaagggggcggtcttttataaggttccttgtttccatacccttccttcaaaatggggggccttttttttggggtcccctttttttcttccccgggcccgcgggtttttttttttttttttggccccccttttttttttccttgcctcgtttttttcccccccttttttttttaaccccttggtttccccaatttttttcccctgccggacctccctttttttcgggggggggttttgaatgggggggggccccccccttctttttctaaatttgtcccccttttttttgtttttgccccccccccttctctttcccttttcccccccggggggggggtttttttcccttttttccctttttttttgccggggcccgagcccccccccatttaattttttacccttctttttcctcccgggttccggttttttcccttacggttcttttttggggggctctttttggggggcctttttcatttttcgccccctcctcccccaaaaattttttt

SEQ ID NO: 1290 - DNA, 581 bp, Chlorella sorokiniana
  Clone ID: LIB3602-039-Q6-K1-C11
cccgaacgttacttccaagcggacagccccaaccccttgcacagatgcagcccacgctgccatctcaaatctgcccacgcgaaaccaagaaacattggccgtcctggctaccttatgcccacgcatcccccgaatcctgcttttgacagcccttagtgaatcccatgcaatccagttttccttttcgctgcacccacccgcacccgatttcattccatcgcaccgcatgccccagccgcctgccgccacgctgtccacgcagcgctcagcccaccccaacgcactcctgcttcaatcagcccaggccccccaggcacccccagttttcggcatcttgaaacccttccttgcttgctcaatccctgatgaggacagttggcgctgctgcgtggtttcctctcaccctaccagcacagctccccagcttcctccacgttggtgcgcgtgcactccgcactgctacctcaacccaaagccaccttcatttgcgtttgctctttgctgccccttgcctcagtgtgtctgtcaccaccccgtgtcaccctcacgttgctggtgttgcgctcattacagctcgggct

SEQ ID NO: 1291 - DNA, 401 bp, Chlorella sorokiniana
  unsure (1)..(401): unsure at all n locations; Clone ID: LIB3602-039-Q6-K1-C12
cacggctggggcgcgcgcctgaaccgcctgcccgccgccgcccccggcgacatggtcatggcgaccgtgaagaagggcaagcccgacctgcgcaagaaggtcatgcccgcgattgtggtgcggcagcgcaaggcgttccggcggaaggacggcacctacatctactttgaggacaacgcgggcgtgattgtcaacaccaagggcgagatgaagggctccgcgatcaccggccccgtggccaaggagtgcgccgacctctggccccgtgtggcggcagcagccaacaccattgtgtagagcggcggccgtccggctgggcgtcgcggcagcgcggaccacactgcagtacccaccgcctgccgcgctcccggcgcagcatgctgtaatgcacatccagcgna

SEQ ID NO: 1292 - DNA, 495 bp, Chlorella sorokiniana
  Clone ID: LIB3602-039-Q6-K1-C2
aaaaaaaaaaaaaaaaaaaaaaaaaaaaaaaaaaaaaaaaaaaaaaaaaaaaaaaaaaaaaaaaaaaaaaaaaaaaaaaaaaagggggggcggttttaggggttacaaggttaaaatgggcgggcttgcgaaaggaaaaaatttttgggggggcgtctttaaagaaaataaattggccggggtttaacaccgggttgattggtattacctgggctttaccaattttattcggttggcgccttttccccttttcgcttgggggaatattaggaattggcccttttcccggccgcctttccaaaaaataaatccccccggattgggaattggaaaaaggcctctgccccggttctttattctcagaaggtgggggtgttttagggcaaaaaggaccgctccctttgcaagtccctataccccggggcttttggtttttttccttcctttttcccccacttttgcgggtttcccctgtcaccttttaattggggggct

SEQ ID NO: 1293 - DNA, 301 bp, Chlorella sorokiniana
  Clone ID: LIB3602-039-Q6-K1-C3
agcgggtgcaggaggttcgtgcggccaccgggcctcgcgccggcgagacggcagaggtgtctgtgggcgcgctgctgctggcaggggcctaccccctgatcccgcccgacaaggtgcccaagagcgtgcgcaaccccggcgcgctttacggcgagttcacgcccgtcacgctgctgcaaggcgtgggcgaggcggggcaggccgcgctgcagattggcaccgccgccttcaaggccgcgggccgcgcgctgggcattggcggcggcagcagcgagggcgagcccggaggcacgcccacggc

SEQ ID NO: 1294 - DNA, 547 bp, Chlorella sorokiniana
  Clone ID: LIB3602-039-Q6-K1-C4
ttttgctttggctgggctcagacccattcccttccccatacaccccagggccaccgcacccggagctgcgtcgcgcaggcgcggctgcggccgggttgcgtgccaggcaagggcggcggggcgcagcgctgcggcgcggctgttttgcgtgacgccccctgtggcgtttgctcacgtgagtttcgccgtattgtgccaccccttgctttgcccctctgcctttcccactcctcccgcccgatctgctctgcctgcccttcccctccttggtggttcccttccccttcccgacttgcacttgtgtcgctgcccctcctgggcgttgcttgatgcagtgcatgaccttcgcagccggccttgggtaagccgtgttgttccccgcccgtgcgatgctttgcgctcgctcctcgctgttgcattggattcattcgatgtcgcagtgggcagcacaggattgtgctgaatggctgtaacccacacaaagtcaaaagtcttgtgtaacacacacacacaaaaaaaaaaaaaaaaaactagttctagatcgcga

SEQ ID NO: 1295 - DNA, 448 bp, Chlorella sorokiniana
  Clone ID: LIB3602-039-Q6-K1-C5
gcgcctcgagcccgccatcaacgagtacaagaaggcggtcagcctgcagcccggttatgtcaccgcctggaacaacctgggcgacgcgtacgagaagcagaagaagtacggcgatgcgctgagcgcctacaaggaggtgctcacctacgcgcccgacaacaaggtggccaacgcacgcagcgagtactgccgcacacggctgcagcgcacggcgtgagcacgggcgccaacccatgctcgcgtggacgtcccaagtaggcacccattttttccaaggaacctccccaacctcatccctgcaaacccagccccctgcagcccggctgctgcgcctgattgtatcccccttctcttcgtcattcgcccgtctcagtctgcactgcgccccttctgctccctggaacaacacagatgcagttgcgctacaaacgctgcaaaactcaatgcc

SEQ ID NO: 1296 - DNA, 577 bp, Chlorella sorokiniana
  Clone ID: LIB3602-039-Q6-K1-C6
cgcgccacctcccacgctcgttggcatcgcccagcgatcgctagcagcgtgctcacgctcgagcggacagccgccgtcactcagcaagctttgttggctgccgcaccacccctctagacagcagcggagcccagcaccatgccgaagaacaaaggcaagggcggcaagaaccgccgcaggggaaagaacgacagcgacgacaagcgggagctgatcttcaaggaggacggccaggagtacgcccaggtgctgcgcatgctgggcaacggccgcctggaggcgcactgcatggacggcgtcaagcggctgtgccacatccgcggcaagatgcgcaagaaggtgtgggtgaacacgggcgacattgtgctggtgggcctgcgcgactaccaggacgagaaggcggacgtcatcctcaagtacatggccgatgaggcgcgctccctcaaagcctacggcgagctgcccgagaacatccgcgtgaacgacacagacgcgctgaacgaggaggagggcggcgagaacgacgactacatcgacttcgacgacatctcggagatttgagcgtgcacgcccacac

SEQ ID NO: 1297 - DNA, 575 bp, Chlorella sorokiniana
  Clone ID: LIB3602-039-Q6-K1-C7
caagagccagatccaggtgcagatcatccgcgccaagtcggaccccgcctacaagccgccctacacaaatgtgctggactgcgtcaagtccacgctgcgcaccagcggcgtccgcggccccttccagggcctgtccgccacgctgctgcgcaatgcgcccgccaactccgtctacctcggctcgtttgaggtgctgaagaaccgggcggcggcacactacggctgcgagatcaaggacctgtctgcccccgtggtcatgggcgcgggcgccaccggcggcatcctctactggctggccatcttccctgtggacgtggtgaagagcgcgatgatgaccgacagcatcgaccccgcacatcgcaagtacccctccatacctgtggccgtgcgcaagctgtgggccgagggcggcgtgtctcggttctaccgcggcttcagcccctgcctcatgcgcgcagcacccgcaaacgcggtcatgctcttcacagtggacaaggtcacgcacctgctgaacgagtgagcagcagcatgagagtggtgtggcggcccggccgtcggtgcagctgcaggcgatc

SEQ ID NO: 1298 - DNA, 387 bp, Chlorella sorokiniana
  unsure (1)..(387): unsure at all n locations; Clone ID: LIB3602-039-Q6-K1-C8
cggacgcgtggggtgcctgtgtgggcgcgcctggtgcctggcgctgctgttttccagctccctctccccgcctgccgctaccctctcactcgccaaccaaccgcatcagctctttgtccctccctacccatttctgcccactgcttgccccccctgcctctcccgctcaccgtacccttcccctcgccctaacccctctgctcctgttgccgcaacagtgcttgcggggcctgctctcacaccttctcagggggcgcccgagtggcctttcatttttgtgctcagacgtgctcagatgtacatgtactgtaagcaatgcacagcnnanaaaaaaaaaaaaaaaaaaaaaaaaaaaaaataaaaaaaactaaaaaaaaataaataagg

SEQ ID NO: 1299 - DNA, 548 bp, Chlorella sorokiniana
  Clone ID: LIB3602-039-Q6-K1-C9
cggagccgctggcatcgacgcaacagagccttcaagatgggctctctggtgggcagcgacaacttcacgcacattctgcgtgtgctgaacaccaacgtcgatggcaagcagaagatcatgtatgcgctgaccgccatcaagggtatcggccgccgcttctccaacatctgctgcaagaaggctgaggtggacctgagcaagcgcgccggcgagctgtctgccgaggagctggagagcatcatgaccatcgtggccaacccccgcgcctacaagatccccgactggttcctgaacaggcagaaggacgtcaaggacggccgctactcgcaggtgacctcctccgcgctggacaccaagctgcgcgatgacctggagcgcctgaagaagatccggaaccaccgcggtctgcgccactactggggcctcaccgtgcgcggccagcacaccaagaccactggccgccgcggcaagaccgtgggcgtggctggcaagaagaagtaagcagcttcttgcgggcgcggcctgcggcacgggcggatgctggcggc

SEQ ID NO: 1300 - DNA, 524 bp, Chlorella sorokiniana
  Clone ID: LIB3602-039-Q6-K1-D1
gtggacttcaacatgtttggccaccagatcgtggcgcacctagtcgacggctactcggcagcagccagccacaacaaggtggatggagaccccgtgcctgtgccccactatggcgtggccctcggggtgcagcagttccagcagctggccgagcgctgccggcagcagggcgtggcgtttgtgatagagccgcacctgcggttccagggccagccgggggagcagtggaccatgttctttctcgatccttccggcaatgcgctggagttcaaggcgatgaccaacccggacaacctgttcgccaagtaccgggtcgactgaggaggcagtacgaacacacgcactgcagttgcgatgcccagcttggccagccatgtcgcccaggttgactggcccggcgattggaggcctacgttggccaacacaagagtaaacctgcctatcagtactcctaactcgtcccactcatgagtaccacttcccctatcagcccataaactctctcttgtaacagtgtggcatgc

SEQ ID NO: 1301 - DNA, 405 bp, Chlorella sorokiniana
  Clone ID: LIB3602-039-Q6-K1-D10
gcggcgagctcggcaggaggaggagcgtcgaaggaaggaggagcaggctcggctggcgaagcagcagatggaggatgccatggcgcacctgatgcagaagcgcatgcaggcagacggcccctgaggcaggcgggtggccgccgtgtgctggcctggcccggaatgcgggcaggcagaccgcaaggcgggctttgggtgtgaccagctacacatatggcctgcacatcagtcaccgtgctgctcgccgggcacatctgctaaggctaaccattcagccacgtgtaccaactcctcacagcagccaggtttgcttctccctgctacctgttgtactcttgccagcaccctccccttgttgtacgccttgcgctctttgacagcggcgcatttgaacacgcacgcctg

SEQ ID NO: 1302 - DNA, 405 bp, Chlorella sorokiniana
  Clone ID: LIB3602-039-Q6-K1-D11
gcggcgagctcggcaggaggaggagcgtcgacagaaggaggagcaggctcggctggcgaagcagcagatggaggatgccatggcgcacctgatgcataagcgcatgcaggcagacggcccctgaggcaggcgggtggccgccgtgtgctggcctggcccggaatgcgggcaggcagaccgcaaggcgggctttgggtgtgaccagctacacatatggcctgcacatcagtcaccgtgctgctcgccgggcacatctgctaaggctaaccattcagccacgtgtaccaactcctcacagcagccaggtttgcttctccctgctacctgttgtactcttgccagcaccctccccttgttgtacgccttgcgctctttgacagcggcgcatttgaacacgcacgcctg

SEQ ID NO: 1303 - DNA, 618 bp, Chlorella sorokiniana
  Clone ID: LIB3602-039-Q6-K1-D12
aaaaaaaaaaaaaaaaaaaaaaaaaaaaaaaaaaaaaaaaaaaaaaaaaaaaaaaaaaaaaaaaaaaaaaaaaaaaaaaaaaaaaaggggggaaaataaaaaaaggggggggccgctttaaaaggaacagggggggccctctttagaggaccaagttttacctcccctttagggcgacctaattttttttttttggggccccttaaataaaatgacgggccgcgaatttcacaccgtttcccagggaaaacccttggcgtcccccaccttattcccctgggggaaaatcccctttttgcccgttgcgttattactaaaaaggccgttcccaatcccctttccaaaagggtaccccccttgaagggaaaatgaacccccccttttagggccctttaaccccggcgggcggggtggattcccccaggcgaaaccctcaattttttagggtccttaccccccgttttttgcgttttttccctttttttctcgcacactttaaaggttttcccccctaaggtttaaaaggggggccccttttaggggttcgaattaaagttttatgggcccgggcccccaaaaaaatgtgttgcgggggggggtaaacaagggggccccccc

SEQ ID NO: 1304 - DNA, 558 bp, Chlorella sorokiniana
  Clone ID: LIB3602-039-Q6-K1-D2
ccaagctgtccagcagctacgggccggacctgctggagagccgctggttcctgcacgaggccggcctggctcacaagctcttcctcctgtggtttgtgggcctggtggcgcggctcaagtactactttgcttgggctgtggctgagtctgctctcatcttcagcggcctctgctacaatggccgcacaccagagggcgcaccactgtggaaccgttacatcaactcgcgcattcgccgcgtggagttcaacttgtcactgcccaacctggccgccaactggaacgtctgcaccggcctgtggctccgccattatgtgtacgagcggctgacgcccgcgggcaagcgccccggcttccgcacgctcgtggccacgcagctggtcagcggcgtgtggcacggcctattccctggctactggctgttctttgccacctctgcagtcatgtttgaggcgggcaagacgctgtacagatatgagcagacgtggcccgccggcgccgcgcgctttccgcttacatcgctctgaaagtggtggtgaatgcggtgctgctgaacta

SEQ ID NO: 1305 - DNA, 87 bp, Chlorella sorokiniana
  Clone ID: LIB3602-039-Q6-K1-D3
aaaaaaaaaaaaaaaaaaaaaaaaaaaaaaaaaaaaaaaaaaaaaaaaaaaaaaaaaaaaaaaaaaaaaaaaaaaaaaaaaaaaagg

SEQ ID NO: 1306 - DNA, 501 bp, Chlorella sorokiniana
  Clone ID: LIB3602-039-Q6-K1-D4
tccgcggcaagaccatcgtcatcaagtatggcggcgcggcgatgaaggacgagagcctcaaggcgcgcgtcgtgtccgacctcgtcctgctgtcgtgcgtgggcatccagccggtgatggtgcacggcggcggccccgagatcaacacctggctgaacaagctgggcattgaggcgcagttcaagaacggcctgcgcgtcaccgatgctgccaccatggatgtggtggagatggtgctgggcggccgcgtgaacaagtcgctggtcagcctcatccagcaggcgggcggccaggcggtgggcctctgcggcaaggacagcgacatcatccgggcgcggcagatggttgagaaggacatcgggtttgtgggcgaggtgacgagcgtggaccccagcctgctgcggacgctcgtgtccgatggctacatcccggtggtggcctcggtcgcctcgaatggcaaagggcagggcctgaacgtgaacgcagacacggcagcgggcg

SEQ ID NO: 1307 - DNA, 413 bp, Chlorella sorokiniana
  Clone ID: LIB3602-039-Q6-K1-D5
gcgcaaacgcagagattgatgccaacacctgccgcgagtgcgccggcacgggggcgacgccctgcgacatgtgcggcggcaccggcaagtggcgcgccctgagcaggaagcgcgccaaggacacgtacgagttcaccgagtgcccgcagtgctacggccgcggcgtgcgtgtctgcggcgtgtgctttggcaccggcctgcgcaacgtcaagggcctgctgcgccgtcccgaggccacggcgctggtgcagcagatgcagcacggcgagctgcggccgggcgaggtgcaggatctgctggccaaggcaaaggccgacctcaaggcagccgatgcggcggcggcggccaaggactccgcctgagcaatgagcatgtagcactgcacggttgttggcagttccacgcctgcgatc

SEQ ID NO: 1308 - DNA, 329 bp, Chlorella sorokiniana
  unsure (1)..(329): unsure at all n locations; Clone ID: LIB3602-039-Q6-K1-D6
attattaaaataattcttttttttttttttttggcctgggatgatttcacaacattagcgcattggtacactggcccaacacacgaccgcacagccccaaaatcaaaatgcgatggtctttgcctggtcctggggcgccaccagccgccacagctgggggttgctgtccaccgccgcggaatccactccaacctgcctggcctgccgcccaaacttctggacgtccagaaacagctgcagctcgatcattttgtaggggtaaggggctgggccncccttcccggcctgttgtcgcgccttgagccggttaaaggtggactccgtcttgc

SEQ ID NO: 1309 - DNA, 65 bp, Chlorella sorokiniana; identical to SEQ ID NO: 672
  Clone ID: LIB3602-039-Q6-K1-D7

SEQ ID NO: 1310 - DNA, 499 bp, Chlorella sorokiniana
  unsure (1)..(499): unsure at all n locations; Clone ID: LIB3602-039-Q6-K1-D8
gcttgcgactgcccatcctgtgtttcgtgtgcccgcaaggcatggcccgctctccccacccaaacccgactttgtccttgtctgcgtatctgatctgattggtgagctacccttgaaggggcggnctntgggccgncctcttgtcctactatttactaaccgtgttctctcggtgtattcattgtgcactgtgtgcctgcgtacttactacttgtgcccgtccttgtctgtccctgtcttgtctgcctgtctgccgcccgtttgccttggtctctttggtctctcgtgttgatcgtccgtcgtctgctcgtcgccgcgttcattctccacccctgcatctgcacacaatccatcccatcttatcttatccaagccacaaagctacttgctggctttcgtacccagcccctgcctcggtcccttactctccgcctgggctctcctgtacattacttcaaccccgcctggcgcttttaattgacgccctgcctgacgcttt

SEQ ID NO: 1311 - DNA, 463 bp, Chlorella sorokiniana
  Clone ID: LIB3602-039-Q6-K1-D9
aataaaaaatagaaaaataaatgagataagagtaaaaaaaaagaaatgaaaagatataaaaaaaaaaaaaagggggtgtgaacttgaatagagtatatatactgattggtgggagttctcttgattggtttttttttttgctaggtttgttaaggttgtggctgtttttttttttgatcgtttttgatgtaaattggtttggcggtttttttactttttttggggtgggtaaaatttttttttttgccggcttgtgtttaatgggggaatttcctatttgctttttttccatttttttaaacgggttgcatattggctttttttctatttggtggagtgttttaaggggtggtggggtttttcttttaaagggtcttacacctttgcgtgtgctttttttcccgccctttaattttcctttttttggtttgtttcttagggccctttatttttttttcctttt

SEQ ID NO: 1312 - DNA, 565 bp, Chlorella sorokiniana
  Clone ID: LIB3602-039-Q6-K1-E1
cggacgcgtgggcccgccttcagccatgggtaagactcgcggtatgggagctggccgcaagctgcggctgcaccgcaaggacgagcgctgggcggacaaggactacaagaagtcgcacctgggctccgagtggaagaagcccttcgccggcgcttcgcacgccaagggcatcgtgctggagaagatcggcattgaggccaagcagcccaactccgctatccgcaagtgcgcgcgtgtgcagctgatcaagaacggcaagaagattgcggcgttcgtgcccaacgacggctgcctcaacttcatcgaggagaacgacgaggtgctcatcgccggtttcggccgccgcggccacgccgtgggtgatatccccggcgtgcgcttcaaggtggtgaaggtgtccggtgtgtccctgctggcgctcttccgcggcaagaaggagaagccccggaactaaacggcccgcgcccagcagcggcagcagcggcgcgcctcggcaacggggggcgccgcgtccgccagcactgcacctgcctggcggcggcttgggagggcctgcaccgcatgc

SEQ ID NO: 1313 - DNA, 590 bp, Chlorella sorokiniana
  Clone ID: LIB3602-039-Q6-K1-E10
cggagttccgggaggccttctccctcttcgataaggatggcgacggcaccatcaccaccaaggagctgggcacggtgatgcggtcgctgggccagaaccccaccgaggcggagctgcaggacatgatcaacgaggtggaccaggacggcaacggcaccattgacttccaggagttcatcggcctcatggcgcgcaagatgaaggacaccgacagcgaggcggagctgctggaggccttcaaggtgtttgacaaggacggcaacggctacattagcgcggaggagctgcggcatgtgatgaccaacctgggcgagaagctgacggacgaggaggtgaacgagatgatccgggaggcggaccaggatggcgatggccaggtggactacagcgagttcgtcaagatgatgctctccaagtgagaccgctggtgcggcgggcagcgctgcagcacgcgttttgcccgccagaacccggcccctgcagcagccatcagcgccactcacttgctggcgcagcagcccctactctcagccctcgcttgctcccttgtctttgccacctgaccctcagcctaaccttactggactcgc

SEQ ID NO: 1314 - DNA, 502 bp, Chlorella sorokiniana
  Clone ID: LIB3602-039-Q6-K1-E12
cccagccagccgccgccgaaaatgtgcgcctggaggacgttgagtcatccacgctgcgtgcagggctgcgggcggctgtggaggggcggctcgaggatgcagagaggctttttcaagtgtatctgctgaatgaggacccgcagagcgcttcggcgcactccaacctaggcaacgtgcaccagcagcagggcaagccggagcttgctgtgcaggactacagccgtgcggtggagctggcgccagaggcccccgtgccctacctcaaccgcgcaattgccaaggagacgctcggcgtgcaggcggcgcagcgcggcgacagccagggcgcgcaggacctctggcgctcggcggcagcggacgcgagccgtgccattgagctggaccccaaggagtttgcggcctactttgacaggggcaacatcgacatgcggctcagcgactttgacggcgctctggccgactttagaaaggccgccgacctggcacccgggctggcgggcta

SEQ ID NO: 1315 - DNA, 356 bp, Chlorella sorokiniana
  Clone ID: LIB3602-039-Q6-K1-E2
cggacgcgtgggccgcgctgcagccacgggtgaaacgcgcggcatgggagctggccgcaagctgccggtgcgggggaaggaccagcgctgggcgcacaacgactacacgaagacactgccggactgcgaggggaagaagcccgtggacgagccttcggacgccaagggcgccgcgctggctgagatcggcctggcagccgctcagaccgcctccgatatccgaaagagcgcgcgggcgcaggagagcaagagcggcaagaagaacgcggtggatgagcccaaccacggcggcctcaacttcatcgacgagaacgacgaggtgcacatggccgggtttggacgccgcggccacgccg

SEQ ID NO: 1316 - DNA, 592 bp, Chlorella sorokiniana
  Clone ID: LIB3602-039-Q6-K1-E3
gtgggagcaggacgctgcccctttcttcgacattacagtgccagctgaccaggctgctgagctggcgagctcgtacagccagatgcttggcgtgcccacaccgccagtcacccaggcgctggcgagcggcgagggcaacctcaccttctatgccctgtcgctgcaccgcaacggcatcaaggtgcccgtcatgcagtccgacctgtccttcagcctgctgtacggcagcaacctgccggaggcgctgatccgagcggtgcccgccctgctggccgaattcccggccggactgctcacccccgcaggcatggtggttgcgaatccaagctatgccgggctggagccccagctggagagcgggctgtaccgcaacttcacaaacggatccgtgatttggggattcgtggaggcgatgatggtggaaggtctggagcggcagctggctctgtgcgactccggcacagccccttcctggtgctccgacacccagctgctgtcccagctgcgcacggcgctcgaccacctgtggagcacgatcgtgaacaacgctgacgtggccttctccgaggtgtggagctggaagtttgaaaac

SEQ ID NO: 1317 - DNA, 441 bp, Chlorella sorokiniana
  unsure (1)..(441): unsure at all n locations; Clone ID: LIB3602-039-Q6-K1-E4
accgaccagcggcacctgcagaagcgggaggagcacaagcagacggggcagatgtgcgagcatggcgtctggcgctgcaagatctgcttccctcacgagagcaagtgagcctggccgcttaccggcgggcaccagtcgagcagcggcgatgctcggtgctagccgtcctagtgggccaatgctgcctgtaaggcatagtgcaaggcagcatgcaccgccagcatcaatatttgtggtgcggcccgactgccaattcccgctgtcccatgccgcccggcaataatccctccactgctcttccacgctgcattgcacctgcgcaatgtgcccttgtgataaccacactttcggcgccggtgcgccggtgtattcctgagcggcatttacacttgaacaaacgagattcgtctgaccctgctgtaaaagactgactggtcnnna

SEQ ID NO: 1318 - DNA, 585 bp, Chlorella sorokiniana
  Clone ID: LIB3602-039-Q6-K1-E5
cggacgcgtgggtttgctgcaaactcgcaaggtctcctgactagcacaagctccggcgaagcctgagacagccggcaggcagcgcggagcggcagccagcaagcgaggcagcaggatgccccgagccaagacattcaaggaggagcacccgtttgagaagcggcaggcggaggcggcccgcatccgagacaagtaccctgaccgcatcccggtgattgtggagcgcgctgacaagagcaacatcccggacattgacaagaagaagtacctggtgcccgcggacctcacggtgggccagtttgtgtacgtgatccgcaagcgcatccgcgtgtcgcccgagcaggccatcttcatgtttgtgcgcaacgtgctgccgcccacggccgcgctgatggcggacgtgtatgcagaccacaaggacgaggacaacttcctctacatcacctacagcggtgagaacacgtttggctgaggctggcgcaccgctcgccagctggccggagtccccatgctgccatgacattgcgctgaatcgcctgcgccctgtatcacgggcatagcccgcctcccccacaaaagtacact

SEQ ID NO: 1319 - DNA, 530 bp, Chlorella sorokiniana
  Clone ID: LIB3602-039-Q6-K1-E6
cgcgaacttgtggtggtggcgctgctgctgtctgcaggcgctgcggcagccacagcaaacagccagggccagctcccggcagacgtggcggccgcccagcaggaggacgcgctcggcatccgcagctgcctgctgcgggaggcggcagcacacccgttgcggcagcaccggctggccacggtgcggcctcgctgggaggattctgacgctgagcgctgcgctgcggaggcaaaggagcttctgaaggcggctggagagcttattgccgcatgtggtgagagcgtggatcgtgcaactcagcacccaccctgtggcgacgagctggttggggggcagcctccgcctgcgtggcgggcctggcacggctgagctgcgttgggcggcccgtaaagggcgccctgctgtcttgtacagaggtggatggttgtttgttccttgtgttggtaacggccctccgtagctctatgtttacatgcgcgtcaacatgagtgtttgaccaagcctgcttgcttgctctgtgtcagcaaacg

SEQ ID NO: 1320 - DNA, 637 bp, Chlorella sorokiniana
  Clone ID: LIB3602-039-Q6-K1-E7
ggccctgccgcaaaagcggcggcggcggcggtggcgcagccggctgcagcagtgcagcagcccataacagcagcagcagcagcgcagcagccgcaggctggagaggtgccgcagcccgccgctgccgccgtgcagcaggaggagcagccgcaggcggctccaggagccacagcagctgagcagcagcagccaggggctgtggcagccatgcaagggctattggaggagcagcagcagcaggtgcagcaggctcagcaggtgcagcaggctgcggccgagcaggcgcatgcactcttcatgcagcaggtggggcagacagagcaggcgcctccagcgatgcacctgcagcagcagggggtggccgcggtgcagcagcagccgcagctggtgccacacccgcaccagcaccagcagcagcagcactacggcaccttggcaacgctacccgtagcagcagctgggcagcaggcaccgccgtcactgctgctttggcctcagacctcgtgatagccgccagtgagcggcactttatgcagtaaccaccagctaccagccgtgccaacgaatgcaaggaagtaaatgtatgcagctgaatgctaactttctactcagcaggacatgtaatcaacacttcact

SEQ ID NO: 1321 - DNA, 565 bp, Chlorella sorokiniana
  Clone ID: LIB3602-039-Q6-K1-E9
acagcctgcgccgccggctgcctcatcccgccagcttccccgccggccgcccccgccggcctactagctttctccctccccagtccctgtgccctccctgcatgtgccaacgtgttgtgctgtgatattgatacactgcgccggtcagtctgtattactatgcccctgccctcccatgcaccgcatgggagcgggtggcttgctcagcgggcagcgcctgcctcccttggaggtcccttcaaagaaggtccaggcctgccgcctcagtccgtactaaacaaatcagcacctttcgttcgtcgcctttcattccgctctcgtcctccctgcctacctggtctgcctgccctagtgtgctggactggtagcaccctttgctgccccagcgtctgtctgcctctgcctccttgtgctttcatgcagctttcatgcagcttatgcagcatcgttgcggctgtcccgctgttcacccctttgcctcacctccctgcccctgctagctccttcccctccccacaaatgaacccaacagctggcctcgctcggctgtgaaccagcccctaac

SEQ ID NO: 1322 - DNA, 84 bp, Chlorella sorokiniana; identical to SEQ ID NO: 289
  Clone ID: LIB3602-039-Q6-K1-F1

SEQ ID NO: 1323 - DNA, 587 bp, Chlorella sorokiniana
  Clone ID: LIB3602-039-Q6-K1-F10
cgggtggcgggacctgctggctggagcgcatggcgacagcctgtggcagacccactgccaggctgcatggaaggatgatgtgtatgtgccggcggcgcagcgcactgactcgtcctggaagcggcgatacctgttctctctggacgaccgccgccgaacagagctcacacccgaggagctgacgcacttccgctggcgcttcaacttcaagcagcaggctggcttcttttggctccagctggatccgtcctggacgctcgagggtccgccgctgcagcgcgtgttcatgctggatggcacaacagagccgggcaaccgagatgaccctttctggggcatgcatgagatgcggtggcggttctgcaagagcaaggagggcgtgaagggcacatacgtcaagatcaaccagtaccccagcctggagctgagccgcacggcgaatggcggctggcgcatggagaacatgtgggtggagtacgaagcgctgctctctggcggagggccctacagccgcggcatcctgccgggccagcagcgccacctgtgctgagcacgatgataacacgctgacctggcaaaagatgcaa

SEQ ID NO: 1324 - DNA, 104 bp, Chlorella sorokiniana
  Clone ID: LIB3602-039-Q6-K1-F11
aaaaaaaaaaaaaaaaaaaaaaaaaaaaaaaaaaaaaaaaaaaaaaaaaaaaaaaaaaaaaaaaaaaaaaaaaaaaaaaaaaaaaaaaaaaaaaaaaaaaaagg

SEQ ID NO: 1325 - DNA, 533 bp, Chlorella sorokiniana
  Clone ID: LIB3602-039-Q6-K1-F12
ctcccccctgcaagccatccgccggaaggaggcgcagcttcgctgtccctgccttcccacaactgtcaagatggctcccaagcgccgcaccacccaggaggagaatgtcagcctcggcccggccacccgcgagggcgagctggtgtggggcgtcgcccacatcttcgcctccttcaacgacaccttcgtccacgtgactgatctgtccggcaaggagacgctggtgcgcgtgactggtggcatgaaggtgaaggccgaccgcgacgagtcgtccccctacgccgccatgcttgccgcccaggacgtggccacccgctgcaaggagctgggcgtgaacgcgctgcacatcaagctgcgcgccaccggcggcaaccgcaccaagacccccggccccggcgctcagtccgtactgcgcgccctggcccgctccggcatcaagatcggccgcattgaggatgtgacccccatccccaccgactccacccgccggaagggtggccgccacggtcgccgcctgagaggcgggcgcgcta

SEQ ID NO: 1326 - DNA, 480 bp, Chlorella sorokiniana
  Clone ID: LIB3602-039-Q6-K1-F2
ccctgttgaactgctttacaatctgctgatctgtatgtctggtgcgtaaggggtgcgacggcggcatcggcagcgctaggcagtcctcggatgctgatcgacagagaggaattaatcctgatgcaacgagatacagatgggtggctcttatgaacacgtatgatacatggctcgcatgagcatcaaagctggtgctgtgcatggtacaaaggcgctggtgtgttgagcaaagatcaggcgatcggatccactttgtccagctccctgttgatgatgaggcgcatgatttcgttggtgccctccaggatggagtgcactctcaggtcacgcatgtatcgctcgatgccgtactcccgcaaataaccgtagccgcccagcagctgcagcgcgctgttggccacgtcaaagcaggcgtcggtggcgtagcgcttggccatcgcgcactcgagcgttttgccgcgcgagtcgctgtccagggct

SEQ ID NO: 1327 - DNA, 129 bp, Chlorella sorokiniana
  unsure (1)..(129): unsure at all n locations; Clone ID: LIB3602-039-Q6-K1-F3
gaggagggcaagatctgagcggtcttcccgtcccgacctaccaattttttcgtcagccctgatgcatcttatttggttccgaggcaagagaatttcccccattgacctgtaacgttacagcacgcanaa

SEQ ID NO: 1328 - DNA, 63 bp, Chlorella sorokiniana
  Clone ID: LIB3602-039-Q6-K1-F4
aaaaaaaaaaaaaaaaaaaaaaaaaaaaaaaaaaaaaaaaaaaaaaaaaaaagggcggccaat

SEQ ID NO: 1329 - DNA, 400 bp, Chlorella sorokiniana
  unsure (1)..(400): unsure at all n locations; Clone ID: LIB3602-039-Q6-K1-F5
ccgacaagcctgtcaacccgctctatgagaagcggcccaagacgttcggcattggcggggacctgccgtctaagcgctacatgctcacgntctgtgaagtggcccaagttcgtgctcatatagcggcagctaagtgtactgaaccggcggctgttggagaccgctgtcattgacaaaacactggcgcgctcgacattaacatggtcgaaagacagtccaatttggtcatgtggtaccataccgaagacgccgcgaccaataaggattcccaactgttggacgccctggatcgcgaaggtgacccgccgtttagaagaacattactcgcgggggcagtggcggtttcaaccacattaaccatttcatttagaacggccatgcgcaccgctccttgattttt

SEQ ID NO: 1330 - DNA, 133 bp, Chlorella sorokiniana
  unsure (1)..(133): unsure at all n locations; Clone ID: LIB3602-039-Q6-K1-F6
cttagcgatctcacattgcattgcccatgctgctcactcttgttcggctggctggcggcagcgcgctgcccaggccttttttccaagcctgccactctgcaatccagccacgccatatgtaagccgcggcntg

SEQ ID NO: 1331 - DNA, 543 bp, Chlorella sorokiniana
  Clone ID: LIB3602-039-Q6-K1-F8
gatcaaactgcgagacggcgggcgggacagcagcgagcctgcagggttcgggtcgggaccgcttttcgccgcagcgcagccaaccgagcggcagccggttgcagacaacgactgggcgctgtaggcgcacattgggccgtgacccaggcgctggtgggcgagcggccaggcagccatggcgtctgcggtgcagcgcctgcgggcgatccacctgtacaggcactcgctgaagaacatgctcagctgggcggtgcggcgtgaggtgttctatgccgaggctgagaggatccggtcggaatttgatcaactgaagacactggacgaccccatccagatagagcgtgcgctggagcgcggagaggcgcgcctgcgcgaccacctgcacccagacccttacatcgtgccctaccgcccaggcggcagcatgtacgcgcgcaacccgcccttcgacccgtctgtgcacatccatctggactttggccgcgagggccactgagcgcttgctggcggcggctgcagaccgacgcagggcagccactggag

SEQ ID NO: 1332 - DNA, 436 bp, Chlorella sorokiniana
  unsure (1)..(436): unsure at all n locations; Clone ID: LIB3602-039-Q6-K1-F9
gcagggcgctctcccagccgcagcaagcagccgcgctggcgcctgctgccccgcccgcccagccggcctagcgagtaagcgccctttgcgacttgtggttggtggtcagcattggcatttgtacagatttgcatcagactttgcgtgtatgtttcatagcacagtgtgcacagaatgaagtgtaagcttacgcagaccgnnnaaaaaaaaaaaaaaaaaaaaaaaagggctgcattgagggataccgcatggaggcatctggggcctgcgaggcctgcacggtggccaactgctcgatgtgcgacgatgacgctgccaagtgcaccctgcccatggagggctatcgtgtgaccgctagtggcggcaccgaggcgtgcactgtggaccgctgcggctggtgcagcgatgcgccggacaagtgcgagtcgtgtgtgac

SEQ ID NO: 1333 - DNA, 340 bp, Chlorella sorokiniana
  Clone ID: LIB3602-039-Q6-K1-G1
ctttcattgcctttttgcccccctttacgaattttcgaatacctggccctccccgcaatctgcttgcgcccagtgctgcgttgcctcccgcacccaagacccccagcgtaccaacctccctcgatcacttatgcataccatcccgcgtctgccttgcacccatgaaccgcttccatccggactacccttctcccaggaaacttcctgttgcgcttaccctgtctgcttttccacccaccaccgcctttttgtgcgagcaataaagtagtgtttgcagtagagagcccataactgagcgggcgaaatgtgaccgcgatcaatgtaagcgaagcaatcttgc

SEQ ID NO: 1334 - DNA, 74 bp, Chlorella sorokiniana; identical to SEQ ID NO: 648
  Clone ID: LIB3602-039-Q6-K1-G10

SEQ ID NO: 1335 - DNA, 530 bp, Chlorella sorokiniana
  unsure (1)..(530): unsure at all n locations; Clone ID: LIB3602-039-Q6-K1-G11
ggcctgcccgaggcgtttgactacaagaagatcctcaaggcgctcaagaaggagtactgctgcaacggcaccgtgattgaggacgaggagctgggcaaggtgctgcagctgcagggcgaccagcgcaagaacgtgtctgccttcctgctggacaaccagctgtgcaagaaggaccaggtcaaggtgcacggcttctaagcagccctgcgcccttgcgcccgcaccgcccaggctgcttgagtggcagctggctggcgcggccaccgtggcccccaaacctgcggcccctgcggccgggcagccacgctgcggctaggtagcgcgctcgcttgtgccggctggcgtcggcagcagcgctggcaagagtggcgcccagagtgttaggctaggcgcggcggcgcggcaagacccgccgncgccacacgcacacagtttctgtctatcctgttcagccccctctctgtaccacatgccctttgctgctgcgtcgctcgccggccagcctgacacaccgttccaatatgcatgtg

SEQ ID NO: 1336 - DNA, 483 bp, Chlorella sorokiniana
  unsure (1)..(483): unsure at all n locations; Clone ID: LIB3602-039-Q6-K1-G12
cgcacattttgtgcaaatttcctagtatcctttttcccggcagcacaggctcagctaggtgcaggtctttgtgtgtttgcggcagcagcgacagcgcatctgcctatttttcgagttcagttcgattgagcagttgatcagatgatgccagcatttcatgtttcctttgccatttttggcgccgcccattttccctgcctgtctcatggtggcactggggccgtgctgtgttcaaccagcgctcctataataatacagtttgtttgaatgtaaagtaagaatcgggnggcnnaaaaaaaaaaaaaaaaaaaaaaaaaaaaaaaaaaaaaaaaaaaaaaaaaaaaaaaaaaaaaaaaaggggaggacgntagcgatctaaaacttgncggggcccttggtcgaacacctaggtttccgaccccggcggggaaaagtttcctgcctctgtttttgcccctaacctcaccaacaggggaagctttt

SEQ ID NO: 1337 - DNA, 489 bp, Chlorella sorokiniana
  Clone ID: LIB3602-039-Q6-K1-G2
ccctgctgtgcacaagctgccagctgcatgcttgccgccaaggctcccagattttatcagcattctaccattgccattcgcttgctccctacgtttcgtttccatctgactgggcggcggcagcgcgagcgcacagcgcgtcagcctgcattgccgcaagcacctaacgactgcactcatattctctctcttcggttgctgggccaacgtttgcactgtaccctgcgcgctcactggcgtgccacaatactgcgcaggtgcagcacctgccccctgctcttatttacgtgtacagcgtaccccctttcacacccaggcgtgtatgggcccccacccaccctcgcccccgaatcaccaacccttgcttcctttgggcctctggcacccacccgccgctctggcactgtttgtcagtgtcagaatttagcagaaggcgctgcactgctgttcactggctgcggggccctcggctgttgtaacatagtagcc

SEQ ID NO: 1338 - DNA, 143 bp, Chlorella sorokiniana
  Clone ID: LIB3602-039-Q6-K1-G3
aagctgatcacggccaaggaccacggcagcgtgcagatcaacattggccacctggacgagagcggcgtgtacaccaactcgttctccaccttcgcgctctgcggccaggtccgcgtcaagggcgaggctgacagcgctctgga

SEQ ID NO: 1339 - DNA, 542 bp, Chlorella sorokiniana
  Clone ID: LIB3602-039-Q6-K1-G4
gcggcggcatgcagatctttgtcaagacgctgacgggcaagaccatcaccctcgaggtggagtcaagcgataccattgagaacgtgaaggccaagatccaggacaaggagggcatcccccctgaccagcagcgcctgatcttcgcgggcaagcagctggaggacggccgcacgctcgccgactacaacatccagaaggagtccacgctgcacctggtgctgcgcctgcgcggcggcatgcagatctttgtcaagacgctgacgggcaagaccatcacgctggaggtggagtcgagcgacacgatcgagaacgtgaaggccaagatccaggacaaggagggcatcccccctgaccagcagcgcctcatctttgccggcaagcagctggaggatggccgcaccctggccgactacaacatccagaaggagtccacgctgcacctggtgctgcgcctgcgcggcggcaactaggcggctggggcacccacccacctgccttcacacccatcgtgtgcggtaggagcggcgcgcgcgtgcacatgt

SEQ ID NO: 1340 - DNA, 513 bp, Chlorella sorokiniana
  Clone ID: LIB3602-039-Q6-K1-G5
cccgccaagcctgtcaacccgctctatgagaagcggcccaagacgttcggcattggcggcgacctgccggccaagcgcgacatgcgccgctttgtgaagtggcccaagtacgtgcgcatccagcggcagcggcgtgtgctgaaccagcgcctgaaggtgccccctgccctcaaccgcttcacccgcacgctggacaagaacatggccgagagcctgttcaagctgctgatgaagtaccggcccgaggacaaggcggccaagaaggagcggctgctgaaggaggcggaggcgcgcgaggctggccaggaggttgagaagaagaagcctgtggtggtcaagtacggtatcaaccacatcacgcagctggtggagagcggcaaggcgcagtgcgtggtgattgcgcacgacgtggaccccattgagattgtggtgtggctgcccgcgctgtgcaagaagatgggcgtgccctactgcatcgtcaagggcaaggcgcggctgggcaccgtggtgcac

SEQ ID NO: 1341 - DNA, 590 bp, Chlorella sorokiniana
  Clone ID: LIB3602-039-Q6-K1-G7
ggccggtctagcaggtactgggcagccatgacggcagctgaggtcaagctgttcgggaagtggagcttcgaggatgtggaggtgaacgacatctccctggaggactacattgcggtcaagcccaagtatgcgcgcttcaccaatcacagtgcgggccgcttccagaagcgccgcttccgcaaggcgcagtgccccatcgtggagaggctgaccaacagcctgatgatgcacggccgcaacaacggcaagaagctgatggcggccagcattgtcaagcacgcgtttgacattgtcaacctgctgaccgaccagaacccggtccaggtgctcgtggacgccatcatcaacggcggcccgcgtgaggatgccacccgcattggcagcgccggtgtggtgcgccgccaggctgtggatgtgtcgccgctgcgccgcgtgaaccaggccatctggctgatcaccaccggcgcgcgcgagagcgcgttccgcaacatcaagaccattgcggagtgcctggcggacgagctgatcaacgcggccaagggcagctccaacagctacgccatcaagaagaaggacgagatcgagcgcgt

SEQ ID NO: 1342 - DNA, 521 bp, Chlorella sorokiniana
  Clone ID: LIB3602-039-Q6-K1-G8
agctgcggccgtccatcacccccggcaccgtgctgatcctgctggcgggccgcttcaagggcaagcgcgtggtgttcctgggccagctgccctctggcctgctgctggtgaccggccccttcaagctcaacggcgtgcccgtgcgccgcgtgaaccaggcgtacgtcatcgccacctccaccaaggtggacgtgagcggcgtggacatctccaagtttgacgacgcctacttcaagagcgccgagaagaagcagaagaagcagagcgaggagggcttctttgccgagaagaccgagaaggcgccgctgcccgctgagtatgtggccaaccagaaggcggtggacgcggcgctgctgggcaagctgagcgacgagctcaagggctacctgtccagccgcttcacgctgcgctctggcgaccggccgcacctcatgaagttctgaggtgccagcctggcagctcgctcgcccagcaagcggcccggcggccgggcttgcttggcggcagcccgcgcggcacgc

SEQ ID NO: 1343 - DNA, 587 bp, Chlorella sorokiniana
  Clone ID: LIB3602-039-Q6-K1-G9
ccgaccccaagatcgtgctgctcatctttgtgtccggcaaggtggtgctgacgggcgccaagaagcgtgaggacatttaccgcgcctttgagaacatctaccccgtgctgcagacgttccgcaagggcggcatgatagcggcgccagaggcgccagcggcgctgccggcgccacagcagcagcagcaggcgctcccagtggtgggagcaccggcaccccacctgtagcccagcagccttagccattcccagcacacagacccctctaggctgcgcggccggcggcagttcgcctcccctccccctggcagcacgatagcctcgtcaaaaaactccagatgttgcgtcagttagcgtgtgtgtgtgttcctctctcctcccgttagcttttttccagaaccagcctgcttgcggagccacggcatgcccttcctacctgcctgctccaaactcattgtagctctgctctgctccctttccttacacagttccgccgctcccctacctctgccctttgcgcgccgcctgcagtaaggcggcagtgcctgccagccctatggctgcgacagcgataaacaaattcgaagc

SEQ ID NO: 1344 - DNA, 436 bp, Chlorella sorokiniana
  unsure (1)..(436): unsure at all n locations; Clone ID: LIB3602-039-Q6-K1-H1
gggcagtcgagttgtaacaatgaggcgcagtggctgttgggtgcagccagagtggtggtagtatgaaggttgcagtgcaatggcgactacaggcagagggcaggtgcttcgacacaaaaaatgggtacaacaaatcgcagggggagcggcagggtggtaggcattaaacctgcttagtggcttaggggcagggaggggaggaaggggattgccattgggcagggattaaaggagcgcccaaagaaaggcttagggcggtaagacggttttgcattgtacagcctgtgcggacggaagcaagaccggtggcggcaggcttcgcaatccaaggtatgaagcaacgtagcggcaataatagtgctcgtgagatgcaccacgcancgaggtgaagtgagggatgctttggattaaagatgcattactgtggcagccgggc

SEQ ID NO: 1345 - DNA, 472 bp, Chlorella sorokiniana
  Clone ID: LIB3602-039-Q6-K1-H10
caaaagcaacgcattttacaacaattgctgcacaatttgccaagaggtttggtcctgagagcagggcacatgtgttggggcatggctagttgcggttgacctaaattgaggctgccgggtggggagggggtgcccccggcgggcttggaaaagcaacaacgcacgagcgttgcaggtttcattcgttggggggttgggctgtgaaatggagggacggggcggccaagaggggcggcaggcatggccgttctcatcaaaggcagggcccactgaaggaaggaaggagccgcattaaggcaggaaggaatcggttgacagaaataaaccactgggcacaggcaccgcacgataccgtatggcatggggcaagggcaggcacgaggggtgtattaaatggggagaggtgcgatgcaagcaggggtgtgatgtggatggcggggtggggtttgtggtggggattcttatggggagc

SEQ ID NO: 1346 - DNA, 599 bp, Chlorella sorokiniana
  unsure (1)..(599): unsure at all n locations; Clone ID: LIB3602-039-Q6-K1-H11
cggcggagaagtcggagatggatgtgtccaagatgtctcccctgggcgaccgcctgctggtgaagccccaggaggtggagagcaagacggcgggcggcattctgctggcccccacctccagcggccgcagcatgcaggatgcgctggtgggcaccgtgctggccgtgggcgatgatgtggacgtgggtgtggctgtcggcgaccgcgtgctcttcagcaagtacagcagctccgacctggaggtgcccgatggagaggtatgctttgtggcgcagaagagcatcctggctaagctgtcgtgaggcggctgttgattgcatgctgcttggctgacccgccaagctgtcgtgcggcggctgtgcagtcccaacacagcgcttggctaaccggccaagctgtcgagctgggtgatgggctgcccccagcaaagcactgcaaccaagcgggcggtacctgccaggtaccatcttgaccaactgccgcgcctgccgccgagccattgctgtgcgcaggcgcatttcacttccctgctcccacaccatttnctgtttcgcttgcccgttttattcccgctcgactgtgctgtaacgacatgatac

SEQ ID NO: 1347 - DNA, 299 bp, Chlorella sorokiniana
  Clone ID: LIB3602-039-Q6-K1-H12
gccggcaagcaagccgggctctttggatggttggatggacggaaagtgaggcaggaggcggcgggtgggggccggccggcaatggcgcacagattggtgcgcagccgtgccacgcccgccgcccgcacgtgccggcatgccaccccctcagaccttcttggtgcggctgcctgctgccagcctggcagccaggcgccgcccctgtgcatgatgctgcttattcccaattccttttgcccatatcgcccattcactaaacaccctgcaccgtacgttttaacacaacaccctcccccttt

SEQ ID NO: 1348 - DNA, 557 bp, Chlorella sorokiniana
  unsure (1)..(557): unsure at all n locations; Clone ID: LIB3602-039-Q6-K1-H2
gcgcgcccgacagatgcaggaggcggctgcgcgcgacgctgcagagcagaaggcgcagcagctgcgtcaccagcttgccgaggcggcggcggcgagggaggcggctgagcagcgcgcgcgggagctgcagcaacgggtggaggcggagcaggcggcgcggcaggcggccgaggggcgggccaaggagctgcaggaggagttgagggaggcgagcagagcgcaaaagggcggcctgctggcctgcttttcagcctgagcagagcgcagacgggggcctgcttctcagcctgagtgctggctgatgtgggctggtgcgtggctcggcacgcgcctgtgctcattagccagcatgcacagggcagctagccgagggcgcagatggcttttgggtgccgatttaactcgatccgtgttttatgtttctctgcattgtatttatgtccacttgacaagccacactgcggcgttgcgcctctgtttaacgcctctgtcgtccgttggttgcctactnccactcacctcgacactttttgatgtttcgatggcagcactgcatg

SEQ ID NO: 1349 - DNA, 457 bp, Chlorella sorokiniana
  Clone ID: LIB3602-039-Q6-K1-H3
gcggcatcagcgatgactcccagatgtacatcctgatgcgcctgctgggtggtgccaagaagcgcaagaagaagacctacaccaagccgaagaagcagaagcacaagcacaagaaggtgaagctgcgggtgctcaagttctacaaggtggacgacagcggcaaggtgcagcgcctgcgcaaggtgtgcccccagtgcggccccggcatcttcatggccacccacttcaaccgcgtgtactgcggcaagtgccacctgacgtacgtgtacgacaaggagggccagaccgcctaagcgccccgctcccccctgcggatgcacgcttagcagcagcacacgcggcgggtgcgcccggcatgccggcacaccagccacggagcggcggggcgtccctggcagcggcgcagcgcctgcaagcccttctgttgtgttctgtgccgctgtaatacccctgctgc

SEQ ID NO: 1350 - DNA, 542 bp, Chlorella sorokiniana
  unsure (1)..(542): unsure at all n locations; Clone ID: LIB3602-039-Q6-K1-H5
acgctgcctccagacagccccaacctggagcttgaactgacatgggagaacaagacggccacgcgcctgccggaggcgttttggctgcgatgggtgccgcgcgctgaagcagttaacacatccagctggcgcatgtacaagctgggccagcccatctctcccctggaggtcatgagcaacggcagccaggcgcagcacgctgtgggcgatgaggggctgagcgtggactcggcagacggccggcgccgcctgttcatcaggtcgctggacgccaacgtggtgagcccggggcggcccaacccgctgcccagcatccgcgaccctccgcagctcaagcacggcatggcgcactgcctggtcaacaacatgtgggggactaattacgtcatgtggttcccctactcccaaggtgacgccaacatgcgcttccgcttcctggtgcaagtccaggagctgtctggggggcacggcatcagcggcgccagcgagagtgcagccagcgcatcagcatagcccctgcatgcgcacantttttgtcgagc

SEQ ID NO: 1351 - DNA, 80 bp, Chlorella sorokiniana
  unsure (1)..(80): unsure at all n locations; Clone ID: LIB3602-039-Q6-K1-H6
acacctgcaggtaccgaatcgcagattcgacccacacgtacgaaaaaaaaaaaaaaaaaaannnnnnnnnnnnngnnnng

SEQ ID NO: 1352 - DNA, 289 bp, Chlorella sorokiniana
  Clone ID: LIB3602-039-Q6-K1-H7
attgtggagcggctgctcaacatggcgcgcggcgggctgctgctgagatagaggcaccaggcttgggagcgcggcgggctgctgctgcgatagaggcaaaaacaactgctgcgatagatggcagaactgcagcggcagcggcggcagcagcagcgagcagagcgtcatgggcagcagccggcaatgcgctcagccggtagcagtgggggcaggagcagcgacagaaatcctgaatgaacatatgcgattaaagcaatttcgtgcacttcctgtgtaacagctgctctgg

SEQ ID NO: 1353 - DNA, 413 bp, Chlorella sorokiniana
  Clone ID: LIB3602-039-Q6-K1-H8
gagccagcaagatggcccctaaggagcagaagtcgaaggaggcgaaggcgcttgccgccgccaactccagcaagggcaagaagaagaaatggtccaagggcaagctgaaggagaaggtgaacaacctggtcctcttcgacaaggccacctatgagaagctgctcactgaggtgcccaagtacaagatgatcactccctcggtgctgtccgaccgcctgcggatcaacggcagcctggcgcgcgccgccatcaaggagctgctgggcaaggggctgattaaggaggtggccaagagccgcgcgcagcagatttacacccgcgcgacggcagccgccagctaagcagccacccagcagtttggcagcatgctagtgcactcgttgtgcttgccaatctggtaacaggtccctcgc

SEQ ID NO: 1354 - DNA, 542 bp, Chlorella sorokiniana
  Clone ID: LIB3602-039-Q6-K1-H9
ccaactcctacttcatggatgtgaagtgccagggctgcttcaccatcacgactgtgttcagccacagccagaccgtggtggtgtgccccagctgcaacaccgtgctgtgcgtgcccaccggtggcaaggcccgcctgaccgagggctgctccttccgccggaagggcgactgagcgcgcccccgctagcggcagtgttggcgctgggcagcggttattgtgatgtccacgggcagcccgtagcagcggcactcgcactcctctcttgttgggatggagcaacaccttgcacgggcgtcggaggagactgatcgcccacagtgaggagcacgcggccgggggcctccgcccctgcagccgcgtgtgaagagccacgagtatagcaccccgcgctgccaggcctcgcggccggcgcgcacaaatgactagcacccgcgcctgcggccggcgctgctggccggtcgcggccgggctggctgtcccaggaagtgacatgcactgatggttttgcccatgcatgcggcactgtaaaaagaggaaaag

SEQ ID NO: 1355 - DNA, 384 bp, Chlorella sorokiniana
  Clone ID: LIB3602-042-Q6-K1-A1
atcaagggcggggccgggccaggggcctccgcagctgcggcggcggcagcggcagcagcggccatggcagtgccgccgcctgacacgcctcgcaaggccgccattgcacccattagcgagggcacgcgtgagcgcatcatttcagcgctgtacgaagcgctgcaggccaaccccaggtactgctccgaaccgtctcgcagcgtgatgtgctgggcgcaggaggtggaggacgcgctcttcgctcgctcccactccaagcaggtgtacctggcccaggtggccaacgcggttcgcctggcgcgcacagccgagaatgtgtcggacattccgcgcatcgccgccggggagccgcgtgcagtggccgaggggcacacggcgggtgag

SEQ ID NO: 1356 - DNA, 612 bp, Chlorella sorokiniana
  unsure (1)..(612): unsure at all n locations; Clone ID: LIB3602-042-Q6-K1-A10
actagttctagatcgcgagcggccgctcgcgatctagaagcacggaacccagacgccatcatgcgggccctggtcgcgatcctcctgcttgtgctggtcgtcggagcgctggccaggaagtacgaagaccctgtgaccagctgcatcaagaggtcgaagtgcgcgtccaagaagttcaagccggtctgcgctcgcaacgccgccactcaggacacctggggaggtttccccaacgattgctacaggaagtgcgccaatgccgcccatgactttggtgtggattgggtgaagggccactactaccgcgtgcccaagtactgcaagaccaagtggctggcctaccccgtggagtgctccacttgctccggctactactaggcaactagctgagcaaggcagggcagcctgaaacaggctcccatgtgccgacgctgctggcggcatgaggcacagcaccaagaaaggcagctntcaagggcggcgttgtgctggagcaggcatggccgccagtctggagcgccagctacagcacgttgccgggctcgatggccctgccaaccagcctcgacgcacagctgaagcgctgcaacacacccgtgacaaaccgtgcaa

SEQ ID NO: 1357 - DNA, 566 bp, Chlorella sorokiniana
  Clone ID: LIB3602-042-Q6-K1-A11
cccacgcgtccgcggacgcgtggggcttcaacacaggcgtgggtgctcccaacatcatccctcagtccgtcaacctgctgggcacgatccgggcgatcgaccatgagctgtttggccgcctgcggcagcgagtgacggatgtgttcaccagcacggcggccatgtacggctgcaacgcaaccattgagtggtcgccggtgccgtaccccccactgatcaccgacaagcgcgccgtggagctggccatggcggctgccgccaaggtggtgggcgccgccagcgctgtgaagatgccccagccgttcatgggtgccgaggactttgctttcatggcggcccgcgtgcctgccgcctttgccatgctgggcatccgcaacgagactgtcggctcggtgcacggcctgcactcaccccagttccggctggacgaggccgccctgcccatcggcgcagcgctgcacgtgcagtttgcgctcgactttctggagcgcggcggcttggacggcaagggcgggtccgcggcacgtgacgagctgtgatgtcgcaggcttgtgacatgcctgttg

SEQ ID NO: 1358 - DNA, 77 bp, Chlorella sorokiniana
  Clone ID: LIB3602-042-Q6-K1-A12
aaaaaaaaaaaaaaaaaaaaaaaaaaaaaaaaaaaaaaaaaaaaaaaaaaaaaaaaaaaaaaaaaaaaaaaaaaggg

SEQ ID NO: 1359 - DNA, 111 bp, Chlorella sorokiniana
  Clone ID: LIB3602-042-Q6-K1-A3
aaaaaaaaaaaaaaaaaaaaaaaaaaaaaaaaaaaaaaaaaaaaaaaaaaaaaaaaaaaaaaaaaaaaaaaaaaaaaaaaaaaaaaaaaaaaaaaaaaaaaaaaaaaaggg

SEQ ID NO: 1360 - DNA, 401 bp, Chlorella sorokiniana
  Clone ID: LIB3602-042-Q6-K1-A4
cggacgcgtgggcgcccagcgctccgagtaaacctgcggctccctcgctcgcctggaggcggccgcctcggcctgcagctgttgggtagcttggcggcagcaggccagccaacccagccctgcagggcgacatctgcctggcttgatgtcagctaagaggctcttttcttgcagctgcactcgcgcccctccgcatcttgttccttgacgcttttttcccctccccccggtgccaaattgtggctgcgcctctgcctcctatcctcttgattcctcggccgtgtcccccgacccgatctattctacgcagcacccccgtccgtaccctgcgagcgtgtgtatgtgtgcccccgcgctgcgtacctctgcctaaacccaccaccgtgcaacaagcatgctcg

SEQ ID NO: 1361 - DNA, 581 bp, Chlorella sorokiniana
  unsure (1)..(581): unsure at all n locations; Clone ID: LIB3602-042-Q6-K1-A5
ggccaccatcatgggtcccagcgactccccttactctggcggcgtgttttttgtgaccatccacttcccgcctgactaccccttcaagccgcccaaggtgcagttccagaccaaggtgtaccaccccaacatcaacagccagggcagcatctgcctggacatcctgaaggagcagtggagccccgcgctcaccatctcaaaggtgctgctgtccatctgctcgctgctgacagaccccaaccccgacgacccgctggtgcccgagattgcgcacatctacaagacggaccgctcgcggtacgaggagacggcgcgcgagtggacccgcaagtacgcgatgggctgagcagctgcagcgccagctcatgcggccccctcgcagcagcagcagcagcagcagcagcgtgcggtggcggcggcgcaaccgcgcgcgccgcgccgcactgcagtttccacgcatcctctgtcccaaccgcttgggcaggggcaggtggngcgccgtcccacccttgcggccctctctaccgncgggcagcactgagcaatactgtactgtgtggaccggccagccgaggcgcccc

SEQ ID NO: 1362 - DNA, 607 bp, Chlorella sorokiniana
  Clone ID: LIB3602-042-Q6-K1-A6
gctggccgaggcgctgcagcaggcggtggcgtatgcaacagagctgcgccagcagggcagcgcgcccacgctggcgggcaagccttccaaggaagtggcggcgcagctggttcgccacgtggaggagaagcaccaggcacaccgcatggacctggaggagatgctgcagtacgccagccacgagctggagccgcaggccggcccctccccggcgctccagctggccatgcgacagctgcgcgataggtgcgaacctcggatcggcgacaagcttgagaagcacgtgagtgcggagcgggagattgatgaccttcgcaagctggtggacgcatcagaggagacatgaacgcaatgcgactgagcagccgctctcagcaagcacggcaggagcttggctgcagttgagtttagcacaagctgccaccagatatgtgcgtagcgccatgcccctgagaacgctaacggatgttgcttgcctattgagcaaagctgccacgagcatgttcatattttgtggtaccagctttgttcctctgaaccttctgtggatcatctgcttacagcttcaaacaacatgcatgctccatctgctttctaacacacacac

SEQ ID NO: 1363 - DNA, 368 bp, Chlorella sorokiniana
  unsure (1)..(368): unsure at all n locations; Clone ID: LIB3602-042-Q6-K1-A7
cgacaacaccagccggctgtggggcgggccgcgcttccgcctgctgcgcacgctggcggggcacgagggcaaggtcatgggcgccgacatctcgcccgatgggtcgttcacagtggccaccaccggatacgatcgaaccatcaagctctatgggcctgacccgctggcagacattgacgcggcagcagaagagggcggcggcagcggcatgcctgcgtgacacctgactttcagctaggcctagggcttacagcagcactgacaccaatgagaactgtaacaaccacttgctttanaaaaaaaaaaaaaaaaaaaaaaaaaaaaaaaaaggggcggcggctcgcgatctagaacgttctagatcgcga

SEQ ID NO: 1364 - DNA, 427 bp, Chlorella sorokiniana
  unsure (1)..(427): unsure at all n locations; Clone ID: LIB3602-042-Q6-K1-A8
cgcatccgcgtcaagggcggcggccaggtgtcccagatctacgccatccgccaggccatctccaagggcattgtggccttctaccagaagtacgtggatgagcagagcaagaacgagatcaaggacatcctgctgacctacgaccgcacgctgctggtggccgaccctcgccgctgcgagcccaagaagttcggtggccacggtgcccgcgcgcggtttcagaaatcttacaggtgaaggctgccccgtgggacggttgggcgcctctggaggcttcttctgcgccgctggcgtggcggcagcggcgtctgcggcctaggcagctgccctggagcagcatgccctcagcgaaagcaccatgagtacaccttgcgtgtgtaacaaaacgccacacannananaaaaaannaaaaaaanannnnnanna

SEQ ID NO: 1365 - DNA, 454 bp, Chlorella sorokiniana
  Clone ID: LIB3602-042-Q6-K1-A9
actagttctagatcgcgagcggccgctcgcgatctagaagcacggaacccagacgccatcatgcgggccctggtcgcgatcctcctgcttgtgctggtcgtcggagcgctggccaggaagtacgaagaccctgtgaccagctgcatcaagaggtcgaagtgcgcgtccaagaagttcaagccggtctgcgctcgcaacgccgccactcaggacacctggggaggtttccccaacgattgctacaggaagtgcgccaatgccgcccatgactttggtgtggattgggtgaagggccactactaccgcgtgcccaagtactgcaagaccaagtggctggcctaccccgtggagtgctccacttgctccggctactactaggcaactagctgagcaaggcagggcagcctgaaacaggctcccatgtgccgacgctgctggcggcatgaggcacagc

SEQ ID NO: 1366 - DNA, 555 bp, Chlorella sorokiniana
  Clone ID: LIB3602-042-Q6-K1-B1
cgagctgatacgcggcgggcagctggccgaggccctcgagtttgcgcaggagtacctggctcctcgaggggaggaccatcctgagctgctggaggagctggagcggaccgtggcgctgctggtgtttgaggacgttcgctcctcgccgctggccgacctgatggatgtggcgcagcggcagaagacggccagcgagctgaacgcggccatcctggccagccagtcgcaggaagcggagcccaagctgcccaacctgctcaagttgctggtgtgggcgcagaagcagctggacgaaaaggcgatgtacccgcgcatagagaacctgacgagcggcgatctggtggaaccgccgcccgcagacgattgacggcgccgcgccagcggcgtgtcgggcgcccgccgcttgcggcggcaaggccttaatgctgctgccggcggtggcagcggtagcagccaatgtacactattcacgctgtcctctcattcaccatctgtattgaccgacatctgcagctcttgactcattgaccactccctggctgttggaaagcacca

SEQ ID NO: 1367 - DNA, 62 bp, Chlorella sorokiniana
  Clone ID: LIB3602-042-Q6-K1-B10
aaaaaaaaaaaaaaaaaaaaaaaaaaaaaaaaaaaaaaaaaaaaaaaaaaaaaaaaaaaaaa

SEQ ID NO: 1368 - DNA, 264 bp, Chlorella sorokiniana
  Clone ID: LIB3602-042-Q6-K1-B11
aaaaaaaaaaaaaaaaaaaaaaaaaaaaaaaaaaaaaaaaaaaaaaaaaaagaaaaaaaaaaaaaggggggggggtttaaaaaaaagggaggtagggaagggggggtttgtaatttaggttatttttttttggggtgtgggtggttttttttttgtgtgtggggggttttaggtaaaatgggtggggggtttgatatttttgtgtgcttgttttaattttgttgttttggaaattttgttttttttggggtggggttttttttt

SEQ ID NO: 1369 - DNA, 482 bp, Chlorella sorokiniana
  Clone ID: LIB3602-042-Q6-K1-B12
gcgggcgatccacctgtacaggcactcgctgaagaacatgctcagctgggcggtgcggcgtgaggtgttctatgccgaggctgagaggatccggtcggaatttgatcaactgaagacactggacgaccccatccagatagagcgtgcgctggagcgcggagaggcgcgcctgcgcgaccacctgcacccagacccttacatcgtgccctaccgcccaggcggcagcatgtacgcgcgcaacccgcccttcgacccgtctgtgcacatccatctggactttggccgcgagggccactgagcgcttgctggcggcggctgcagaccgacgcagggcagccactggagccgctgtcctgccgtcctgcagcagcgcacaaccggcagccctgaagagcctctggatgtagcggcggccctgcagagtctgctagtgcagccgcagtaatgagcctgtgctgtggaaaccctgctgcattgttgtc

SEQ ID NO: 1370 - DNA, 414 bp, Chlorella sorokiniana
  Clone ID: LIB3602-042-Q6-K1-B2
ggagccagcaagatggcccctaaggagcagaagtcgaaggaggcgaaggcgcttgccgccgccaactccagcaagggcaagaagaagaaatggtccaagggcaagctgaaggagaaggtgaacaacctggtcctcttcgacaaggccacctatgagaagctgctcactgaggtgcccaagtacaagatgatcactccctcggtgctgtccgaccgcctgcggatcaacggcagcctggcgcgcgccgccatcaaggagctgctgggcaaggggctgattaaggaggtggccaagagccgcgcgcagcagatttacacccgcgcgacggcagccgccagctaagcagccacccagcagtttggcagcatgctagtgcactcgttgtgcttgccaatctggtaacaggtccctcgc

SEQ ID NO: 1371 - DNA, 461 bp, Chlorella sorokiniana
  Clone ID: LIB3602-042-Q6-K1-B3
cctgcagtaccgtccgtatcccgatcgtacccacgcgtccgaaaaaaaaaaaaatagaaaaataaagaaaaaaaataaaaaagaaagaaaaagcaaatagaagaaaaaaaataaaggaagggcgggtacaagatattggggctaggagaattctgaaagagtgggtgcacaatctggttttttttgtcttggcctcctatgacagtgtgttggctgatgttttcaaatactttattattactaactttggctttttgattttcttgggattaacagaatttttgccttttggccacatgatggaattgctaagaagggggctgatttaggagttccccaattttccagagtttgaaatttacacccgtgtgacggtgtattaaagcttaaaaggctgcgggttgtttgctttctgctaatgcacttgttatatttgccaatctgctaacacgttccttttt

SEQ ID NO: 1372 - DNA, 61 bp, Chlorella sorokiniana
  Clone ID: LIB3602-042-Q6-K1-B4
aaaaaaaaaaaaaaaaaaaaaaaaaaaaaaaaaaaaaaaaaaaaaaggttctagatcgcga

SEQ ID NO: 1373 - DNA, 571 bp, Chlorella sorokiniana
  Clone ID: LIB3602-042-Q6-K1-B5
aaaaaaaaaaaaaaaaaaaaaaaaaaaaaaaaaaaaaaaaaaaaaaaaaaaaaaaaaaaaaaaaaaaaaaaaaaaaaaaaaaaaaaaaaaaaaaaaaaaaaaaaaaaaaaaaaaaaaaaaaattggggggggcttttttataattaaaatttttttgcgcgtgtttgtgagattttattttttttttttggggactaaaatttaatttttttggcgtttttttaaaaatcgaaattttggaaaaacttgttttattcaaatttttaaagatttttaaagaaaataccttttttccaaatgggaaaaaaaaaaaaaaaggccatcaacttattttttttaaaaattttaggcatttatttgtgataattgtccccccttttatagccaattaaaaaggggggtttttgtgtttttttccctttgtttcccttttttttttgttggcccttttggcccgaattttagttttttttttattttttttaggcagtttttcgggttttttctaaaaagtttttaattagggggttttttttaagggtctaaataaatttttttgggccattgcctt

SEQ ID NO: 1374 - DNA, 164 bp, Chlorella sorokiniana
  Clone ID: LIB3602-042-Q6-K1-B6
gcacctgcagctgggcagccattgcaagccaccaggcgagagcggccacacacaacagtgcggccttgcacagctcatagacggtcctgccggaacacagtccataattcggattgttggttgctgcactgtacattgccattccttgtaactgcggcagtatt

SEQ ID NO: 1375 - DNA, 328 bp, Chlorella sorokiniana
  unsure (1)..(328): unsure at all n locations; Clone ID: LIB3602-042-Q6-K1-B7
gccgcatcagaggagacatgaacgcaatgcgactgagcagccgctctcagcaagcacggcaggagcttggctgcagttgagtttagcacaagctgccaccagatatgtgcgtagcgccatgcccctgagaacgctaacggatgttgcttgcctattgagcaaagctgccacgagcatgttcatattttgtggtaccagctttgttcctctgaaccttctgtggatcatctgcttacagcttcaaacaacatgcatgctccatctgctttctaacacacacacctgtagcgcttgcacacgcaaacatgtaactctactgcacacanna

SEQ ID NO: 1376 - DNA, 404 bp, Chlorella sorokiniana
  unsure (1)..(404): unsure at all n locations; Clone ID: LIB3602-042-Q6-K1-B8
cggcctggtcctgctcttcattgccaacgggctgggcgtcttcagcgccgtgggccaggatgatgaccaggccttctgaagctgagagtcttctgagtctgagatggactgggctgaactgggctccatctgttggacagcagttggccagtctctgcggcagtgcgtagtcccaagcggcgctgaggggcccctgaggcaccggctgcactgcacgctgcgctgctgagtggcccacttgctgcttggccccgttgaaacctgggcacacgtgcttgctccttgctgagttgcttgtgttgcagagcaagatggtgagtgggttgtagcatctgtaaatacagtaagcggggaaaaaactaaagcactcanngngctagacaatctggtaacaggtccctcgc

SEQ ID NO: 1377 - DNA, 62 bp, Chlorella sorokiniana; identical to SEQ ID NO: 1367
  Clone ID: LIB3602-042-Q6-K1-B9

SEQ ID NO: 1378 - DNA, 524 bp, Chlorella sorokiniana
  Clone ID: LIB3602-042-Q6-K1-C1
ggggttgtgaacaagatggacaactcgtacattctgaagctgccggagtggcggcgcgcgcgggagggccctgtgcaggttgccaagctgctggacgcacgggaggtgcagcgtggagccaagcagtatgtgttctcctactcgctggccaaggagggcgaggcggagcgcaccgtgttccagagcgtggcgctgggcaacacggggcggtacaacaagctgttcacgctcaacgccacctgtaccgccgccgacctggagcagtacggtcccgtgctgaagggcatcgtcgacagcttccggccgccggccccgctggcgatctgagcgggcaacgcagcaaagcagctcctgctgcaagatgatcgagcagtgcagagcagcacagctgtgccgccgctgcctgcggcgctccactcaaacgtgctgataccggcgtggcttgccaaccaaacacagccactgtcggcgacgcttattacaagcacagggaaggggctgccgtggcccgcagtgagtatttg

SEQ ID NO: 1379 - DNA, 79 bp, Chlorella sorokiniana; identical to SEQ ID NO: 903
  Clone ID: LIB3602-042-Q6-K1-C10

SEQ ID NO: 1380 - DNA, 383 bp, Chlorella sorokiniana
  unsure (1)..(383): unsure at all n locations; Clone ID: LIB3602-042-Q6-K1-C11
acgatgcggggctgagcctggccggcacaaacgccatcaccgtggtggagcccagcagcctgtgatgcaaccctgcgccacgccgcggcagcgacagcagcagcatgaccgctggcagcaccttgcaaagctctcgcagagcttgcacccccagcaccgcctgtgtaacttttgacctggaaaaaaaaaaaaaaaaaaaaaaaaaaaaaaaaaaaaaaaaaaaaaaaggaagaacgaaaaaaaaagaaaaaaaaaaaaaaaacgcgggcatgcaacgtaaaaaaatcttatatagagaaaccaaaaaaaaaattaactgnccgggggggggcccctttaaaaagtacaaaaattcctcccggttccaaacaaaataaaacttt

SEQ ID NO: 1381 - DNA, 314 bp, Chlorella sorokiniana
  Clone ID: LIB3602-042-Q6-K1-C12
ccggaatcgacggatggacccacgcgtgcgcggcctgataggcggcccttcagcattttgtacctatgtggtcagataggccaaggcgccaggtggtgtatcaacatagggccgggccagtgggtagggcatgcaggaaatgactgcaacgtacacaatgaataaagcactgacgcaagccatggacgtggcactgatccactaacgtatcctgaggcacaagctctgggaagcactcacgagcaatcaaacgctcaacgccctacatgcaccatcctaccaatacaccaaatgtgccaccctaaacgcacgtg

SEQ ID NO: 1382 - DNA, 502 bp, Chlorella sorokiniana
  Clone ID: LIB3602-042-Q6-K1-C2
gccccgagaagaaggcgtggcagatcttccgctccctggacgtcaagtacgtgtttgtcgtgtttggcggctacatcggctacccctcggacgacatcaacaagttcctgtggatggtgcgcatcggcggcggcgtgttccccgacatcaaggagtccaactacctgtcctctgatggcaactaccgcgtggacgacaaggcgggcaaggcgctgctagactcgctgatgtggaagctgtcctactaccgcttcgccgacacctcccccatgtttggcgcgccccgcggctacgaccgcgtgcgcaacgccgtcatcggccgccccgacttccagctgcactactttgaggaggtgttcaccagcgagcactggatgatgcgcgtgtaccgcgtgctggacaagcccaaccgggacaaccgcatgcgcaacccgcggcgcagcaaggtgggcaagagtgcggccaagaccaagcagcggacggcatctggcgcgcccgcatg

SEQ ID NO: 1383 - DNA, 608 bp, Chlorella sorokiniana
  Clone ID: LIB3602-042-Q6-K1-C3
ggtgttcttcgtgtacatcctctgggaccccctgaactatggggaccctccttgagcggtggccggcatgggcacaggtgagcactgtgcaggcacatggctgccggctgctcaactcactccacccagggcatgcggggttgccatgctctgctgcggcgcatgatgcctattaacacgagctgcccatgcctgctggctcactgtcctgcctagctgcccgacacgccggcgcctgacctgccgcgcagtgcaaccctttgagttgggccctcaggggctggcgctaagctgttagactagactagactagtgcaacccacgtctgggcggcgccatctcatcgccaagtggcggcgctgcgctgcaccacacccgtggcctgtggcgcaagctgtgagcgctaccgcagcgctgccgcctgccccatacgtgccagcgctctgggcctggctcgctgctcggcggcccctccgatcgagcctttggctagctctgcagcatgtacattgcctgtaatgtttgcattgctactcgactttgttttcccctttctatgatcgcgcattctagcatgtgtaaccatctgactatatgcactgtaacgc

SEQ ID NO: 1384 - DNA, 494 bp, Chlorella sorokiniana
  Clone ID: LIB3602-042-Q6-K1-C4
ctagttctagatcgcgagtggccgcccttttttttttttttttttttttttttttttttttttttttttttttttttttttttttttttttttttttttttttttttttttttttttttttttttttttttttttttttttttttttttttttttttttttttttttttttttttttttaaaaaaaaaaaaaattttaaaaaaaaaaaattcctaaaaaaaaaaaaaaaaagaaaaaaaaagggttttttaaaaagggtttaaaaaaaaggtttttataatttaaaaagggggggaagagagggcaaaaaaaaaaaaaagagttttaaaaaaaattttttttaaaaaaacccctttttaaaaaccaaaaaaaaaaggagtaaattaatgtggggttgttagtaaaattctccgcaaaaaaaaaaaaaaaaatagggggtaaaaaaaaatctgttggtaaagagccaacaattgaagacattagcaacttttttt

SEQ ID NO: 1385 - DNA, 525 bp, Chlorella sorokiniana
  Clone ID: LIB3602-042-Q6-K1-C5
agaacgtgatgcggcaggtgggcgcggtgcactcgacgcggctgggtgaggacgactcgaaaacgctgaagcagctcaacttccagactggcgacttcctgtcggtggccatctattgagttgtgcagccaggccaggcgacccatgtaacagctgggtgggaggcaggcgcactggcgctgggtgaagcagcaagcttcgggtgcgtggagagatggacagcagggaggcgtgggtgggcaggggccttcaggtgcagtggtcatggccaagcctgtctgtcgccagcgaggccgaaggctgtgcgccgactaggcgcagcccaccagtccaacactgaatgtttggtttgcattgcatggcgtggggaagggtctgttggagcatttgattcaatgctgcgcagcgagaagagcggagatggaggcaacgcggacggcaaacaaccggatcgttggaggggacagccagccacggcgagttcagccctcagccccgctgctggatcgtgtgacgtgtacagat

SEQ ID NO: 1386 - DNA, 574 bp, Chlorella sorokiniana
  Clone ID: LIB3602-042-Q6-K1-C6
gcgcaacgactgccccatgccctccacgtactacatctgcgtgacggacaccatcccagcagcagtgcaagccctgtacatggccggcaatgagattgccacgcacaccatgacgtacgtgggcaacccgtcgcgggaggagattgtgggtgcgcgcacctggctggccaacgccacaggcatcccggagagcaagattgtgggcttccgcgcgcccttcctgctgcacgacgagcaggggcgcaaggcgctggctgaggccggcttcctgtacgactcgtccatccccgacaacgtgccctccaagatcagccccagcctggagcagcgcagctggccgtaccgcatggaccagggcatcccacaggactgcgacacaggcagctgcagccccggcgagcggcacaacctgtgggaggtgccgctgtggtcggtggcggacgagaatggcagcccattgcgtcgatggaccctcccggaacgcatacgacaaactacagcgcgagctggagcggcggctggctgcaaccgcgcccgctgggatgtctccacgcagctgagttgaggctccggt

SEQ ID NO: 1387 - DNA, 155 bp, Chlorella sorokiniana
  Clone ID: LIB3602-042-Q6-K1-C7
cacgtcctcccgtcctgtccgctgtaccaccacgccatgccatcccatccatccatccatcttgcgccgcgtgcccaagctctgccagcagcagcccacgtgcccgcagctgcccctgtgcccacctgtgcgcactttaattgagcgtgcctgcc

SEQ ID NO: 1388 - DNA, 375 bp, Chlorella sorokiniana
  Clone ID: LIB3602-042-Q6-K1-C8
cccacgcgtccggcgctggtggacgaccgccttgcgggcgagggcaccggcaagatcctgggcatcaacgacccctccctgttctgggccatcaccattgtgttcaccatcgtgtggggcgtgttctacgtgtccacccgcgagattgacgctgcgtctgaccgcgagaacgacgatgactttggcctgaccctctgagcgggcgcccagcatcaggcggcccgcgcggcgtaggcccacgggcctgccgggcaaattttcgtccttctgttgcagcttgtccgccatgtgtacgctaaatccaaatttcaccccgagaagagaactcgctatgtagcacccttgtgtgaacaccgcccctctggggctcccgac

SEQ ID NO: 1389 - DNA, 83 bp, Chlorella sorokiniana
  Clone ID: LIB3602-042-Q6-K1-C9
aaaaaaaaaaaaaaaaaaaaaaaaaaaaaaaaaaaaaaaaaaaaaaaaaaaaaaaaaaaaaaaaaaaaaaaaaaaaaaaaagg

SEQ ID NO: 1390 - DNA, 425 bp, Chlorella sorokiniana
  unsure (1)..(425): unsure at all n locations; Clone ID: LIB3602-042-Q6-K1-D1
aagaacctgtacatcatctcggtgcacggctggggcgcgcgcctgaaccgcctgcccgccgccgcccccggcgacatggtcatggcgaccgtgaagaagggcaagcccgacctgcgcaagaaggtcatgcccgcgattgtggtgcggcagcgcaaggcgttccggcggaaggacggcacctacatctactttgaggacaacgcgggcgtgattgtcaacaccaagggcgagatgaagggctccgcgatcaccggccccgtggccaaggagtgcgccgacctctggccccgtgtggcggcagcagccaacaccattgtgtagagcggcggccgtccggctgggcgtcgcggcagcgcggaccacactgcagtacccaccgcctgccgcgctcccggcgcagcatgctgtaatgcacatccngcgna

SEQ ID NO: 1391 - DNA, 148 bp, Chlorella sorokiniana
  Clone ID: LIB3602-042-Q6-K1-D10
aaaaaaaaaaaaaaaaaaaaaaaaaaaaaaaaaaaaaaaaaaaaaggaaaaagggctataaggggtggacggtctaagatgacccacgcttagcctcgcatgcatgcgatgtcgtaacttgcatatagtgtacaggaagttgatttac

SEQ ID NO: 1392 - DNA, 458 bp, Chlorella sorokiniana
  Clone ID: LIB3602-042-Q6-K1-D12
accagaacccggtccaggtgctcgtggacgccatcatcaacggcggcccgcgtgaggatgccacccgcattggcagcgccggtgtggtgcgccgccaggctgtggatgtgtcgccgctgcgccgcgtgaaccaggccatctggctgatcaccaccggcgcgcgcgagagcgcgttccgcaacatcaagaccattgcggagtgcctggcggacgagctgatcaacgcggccaagggcagctccaacagctacgccatcaagaagaaggacgagatcgagcgcgtggccaaggccaaccggtaaacggctgttgcgcacccaccaaaacagcagcccgccacagccggcacccctgggcaggatgccagaccgccagtgcagcagcacggtgtggttcagctgctgttatcgtggcaggctttccaattaggcgcgggtgttaggaatgtgtaacacagc

SEQ ID NO: 1393 - DNA, 500 bp, Chlorella sorokiniana
  Clone ID: LIB3602-042-Q6-K1-D2
gtcctcacttacaggcttcaccgaaggaagcgtctgagtcgggacaaagatggcgaccgctatcaagcctgcccagaagccgggtgtggaggaggccgaggccgcccccatccaccgtatccgcatcaccctgacctccaagaacgtcaagagcctggagaaggtgtgcgcggacctggtgcgcggcgccaaggagaagcagctcaaggtcaagggccccgtgcgcatgcccacccgcgtgctgaagatcaccacccgcaagtccccttgcggtaacggtaccaacacctgggaccgcttcgagatgcgcctgcacaagcgcctgatcgacctgcactcccccgccgaggtggtgaagcagatcacctccatcagcatcgagccgggagtcgaggttgaggtcaccatcgccgacgtgtaagcagccatttcagctgtggaagctggtcgcacggtgcgcccctgaccgccgctggcgggcgggtcggcccttcggagcc

SEQ ID NO: 1394 - DNA, 366 bp, Chlorella sorokiniana
  Clone ID: LIB3602-042-Q6-K1-D3
cggcggacagaggcggagaagaaggctgaggagcacttcttgaagtatgaggcgcagcgtgccaagaagattgcgtccaagagccaccgcgagcgcatcaaggagctgaacgagaagctggccagcctcacagagcacaacgatctgttcaatgtgtcctacacacactgagctttggagggtggagcgacgtggcggcagcgtgtgcggccccggagtactcaggcggcgccttgggctgcggccacacttgcggcagctgcgaccgtgcagcagtgccctgcccattcagccctccatgctggtggtcttgcgttagggctgctgtatcatactttgaaacttcagaacatgtgtaacacgctg

SEQ ID NO: 1395 - DNA, 514 bp, Chlorella sorokiniana
  unsure (1)..(514): unsure at all n locations; Clone ID: LIB3602-042-Q6-K1-D5
ctgctgcctgtcacacagacgtaccatgtgggatacgtgcgcgatgaccagacgctggaggccacatgctacttgaacaagctgccgccctccttctcgcctgaggaccgcatcctggtgtccgaccccatgcttgcaacaggcggcacgcttgaccaagtgctagcagacatcatcaagcgtggcggctcgcaagagatgatacgagtggttagtgtggtgtgcgcgccaccagcgctgaagatgcttggagagaagtaccctggcctcaagatctacactgctatgattgacacggagctggacgcacgggggtacatcctgcctgggctgggcgatgctggtgaccgcgctttcaacacggtgtgattacatgggcagcagcagcagcagaccggcaacagcagcttcctgcagtaatccgaacaggtgtcttccgcatggcagcatgctgttctgtgcaatgtaacatgttgtgcatcaaanaaaaaaaaaaaatnataataatataaaa

SEQ ID NO: 1396 - DNA, 606 bp, Chlorella sorokiniana
  Clone ID: LIB3602-042-Q6-K1-D6
cggacgcgtgggcgcccatgctgcaggcggccatccccactgccccctgaggttgccgcctggcatgccgaagacgcctacacgtttgcaaatgagagcttcaactacgagtgggcttgggcacccagcgccgtgagcgagtgcggcatgcgccggcgcacgcccgccgaaatggcggcagccttcaccaaccggcggctggtgttcttgggcgactcgcatgtgctgtacatgcacaattggctggcgattgcactgggaggtagcgagctttcaaaattcacacctcaggtggaatggctgcagacgatagatggcagcaacattcgcattgaaatgtatcatcaaagatggctcgatgccattgacagccagctgcgcacctgggaagcggcggactggccggacatgctgttgatggactctgcagagtggccgctctttgtcgacaagaacatgactcagcacgtgctgcaaatgcgggccttgctggcaaccttgcaagagcaggcaccacctcacactttgatcgtctggctgtcgccaccaccacgtgacgagaagaagtgggataagacggcattgccagcagaatggatccacatg

SEQ ID NO: 1397 - DNA, 353 bp, Chlorella sorokiniana
  Clone ID: LIB3602-042-Q6-K1-D7
acggggcaggcggcgcggcaatgctgccgcacgccctgaattttgcacccgccctggggtcagcagcgctgccagcgccgggtggcagcagcaacgatagcacagccagttagatgaacgtccctgtattctttccttagacgcactgtactgaccggcaaggcacgcagcctttgatatgcttggccgcggcccgcagacgggcagcattttctctgccgcctctttgttatatcctccgcccttcactgctttgctcgactgcaagctgtgtagcagcactgttcatctcctctgttacctgtgttcccattgtgcatcaacacgcttcatcatatgtaacttcgctggcc

SEQ ID NO: 1398 - DNA, 575 bp, Chlorella sorokiniana
  Clone ID: LIB3602-042-Q6-K1-D8
cggacgcgtgggggcgccgaggggagagcacgatgcagatcttcgtgaagaccctcacgggcaagaccatcaccctcgaggtggagtcttcggacaccatcgagaatgtgaaggccaagatccaggacaaggagggcatcccccctgaccagcagcgcctgatcttcgccggcaagcagctggaggacggccgcaccctggcagactacaacatccagaaggagtcgacgctgcacctggtgctgcgcctgcgcggcggcatcattgagccgtccctgcagatcctggcccgcaagtacaaccaggacaagatgatctgccgcaagtgctacgcccgcctgcacccccgcgctgtgaactgccgcaagaagaagtgcggccacacctcgcagctgcgccccaagaagaaactcaagtaaactactcgcttcggcacgagcggaagcggcatgagcggcagcaaccggtgccccccccccgccccgccagccgggatgccatgacagcaccggctgctcagctgctgatgtgctgcatgtcaattgctgctgcggaaatgtaacggtggtagcgat

SEQ ID NO: 1399 - DNA, 58 bp, Chlorella sorokiniana
  Clone ID: LIB3602-042-Q6-K1-D9
aaaaaaaaaaaaaaaaaaaaaaaaaaaaaaaaaaaaaaaaaaaaaagaaaaagggcta

SEQ ID NO: 1400 - DNA, 53 bp, Chlorella sorokiniana
  Clone ID: LIB3602-042-Q6-K1-E10
aaaaaaaaaaaaaaaaaaaaaaaaaaaaaaaaaaaaaaaaaaaaaaaaaaaaa

SEQ ID NO: 1401 - DNA, 78 bp, Chlorella sorokiniana
  Clone ID: LIB3602-042-Q6-K1-E11
agcggcacagaatttgcccttgatgtcgcaactgaccacctccaacagtcggctatgtcccgacaaactcaatcggct

SEQ ID NO: 1402 - DNA, 628 bp, Chlorella sorokiniana
  Clone ID: LIB3602-042-Q6-K1-E12
gctggagcgggacgcgggcaacccggagctggcgcgcgagctgttcaagtgcgcggtcaaggccgaccccaagagcgagccgtcctggctggtgtgggcccagatggaggaggacctgggcttcctgcagcgggccgccgagctgcgctccttcaacatgcaggagcacaccgaaatcgtcaagcccgccaactttgccagcgggctgggcggcgaggacaaaggcgccggcctgctggcccccatcttcggccagatcgcaaagtggttcaagcggtatgaggagagcggcagcgacagcgacattgagctgcctgagctgctgccgctggatgcggtccccaagccggagcccgaaccgcttgttgccgtggcagctgcggcgccggcccgccgcagcggccgcgcccgccccagcggcgccaacggcgccagctaagcagtattggttgtattctcgaagggcacgcagcacgcgtgcccagaactttcagcaccggtgtatttctgagcagactccgcggctgctcgaggcggccgcacaaattgcacaactaatgagcattctgacgaggaacttggctactgcctgaatcttgcactgttgatgcaatcgatcaatgtaatg

SEQ ID NO: 1403 - DNA, 268 bp, Chlorella sorokiniana
  Clone ID: LIB3602-042-Q6-K1-E2
gaagtgaagagcgtggtgtgcgccagcaaccccacctccaagatctgcctcaaggacagcgccaagaactgaggcgtgccagctggactgagcgagcgctgagcccttgctggccgcacctgaggcaggcagccattgctgactgccggggggcaccgggccgccacccgctgcccggcagcatgggcgaggcggcgtgagaaagagaggacttgtgcactgccacacagttttttggacacctgtgctgtaacatatacttgaggag

SEQ ID NO: 1404 - DNA, 602 bp, Chlorella sorokiniana
  Clone ID: LIB3602-042-Q6-K1-E3
ggagacgctggtcagggccgcccccgacgctaagctgaacgacatcaaggcgctgctgggcaagatgctgttcagcggggcgggcatggagaagaaggttgagtggctgagcggcggcgagaaggcgcgcctggcgctcgccaagttcatgctcacccagggcacgcttctggtgctggacgagcccaccaaccacctggacatcccctccaaggagacgctggaggaggcggtcagcacgtttgagggcagcgtgattgctgtgagccacgaccgctacttcctgcgccgcatcgccacgcgcatcgtgacggtggacggcggcaagctggtggactaccagggcgactacgagctgttcctggagcagaacgaggaggaggcggagaagatggaggccaaagaggagaagcagcgcgagattgagaagtcgcagatcaaggccaagagcaagatgagcaaggcggagaaggccaagtcgaagaaggagaaggccaaggccttcaaccagagccccagtgccggcggcaaggcagccaagaacgccaagcgctggaactgagcgcagcagcaggcgggcagctgtccatcgaccgtcaatg

SEQ ID NO: 1405 - DNA, 454 bp, Chlorella sorokiniana
  unsure (1)..(454): unsure at all n locations; Clone ID: LIB3602-042-Q6-K1-E4
agctgcgcaccaagccgtggcagggggaggggctcaacaccctgcgcgccccctccgcgcttgacgagatcatccaggtcactgagaagctggagcccctggccgagaagctggaggtgcccgagaaggtgaaggtcaacgcctgagctgcaagcctgtgagccttcaccgccactggcagcatggtaccagccgcccagagcagccattgctgtccatcgcggccccatctgatcgaacccaaggaatgtatccctcgcccccgtcccccgccctctgcctctcccagtggggccgccccccaacccagtctgatccgatttgcttgcgtgccgccatttcaggcactcccccttgtcgtccgcctgtacattacccgcttgacccaattgcatcggtgccaacagtgcgtccagtatgtaaccacagtgagccaaaanaaaatataattaat

SEQ ID NO: 1406 - DNA, 244 bp, Chlorella sorokiniana
  Clone ID: LIB3602-042-Q6-K1-E5
caacgcatgatagcgctcctgctcccccctgtttctcctgtctgtttgtaatttttcagtagctctgccctgctgactgctgccgaatttgtttgctagtgtgggcccccttagccttcagacactgtgcgtcaccccctgcccagccgcccagcggcaccccctgtgcttgcgcctcagaactgtcctgcaccgccgccacttcccataacaaatatagcatggtcatgtaaagtgcagtggc

SEQ ID NO: 1407 - DNA, 248 bp, Chlorella sorokiniana
  Clone ID: LIB3602-042-Q6-K1-E6
gcgagcggcacataacgcttgcctctcattatttagtctgcaagctatctaaaaggccgtctaggccgacgggggaagcgagccgtcctggctggtgtgggcccaaatggaggaggacctgggcttcctgcattaggccgccgagctgcgctccttcaacatgcaggagcacaccgaaatcggtaagccccccaactttgtcagcgggctgggcggcgaggacaaaagcgccggcctgctggccccca

SEQ ID NO: 1408 - DNA, 552 bp, Chlorella sorokiniana
  Clone ID: LIB3602-042-Q6-K1-E7
cgagttcaagccgcgcctggtccgcgcgtttgaggcgctgcggatagcgcagatctcggcgggccagatgcactcggcagcggtcagctccgcgggagacctgtttgtgtggggctacggcaagttccaccagctgggctttggcaatgaccaggatctggagatccccactgtgctgccaccactcaagggcagcaccgcggctgtggcctgcggctggctgcataccctggccctggagtatggcggcaatgtgcaggcctggggggccaaccagaacggcgtgctggggctggggcatgagaaggagcagcagccgcggcgtccaacccgcgtgcgcggcctggcagatgtgcagcaaatctcagcgggctggaagcacaacgctgcggtgacggacagcggcctgctctacacctggggctggggcggcagccaaggcacggcatattcgttcgagggcaagaccggcacgggcggccagcttggccacggcaacgacttcgactactggagcccccaccacgtggagtggctggccgctggtgacac

SEQ ID NO: 1409 - DNA, 607 bp, Chlorella sorokiniana
  unsure (1)..(607): unsure at all n locations; Clone ID: LIB3602-042-Q6-K1-E8
gcgggagcggggcgggcggcgcgaccgcagccgcagccgcgaccgcaagcgcagccaccgcagccgcagccgtgagcggggctcgcggcacaaggagcacaagcacaagcaccacaagcaccaccacaagcgcagccaccgcagccacagccgggagcgcaaagaggacaagtcggcgggcggagacaagatggaggtggaggcggcagcagcagcggcagagcagcagcagcagcagcagccagcggcagcaggcaacaaggatgatctggaggcgctgctggatgagtttgacggctgagggccactgcccaagaggccgctgcccgagaggccactgcccaagaggccgctgcccaataggccccgctgcctgagctccatcctggcaagcagcgcgccctgccttgacagcagctgagtagttgcagcttgcctgaagcagcagcgctccccgcctcctgccacctgcgccgccgcctgtgcctgtgattntgctctgtacctttcccccatgtgctttcttttgtaccctgtttcatcccgcctgcccgctgcctgcgctcaacctgctgacactcatctgctcttacaactgcaacaagcg

SEQ ID NO: 1410 - DNA, 53 bp, Chlorella sorokiniana; identical to SEQ ID NO: 1400
  Clone ID: LIB3602-042-Q6-K1-E9

SEQ ID NO: 1411 - DNA, 459 bp, Chlorella sorokiniana
  Clone ID: LIB3602-042-Q6-K1-F1
cggacgcgtgggcagacatctgagcaaccatgggtaaggtgcacggctcccttgctcgtgccggtaaggtgcgcggccagacgcccaaggtgcccaagcaggagaaggcgaagacccccaagggccgcgcccgcaagcggctgcagtacaaccgccgcttcgtgaacgtggtggtgggcttcggcaagaagcgcggccccaacagccagtaagctgactgcggcgccagcagcagcggcaggcatgtgctgaacgcacggagcgcaagcgcgtcccgcgcacagccgccaccgaagcggcctgccagcgtcgacggcagcgaggcagcaaggcgcggcctggcatgctagcagcgcgtactgcgcgccacggcgctagcagccgcaccctggaacagcatcagcagtaattcagcagcccacctgcatgccgaacgctccgctgtaacaggttctcagg

SEQ ID NO: 1412 - DNA, 432 bp, Chlorella sorokiniana
  Clone ID: LIB3602-042-Q6-K1-F10
ccaagaccccgccaagcgccccacagcgctggagctgctgcaacgactaggtccgctggttgccccaccggcgccacctgcgcctgcccacccgccagctgaagctggcagcagcagcagcagcggcagcgagcgccccgccggcggcgctgcccagcacatgcctcctcaggccgaagttcccctggaacctgatgtgccggaacccagtgccctgcggccgccccgccagcagcaggggcaggtcttgtcgccgtttttagcgcaggcaggagttgcaccggccggccagcagcggccaccaacggcggcgcaggcgacggcacagcagcagcagcagcagcagcagcatattgactagtgcagtgagccgttcctgtgtaaagttgttattatcatgtcttacttctagattttgtaatcgagtcctgg

SEQ ID NO: 1413 - DNA, 611 bp, Chlorella sorokiniana
  unsure (1)..(611): unsure at all n locations; Clone ID: LIB3602-042-Q6-K1-F11
agcgccgccacctgcgccgcctcgtgctgccgctctactggcgcctggtgggcggctccccggatggcctgcccgccgtgctgctgtccctcatgccgtggttgcagctggagcactgctgagctgcgcagcggctggcctgctgcacggcagcacatgcgcagccgatagccgccactccctggtgggcacgcctagttgcctcgcagtctggagcgggtgcaatgtctgcccgccgtcagccgccccatgagctaccccgcacgtgcggcgccggctggcttgcacatttggataatgcggcgctcagcgccccagcctcctgtgcgagaggcttccgacatttttttgcgcccctttttgtccatttcgggcgggctcttcttgagtgtgcgctgccgccagtcctgtcctgcagcgccgctcctcgattttttccacttgcacctccgctggcgcacaatgcacgccgttagcctgccagccccagccctcgtcctcaactcatcccccattcgattccttcgattntccagcacgagccgaccccccgccgcgccgctgcaatgcgccggcagtcccaaacccaaaccaatgccccccgcggaccg

SEQ ID NO: 1414 - DNA, 452 bp, Chlorella sorokiniana
  Clone ID: LIB3602-042-Q6-K1-F12
ctggcgtctgacgacagcgagcgcacgcagaagctgcgcgaggcggagatcaagcacgcccgcctggccatggtctccttcctgggctacaccgtgcaggcctggtacaccggcgagggcgccctgggctccctcaacaagttcgccaacggcttctaagcagcccggcatgacgacggcctgggcctagcgcccggccgctttgcagccacttgcagccggcccctttgcggggccacccccacccaacacccctttcatgagaagattaacaccctgccatcgctcccttgctacgcctcccccgcccgtgcgctctctgcatcggtcgttctgtttgcctgcgggcgcgcttgctcccgggcgccccgcagattttgcatctgctcgctcgtgtgctgtcaggagtcagcggttgtatgatttcctgttgtaattcgtaacgttcccca

SEQ ID NO: 1415 - DNA, 560 bp, Chlorella sorokiniana
  unsure (1)..(560): unsure at all n locations; Clone ID: LIB3602-042-Q6-K1-F2
ggcaggtgtcctgtctggggcgaccagcccccgacttattgggatgtaacacatctgaccgcnnaaaaaaaaaaaataaaaaaaaaaaaaaaaaaaaaaaaaaaaaaaaaaaaaaaaaaaaaaaaaaaaaaaaaaaaaaaaaaaaaaaaaaaaaaaaannggggcggcctttttaggaatataaagtttacttacgcttgattgcaacgttttagtttttttttagtgtcacttaatttaatttatttggccttttttttaaacattttttattgaaaaaacttttggtttacaaattttatttgttttaaaaaatttccttttttccaaatttgggttattaaaaaaaaggcccaaaaattttttttttcaaaatatttgcaaactttaattggaaattggaaccccttttttacgggatttttaaacccgggggtttttttgtttacccaaagtttaacttttatttttaaaattgttttagccccggtttttttggtttttttcttttcttttttgacaagtttggcggtttttcccgtaaaatttttaattggggg

SEQ ID NO: 1416 - DNA, 502 bp, Chlorella sorokiniana
  Clone ID: LIB3602-042-Q6-K1-F3
gccccacccaggatccctgtggttttccgaagggccgctgctggaggctgacccctactacgtgctgacagccatcgcgcagctggtgttcacctttgtggtgcccctcctctggctggcgcggcgggagtggcgtgcccgcatggcacatgctcagggccacagccaagcagcagtgcgggcgctgcagcgctgggagcagcagtggcgcctggggccctttgagtggatagcggtagcggcgctggtgtggtgcattggccttgcgggcccatcgctggccactgtgggcagagtgcccatgtctgtgattgattgaccagttgtaggcttgccctggaaaaaaaaaaaaaaaaaaaaataaaaaaaaaaaacaaaaactaaaaaaaaaaaaaaaaaaaaaaataatacaataaaataaaaaaaaaataaatttataaaatataaaaaaaataaaaaaataaattttaaaaagggggggccccttttaaagattcaaatt

SEQ ID NO: 1417 - DNA, 423 bp, Chlorella sorokiniana
  unsure (1)..(423): unsure at all n locations; Clone ID: LIB3602-042-Q6-K1-F4
agcagctgaacccgccagcagcagcggcggtggtggcagctctgcacctgcaccatcaacggcggcggcggcccccaaagcggccaagtcgggtggaggctctaagcctgccagcccattcaagcctgccagccctgtgccgcggccagcggcagccagtgagcctgatctggaggcaggtgcggcagatgaggagtgacccctgcagcagcagtggttggagcactgaatatttgattgccaagcgagcctgtgagcgggcatgcagcanaaaaaaaaaaaaaaaaaaaaaaaaaaaaaaaaaaaaaaaaaaaaaaaaaaaaaaaaaaaaaaaaaaaaangggnggnngtaaaggaggaanaaagttaagnaagggggccatgcaagggaaaagnttttttatggtgtagtaaaaattaaat

SEQ ID NO: 1418 - DNA, 637 bp, Chlorella sorokiniana
  Clone ID: LIB3602-042-Q6-K1-F5
cattcaagtccatatttgcggacgaggtggccacccaggcggcggcggtgcacgagcagggagaggacgaggtgctgggcgcggagcacattgccgtcatggcctgattcgatttggctggcgcaaccgcagtcacaacaccaacattcataccacgcggaacattgccgtcatggcccgactcggctggcgcactggcattcacaaaacccgacccaagaatgccacgtggagcacagtgcggtcctggcgctgccatgtctacaccacggtgctgcactgcaccagcctgccatggaagtgcctagcagaggaggggacggccttgtgctgtggcctgtggtccattgctgtgcgctgggccgtgggcagccgcccccagccggcgctacccccgccagtgcaccacagcgggcgcagctgtgatcccgctcttatctgctgttttgctgctgctttgctgcgctctgtcatgtcgtctgtcacatttctgtactcaccgccccttcacaacgcctcagccgccttccttcggaactgtgaccacccaccaatagtgcattcattaatctgcgtctctccttgatatgccgggctcgaagcttcttttcgttggtcagtgaagcggtgtaagcac

SEQ ID NO: 1419 - DNA, 636 bp, Chlorella sorokiniana
  unsure (1)..(636): unsure at all n locations; Clone ID: LIB3602-042-Q6-K1-F6
caaggtgcccgtcatgcagtccgacctgtccttcagcctgctgtacggcagcaacctgccggaggcgctgatccgagcggtgcccgccctgctggccgaattcccggccggactgctcacccccgcaggcatggtggttgcgaatccaagctatgccgggctggagccccagctggagagcgggctgtaccgcaacttcacaaacggatccgtgatttggggattcgtggaggcgatgatggtggaaggtctggagcggcagctggctctgtgcgactccggcacagccccttcctggtgctccgacacccagctgctgtcccagctgcgcacggcgctcgaccacctgtggagcacgatcgtgaacaacgctgacgtggacttctccgaggtgtggagctggaagttagaaaacggcggctaccgcaccgtctccctggcggagacctctgcaaccagcacagagagcaatgcagttcagctgtggagccatgccttcatcgctgttcccggtcccagcggcggtacactgctggagctntgatgtggccactggcggctggggatcccacacgctagcaagcttgcaaggattgcctctggcgagtgcacatagacttactgggaacgagcaaa

SEQ ID NO: 1420 - DNA, 503 bp, Chlorella sorokiniana
  Clone ID: LIB3602-042-Q6-K1-F7
ctagttctagatcgcgagccgccgcccttttttttttttttttttttttttttttttttttttttttttttttttttttttttttttttttttttttttttttttttttttttttttttttttttttgggggggcccggtttacaaaggaaaccaaaaatttttaaaaaaaaatggggggggaaaaaggggcccgggggaacaaacccttaaaaatttttggactttcctaaaaagggtttggtgttttatgccccgaccaaccccacgggttttttttggactttccgggcgccggtggtgaccttttgtttttttgaaatgaccccaatgaaattttggggaaccctgactttaaaagttgggggccaaacttcgggggggcattttctggaggtgttaaatttttggggaacgaaccaattggaaaaaaaaaaaaaaaaggggggggcgttttaaaggatccaaattttcttaccgggggttgggaaggaataatttttt

SEQ ID NO: 1421 - DNA, 436 bp, Chlorella sorokiniana
  Clone ID: LIB3602-042-Q6-K1-F8
gtcactcccgagaacatcgtgaccctgaccaaggccgccggcatcgaggtggagccttactggcccgccctgttcgccaagctgatcgagacgaagtccgtggaggacttcatcgtcaacgttggcgctggtggcggtgcccccgccgcggccgctgctgcgcccgccgccggcggcgccgcggccgcggaggagaagaaggaggagaaggttgaggaggaggaggacgaggacatgggcttctccctgttcgactgagcgcacagccggccgcggccagccaccctccagtgcctggtccgctccagttgcagcggcagctcgatccctcgcctgcggcacgtacggcgtagcgtggcggcagcggcggcggcagcctagcggcgtgtttgtctcgctgccgtcgcagctgcggcgcatgtaacgcattccttcc

SEQ ID NO: 1422 - DNA, 432 bp, Chlorella sorokiniana; identical to SEQ ID NO: 1412
  Clone ID: LIB3602-042-Q6-K1-F9

SEQ ID NO: 1423 - DNA, 603 bp, Chlorella sorokiniana
  Clone ID: LIB3602-042-Q6-K1-G10
ctttgggacgagggggagcagcagagatgggcatcgacctcaacgccggtggccgcaacaagcgggtgcaccgcaccgctcccaagagcgagaacccctatgtcaagctgctggtgaagctgtaccgcttcctggtgcgccgcaccgagagcgacttcaacaaggtggtgctcaagcggctgttcatgtccaagaccaaccgcccgcccctctcgctgtccaagctcgccaagttcatggccggcaaggacggcaagattgcggtgctggtcggcaccatcaccgacgacgtgcggctgtttgaggtgcccaagctgcgcgtgtgcgcgctgcgcgtcaccgagaccgctcgcgcccgcatcctcaaggctggcggcgagatcatgaccttcgatcagctggcgctggtggcgcccaccggcagcaactgcgtgctgctgcgcggccccaagaacagccgcgaggccgtcaagcacttcggccccgcacccggtgtgcccggctcccacgccaagccgtacgtgcgcagcaagggccgcaagtttgagcgcgcccgcggccgcccgaagagcaagggctacaaggcgtaagcgcccccacgcc

SEQ ID NO: 1424 - DNA, 561 bp, Chlorella sorokiniana
  unsure (1)..(561): unsure at all n locations; Clone ID: LIB3602-042-Q6-K1-G11
gcgatctagaactagttgcagcaatggcagccggctgcatctttctaacatcgtcaccggcccactcgtttgtgccatgcccacctgcctccaacgtcacccttcatcaaccctcacccaacccatccacctgccacccatccactcaccttccctccgccacaacctctgccacccactcaccacccatcacccgctcaacgccctccatgcaccatcctccccatccaccaaatctgccaccccaaacgcacgtccgccgctgcaccacctgccgccccctcacccgcacccatcttccacccgccacctttcctgccgctcaccgccgcacatcctacctcccacacctcactccatgtccacccttcacccgcgcttcacacagcggctgctgccatgcaaagctgctgccaaacccatccatcatgctcgcacacccactcacccacacgtncaacgtatccagacccattttcaaggcccgactgtacagtgcctttttgcgtccttatgccgatctggtaccaagacttaatgtgtaacaaatggtatgtnnaa

SEQ ID NO: 1425 - DNA, 70 bp, Chlorella sorokiniana
  unsure (1)..(70): unsure at all n locations; Clone ID: LIB3602-042-Q6-K1-G12
aaaaaaaaaaaaaaaaaaaaaaaaaaaaaaaaaaaaaaaaaaaaaaaaaaaaaaggncggccgatataag

SEQ ID NO: 1426 - DNA, 527 bp, Chlorella sorokiniana
  Clone ID: LIB3602-042-Q6-K1-G2
cacctgcacctcgcacgtgcagaacatgatcaccggcgtgaccaacggctacgagtacaagatgcgcctggtgtacgcccatttccccatcaacatcaacatcgagaacaagggcggcaaggtggagatccgcaacttcctgggcgagaagattgtgcgcgtggtggacatgctgtcgggcgtgacctgcgagcgcagcgcctacgtaaaagacgagctgatcctgaccggcaacgacatcgagctggtgttccatagcagcgcgctgatccaccagaagtgcctgatgaagaataaggacatacgcatgttcctgtacggcatctacctcagcgagcgcggcacccttgtgaagcccgaattagccgagcccccacgttgcaataaaaggggcggcacgaacccagcaatgggcaacgcttaagcccgggccgggggaacattcgcgggggcaggccgccccaacttgggcgcttcacgccatgtaacgcacacctttgccaaaaaaaaaaaaagaggggccgtat

SEQ ID NO: 1427 - DNA, 465 bp, Chlorella sorokiniana
  Clone ID: LIB3602-042-Q6-K1-G3
gcacagttgctcggcacagcccgcacggtctcactcgccccctgcgctccaccctccctccagcacctcgggaccagcccccagcagcagcaggagcgcccaccatggccgcagcatccctttccagcagccgcagcagcctgcagcggtgcagcctggccagccgcgtcacggcgccccgccgggcagcgcccgcccgcgcgccgctggcggtccgcgccgacgcggccatcaagccgccgcagggcgtgacgctgccgcctgtgcagcccgcggtgccgccctccaagtttggcttcgtggagaatgcagagcggctcaacagccgcgcggccatgatcggctttgtgtccctgctgctgctggagctgattgcgggccagggcatcctcaacctgctgggtgtgactgtgggcaagggcctgggcttcgagttctaagctgccgtctgagcggagctccgct

SEQ ID NO: 1428 - DNA, 635 bp, Chlorella sorokiniana
  Clone ID: LIB3602-042-Q6-K1-G4
attggttgagacgcccagccgcaggaatgctgctgcacataactgaatcaacagttgcatgcctttgcctttgattactgcatgctcttacaaacagctgccttaaattgctgcttgcaggccgaaggatacaccttcttcaggaccattgcccctctggtggcaaaggtggaccgcgaaggcgctgctgctgtggacgccgccttcatggaccccaccactggcatcggcatgcaggcaaggcaaaccagtttgagctggctgggcacttgccgcgatttgcaaccttgctgaggctacccaccaccttttatgctctgtggtcaagactgcaacattgttagcatgagaagtgcacgccggcgacccagccaccccatcgctgaggtgcatcacctgatgtcgttatgcttgatctgaggacctgatgctgcccgcgcgctcacatgccgcaggtcaaggccgcactgcagccagccatggaggcgtacggcatcacggccgatgatatcggcacctttggcgttacccctcaatgcgacttctgagcgcctgggctggcgccactggtacggctgcgaggcccgtacaagccagcagaccctcaagctccaggaagcattgccattccccta

SEQ ID NO: 1429 - DNA, 476 bp, Chlorella sorokiniana
  Clone ID: LIB3602-042-Q6-K1-G5
gcagcaacgccggccgcaccgtcgtggtgtgccgcgcgcagcagcagaacctggccgctaaggccgcggctgcgggcgtgtctgtccccgccctgctggcggcgcaccccgctctggcgctggtggacgaccgccttgcgggcgagggcaccggcaagatcctgggcatcaacgacccctccctgttctgggccatcaccattgtgttcaccatcgtgtggggcgtgttctacgtgtccacccgcgagattgacgctgcgtctgaccgcgagaacgacgatgactttggcctgaccctctgagcgggcgcccagcatcaggcggcccgcgcggcgtaggcccacgggcctgccgggcaaattttcgtccttctgttgcagcttgtccgccatgtgtacgctaaatccaaatttcaccccgagaagagaactcgctatgtagcacccttgtgtgaacaccgcccctctggggctccc

SEQ ID NO: 1430 - DNA, 468 bp, Chlorella sorokiniana
  Clone ID: LIB3602-042-Q6-K1-G6
caagatcgccgaggagtaccacatcaagctggacgagctgctgaagctcaacacccacatcgatgacccccacctcatctaccccggcgacaagatcaacgtgccctgctgaacggcgcacgcacattgagacggcgctgccatgcaccgcccagccatccagctgcgtgacgtgccctgctgaacggcagccaaaatccccgcctcgccacgctcagcagccagcccccaccattcctcatcccttccttcccaatctgtcctcatctctggtcctgttggacatcctcagaatttcattgatttcagtgtgccccccgtgccccgagggcttgctgccctgagcagcgccctcgagtggcccctgtccccgcgatcgatgcgcgatgtgcccctcgtgattgggtgctgctccaattgtagcagcccacccctgactagcgaccctatgtaaatcttttcactgtg

SEQ ID NO: 1431 - DNA, 395 bp, Chlorella sorokiniana
  Clone ID: LIB3602-042-Q6-K1-G7
aacccgtctgtttgttgcaaggggggccaaacaaagttgacttggcaaagggaaagggaaatcaaaagtgtaaaggggggaaaccagcttgggctgggagcattaatcagtcaaacaggggggtggaaatgagtcggtcggtcagctggaaaaatttagcgagagcttgggttccaaaaaagggcatgaaaaaacttcaaatggtacaatgttacttaacacagttttaccccaaggccgtcagtttagcctgtccagtttaggggaaacccccagcgatgcctcgccatgcagggatgggctggggccacccccggatgtgccgccggtgcttttgtcctccaagccgttgttgttattggggatacccatccccatgaggggggcgcttatgg

SEQ ID NO: 1432 - DNA, 409 bp, Chlorella sorokiniana
  Clone ID: LIB3602-042-Q6-K1-G8
gagctcttcaaggagtcggcgccctgagggcagcgtggtgtggcgcccagttgcagtaccgcacggcagcctgatggctgtgctgcacgtgcccttgcgcgcacatggctgcccttcacactgcggcgtgctgctgcattttctgggtggcagcaccgctcgcccgcatgacagacgatgaacaatctacatatccgatttgtaccctcactcacacctgattcttggttgcatcccagcagcggcagccgcgcctgaatgcgctggcctgccatgtacattgccagcctgcgatgcggtggcaacattttgccatgcatgcatgtacatctacctccgactgccgctcactgctgacggtggccctcttggcaggcatgccaacttgcgcttgcaaagactgcgctgc

SEQ ID NO: 1433 - DNA, 599 bp, Chlorella sorokiniana
  Clone ID: LIB3602-042-Q6-K1-G9
ctttgggacgagggggagcagcagagatgggcatcgacctcaacgccggtggccgcaacaagcgggtgcaccgcaccgctcccaagagcgagaacccctatgtcaagctgctggtgaagctgtaccgcttcctggtgcgccgcaccgagagcgacttcaacaaggtggtgctcaagcggctgttcatgtccaagaccaaccgcccgcccctctcgctgtccaagctcgccaagttcatggccggcaaggacggcaagattgcggtgctggtcggcaccatcaccgacgacgtgcggctgtttgaggtgcccaagctgcgcgtgtgcgcgctgcgcgtcaccgagaccgctcgcgcccgcatcctcaaggctggcggcgagatcatgaccttcgatcagctggcgctggtggcgcccaccggcagcaactgcgtgctgctgcgcggccccaagaacagccgcgaggccgtcaagcacttcggccccgcacccggtgtgcccggctcccacgccaagccgtacgtgcgcagcaagggccgcaagtttgagcgcgcccgcggccgtcggaagagcaagggctacaaggcgtaagcgccccca

SEQ ID NO: 1434 - DNA, 357 bp, Chlorella sorokiniana
  Clone ID: LIB3602-042-Q6-K1-H1
agctgctgcctctggccaagccggcggcggcgctggagaaggtggcgatcactgcggagatgaagaaggagagcgcgtacggcaagctgcgtgtggagcggatgaacgcccgcatggtgggcgtccgcgccaagcgcgccgccgaggctgctgctgccgagaaggacgcgtaagcgccctgcgcgcagccgcgactggcagccgcctgtgcggccgggggcgcggtggcggccggcgacgcggcggggggcaggcgatccccaggcccgcccgctgtggagcgcagcgcagcgcagcgcagcatgcatgccagttggccagccgtgcgcgctgccgcgcccctgtaacacacccctg

SEQ ID NO: 1435 - DNA, 538 bp, Chlorella sorokiniana
  Clone ID: LIB3602-042-Q6-K1-H10
gagcccaccatcaagctggaggacggcctgcgcgtgacgtaccactggatcaaggagcagctggagcgggaggccaaggagcagggcaaggacctcagcgagtacgcgagctccatggttgtgaccacccaggcgcccaaggagctgggcacgctgcgcgccgccgacggcgccgagggcctgcaggacaagaaggccgcggcgtgagcccggccgccccgccccgctgctgtagccgcgcccctgccagccggcgcagcctggtccagcctcgcctgtgcaaacaagcatggagccttggcttgttcgcaacgaatgcgcaggacacatacatgcccacacttcagtatgctgcacccggccccggctgctgtgcgccgcgccattgcgtgcgtcacacgccggacccggctgccatttgtcgctctgccccattttattcgtgtgagtgagcactccatcctgctgccctcctcctgctgaactgtacctcacgctcctaattcacacacagcctccaccattcaaatgtaatgta

SEQ ID NO: 1436 - DNA, 437 bp, Chlorella sorokiniana
  Clone ID: LIB3602-042-Q6-K1-H11
cggacgcgtgggctggctgaccaccttgctgagccgtctgtgaacaacggcttcgcgtccgccaccaagttcctgcccctggcctgaacgccgtcgtcaacctggagcgacctgggcatcccatattaacggcggccagccggttttggacaagcacacacaacatatgagattcccaacctccctgcgcactgcttgtaacaatcctggctccctcttgtacccttgacccgcactcgggcgtggatatgtaacgttccgcgggaaaaaaaaaaaaaaaaaaaaaaaataaaaaataaaataaaaaaaaaacaaaagaaaaaaacaaaaacatacaaaaaaatacaaaaaactacacaccaaccccaaatgatgaacacacaaaccatttgaatgatcaaaactctaacacccaaatgacatttgaaagggggggc

SEQ ID NO: 1437 - DNA, 501 bp, Chlorella sorokiniana
  unsure (1)..(501): unsure at all n locations; Clone ID: LIB3602-042-Q6-K1-H12
tgccttcggtttgtaccccgttactcgccaaagcggccccaggcagcgcagcggctcttggctcgggcagcagcgggcgtcgcaatgtcgcagctgctgcgcaggctgcccctggtggcccggcggtgcggcaagacgcgcggcggcggcggtggcggcagcttcttcgcggagggcaagcacgagcccggcggcaacctgtttggcgaaaccccgcctccccccggccaggctaggaagtgggagtcgtgggaggggccctggtacttcacgctcggcgcagcaaccgcgatgctgacccttggcctctcggcccgccccgacagcagcctgacctactgggcagacaggaaagcggcagagatcaagggctcggcatgatggcacccgccatgaccctgctctcgcactgctgctcagcggctgacactngaccagcctgatggcagcggccagctgcccctgtgaggctgacgcccgcacgcagcagccgcagatagt

SEQ ID NO: 1438 - DNA, 362 bp, Chlorella sorokiniana
  Clone ID: LIB3602-042-Q6-K1-H2
agcgcatccatgcgattgaggcagacgggcgtgtaatcactgatgtggaggtcttccggcggctgtacgaggaggttgggcttggctgggtgtatgcgctcaccaaggtgccggcggtcgagtcccttgcaaacaaggtgtacgatgtgtgggctcgctacaggctgcccatcaccggcaggccagacctggcagtggtcatgcagcagaagaagatgtgtcgggcggacggcagcggcagccaggcagcggcgcagccggtgcagcagcagcggtgaagcgagcgggagcttgactttcaattttgaacgatgcccatccatctgatttgattatgttttgttgcaagcaactaaggcgaa

SEQ ID NO: 1439 - DNA, 534 bp, Chlorella sorokiniana
  Clone ID: LIB3602-042-Q6-K1-H3
cctcatcaactctgatgagatccagtcggtggtcaagccgcagaagaccggcaccgtccgcgccgcgctgaagaagaacccgctgcgcaacctgggcgcgctgctcaagctcaacccctacgccaaggtggcgcgccgcgccgagctgctggccgcgcagaagggcgccaagtcggccaaggtggaggcggcccacaaggacaaggccgccgagcgccccgcggtgaagaaggtgttcaaggccttctacagcaccatgatcacagactgggactacgtgggcgaggactacgaggtggcaccatgtgtctgggcaccacccagtgagcgccccggccggagtagctccccagaggaggcgagcgcggcgcggcggcgccgcccgccgcgggcggcggagggtcaccggcccgcggcggcggccgctgcgcgcgcgccgccccgagcgttgacagagaggcccgcccagttgagggcgcacagaagtacacgcacccgtgtaacacgcacacacgaaaaataaaaatattaatt

SEQ ID NO: 1440 - DNA, 564 bp, Chlorella sorokiniana
  Clone ID: LIB3602-042-Q6-K1-H4
gtctgacgcagcagacgaagcagcttccagcggtgaaatgctagcagtcggcggcagcagcggcggcggcggtggcaggcagagagcggcgcccgctgcactgccgctcgagattttggcacagggagaattcgagccgctgtatcgctccactctggacgtgcgcagcggagagctgccggtgctgccgctcagcatttatggcgcagtggcgatggcacacctgccagacagctctgccggctacgtgagcggcctgaacttcttcatctacaaattcgaccggcagcaagcgggcctggcggggctcagcttcgacgagggcgagtttggcgtgtgcggctacattgtgcagggcctggatgcggtcagcaagctggagagcggggaccgaatcgtggcagcaaaagtggtctccggactggacaagctgactgccacatgacgcagcagccgcagcggatactagctggggcctccgcagcaacactccgaccgtgcaactgcatttttgtcaatgctgtggggctaactgtcttgtgcgcatgccactgtgttagcatg

SEQ ID NO: 1441 - DNA, 195 bp, Chlorella sorokiniana
  Clone ID: LIB3602-042-Q6-K1-H5
ctttcatgagaagattaacaccctgccatcgctcccttgctacgcctgccccgcccgtgcgctctctgcatcggtcgttctgtttgcctgcgggcgcgcttgctcccgggcgccccgcagattttgcatctgctcgctcgtgtgctgtcaggagtcagcggttgtatgatttcctgttgtaattcgtaacgttcc

SEQ ID NO: 1442 - DNA, 411 bp, Chlorella sorokiniana
  Clone ID: LIB3602-042-Q6-K1-H6
cagagccgaccgagtgaggttataaatccagctgagtgagggcagcgatgcagctgagtgaggacggcgatgcagctgccgccagtgagactagagcgagagcgccaaaatgggcaggcatcggatgcccttgagcgagtgccagtcagccaagcgaagcgaagcgagcggagcgaaccgtgccattgtgcgccccagcgatcagacctgaaaccagcaaagagcgctgtctgcctgcccacctttgtgtacccatgccactccatgcagtagagtttgcccaatgcgaccgtcctgtacatctttctgtgctctgtttcctgccatgccttcctctgcgtctcatttggcacgtgtatactaggctgtgccacttagtgtcatgctactgcaatacaagtaaacacttca

SEQ ID NO: 1443 - DNA, 509 bp, Chlorella sorokiniana
  Clone ID: LIB3602-042-Q6-K1-H7
aaaaaaaaaaaaaaaaaaaataaaaatataaataaataaaaataaaaaaaaaaaaaaaaaaaaaagaggaagagaaaaaaaaaaaaaaaaagaaaaaaaaaataaaaaaaaaaaaaaaaaaaaaaaataaaggggggggggctttttaaagtataaaattttttttacgtgtgtttggaatgtaatattttttttttggggcaacaaaaataaaattaatgggcggtgttttaaaaacgttgtaattggaaaaactttgggttaacaaaattaataggttttggaaaaaatcctttttttaaatttgtgtttaaaaaaaaaaaggcccgaacatttttttttttaaaaaatttcctaaccttaaatggaaatgggaacccctctttttgggttatttataaggcgggggtgtttggtgtatattcaaatttaattttttatttttaaagggctttaaggccggtttattgggtttttttcttttttttttagaaaattttttgtttttt

SEQ ID NO: 1444 - DNA, 62 bp, Chlorella sorokiniana; identical to SEQ ID NO: 1367
  Clone ID: LIB3602-042-Q6-K1-H8

SEQ ID NO: 1445 - DNA, 460 bp, Chlorella sorokiniana
  unsure (1)..(460): unsure at all n locations; Clone ID: LIB3602-042-Q6-K1-H9
gagcccaccatcaagctggaggacggcctgcgcgtgacgtaccactggatcaaggagcagctggagcgggaggccaaggagcagggcaaggacctcagcgagtacgcgagctccatggttgtgaccacccaggcgcccaaggagctgggcacgctgcgcgccgccgacggcgccgagggcctgcaggacaagaaggccgcggcgtgagcccggccgccccgccccgctgctgtagccgcgcccctgccagccggcgcagcctggtccagcctcgcctgtgcaaacaagcatggagccttggcttgttcgcaacgaatgcgcaggacacatacatgcccacacttcagtatgctgcacccggccccggctgctgtgcgccgcgccattgcgtgcgtcacacgccggacccggctgccatttgtcgctctgccccattntattcgtgtgagtgagcactcca

SEQ ID NO: 1446 - DNA, 363 bp, Chlorella sorokiniana
  Clone ID: LIB3602-043-Q6-K1-A1
cccacgcgtgcgtccacgcgttcgcccacgcgttcgaccctgcgtgaatcacagacatgcccagcaacatgcaggccgccgtcgctcagcgcctggcgctcgtcaaggccagccgggccacccgccaggtgaccaaggcttccgccgagttctatggccccgaccgcgtgaagttcctgggccccttctccggcaacacccgctcgtacctcaagggcgagtaccccggtgactacagctgggacaccgcgggtctgttcgacgaccccgagcccttcgcccgctaccgcgagctggaggtgatccacgcccgctgggccatgctcggcgccctgggctgcgtgacccccgagctgctgcagc

SEQ ID NO: 1447 - DNA, 380 bp, Chlorella sorokiniana
  Clone ID: LIB3602-043-Q6-K1-A10
cggacgcgtgggccgcgccgagaccggcccgctgcaccaggcttcgtttgaggagaccaacgacatcctgttccgcgcggccacgtacgctgagcgcgacatgatggcgggcgtgagcgagaacatcctgctgggccagctgtgccccgtgggcaccggcgccttctcactcatgctggacgaggacaagctggcggacgccattgagctggactatgcgctggtggaggaccagggctgggggtacggcggcgtgggcatgacgccggggcgcacacccggccgctcacccttctacaacctgcgcatgtcgcccagccagatggcctccccggcgtccatgtctcccttcaacgacaacattatgttcagccccatgg

SEQ ID NO: 1448 - DNA, 311 bp, Chlorella sorokiniana
  Clone ID: LIB3602-043-Q6-K1-A11
gacctagccagcactccctgtaccccctccttgctcgtgtacgctccccgccgctgccgccatctgccgcagctgctgtgtattgtttgacccgcttgttgctcctgcttctgcttgcccctgccgcccctacccatgcctggcggcagcctccgcgctctgctcaaacttcccatgcaatgccagttttccgcctccgggccgtggcgttttcccgtgcatccaaccccattgatttacacctctgcgacctctgagcgcatgcgctcctcaataattcaagcctctctgtgtaatgctggtaccccggc

SEQ ID NO: 1449 - DNA, 258 bp, Chlorella sorokiniana
  Clone ID: LIB3602-043-Q6-K1-A12
cttgagctgctgctgatgcacaaccgcaagtactgcgccgagatcgcgcacaacgtgtccaccctcaagcgcaaggcgattgtggagcgcgcggcggagctgaacattgccctgaccaacggcaacagccggctgcgcagccaggaggacgagtaagctgctcgcccccctgcgtcaccagcagcggcgccagtaccttgggagcatagcagcggcttacattggggtgctactgctcccatgtaaggcaccccaatc

SEQ ID NO: 1450 - DNA, 332 bp, Chlorella sorokiniana
  unsure (1)..(332): unsure at all n locations; Clone ID: LIB3602-043-Q6-K1-A2
cgaatcggattgncgacccacacccacgcggacgcgaacacccaccccaaaaaacaacgcatcccccgaggagggtattagagacatgccccataaagtgacgggggcgcacctgaccgaccgccgctataaaaggcctgtctagccacccctcaaatgaccaaagcaccctgaacctgaacgccatgcgatcangtaaaaccttaaaggcacgtgttgttataatacactcatcacacttcaaattaccgtgctgaagacctggaagggtgaggagggcaacgtgcaggtggcccaggcggagctgctgaagcgcgccaaagccaacagcg

SEQ ID NO: 1451 - DNA, 417 bp, Chlorella sorokiniana
  unsure (1)..(417): unsure at all n locations; Clone ID: LIB3602-043-Q6-K1-A3
gcggctggttccgccccagccccaagcccaagacgcaggggcagcagtgaggcggggccggcgcacaacagccctggccacggcggctcgcaagctggcttgccagccccacagcggcagggcaggtagcctcgctccatcttggcaccagcccggctggcagcggcacgcgctcaaagcagcacagcanatgatgaccaggcgggatgccaacctcacagtagcgtgtgttttcagttttgatcctcgggttttgggaaccagaatttttcccactgctcctctcagcccgactcagcccatctgacttgcacccctgcatgctttctggccctgacccatgctcctcggtccatttcattgacacctagcgacttgttacacgcanangccannnnnnaaaaaaaaaaanaaaaa

SEQ ID NO: 1452 - DNA, 311 bp, Chlorella sorokiniana
  Clone ID: LIB3602-043-Q6-K1-A4
gcgagggcgatgcgccgagcactatgctcactaacccaggcaacgagcgaggcgtggccgtcgcacaacagccgctgggcactgcgcatcgcaagcgtgcttgccagtcacacagcggcagggcaggtagcctcgctccatcttgtcaccatcccggctgacaacgacactcactctaatcatcacagaaaatgatgaccaggccgcattccaacctcacaataccctgttttttcagctttgatgctcgttctttggaacccaaattactcccactgctcctctcagcccgactcactccatctaacttg

SEQ ID NO: 1453 - DNA, 313 bp, Chlorella sorokiniana
  unsure (1)..(313): unsure at all n locations; Clone ID: LIB3602-043-Q6-K1-A5
ggcggacgtgcgcgacggcaaggagctgcgccgcaccgcgctggcgcacaaggtgcccatcatcaccaccatcgcggccgcccgcgccaccgtggaggcgctgcgggacatgtccaagggcgcgctggagcaggtgccgctccaagactacttcaagtaaagggcggcccgcgccccctccttagccccttagccccatgagcgcgcgcgagagcagctttgacgctggggaggctcagagacctctagaccccccatcttcccagcactgcctatatctgtacctcccgtgacggtgtaacatgcctctgnc

SEQ ID NO: 1454 - DNA, 485 bp, Chlorella sorokiniana
  unsure (1)..(485): unsure at all n locations; Clone ID: LIB3602-043-Q6-K1-A6
gggcaagcagcggcccacggcccaggaagacctggacttcaactaccaagacgtggctgtgatgaacggggtgggcaaggcatatgatctagtgctctggggcgactcgttgaccgccgacatgcgcgactggcgtgcggatgcctgggacgacttctttcctcccggggagctgctcgcccagccgctgggcatgggcgggtcgactgtgcaggagctggctgcccgcatcatcaaggacggcgagcggccggacatcgaccccaaagccattgtgctgtgggtgggcacaaacaacgtgaagcagccgaacgccaagaacgcaaaccccgccgacaagctggactggctgatccagtggctgcagcacaacatgcccaacaccaagctggctgtgtctgggctgatccccaacgacgcgaaggatgtggggcctacaaatgaggagtacaaagcgatggcagaagcacgaggngtgctgtttt

SEQ ID NO: 1455 - DNA, 174 bp, Chlorella sorokiniana
  Clone ID: LIB3602-043-Q6-K1-A7
cgccatgctggcgttcctgggcttcagcagccaggcggcggtgcagggcaagggccccatcgagtgcctgcaggcgcacctggccgaccccggccacaacaacatcttcacctcgtctgtgggcaacgaggccctggctgccgtgctggtgctgtccatcaccccctgcctgat

SEQ ID NO: 1456 - DNA, 502 bp, Chlorella sorokiniana
  Clone ID: LIB3602-043-Q6-K1-A8
ccggcgccgagcacaagaagaagtccacccccgaggaggttgcttcctacaccctgaagatgctgcgccgccgcgtgccccccgccgtgcccggcatcatgttcctgtctggcggccagtctgagctggagtccaccctgaacctgaacgccatgaaccagagccccaacccctggcacgtgtcgttctcgtacgctcgcgcgctgcagaacaccgtgctgaagacctggaagggtgaggagggcaacgtgcaggtggcccaggcggcgctgctgaagcgcgccaaggccaacagcgaagcgcagcagggcaagtacgaccccagcaacgaggacgctgcggctaaggagggcatgttccaggcagggtacacttactgatcaatcaaccccacagctgagcggcgccgccacggtcgcccgcgggtggagcgctgcccacagccgtgcgccgactccgccgccagcagcgcccgattctttccgctcccctcggtcccctg

SEQ ID NO: 1457 - DNA, 493 bp, Chlorella sorokiniana
  Clone ID: LIB3602-043-Q6-K1-A9
gcgcccagcatgttcaacacccgcaacgtgggcaagaccctggtgacccgcacccagggcaccaagattgcctccgatggcctgaagggccgcgtggtggaggtgtctctggccgacctgcagaacaacgaggccgatgcctaccgcaacatcaagctgcgcgtggaggacgtgcagggccgcaactgcctgacccagttctacggcatggacctgaccaccgacaagctgcgctccctggtgcgcaagtggcagaccctgattgaggccaacgtggacgtgaagaccaccgacggctacttcctgcgcgtgttctgcatctccttcaccaagaagcgccccggccaggtcaagaagaccgcctacgcgcagagcagccagatccgcaccatccgcaagaagatggtggagatcatgacccgcgaggcgaccagctgcgacctcaaggagctggtgggcaagttcatccccgaggccattggcatggagattg

SEQ ID NO: 1458 - DNA, 234 bp, Chlorella sorokiniana
  Clone ID: LIB3602-043-Q6-K1-B1
gtgccacccctgccttttcacccctgccttttgcaacccgacgtccctgctgccgattgataagcagcccagtctgcccgcctgctattgctgagactgagttcatgttgtgtcttctgtcgcctttccaccgcccctgctttcctgccgcaagtttgtcaatgggcgggttgccatgccagcgccggcgctggcggccacccagttgcgcttgcctttgtaacacgatactat

SEQ ID NO: 1459 - DNA, 473 bp, Chlorella sorokiniana
  Clone ID: LIB3602-043-Q6-K1-B10
cagttgcaaggagcaatttggggaatcgagttcggctcgaccgaacgcgaaacagccaaccagccaccatgctgatctccaagaagaaccggcgcgaggtgtacaagtacctcttcaaggagggcgtgctgtacgcggagaaggacttcaacctgcccaagcaccccgagattgatgtgcccaacctggaggtcatcaagctcatgcagtccttcaagtccaaggagtatgtgaccgagcgctacgcctggcgccacttctactggttcctgaccgactctggcattgagtacctgcgcgagttcctgaacctgccctccgagatcgtgcccgccaccctcaagaagagcacgcgccccctggagcgcgagggcgcgcgcccgccccgccgcgacggccccccccgccgcttcggcgaccgcgagggctaccgctccgagaaggcgggcgcccccggcgagtaccgccccgag

SEQ ID NO: 1460 - DNA, 195 bp, Chlorella sorokiniana
  Clone ID: LIB3602-043-Q6-K1-B11
acggcacccgctatggcgcttcgcttggggagcagatcaaggagatcggagttaggcagcactccaaggacttttgcagcttctggggcaagttcgccatgaaagcgccgggggttggcatctggaagtgcaaggcctggaagaagacccaagctggcggggcgtacgtgcctaacactgcggcgttcgtgactg

SEQ ID NO: 1461 - DNA, 74 bp, Chlorella sorokiniana; identical to SEQ ID NO: 648
  Clone ID: LIB3602-043-Q6-K1-B12

SEQ ID NO: 1462 - DNA, 67 bp, Chlorella sorokiniana
  Clone ID: LIB3602-043-Q6-K1-B3
aaaaaaaaaaaaaaaaaaaaaagggcggccgataaaaaaagaaacaagattacatacacatacatgc

SEQ ID NO: 1463 - DNA, 462 bp, Chlorella sorokiniana
  unsure (1)..(462): unsure at all n locations; Clone ID: LIB3602-043-Q6-K1-B4
cttgccgactgcagcagacatctgagcaaccatgggtaaggtgcacggctcccttgctcgtgccggtaaggtgcgcggccagacgcccaaggtgcccaagcaggagaaggcgaagacccccaagggccgcgcccgcaagcggctgcagtacaaccgccgcttcgtgaacgtggtggtgggcttcggcaagaagcgcggccccaacagccagtaagctgactgcggcgccagcagcagcggcaggcatgtgctgaacgcacggagcgcaagcgcgtcccgcgcacagccgccaccgaagcggcctgccagcgtcgacggcagcgaggcagcaaggcgcggcctggcatgctagcagcgcgtactgcgcgccacggcgctagcagccgcaccctggaacagcatcagcagtaattcagcagcccacctgcatgccgaacgctccgctgtaacaggttctcnngg

SEQ ID NO: 1464 - DNA, 110 bp, Chlorella sorokiniana
  Clone ID: LIB3602-043-Q6-K1-B5
aaaaaaaaaaaaaaaaaaaaaaaaaaaaaaaaaaaaaaaagaaaaaaaaaaaaaaaagggcggccgttcacgcccacgcgtccgcccacgcgtccggttttagatcggga

SEQ ID NO: 1465 - DNA, 171 bp, Chlorella sorokiniana
  Clone ID: LIB3602-043-Q6-K1-B6
cttgatctctcaactccgccctgtctcctaccttgtgcaattacttgtaccgctctgtttagcagcactgaggttggtgttgtgaccacaccgcgcatgcaaagccgcttgcgtgaaaaaaaaaaaaaaaaaaaaaaaaaaaaaaaaaaaaaaagggcggaaaatataaaa

SEQ ID NO: 1466 - DNA, 341 bp, Chlorella sorokiniana
  unsure (1)..(341): unsure at all n locations; Clone ID: LIB3602-043-Q6-K1-B7
ctctgctttgtgtgcccgactcccgagcgcgccagtgacctcgcccccccactgttcagatacgcctaccccctttcttggcgcgctccccctgccaacacccaacccctttgttgacatgccaaagctgtgtgcaatgcagtgacgacctgtttttctccgcccagtttgcttctttataaacggcagcaaaagcacttgttgcaacgcgctgggataaccatggcggtcctgtaactatattcaacaaaaaaaaaaaaaaaaaaaaaaaaaaaaaaaaaaaaaaaaaaaaaaaaaaaaaaaaaaaaaaaaaaaaaanaaaaaaaaaaaaaaaaanaaaa

SEQ ID NO: 1467 - DNA, 660 bp, Chlorella sorokiniana
  unsure (1)..(660): unsure at all n locations; Clone ID: LIB3602-043-Q6-K1-B8
gcggccacgccggctgcgctggcgtattcgtttgggccgggcgcagctgcgccccgcccgcatcctcaccccgcccccggcctgccccctgctgcgcccccgtcacccgccggcagaatgatagggcaacccccggcgccgccgcccgctgctgtctctagtcccaaaacccaagtctttccaatcacaacactcccccgctccccacccgcccccgactgcacaccacatagacgctccacccccttcacatcaacccaaatgtttgcattcagtgtgccctcagcgcgcccagcgtcctgactgtctgtaccttagagccccctctttgcattccatctcatgtttgtttggttgttgctggcggattgcccgtgcacgcgctgaagcctcgtccttagtgacgcttctacccccccttgctattcacccgctaagtttattcccctcgcgccccgcgcagcgcccctgcttgcctccccgctctgctttgcataccgttgcctgctgcatgcaccccgtgcgcttgcatgctcagtggccgatttgggcggctcacaccattttgcgcgcgcgcgcggcgctacactgatatttcccttcatngaggtgtagagccatgcagttctcctgtcctcgtcgtggcagcctggcaacggt

SEQ ID NO: 1468 - DNA, 320 bp, Chlorella sorokiniana
  Clone ID: LIB3602-043-Q6-K1-B9
aaaaaaaaaaaaaaaaacaaaaacaaaaaaaaaaaacaaaaaaaaaaacaaaaacaaaaaaaaaaaagaggcaggaaaataaaaacaactaaatgccatacactcaaacgacaataaacttcatgggcggcggccgttttcggggtccctgctttccttccccgtccttccgcacttttacttttcttttggtgcccccttattccatttgcccgccccggtttttcctccctggagttgggaaaacccttgggctcccccatcttatcctgttgcagcccattccccttttccccggtggtgtttaaacgcaagggccc

SEQ ID NO: 1469 - DNA, 400 bp, Chlorella sorokiniana
  Clone ID: LIB3602-043-Q6-K1-C1
ggctttgcgctgaccacggcgctgctgcagggtgccaagacccagctgactgagcccaagggcacctcccagatggccgtctcgttcggcttcttcttcggcggcctggcccagttctgcgccggcctgctggagtaccagcgccgcaacaccttcggtaccgtggccttctgctgctacggcgccttctggatgtccctggccatcttcaccaccctgtcttccgctggcgtgtttgttgccacccccgtcaagggcgaccgcctcatgctcaccctctggggcatcctgaccttcctgctctggctgtgcaccttccacaccaacctggttacctgctggctgttcctgtccctggccatcctcttctggctgctggctggcggcgtgggctaccccg

SEQ ID NO: 1470 - DNA, 342 bp, Chlorella sorokiniana
  Clone ID: LIB3602-043-Q6-K1-C10
gggcgtgcacatgctgtttgagggcatgccggaccgggagtggaaggagggggagaagcgggtgtccaagatggtgttcatcggcaaggagctggaccgccagctgattgaggagggcttccgggagtgcctggtcaagtgaccgggctgttttgggctgttttaaaagccgcgcagttgagacttggcaaggctgaaggcgcagcgtgctgaggcccgtagtacggcgcaggggcctgcaccggcgttttggagattgccccagctgacggcgcgcaccgaacgctgttgacgcgcactcacccatatcgactttatgcacactgtaaaaacatgattact

SEQ ID NO: 1471 - DNA, 475 bp, Chlorella sorokiniana
  unsure (1)..(475): unsure at all n locations; Clone ID: LIB3602-043-Q6-K1-C11
ccaaaatgccgggcatcgccgtgggcctgaacaagggccaccccacgaccaagcgggagaagcaggcccgcccggcggcgcggaagggccggctctccaagcgcgtgaagctggtgcgcgacattgtgcgcgaggtggcgggccaggcgccctatgagaagcgcatcatggagctgctcaaggttggcaaggacaagcgcgccctgaaggtggccaagcggaagctgggcacccacaagcgcggcaaggccaagcgcgaggagatggccggcctgctgcgcaagatggctgccaaggcgcacaagtaaacgcctgtgcagccacagcagcagcccgcagcagcccccatcgtggcggggcggccgcagcgcagcacggcacagcacagcgcagcgcgcggcgccgcccgccttgcagcagcagcatcactgtgcctagcacctgtgatgtaacacagcacccggcaaaaannaaa

SEQ ID NO: 1472 - DNA, 389 bp, Chlorella sorokiniana
  Clone ID: LIB3602-043-Q6-K1-C12
aatgcacacggttacatgcgctgcgccccgccgtttgggaattactgggccccccgtggccggtttcttaggggccaggtgtttgcaaggggggcggtgtttttgccaccgccggaacatgggggggtttactaagggaaaaagggcttttgcagcgtttgcatgccgtgctggggttgttgttgttgttgtcaagggtttaacccagcaaggaaaaaggcctttattccaccctgtttaaaaggagccaaacccttttttggccccaaagcccggggggataacccccaacacgttaaagcccacctttttgaacaggggccggcattggccaataaccacggtgtcccccttgtggcagcgaaagcagggcaaaatgtgccccaaaa

SEQ ID NO: 1473 - DNA, 616 bp, Chlorella sorokiniana
  Clone ID: LIB3602-043-Q6-K1-C2
tgattgtgtacgagggccagccgtcgcgggaggccaccgcgcggtcgccgcagtcgctgcttaccggtaagtgggagccaatactaacaagctgcttgatgggaaggggggacgacgctggttgatgggaagctgggcgcagtcgccgcagtcgctgctcaccggtaagcggctgttttattgtgcagaagtcgtgcgtttagccgaatctactcagggcttggattggcagcgggtgggtggtccgctacgaccgtccgctggcagctactccgaagcaccgcgcccttctgggccttgctgtcgggatgggagccggtgtacctatttagagggaccagcgtgtctcagtctatgttgcaatgcctgtctatccaatttgcaggcatgaacacgttcctcaagaacctggagatcacgttccggcgggaccccaccaactaccgcccccgcatcaacaagaaggagtcgaccaaggaccgggagcagaaagctagcggcaccttctattacctggaggactgagcggtcgtcgcacctgggcgcatgggtgcacgccatctccccccagctggctggctctggacgctcggcagcacccttggcaacacccagc

SEQ ID NO: 1474 - DNA, 461 bp, Chlorella sorokiniana
  Clone ID: LIB3602-043-Q6-K1-C4
aaataaaaaaaaaaaaaaaaaaaaaaaaaaaaaaacaaaaaaaaaaaaaaaaaaaaaaaaaaaaaacaaaaaggaagagaaaaaaaaaaaaaaaagaaaaaaaaaaaacaataaaaaaaaaaaaaaaaaaaaagaaaaaaaaaaaaaaaaggggggggcccttttaaggaatccaagttttcttccccgggcctcgggagtaatactttttttttttggccaccaaaatttaatttattggcgccggttttacaatggtggtgggggaaaacaccgggggtgacccaaattaattcttttggaaaaaaacccctttttagcgagtggggaaataagaaaaagggcccccccctaaccctttttaaaaaattgcccaccctaaaaggaaaaagggacccccccttttctgggcaatttaaacgcgggggtgtgggggttccctacaaagttaccttttcttt

SEQ ID NO: 1475 - DNA, 232 bp, Chlorella sorokiniana
  Clone ID: LIB3602-043-Q6-K1-C5
cgcgcgtgatgcgcgaccgcagctgcgccgccaccttctcgggcaccgtcaaggagatgctgggcacctgcgtgtccgttggctgcactgtggagcacgaggacccccgcgacatccagaccaagattgacgagggcgaaatcgtgtgccccgaggcgtgagcacgcccccggcacacagcagcagcggcctagcagcagcagtgtagctgtcatgtaacacactgctgctg

SEQ ID NO: 1476 - DNA, 582 bp, Chlorella sorokiniana
  unsure (1)..(582): unsure at all n locations; Clone ID: LIB3602-043-Q6-K1-C7
ctctgcggcccttcatacctttgtacctttctgtatcatcttgcagcaatggcagccggctgcatctttctaacatcgtcaccggcccattcgtttgtgccatgcccacctgcctccaacgtcacccttcatcaaccctcacccaacccatccacctgccacccatccactcaccttccctccgccacaacctctgccacccactcaccacccatcacccgctcaacgccctccatgcaccatcctccccatccaccaaatctgccaccccaaacgcacgtccgccgctgcaccacctgccgccccctcacccgcacccatcttccacccgccacctttcctgccgctcaccgccgcacatcctacctcccacacctcactccatgtccacccttcacccgcgcttcacacagcggctgctgccatgcaaagctgctgccaaacccatccatcatgctcgcacacccactcacccacacgtncaacgtatccagacccattttcaaggcccgactgtacagtgcctttttgcgtccttatgccgatctggtaccaggacttaatgtgtaacaaatggtatgt

SEQ ID NO: 1477 - DNA, 404 bp, Chlorella sorokiniana
  Clone ID: LIB3602-043-Q6-K1-C8
tgcccttccaggtggtgccgccgcaggctgccgaggtggcggcaggctgggaggctgccctgggtgaggcggcgcggcagcaggccctcaccactcaccgcaagcgcctggcagcgtgagagcaccgctggtgtaagcaacaggatagccaacaacccatcggctgctgcctgccgcatgccggcactctagtgcacgcaccacgatagcaacagctggccgccgcatgccggcagcccgtaacctttgtatgctcacccccctacgttcttttgcatgcctgctaccttctgcctctgtatagctccctcatggcgcttttgtgtgcagccaagaacgccgcgttccgcacttcttgcatgcacatgccaatttctgcacagcacctcagtaaaagtcaagac

SEQ ID NO: 1478 - DNA, 293 bp, Chlorella sorokiniana
  Clone ID: LIB3602-043-Q6-K1-C9
ggcagagagcgcaaccaagcactacaacctgcgcgtagtggagtgcaggctggcgtcggctgcgctggcgctggcactggggcagagtcagcagtaaccccacaccattatcacccttaaagaaccgttgctgtaaataacaaaatagcccataacccatatcctgattcctacctaataccaactctctattgcacactccactatttctacatctaaccttcacattcctataatccttatcctttttatactcacctccatactttctttttcattcttactaccttttt

SEQ ID NO: 1479 - DNA, 489 bp, Chlorella sorokiniana
  Clone ID: LIB3602-043-Q6-K1-D1
gtcaacaccgtgaccgtctcccccgacggctccctgtgcgcctccggcggcaaggacggcgtggccatgctgtgggacctgtccgagggcaagcgcctctactccctggacgccggcgacatcatccactccctctgcttctcgcccaaccgctactggctgtgcgccgccacccagtcctccatcaagatctgggacctggagtccaagtctctggtggacgagctgcgccccgagctgcccgagcgctccaagaaggcgcaggtgccctactgcgtgtgcctggcctggtccgccgatggctccaccctgtactccggctacaccgacggtgccatccgcgtgtggcaggtgggccgcgccatctaagcagctggccacggcggtcggtctcagctgccctgcgctgcagcaggtgctgccccagtggcaccccgcacctggctgtggcggcggcggcggcggccttgacccacggcgcgcggcgcg

SEQ ID NO: 1480 - DNA, 352 bp, Chlorella sorokiniana
  Clone ID: LIB3602-043-Q6-K1-D10
aggaggacgaggacgcggatctagagcaggtggaggtgcaccggcggcggggcggcagccagcggcgggcggcggcggtggatgccgtgcccacgctgcccgcggcgacgcaggaggaggaggaggagagaccggcgcggcggcggcgcaggggatgagctgtggctgcagcctggacgactgactgcgcagcctgccgcctgcgggctgtgccctgtacagaaatgtgacacgaagcgaccgatgaccctaatgccctgcaaccctgccctgcatttttgaccttgacctgccgctgcgcctcacagcaggcccagtggcagctgcacccgaatgtaaactgactccaggc

SEQ ID NO: 1481 - DNA, 529 bp, Chlorella sorokiniana
  Clone ID: LIB3602-043-Q6-K1-D11
gaaggccgctgcggcagctgaggccaagcagaagggcaaggcgcagcgcaaggagatcttcaagcgggccgaggcttatgtgaaggagtaccgcgcgcaggagctggaccgcatccggctgaagcgcgaggccaaggccaagagcggcttctatgtcgagcccgaggccaagctggtgttcgtgatccgcatccgcggtgtgaacgacatcgaccccaagaccaagaagatcctgcaggtgctgcgcctgcgccagatcaacatgggcgtcttcctcaaggtgaacaaggcgaccatgaacatgctgcagcgggtggagccctacgtggcgtacggctaccccaacctgaagaccgtcaaggagctgatctacaagcgcggctttggcaaggtcaacaagcagcgcatcccgctcaccgacaactcggtgatcgagcaggtgctgggcgacaaggacatcatctgcgtggaggaacctgtgcacgagatcttcaccgtgggccccaacttcaagcaggccaacaacttt

SEQ ID NO: 1482 - DNA, 406 bp, Chlorella sorokiniana
  Clone ID: LIB3602-043-Q6-K1-D12
ggcctgctctgcggcccttcatacctttgtacctttctgtatcatcttgcagcaatggcagccggctgcatctttctaacatcgtcaccggcccactcgtttgtgccatgcccacctgcctccaacgtcacccttcatcaaccctcacccaacccatccacctgccacccatccactcaccttccctccgccacaacctgtgccacccactcaccacccatcacccggttaacggccttcatggcccatccctcccatccaacaaatctggcaacccaaacgcaccgtccgcggttgaacacctggcggccccttaaccggaaccatttttcaaccggcaacttttctggcggttaccggcggacaatctaacttccacaacttaattcatgttcaacctttaacc

SEQ ID NO: 1483 - DNA, 326 bp, Chlorella sorokiniana
  unsure (1)..(326): unsure at all n locations; Clone ID: LIB3602-043-Q6-K1-D2
gtttgggcctctatctaagggctgcactttgcagttttccccgaccaatcgggcacctgccagccatgccaatgcctcttacctcgccaccccaaaacctgtggggttggccatgtgcaatcacgctccagttttgcctgcttcggtacgttgtccaattatccttgctgtctgcttagcggcaccccatctccttgaccacccatttgatgacctatgccatgcctcaaaagcccatttagcgctagcgttttccccctctgcgtagcgaacgtctttctgcgcctgctttacacaagcctgtaagttggtggcaatgcgccnaa

SEQ ID NO: 1484 - DNA, 468 bp, Chlorella sorokiniana
  Clone ID: LIB3602-043-Q6-K1-D3
gagcagccggtcaccatggtgcagcgcctcacctaccgccggcgtcacagctacgccaccaagtccaacaagcagcggatcctgcggacccctggcggcaagctggtgtaccagctggccaagaagaagacctcccaccccacctgccccatctccggccagcggctcaatgggctgcccgcggtgcgccccaacagcctgcaccgcgtgaacaagagcaagaagacggtgcaccgcgcgtacggcggccacctggcggcgggcgtggtcaaggagcgcatcgtgcgcgccttcctggtggaggagcagaagatcgtgaagaaggtgctgaagctgcaggctgccaaggaggctgcgcaggccaaggccgcggcggcaggcagcaagggcaagaagaagtccaagaagtgagcggcgcacgcgagcggacagttgcgccccatgctcccgctgtaatgcaccctcgat

SEQ ID NO: 1485 - DNA, 469 bp, Chlorella sorokiniana
  unsure (1)..(469): unsure at all n locations; Clone ID: LIB3602-043-Q6-K1-D4
cctaacccctgcaccccggcccgcggcagccgggcgtgtgtaaacgcgaagccgnaaaaaaaaaaaaaaaagaagagaataaaaaaaaaaaaaaggaaaaaagataaaaaaaaaaaaaaaaaaaaaaaaaaaaaaataaaaaaaaataaaaaaataaaaaaaaaaaaataaaaaaaaataaaaggggggggcctttttaaaggaaccaattttaaatcccgggggttgcaaaatttaaattttttttttggggcacctaaatttaattgtgggggcggtgtttaaaaagcgcgtgtttgggaaaaacctgggttttcccaatttaattgttttggaagaaaatccttttttggcgggtgggtaaataaaaaaaaggcccggaacaattcccttttcaaaaaatttctaaactttaatgggaaatgggacccccctttttccgggcattttaagcggggggggtgggggg

SEQ ID NO: 1486 - DNA, 480 bp, Chlorella sorokiniana
  Clone ID: LIB3602-043-Q6-K1-D5
ggcaagaagaagaagaaggagaagaaggagaagaagcggaaggcggaggcggctgaggaggaggcgccggcggcagcggaggagaaggcggaaaagaagaagaagaaaaagaagaaggaggccgccgcgtaaagggcagaaaaaatgtgttgcagccctgggccctgggaagagatctctctcccacagccacacgactgccgctgttgccgccgccaccgccactgtatgccaaccggctttcctgtatgaatagctctgattgcccgctctttctgccctggcggcttgggcagtcaggggctgagggagccatgcgctgctaagctttgccacccacccctgcttccccgccgccgccgttccttgcgctactttcgtgtccccgctctctctccctgctgcctcctgcctctcccctgccaacccctctagccagccgcccgtattgaggccgctggccgcacgctgtgtgtgcac

SEQ ID NO: 1487 - DNA, 437 bp, Chlorella sorokiniana
  unsure (1)..(437): unsure at all n locations; Clone ID: LIB3602-043-Q6-K1-D6
ccacgacaagctgatggccatcccccacggctcgtacgcgcgcctggtgcgccaccagctgacccgcaccaccacaagctccctgtccacccgaggccccagccggcgaggactgccggcccctgcacccggcaaggagtagcgcagtacggcggcaggcagcattgctgccgtttttgctgcgtgacccgcagccatttatgaattggttgaccaagtacgctctctgattcctctattctgcgcacttcccctaagtaccgcttttgactcatttccacctgtcacaacagccgtactagtctccctgcctgtctctcatctttctcattcttcatccccagttcatcgcgctacgtggcgaggcgcgcaacacataaagtgttgcacgcacgtgagctgaatagcgacctcagcggtaaatagtaactatnntg

SEQ ID NO: 1488 - DNA, 486 bp, Chlorella sorokiniana
  Clone ID: LIB3602-043-Q6-K1-D7
cccggacccgtggtgcaccggccgtgccccgggtgcatgccagctgagagcccctagcgcgcccaggcacgctgggggcagctactaaactaaacccaagccttggagcagcatagctgcccttagaccttgctggcccgctgcgttgaaactcacgggctcagtcacaatcgagcgtgttccttgcatgtcctgcaccctgcgtttgcacggtgcctggcctacgttttaactgcctctgcaccaccaaatgagcaccgcataccgcctcaagaaaatcccagccctatcagtgcactgcctctgtggcccttttgatgcattgtgagcgcccgactgtcacaacctgccgccctggctcatgaatgggcccgtgctctgtctgcccctggcgggcggttcccgcaatttgatcaagaccaagcgcatgttgcattgagagcgatgccccttgcatgtctgcctgcgtgttgtaacacttcaatg

SEQ ID NO: 1489 - DNA, 515 bp, Chlorella sorokiniana
  Clone ID: LIB3602-043-Q6-K1-D8
ctcggggtccacaggagaaccccggctgatgtggctggactgcttgtttgcaccccactcctgtctttctcaccctgtctatgcctcctctgaagaggcctcaaagcgtttctccggccggtggtgaccgccgatccatatgatccctgctgttcctcacaaagtgacactgccttttcgccccccacctaaccaacaacccgcctgctctcgcacacaaaatggccccgcacaccggcaagcacctggcagcacctgcagggccgctgcccctttgtatcaatgcttacccttgcttctcacgcgccgtatgcaccccgaaatgccactctcgtcaaccctaccctgttggcttttcaacgactcgtcgcacctggctttgaagctgcctgctgtgccgcgctgtgcttatccgccagccggtgcctgcttgaggcttagcatgtgccaggattgttttaaccttacgcaagtatgtgatgaaatgccttggctgtgtgtaaaaatccgtcgac

SEQ ID NO: 1490 - DNA, 528 bp, Chlorella sorokiniana
  Clone ID: LIB3602-043-Q6-K1-D9
cccacgcgtccggcccagccccaccagcagccgtagcggcagcgtcacagccagcggcggtgccagcccgccggccagcgtcggcgtggcgtcgccgcagcgctcgccagccgggcgctcgccaacactgtcgtctgtgggcgagatagaagaggaggcagtcgatgagctgagcctgcgccagctgtaccatgtgcagccggtggctgcctgaccaccacgtagttagttagcctggcctcgctgaagtgcgagatgcttctcaaaccaaccgccaatcaaccaggcagcaacccaacccatccagcctgccactgcaccttctgacccctgcacttgcatttgaggccagcagcgcatgcactgctgctgcccacgctatcccgacctgtgtagcatgcctgattcgaaacccgctccttataaaccccttttgcttgtgctacccattgagcgatccatttgctgctgttgcaaatcccctgttcctgcctctcttgttcctcgtttctctccctcagctggcat

SEQ ID NO: 1491 - DNA, 396 bp, Chlorella sorokiniana
  Clone ID: LIB3602-043-Q6-K1-E1
gccgtcggcgccagcagcccagctgaacgactcatctgtgcggccgctgggccgctgtgattcatttgcatcggcccatgagcggctgccttgcacgcatggtgcggcacggcctgctctgcggcccttcatacctttgtacctttctgtatcatcttgcagcaatggcagccggctgcatctttctaacatcgtcaccggcccactcgtttgtgccatgcccacctgcctccaacgtcacccttcatcaaccctcacccaacccatccacctgccacccatccactcaccttccctccgccacaacctctgccacccactcaccacccatcacccgctcaacgccctccatgcaccatcctccccatccaccaaatctgccaccccaaacgcacg

SEQ ID NO: 1492 - DNA, 433 bp, Chlorella sorokiniana
  Clone ID: LIB3602-043-Q6-K1-E10
cggacgcgtgggcggacgcgtgggcggacgcgtgggggccaagggccggcacaccggctacggtaagcgccgcggtacgcgcgaggcgcgcctgcccaccaagatcctgtggatccgccgcatgcgcgtgctgcgccgcctgctcaagaagtaccgggacagcaagaagattgaccgccacctgtaccacgagctctacctcaaggtgaagggtaacgtgtacaagaacaagcgcgtgctcatggaggccatccacaagcagaaggcggagaagatccgcgagaagaacattgcggaccagctggaggcgcggcgcgccaagaacaaggcggcgcgcgagcgcaaggcggcccgccgcgaggagcgcttcgcgcagggcgtgaccgccgccaccgagagccagaagtaagcggctccgtctcggcggcagcag

SEQ ID NO: 1493 - DNA, 357 bp, Chlorella sorokiniana
  Clone ID: LIB3602-043-Q6-K1-E11
gtggccttttacaaggagaacgcggccgtgctgcgcaagacgttgcacgacatgggcttcaccgtgtactgcggcgagaacgcgccctacgtctgggtctgcttccggggccagaagagctgggacatgtttgctgacatcctggataagagcatcatcatgaccacgcccgggagcaggtttggccccggctgtgagggctttgtgcgcgcctccgtttttggccaccgttagaacctgctggagagcgtggagcgcttcaaggcggtgtacaggaacaagtgaagtgacaggcccaccgacgctgaacacaaccaattagaacgactatgggcgacatgacgtgaccgacgacct

SEQ ID NO: 1494 - DNA, 355 bp, Chlorella sorokiniana
  Clone ID: LIB3602-043-Q6-K1-E12
gtgcaggcctggtacaccggcgagggcgccctgggctccctcaacaagttcgccaacggcttctaagcagcccggcatgacgacggcctgggcctagcgcccggccgctttgcagccacttgcagccggcccctttgcggggccacccccacccaacacccctttcatgagaagattaacaccctgccatcgctcccttgctacgcctcccccgcccgtgcgctctctgcatcggtcgttctgtttgcctgcgggcgcgcttgctcccgggcgccccgcagattttgcatctgctcgctcgtgtgctgtcaggagtcagcggttgtatgatttcctgttgtaattcgtaacgttc

SEQ ID NO: 1495 - DNA, 368 bp, Chlorella sorokiniana
  unsure (1)..(368): unsure at all n locations; Clone ID: LIB3602-043-Q6-K1-E2
cacccgctcaacgccctccatgcaccatcctccccatccaccaaatctgccaccccaaacgcacgtccgccgctgcaccacctgccgccccctcacccgcacccatcttccacccgccacctttcctgccgctcaccgccgcacatcctacctcccacacctcactccatgtccacccttcacccgcgcttcacacagcggctgctgccatgcaaagctgctgccaaacccatccatcatgctcgcacacccactcacccacacgtncaacgtatccagacccattttcaaggcccgactgtacagtgcctttttgcgtccttatgccgatctggtaccaggacttaatgtgtaacaaatggtatgtt

SEQ ID NO: 1496 - DNA, 595 bp, Chlorella sorokiniana
  unsure (1)..(595): unsure at all n locations; Clone ID: LIB3602-043-Q6-K1-E3
ccgcctctactccatcgcctccacccgctacggtgacaactacgacggcaacaccgcctccctgtgcgtgcgccgcgccgtgtacgtggaccccgagaccggcaaggaggaccccgccaagaagggcatctgctccaacttcctgtgcgacgccaagcccggccaggagatcaccatgaccggccccaccggcaaggtgctgctgctgcccgaggaccccaacgccgtcatcatctgcgtggccaccggcaccggcattgcgcccttccgcaccttctaccgccgcatgttcatggagaacgtgcccaactacaagttcacaggcctgttctggatgttcatgggtgtggccaactccgacaacaagctgtacgacgaggagatgcagaccatcgccaaggcgtaccccgagcagttccgcctcgactacgcgctgtcccgcgagcagaagaaccgcaacggcggcaagatgtacatccaggacaaggttgaggagtacgccgacgaggtgttcgacctgctgaacaacggcgcccacatctacttctgcggnctgaagggcatgatgcccggcatcttggagatgctcgagcgc

SEQ ID NO: 1497 - DNA, 89 bp, Chlorella sorokiniana
  Clone ID: LIB3602-043-Q6-K1-E4
aaaaaaaaaaaaaaaaaaaaaaaaaaagataaaaaaaaaaaaaaaaaaaaaaaaaaaaaaaaaaaaaaaaaaagcggggcggtacacac

SEQ ID NO: 1498 - DNA, 448 bp, Chlorella sorokiniana
  Clone ID: LIB3602-043-Q6-K1-E5
gcctacagcgagcacaggggcaaccatgaccaagaagcggaggaacggagggcgcaacaagcacggccgcggccacgtcaagcgcgtgcgctgcgagtcgtccgccgccatggtgcccaaggacaaggccatcaagcgcttcatcgtgcgcaacatggtggacgcctcggccatccgcgatctgcaggacgcctgcgccatcgacggctatgcgctgcccaagatctaccgcaaggtctactactgcgtgtctgccgccatccactccaagattgtgcgcgtgcgctccgtcaaggaccgccgcaaccgcgagccgccccgccgccccggctttggcgcccgccccgagcgcaagtgagcgtcggcatggccgcagcagcagcagccgctgaggagcagtgagggcggcgctctgcagccgcgcctcgtcctgcgatgagtcagcacc

SEQ ID NO: 1499 - DNA, 223 bp, Chlorella sorokiniana
  Clone ID: LIB3602-043-Q6-K1-E6
aaaaaaaaaaaaaaaaaaaaaaaaaaaaaaacaaaaaaaaaaaaaacaaaaaaaaaaaaaaaacacaaacaaagaacgagaaaaaaaaaaaaacagaggggggcgccccttttgggggcccacgttttggggcccccgcgtttccgggcccgccctttctatagcgccccttttttatagggtccccgccctgcctttcctcccccgttgattggcacccccc

SEQ ID NO: 1500 - DNA, 571 bp, Chlorella sorokiniana
  Clone ID: LIB3602-043-Q6-K1-E7
gtctaaactgcagcctgatcgcctccgacacgcgcttcagccatggacaagctgcgggagctcaagaacaaggttgtgggggcctccactgcgcctgcgggcggccctccctcccagcagatgggtgcgggcgcgtctggcatggcagcgcaggccggcccccccgccatctccaccgaagcgcccaagctctcccgcatctctaccgagtatggcgaggtggaggggcagcccttcatctcagggctgggcatgaagcgcggcccgctgtcgccccgcgctcaggccgtcaaggaccgcctggctcgggagctggaggagtccacccgcgtcattggctagccgctcacaagtatgtacaataagcggcaagcagctgcaatatgaaccagctatgagccagtgcgcctgcgcggcaagcccagcagcaccactgcaactgcgccgacggcatgcgacgataaacaagcgacaccaagccccccacggttgatgtatgccctgtatgaacccgtgaacacgtaatggacccctcagttgccctgatgaactcaacatgtaacaacgcatg

SEQ ID NO: 1501 - DNA, 303 bp, Chlorella sorokiniana
  Clone ID: LIB3602-043-Q6-K1-E8
gcccccaacaagctgtccaagatcaaggtggtgcgcaagggcattgcccgcgtgctgaccgtggtcaaccagaagacccgggacgctctgaaggaggcgtacaagggcaagaagtacgtgcccctggacctgcgcgtcaagaagacccgcgccatccgccgccgcctcaccaaggcgcaggccaacgccaagactgagaaggctgccaagaaggcgcgcgccttcccgcagcggaagtacgcgctcaaggcgtgaaggccttggaagcagcccgctgcagccgtgcaggcacacctctaggca

SEQ ID NO: 1502 - DNA, 198 bp, Chlorella sorokiniana
  Clone ID: LIB3602-043-Q6-K1-E9
gcgatccccatcatgctcttcatcatcaagcagttgttcaatgtcatattcccgttacatcacaccactgggcgggaataaagatcacggtctgtcagacccatccaaggtccttacttaccttccccttcaccttcaattacacaatacccattcaattccccaactaatcacttaaaacccattccaactatccaa

SEQ ID NO: 1503 - DNA, 366 bp, Chlorella sorokiniana
  Clone ID: LIB3602-043-Q6-K1-F10
tgagcggccagttcaaggttgacggcagcggcaatgtggagctcaaggagacggatggcatcgactacgcccctgtcaccgtgcagctgccaggcggcgagcgtgtgcccttcctcttcagcgtgaaggagctggacgccaagggcaatgctgatggctttggtggggagtttgtggtgccctcctaccgtggtgccaccttcctggaccccaagggtcgtggcgctgcgactggctatgacactgctgtggccctgcccgccgctggcgacgatgaggagtacctgaaggagaacatcaagtcggccggcgcaatgaagggccaagcagtgttctccattgccaaagtggatgctgccaccggcg

SEQ ID NO: 1504 - DNA, 53 bp, Chlorella sorokiniana
  Clone ID: LIB3602-043-Q6-K1-F11
aaaaaaaaaaaaaaaaaaaagggcggacaataaaaaaagaaacaaacttaaaa

SEQ ID NO: 1505 - DNA, 331 bp, Chlorella sorokiniana
  Clone ID: LIB3602-043-Q6-K1-F12
aaaaaaaaaaaaaacaaaaaaaaaaaaaaaactaagaaaaaaaataaaaaaaaaaacaaaattaaaaagacgggaaaaaaaaaaaaaagaaaggcccatgcttacacactttctaaactttccttaccttcgatttctagggcgtgtcttttctatgctgttcctttttcacgactttgtggcccccctttcataccttcttggctcgcatctacctttaccgtgcccggcttgtttggcttgcccttccttacacttttgctccctagcttgataatgcaatgggccctgtttgcgcgctttccccacccctttgatattgtggtggtgg

SEQ ID NO: 1506 - DNA, 87 bp, Chlorella sorokiniana
  Clone ID: LIB3602-043-Q6-K1-F2
aaaaaaaaaaaaaaaaaaaaaaaaaaaaaaaaaaaaaaaaaaaaaaaaaaaaaaaaaaaaaaaaaaaggcctggttctagatcgcga

SEQ ID NO: 1507 - DNA, 517 bp, Chlorella sorokiniana
  Clone ID: LIB3602-043-Q6-K1-F3
agaacagcgccatctttgtcagcgacacgcccaagcagatcaagaacaaggtgaacaagcacgcgttcagcggcggcggcgctacggcggaggagcagcgggaaaagggcgccaacctggaggtggatgtgccctggaagtggctcaacttcttcatggaagacgacgccaagctggagcagattgggcgcgactatgcgagcggccgcatgctgacgggagagatcaaggcggagctgattgcggtgctcacagagatggttgagcggcacaagcgggcgcgggagctggtcagcgacgatgtggtggatgccttcatgacggtgcggccgatgaccgacctgtacggctgacgggcctgccagcaggcaacgagcaccctccttgggcagccgctgcccatcctgcgcggcggcctgatggctggctggtgcacgccatgcctatctgcgcggtagcggagctgtgctgacaagttctggcgcatttgataccttcaacattgtaaacactgcag

SEQ ID NO: 1508 - DNA, 72 bp, Chlorella sorokiniana
  Clone ID: LIB3602-043-Q6-K1-F4
gcagaagagagcgcatgcacttcatcaagactaacacgcctatctttttcaacatagtcgaccacgccttct

SEQ ID NO: 1509 - DNA, 409 bp, Chlorella sorokiniana
  Clone ID: LIB3602-043-Q6-K1-F5
ggaatgaggcggccatgctgcgcagctgcacccacccacgcatcatgccgctgtacggcatttcagtggaggacaacctgatcatgctggccatgaagcacatggagggcggctgcatgcgagacgtgctgcgccagccagacgccgccagcaccttgagctggcataactggggtggccagctggcgctggacattgctgacggcatcgcgttcttgcacaacaacatgaagtgcctgcatgccgacctgaaagccagcaatgtactgattgatgaggaggggcgcgcctgcctggcggacctggcgctcgccaaggtgctggccagccagccggcccgcacagccgctggtgccacctacacatatgctgcgccggagcaactcatgggccagcgctgcacgctcgc

SEQ ID NO: 1510 - DNA, 407 bp, Chlorella sorokiniana
  unsure (1)..(407): unsure at all n locations; Clone ID: LIB3602-043-Q6-K1-F6
ctagttctagatcgcgggcggccgctcgcgatctagaactagcttctccaacaactggaccaccaacattggccactgcatggtgcccacctctgtggacgtccagggcctgaccatccccctgagctgcctgtggcccggccagcagatggtgtaaggcggcggcagcagcagcaggggcggcagtgtgcacccacctgcaccgccgccccagccccggccccgcgtgtaactggttaccctctttcgtcccatttccttgctccgcccgccgccgcggcgtgctagcgcacccgcccgggcacctctcccgttgcacctgagaagaaaacaaccactcacatcgctcacctgtatggcagaccgtgcgtctgcggctgcgcctcggttaacttgcattcnnccna

SEQ ID NO: 1511 - DNA, 699 bp, Chlorella sorokiniana
  unsure (1)..(699): unsure at all n locations; Clone ID: LIB3602-043-Q6-K1-F7
ctccatcgcctccacccgctacggtgacaactacgacggcaacaccgcctccctgtgcgtgcgccgcgccgtgtacgtggaccccgagaccggcaaggaggaccccgccaagaagggcatctgctccaacttcctgtgcgacgccaagcccggccaggagatcaccatgaccggccccaccggcaaggtgctgctgctgcccgaggaccccaacgccgtcatcatctgcgtggccaccggcaccggcattgcgcccttccgcaccttctaccgccgcatgttcatggagaacgtgcccaactacaagttcacaggcctgttctggatgttcatgggtgtggccaactccgacaacaagctgtacgacgaggagatgcagaccatcgccaaggcgtaccccgagcagttccgcctcgactacgcgctgtcccgcgagcagaagaaccgcaacggcggcaagatgtacatccaggacaaggttgaggagtacgccgacgaggtgttcgacctgctgaacaacggcgcccacatctacttctgcggnctgaagggcatgatgcccggcatcttggagatgctcgagcgcgtggccaagagcaagggtctctcttacgaggagtggttcgagaacctgaagcacaagaaccaggtgcacgttgaggtgtactgagcggcttaaaccaaaccctggaaccgcca

SEQ ID NO: 1512 - DNA, 423 bp, Chlorella sorokiniana
  Clone ID: LIB3602-043-Q6-K1-F8
acaagcctatcgttacatgccggtccattgcaggctcaaaagcatgtgaaggtgcggtgctgctgcgttggccggcttgcgctggcgtagcccgcaagcctggagtgaggcggggcatcctgccccctcccgggtgctgggcccatcaccgccttaggcgcccttttgtttgaggatcagcttgtcgcccaggctgagcgcaatgccctgcgttttggacctgattcggaggtagccgcccaggcggccgtctggcagcttttccacgctcacgttcaccagcgcgttttcgccaaacacactgcgtgcatacaggttggccgccaggaagccgcagtcgccctccagcgcggagggcggcgtcaggcaccgcatgtttgtggacgcgatgatgtggtccaagaaggccaggggctcggtgat

SEQ ID NO: 1513 - DNA, 452 bp, Chlorella sorokiniana
  Clone ID: LIB3602-043-Q6-K1-F9
gtagagctggatatggacgtgactagcagcgtggacattgaaaacatccagtatgaggacggctgctacaccgtgcagggctgcctgctgagcacggcctcagctgacgatgtgtatcgagtgctgacagactatgaagcgctgccacgggtgtttcacaatgtagagacctctcaggtgcggcacaatgagtcctcgggcagcaagcagctggtgcagacgtgcaagtgggccttcctcatgtttagcggcacctttgtcaccgagctgaacgtgcacgaggacgcctcgcagcgcaagctcaccttttcgctcatccaatcggccttcatgaaagaatttgtggggagctggcacgtgcagccggcggccgagggcggcctgaccgaggtgcggcaccggctgtcagtgcggcctagcctggcgcctccccagaagattggtgacatcac

SEQ ID NO: 1514 - DNA, 576 bp, Chlorella sorokiniana
  Clone ID: LIB3602-043-Q6-K1-G1
cccatccaagcccctccccacaatgcaaacgaggccacaagtgccacctataacccccccaacattgcaagcacttctctatcccccaccgggctgccccgcgtctacgaaatatatgcacaccccgaacccaagcaccggtggcgggcgagctgcctatgctgcggcgctgataatgcccctctaatagctactcccaattccaccagaccagctcatacccctcccttttgtcactgccgtgcgtcgcgccgccccgccccccaacggcggcgccagccttttcccaacgaccccgtccccccgtgccgcgccgcccgcattgccagcgacgccgtcgccgagtccatttttgccactgccctgccgaatccgcttttccccacttttcaacaacagaagcccccgcaaaacgcctttgcaaattgtcgaccttgcccagttggttttggggtgcgggcccgtggatacggtaacatttcccccttccttttttcccatgcacgtcccgtgctgttgcttcagggtgagcgagtccccacacagccctttcatcccctcttttccccgccggat

SEQ ID NO: 1515 - DNA, 481 bp, Chlorella sorokiniana
  unsure (1)..(481): unsure at all n locations; Clone ID: LIB3602-043-Q6-K1-G10
agaaaaaaaaaaaaaaagaaagacagaaaaaaaaatgagaaagctaaaggagacggatggcataaactacgcccctagtcaacgagcagctgacaggcggagagcgtgtgcccttcctcttcagcgtgaaggagctggacgccaagggcaatgctgatggctttggtggggagtttgtggtgccctcctaccgtggtgccaccttcctggaccccaagggtcgtggcgctgcgactggctatgacactgctgcggccctgcccgccgctggcgacgatgaggagtacctgaaggagaacatcaagtcggccggcgcactgaagggccaggcagtgttctccattgccaaggtggatgctgccaccggcgagattgctggcgtgtttgagtctgtgcagcctttcgacactgacctgngagccaaggcccccaaggacgtcaagatcactggcctctggtatgctcagctttcggaagcgct

SEQ ID NO: 1516 - DNA, 447 bp, Chlorella sorokiniana
  Clone ID: LIB3602-043-Q6-K1-G11
gctgatccccccactcccgccgacggtggtgacgacaccccggccgatgacaccccggccgatgacaccccggcggacgacaccccggccgacgacaccccggccgacgacaccccggccgacgacaccccggccgacgacaccccggccgacgacaccccggccgacgacaccccggccgacgacaccccggccgacgacaccccggccgatgatactccggccgacgacaccccggccgacgacaccccggccgacgacacccccgcggacgacaccccggcggacgacaccccggcggacgacaccccggctgacgacaccccggccgacgacaccctggctgatgacgatgtgctgtgagagcctggccaacagccctaaacagccggtgtgcagcaggcagcacccccgagcgctggcggctggctggaatcggcactgaaa

SEQ ID NO: 1517 - DNA, 475 bp, Chlorella sorokiniana
  unsure (1)..(475): unsure at all n locations; Clone ID: LIB3602-043-Q6-K1-G12
cggcagcagaggaactagcacatcagcaaccatggtgctggcgtgcgacatcgacctgctgcaccccccggcggagctggagaagcggaagcacaagctgaagcgcttggtagcctcccccaactcctacttcatggatgtgaagtgccagggctgcttcaccatcacgactgtgttcagccacagccagaccgtggtggtgtgccccagctgcaacaccgtgctgtgcgtgcccaccggtggcaaggcccgcctgaccgagggctgctccttccgccggaagggcgactgagcgcgcccccgctagcggcagtgttggcgctgggcagcggttattgtgatgtccacgggcagcccgtagcagcggcactcgcactcctctcttgttgggatggagcaacaccttgcacgggcgtcggaggagactgatcgcccacagtgaggagcacgcggncgggggcctncgcccctgcag

SEQ ID NO: 1518 - DNA, 415 bp, Chlorella sorokiniana
  Clone ID: LIB3602-043-Q6-K1-G2
gtttgtaacaagtcaccgaaaggccgtttacaggcgggtggggtgcgccacgccttgcaggcggctgccagtcaaaagctgagtccgtccgtcgtcaagccgccgccgcaagcctaggtgcgcggcgccgccccgcccgcctgctgccccgcccgccctcgcgagcgccacggggcgctgctgctgctggcgggcccgccgggcggtagcaggcagcctaagccgccgctgtcgcaccggcgtgcaccgccgtctcaggcggagggtgatcacgccttgggggtggtcttcaccaccttgccgaacatgacggcagtgttgccgtccaggaaggcgatgccggacaagccctttgcatttttgaaggagtccaccaccatcggctggaagggcttgaacaccaccttcaccatct

SEQ ID NO: 1519 - DNA, 624 bp, Chlorella sorokiniana
  unsure (1)..(624): unsure at all n locations; Clone ID: LIB3602-043-Q6-K1-G3
cctgtccaactcgctgaccggaaacgcggctgctccctccagtggaggctcctctggagtcagctccggcgcggcagctggtattggcatcggctgcgcggtggcgggcgccctgctgggcgcgctgggcatgatgatgtttgccaagcgcaagggcggctggcagcgccacaacgacgcgctgtccgccaccggcgccggctccgaggcctacaagctctgagctgagccgacatcttttgcaacagctctgagccgctgagctgaccctggctcatgccagctggcatgctgcagcacccccagcccgccaagcagcctggacagcagctggctgattgtttgcccgctggcctgtgcagcaggggcgctgcccggctgccacagtaatgcatccttaatccacagcatccctcacttcacctcgctgcgtgctgcatctcacgagcactattattgccgctacgttgcttcataccttggattgcgcagcctgccgccaccggtcttgcttccgtgccgncaggctgtgcaatgcanagccgtcttaccgccctcagcctttctttgggcgctcctttcatccctgcccaatcgccatccccttcctcccctccctgcccc

SEQ ID NO: 1520 - DNA, 520 bp, Chlorella sorokiniana
  unsure (1)..(520): unsure at all n locations; Clone ID: LIB3602-043-Q6-K1-G4
gtacgtgcgcatccagcggcagcggcgtgtgctgaaccagcgcctgaaggtgccccctgccctcaaccgcttcacccgcacgctggacaagaacatggccgagagcctgttcaagctgctgatgaagtaccggcccgaggacaaggcggccaagaaggagcggctgctgaaggaggcggaggcgcgcgaggctggccaggaggttgagaagaagaagcctgtggtggtcaagtacggcatcaaccacatcacgcagctggtggagagcggcaaggcgcagtgcgtggtgattgcgcacgacgtggaccccattgagattgtggtgtggctgcccgcgctgtgcaagaagatgggcgtgccctactgcatcgtcaagggcaaggcgcggctgggcaccgtggtgcacaagaagacggccaccgcgctggcgctgacggcggtgaagaacgaggaccagcgcgagttcgccaagctggtcgagtccttcaagaccatgtacaacgacngnccccgcgtcagc

SEQ ID NO: 1521 - DNA, 560 bp, Chlorella sorokiniana
  unsure (1)..(560): unsure at all n locations; Clone ID: LIB3602-043-Q6-K1-G5
cttcatacctttgtacctttctgtatcatcttgcagcaatggcagccggctgcatctttctaacatcgtcaccggcccactcgtttgtgccatgcccacctgcctccaacgtcacccttcatcaaccctcacccaacccatccacctgccacccatccactcaccttccctccgccacaacctctgccacccactcaccacccatcacccgctcaacgccctccatgcaccatcctccccatccaccaaatctgccaccccaaacgcacgtccgccgctgcaccacctgccgccccctcacccgcacccatcttccacccgccacctttcctgccgctcaccgccgcacatcctacctcccacacctcactccatgtccacccttcacccgcgcttcacacagcggctgctgccatgcaaagctgctgccaaacccatccatcatgctcgcacacccactcacccacacgtncaacgtatccagacccattntcaaggcccgactgtacagtgcctttttgcgtccttatgccgatctggtaccaggacttaatgtgtaa

SEQ ID NO: 1522 - DNA, 663 bp, Chlorella sorokiniana
  Clone ID: LIB3602-043-Q6-K1-G6
gttctagatcgcgagcggccgcccgcgatctagaactagcccacgcgtccggcccccgccaagcctgtcaacccgctctatgagaagcggcccaagacgttcggcattggcggcgacctgccggccaagcgcgacatgcgccgctttgtgaagtggcccaagtacgtgcgcatccagcggcagcggcgtgtgctgaaccagcgcctgaaggtgccccctgccctcaaccgcttcacccgcacgctggacaagaacatggccgagagcctgttcaagctgctgatgaagtaccggcccgaggacaaggcggccaagaaggagcggctgctgaaggaggcggaggcgcgcgaggctggccaggaggttgagaagaagaagcctgtggtggtcaagtacggcatcaaccacatcacgcagctggtggagagcggcaaggcgcagtgcgtggtgattgcgcacgacgtggaccccattgagattgtggtgtggctgcccgcgctgtgcaagaagatgggcgtgccctactgcatcgtcaagggcaaggcgcggctgggcaccgtggtgcacaagaagacggccaccgcgctggcgctgacggcggtgaagaacgaggaccagcgcgagttcgccaagctggtcgagtccttcaagaccatgtacaac

SEQ ID NO: 1523 - DNA, 115 bp, Chlorella sorokiniana
  Clone ID: LIB3602-043-Q6-K1-G7
aaaaaaaaaaaaaaaaaaaaaaaaaaaaaaaaaaaaaaaaaaaaaaaaaaaaagaaaaaaaaaaaaaagaaaaaaaaaaaaaaaaaaaaaaaaaaaaaaaaaaaaaaaagggggg

SEQ ID NO: 1524 - DNA, 429 bp, Chlorella sorokiniana
  Clone ID: LIB3602-043-Q6-K1-G8
cggacgcgtgggtggccaaccccctggctgcccaggctgctgccacccccagcctgaacaacctgagcggctccgtggtggcgggcggtctggtgctgtccgccattgctgtcgccatcaccgcggtctccaacttcgactccatccgacgctaagctatgcggactggagtaccgcaccctgagaagagaatcaacccgttgattgctaggccctgcttagagtatttgctgctcagcgctggggcgttcgcgggacgccctatgtcggacaacacctgtgtgcactaaagaggaattttattctgcaacttcccgggcaaaatggaacgccccttgtagcgcccatttaaagcgcggcggttggggtgattactcgcagggtgccggtttcctttgccagccccctacccccccttccttcggtttg

SEQ ID NO: 1525 - DNA, 565 bp, Chlorella sorokiniana
  Clone ID: LIB3602-043-Q6-K1-G9
ggacaggtggatatggtcctcactagtgacttgcgcgcatatgaacaacgatccacctctggtaggacgggctcgtgtacacgcgaagcacgcgttgacatgcatagacgtcacgcggctacacggtgagcgatcgctgtatcagagacgctcgacgagactagtgaccagctggcacgtgtggctcacaatgtgatagacctttaagatgcggcacattgaggactcgagcagcatgcagatggtgcacacgtgcaagtgggccttcctcatgtttagcggcacctttggcaccgagcttaacgtgcactaggacacctcgcagagcatgctcaccttttggctcatccaattggccttcatgaaagaatatgtggggagctggcacgtgcagccggcggccgagggcggcctgaccgaggtgcggcaccggctgtcagtgcggcctatcctggcgcctgcccagaagattggtgacatcaccaagaaggtgttcaagaagcaggtggagggcattttggaggacttggctattgagctcgaacggtgaccgcatttgtgatgc

SEQ ID NO: 1526 - DNA, 222 bp, Chlorella sorokiniana
  Clone ID: LIB3602-043-Q6-K1-H10
aaaaaaaaaaaaaaaaaaaaaaaaaaaaaaaaaaaaaaaaaaaaaaaaaaaaaaaaaaaaaaaaaaaaaaaaaagaataaaaaaaaaaaaaaaaaaaaaaaaagaaaaagaaaaaaaattaaaaaaaaaaaagaatggggacgaccttgttgggaaacaattttaaggactcgaagtatatagacttgtagacatttggtttgataccagaatgaggtaata

SEQ ID NO: 1527 - DNA, 400 bp, Chlorella sorokiniana
  unsure (1)..(400): unsure at all n locations; Clone ID: LIB3602-043-Q6-K1-H11
ctctgcggcccttcatacctttgtacctttctgtatcatcttgcagcaatggcagccggctgcatctttctaacatcgtcaccggcccactcgtttgtgccatgcccacctgcctccaacgtcacccttcatcaaccctcacccaacccatccacctgccacccatccactcaccttccctccgccacaacctctgccacccactcaccacccatcacccgctcaacgccctccatgcaccatcctccccatccaccaaatctgccaccccaaacgcacgtncgccgctgcaccacctgccgccccctcacccgcacccatcttccacccgccacctttcctgccgntcaccgncgcacatnctacctnccacacctnactccatgtncaccctttaccc

SEQ ID NO: 1528 - DNA, 218 bp, Chlorella sorokiniana
  Clone ID: LIB3602-043-Q6-K1-H12
cggacgcgtaggcactagaaaataaaaccttatggtgctggggtgctagatctacgttctgctcccgctggcgggatgtattaagtggcacgctgaacgctacggttatttgctgctgtccaactcctaatgctttgatgtcaaatgcgagcactgtttctccatcactactatcggcagctactatctaaccgtggtaccgttgcctagctaataca

SEQ ID NO: 1529 - DNA, 130 bp, Chlorella sorokiniana
  Clone ID: LIB3602-043-Q6-K1-H2
gctccctaccctccgctcgcccatgccatgagccgccagtgctgctgacgcacacgggcgctcgggacacgatatatgctgcgcacctccggcccctctgatgggcaaagctgcaacagatccgcagaac

SEQ ID NO: 1530 - DNA, 464 bp, Chlorella sorokiniana
  unsure (1)..(464): unsure at all n locations; Clone ID: LIB3602-043-Q6-K1-H4
cggcctgctctgcggcccttcatacctttgtacctttctgtatcatcttgcagcaatggcagccggctgcatctttctaacatcgtcaccggcccactcgtttgtgccatgcccacctgcctccaacgtcacccttcatcaaccctcacccaacccatccacctgccacccatccactcaccttccctccgccacaacctctgccacccactcaccacccatcacccgctcaacgccctccatgcaccatcctccccatccaccaaatctgccaccccaaacgcacgtncgccgctgcaccacctgccgccccctcacccgcacccatcttccacccgccacctttcctgccgctcaccgccgcacatcctacctcccacacctcactccatgtccacccttcacccgcgcttcacacagcggctgctgccatgcaaagctgctgccaaacccatccatcatgc

SEQ ID NO: 1531 - DNA, 282 bp, Chlorella sorokiniana
  Clone ID: LIB3602-043-Q6-K1-H5
cggactgctctgagacccttcatacctttgtacctttctgtatcatcttgcaacaatggcagccggctgcatctgggtaacatagccaccgccgccctcgtttgtatcatccccacctccctacaacatcacccttcatcaaccctcacccaacccatccacctaccacccattcactcaccttccctccatcacaacctcttccacccactcaccatccatcacccattcaacaccctttatacaccatcctccccatccaaccaaatctatcaaccccaa

SEQ ID NO: 1532 - DNA, 328 bp, Chlorella sorokiniana
  Clone ID: LIB3602-043-Q6-K1-H6
gctgtccaagatcaaggtggtgcgcaagggcattgcccgcgtgctgaccgtggtcaaccagaagacccgggacgctctgaaggaggcgtacaagggcaagaagtacgtgcccctggacctgcgcgtcaagaagacccgcgccatccgccgccgcctcaccaaggcgcaggccaacgccaagactgagaaggctgccaagaaggcgcgcgccttcccgcagcggaagtacgcgctcaaggcgtgaaggccttggaagcagcccgctgcagccgtgcaggcacacctctaggcagcggccgctccggccccatgtaacttgacgcccgac

SEQ ID NO: 1533 - DNA, 719 bp, Chlorella sorokiniana
  unsure (1)..(719): unsure at all n locations; Clone ID: LIB3602-043-Q6-K1-H7
gcgctggccaggaagtacgaagaccctgtgaccagctgcatcaagaggtcgaagtgcgcgtccaagaagttcaagccggtctgcgctcgcaacgccgccactcaggacacctggggaggtttccccaacgattgctacaggaagtgcgccaatgccgcccatgactttggtgtggattgggtgaagggccactactaccgcgtgcctaagtactgcaagaccaagtggctggcctaccccgtggagtgctccacttgctccggctactactaggcaactagctgagcaaggcagggcagcctgaaacaggctcccatgtgccgacgctgctggcggcatgaggcacagcaccaagaaaggcagctttcaagggcggcgttgtgctggagcaggcatggccgccagtctggagcgccagctacagcacgttgccgcgctcgatggccctgccaaccagcctcgacgcacagctgaagcgctgcaacacacccgtgacaaaccgtgcaacagcagccacacactgcgttgcttgaacccccttttcgtgacccaagacccgatccattccgtgatctctcccatctgcaacccagcacactcccccattccctgaccccatgcatgaccctnccccctttctgaccccgaaccattccgatgaatgaaaccacccccccgccgctgtgcttgccccacacatgtgtacagatgtaagcaca

SEQ ID NO: 1534 - DNA, 405 bp, Chlorella sorokiniana
  unsure (1)..(405): unsure at all n locations; Clone ID: LIB3602-043-Q6-K1-H8
cggacgcgtgggcacctgtgcccaacccaacccgtctgactacgcgcccattgccagtaggtagcgatagcagcgcactcctccctccctgtgcggcgcggcccggctcgtgcgttcgccgctcggcccggccgccgcccctgtgtacactagcgatcaaatttgcaccactgttcgacgcgccacccgttttttttgacgcgacccgcgcaagcgcctgtaccaacagccccccgcctgccctgccgcggcgcccattggatgatgtacccagctgcgcggccacgcgcgccgattgagaagagccccaaccgatgtaacatcaccgctttgnaaaaaaaaaaaaaaaaaaaaaaaaaaaaaaaaaaaaaaaaaaaaaaaaaaaaaaaaaaaaaaaaaaaataa

SEQ ID NO: 1535 - DNA, 535 bp, Chlorella sorokiniana
  Clone ID: LIB3602-043-Q6-K1-H9
aatcgcgccaagcacagcctcgcagcgcacgcttggggttgacggcgggagctcggctcgcggcctgcagagctgtcttgagcggctgtggcttcgccattgcaatcccaagtattcataaaagcagcggcaggcagccagcatggtgaccaagcgcgggaatgtgctcaagaagatgaagtactacctcacgctgaacccgcctgagaacattctgccgcagaagaagctgaacgcgactgcccgcgcggtgcttgaagccaacaagagcgtgcaggcggggctgagcgaaacaatggagaacgtgcagcagcggctgctgtacagctggctgcgcatgcagcgggcacgcagcggcatgtaacatcgcgctgctgcccagcgtgcacaccggtgtggaacgctgcgtactgctggcttgcctcttgcggcgcgacggcagcggtgtgtgcccctaagcttgccgccgcagtcgctgccggctgctccgagcttgccgtcgctcccctctttgctcctctctgctgttttcatc

SEQ ID NO: 1536 - DNA, 266 bp, Chlorella sorokiniana
  unsure (1)..(266): unsure at all n locations; Clone ID: LIB3602-012-Q6-K1-A1
gcacccccgagcgctggcggctggctggaatcggcactgaaaggctggggcctcggctggctggccatccgcacattcgaggtgccgcacctcaaagcagcttgtggcgtgctgctgagtcagcaggagttgcgtcctgcgtttagacgcctgagaacggattcccggcgggtgatttttgtgcccgttcgacctcccccttcatgactcccgatcgacctccccctnctnnncnctctcacactcttcacngtttgtttactttc

SEQ ID NO: 1537 - DNA, 528 bp, Chlorella sorokiniana
  Clone ID: LIB3602-012-Q6-K1-A10
aaaaaaaaaaaaaaaaaaaaaaaaaaaaaaaaaaaaaaaaaaaattaaaaaaaaaaaaaaaaaaaaaaaaaaaaaggaaaggggggccgccgttttagaagccacccttcttacccccccctgcctgcggcgtcctttttcttttgtggcgccaccttactttaatttgccgcccgttttacaacaacgtcgcggcggaaacccccctgtcgccccccaaattaaccgccttgcacatcatccccctttcggctgccggaatattaacgagggggcccccactggtctttctcaccattagttcagcctgatgggcgcctggtgggcccccctttgcagcgcttcattaaccgcgggggtggtggtgaccccccccgtggccccttttctactcgccggccccttacccccccctccttgcgttttcctccctttcttacccccctcggccgccttttttccccgagatgtaattagtgggcgccctctttgggggtttttatttgttgttctgcaccacctcccccc

SEQ ID NO: 1538 - DNA, 384 bp, Chlorella sorokiniana
  unsure (1)..(384): unsure at all n locations; Clone ID: LIB3602-012-Q6-K1-A11
nnaaaaaaaaaaaaaaaaaaaaaaaaaaaaaaaaaaaaaaaaaaaaaaaaaaaaaaaaaaaaaaaaaaaaaaaaagaaaaaaaggggggaggaaaaagaggaaaaaaaggggggggccgcgngaggggaaccaaggggggcgccgggggggggacaaaaaaaaaaccaaggggggggggccaaacaaaaacngaagggggagaacccagaagggcccaaaggggaaaaaccgggaggaaaccaaactgaagggagggggggaaaaaccaaagagggccggagggagaaaaagcaaaaagggcggggcggacggaagggaaaaagggaggcgcacggggaagggaaaaaaggagcggccggggagggggaaaaaaaaaggggggg

SEQ ID NO: 1539 - DNA, 635 bp, Chlorella sorokiniana
  Clone ID: LIB3602-012-Q6-K1-A12
ggcctgttctgccagcgccgcaaggaggccgacaggcacgtggtgaccatcgacggctacgaggacgtgcccgccaacgacgccgactcgctgcacaaggcactggcccaccagcccgtggcggtggccgtctgcgcctcccccgccatgcagttctactcgagcggcgtgatcggcgacgaccagtgctgccaggacctgaaccacggcgtgctggcggtgggctacgacaacagcggcgaccacccccactacattgtgaagaactcgtggggcgacagctggggcgagcagggctacttccgcctgtctgccaagtccaaggacgaccgcggcgcgtgcggcgtgctcaccaccgcctcctaccccaccaagaagggcaccaccaaccccgaggtcccctccttctgcggctactttggctggaccgagtgccccgtgcactccacctgcacctgcaactggaacctgtttggcctgctctgcctctcctggggctgcgacgccggcgcgcagtgagcaccacgcagctaggcggatgtggcacatgccacacgctctcgactgtgccgctgctgctggcgctgcagcatccacccatgtcccaccatgcacgcacagtcagctaaagcgca

SEQ ID NO: 1540 - DNA, 285 bp, Chlorella sorokiniana
  Clone ID: LIB3602-012-Q6-K1-A2
ggagctgcacttccgctactacccccagccagaccagcacccatgcaacctggccgactcgctggccgtctgagcgcggcgccacacaccagcgctgccccttgcgctgcaatcgccgccccgggccctgggtttgcaaggcggcatgcggtgcgctgtgctcatggctggcgctgcaacctgttagctgcggctgtaacatacaggcccaaagaaaaaaataaaaaacacagagaaaaagcaataatgaacagacgtgacaatgcaacaagaaaaaagcctcag

SEQ ID NO: 1541 - DNA, 491 bp, Chlorella sorokiniana
  unsure (1)..(491): unsure at all n locations; Clone ID: LIB3602-012-Q6-K1-A5
gtggagtgggcaattcgttcgcgatggtgaacgtcccgaagaccaagaaggccttctgcaagggcaaggagtgccgcaagcacaccatgcacaaggtcactcagtacaagaccggcaaggcgtcgctctacgcgcagggcaagcggcgttacgaccgcaagcagtccggctatggtggccagaccaagcccgtgttccacaagaaggccaagaccaccaagaagattgtgctgcgtctggcctgcaccgtgtgcaaggcccagcacatgcacgccatcaagcgctgcaagcacttcgagatcggcggcgacaagaaggtcaaggggctatactagtaaaaaaaaggagagcggcaggcggagagcatgaccgagaaatggaggcagcggcgcccgctcaccctgggcggcctgctccccgcccggcgcctcgctttggccgcctctggccactcgtacgcctccttgtncatgcccttgtgcttcctgagc

SEQ ID NO: 1542 - DNA, 560 bp, Chlorella sorokiniana
  Clone ID: LIB3602-012-Q6-K1-A6
attggcggcgacctgccggccaagcgcgacatgcgccgctttgtgaagtggcccaagtacgtgcgcatccagcggcagcggcgtgtgctgaaccagcgcctgaaggtgccccctgctctcaaccgcttcacccgcacgctggacaagaacatggccgagagcctgttcaagctgctgatgaagtaccggcccgaggacaaggcggccaagaaggagcggctgctgaaggaggcggaggcgcgcgaggctggccaggaggttgagaagaagaagcctgtggtggtcaagtacggcatcaaccacatcacgcagctggtggagagcggcaaggcgcagtgcgtggtgattgcgcacgacgtggaccccattgagattgtggtgtggctgcccgcgctgtgcaagaagatgggcgtgccctactgcatcgtcaagggcaaggcgcggctgggcaccgtggtgcacaagaagacggccaccgcgctggcgctgacggcggtgaagaacgaggaccagcgcgagttcgccaagctggtcgagttcttcaagaccatgtacaacga

SEQ ID NO: 1543 - DNA, 315 bp, Chlorella sorokiniana
  Clone ID: LIB3602-012-Q6-K1-A7
cggacgcgtgggcggctgcgggaggacgactgatgggccgccattgccaagcaccaattgccaagtcgcctgcgagctcgtttgcgagacggacagaacttctagctgctgcctagttgccggctgcgggattgacaggcagctgccgtgcacgcagctgcggtgcacctgcacgactcacaccgaccgcttgacccgtgtgccgctgttttttgctgctgctgtgcgctctcacactcttcacggtttgtttactttccaatctcacaagtcgactttgttcaaccgcaacaccacactcttgcatctttcaat

SEQ ID NO: 1544 - DNA, 633 bp, Chlorella sorokiniana
  unsure (1)..(633): unsure at all n locations; Clone ID: LIB3602-012-Q6-K1-A8
gccagggcgcacagggcaggacattcctgacgatgtcattctggagctggcccagcacaagaacttcctcggcgtgaaggagtgcacaggcaacgcacggatcgagaagtaccacaatgctggtgtgctgtgctggagcggcaacgatgatgaggcacatgctgggcggcatcagcatcatgcgcagggtgtcatcagcgtgaccagcaatgtcatcccgggcctgatgtcaagcctcatgaacgggcgtgacgatgcaacggcagagagcctcaaggagcttattgcctggctgttctgcgagcccaaccctatcccgctgaacaccgcgctggccatgtgtgggcttgttcgcccgattttccggctgccctacgttcctctgtcgcgtgagcagcgcgagcatggtgccaagctgctgcgggcagtgcagcaccacatcccaggctgcaaggaagtccgcgtcatggatgacgaggagttcatcctgatccactctgctggctattgaccgtgtgaccctctntgacagagaaggggaggttgaaagtccaccgccgctgctgctagcactgtcacgctntgccacagtaatgtacagctcataagtgccacatgtaactctggaaggac

SEQ ID NO: 1545 - DNA, 311 bp, Chlorella sorokiniana
  Clone ID: LIB3602-012-Q6-K1-A9
ggccacctggacgagagcggcgtgtacaccaactcgttctccaccttcgcgctctgcggccaggtccgcgtcaagggcgaggctgacagcgctctggaccatctgtgggccaagaagcgggctgagatcggccagtgaagcgctgctgagttctagccgccagccggctgggctacacagctgccagccggcggtgggccagccagccttgggtcggccagtgatgcgctgcgaagcaaagtgctgagcgggcgggcgctccggcgcgccgccgccagccacgcagtgcaagctgtaacgcgcctccttgc

SEQ ID NO: 1546 - DNA, 323 bp, Chlorella sorokiniana
  unsure (1)..(323): unsure at all n locations; Clone ID: LIB3602-012-Q6-K1-B1
cgctgccgngaccctggtgctggcgcccgccgccaacgctgctgaggcccgcgcggaagtgaagagcgtggtgtgcgccagcaaccccacctccaagatctgcctcaaggacagcgccaagaactgaggcgtgccagctggactgagcgagcgctgagcccttgctggccgcacctgaggcaggcagccattgctgactgccggggggcaccgggccgccacccgctgcccggcagcatgggcgaggcggcgtgagaaagagaggacttgtgcactgccacacagttttttggacacctgtgctgtaacatatacttgaggag

SEQ ID NO: 1547 - DNA, 607 bp, Chlorella sorokiniana
  Clone ID: LIB3602-012-Q6-K1-B10
ctgttgatgatctgcgaggaggcgcaaaagcttgatggcacagtgcctggcgtgtcgcttgctgtagagcagatctttggcattgaggtgcatgaggaggcgcgctgcagtgatagcacttgcggcaaggtttcacaccggactgcctacacgcagtacttctactcggctgaggccagcgcgctgtgcgtgctgtttgagttggagcccaccatgggccagcgcctgtgcgagatagctgaccaggagatcaagcattgcgacacagacctgggcggctgtgggcggcgcgccatcgtgaaccgcttgatgaagcacgcaccgagcgtgttcccgatgcgggtggactggaagacgctctccaccgagcctggagccgtggcttgcgcgctggcggcgctggacgatacggtggacctgggtgagatttaccagggcgtggatcaaggcgtgcaccgctacgtgctgcgcttcctggtgggctaccaggaccagcactaccaggcactggtgctggaccgcgcggcgcacagccggctcaagtttgatggcacgcctggcagcagtgtgggcagctgggccgatgtgcagcgcatgtgccaggcag

SEQ ID NO: 1548 - DNA, 393 bp, Chlorella sorokiniana
  unsure (1)..(393): unsure at all n locations; Clone ID: LIB3602-012-Q6-K1-B11
aaaaaaaaaaaaaaaaaaagaggaacaaaaaaaaagaaagaaaaaaaaaagaaaaaaaaaaaagaaggaaaaagaggaaaaaaaaaaaagaggggcaaggagaaaaaacaggggggggccggccaagggggcccaggcnacccaccgggggggggggacgcaaaagcnctactaggggggcgccaaaacgcaaagcaggggccgggganaaacaacgccgggaggggaaaaaccggggggagccccaacaaaagggcgggggggaacaccccccnaccgccggggggggaaaaagggaaggggcccgccccgaccgccctaccaaacagagggccaaccggaagggcaagggggccgccccctgggggggaccataaaggggggggggggggg

SEQ ID NO: 1549 - DNA, 438 bp, Chlorella sorokiniana
  unsure (1)..(438): unsure at all n locations; Clone ID: LIB3602-012-Q6-K1-B12
cggacgcgtgggtgaagaacgaggaccagcgcgagttcgccaagctggtcgagtccttcaagaccatgtacaacgacggcccccgcgtcagctggggcggcggcatcatgggccccaagagccaggcggcgcagaagaagaaggagcgggctctggccaaggacgccggcctccgcgtgtaagcgggcagcacccacctgccgctcaccgcgcgccgggccgggacagcccggccagcagggtcggcgtgccgcgcgtgggcgcgggcgccggccgggtgttgacagccgagtgcgccgggcggcggncgcagctgggccagcgccggcgcccgcgattctcctactgctcttgcgccggctgtaacacccatactcgcaaaaaaaaaaaaaaaannaaaaaaaaaaaaaaaaaaaaaaaaaaaaaaaaaaataaaaa

SEQ ID NO: 1550 - DNA, 544 bp, Chlorella sorokiniana
  Clone ID: LIB3602-012-Q6-K1-B2
atgctgctgtcgggcatgccaccgttttatgacaagagcgagccgcgcctgctgcggtccatcatgagcggcaagttctccttcaaggaccctgtgtgggagccggtcagcgcggaggccaaggacctgatccgcaagctgctggtggtggaccccgcgcagcgcctcacgtgcgagcaggttttggagcacccgtggatgcaagcttctggtggagcggaacatttgccacgcactgcagcgcgcatccaggacgccatcatgcggcggcgcagcagcagccgactgacgctgcagcaacgtatcagcgaggcaattgatgcatctaggtcagtcaccccgactgtcagccgcacagtcactcctgccaccgagtcgttgaaagcagctgcagcggcagcaagcctcgcatgcggcagcccttgcggcggcagcagccccccagccggtggctccccccggtttgacgccgcagcatacagtcagccgctgcacgcagctgcggtcagcagcggcagtcaagcagcaggaagggaggcatgaa

SEQ ID NO: 1551 - DNA, 542 bp, Chlorella sorokiniana
  Clone ID: LIB3602-012-Q6-K1-B3
gtctttcatgcgcagcgtgtatgtggaccctgagagctgcacagctgtggtggacggcggtgcgctcgcctgcgacgtagacgctgagacggcgctgcacgggctggcggcgcctctgggcgtgtgcagcgtggtgggcgtgggcggcttggcgctcaatggtggcctgtcactgctgtcgagggcggtcggagccacagcggacaacattctggaggccacaatggtgctggctgatggctctgtggtgcacgccaccgccgaccgcgatccagagctgctgtgggcgctgaagggcgcaggcactgccctgggcgtcgtcacgaagctcaagctgcagctgcacgatgtgtcaaacttctattgcggcgtgctggcttggcgggatgagccggggcacgccacttacagggcggtgctgcgctttgtgcgagacgtgttggtccccaacccatgcatcggtttcaacctggcccgagtggtggacccagcaatcgggccgctgctggtgtccctggtggtggtgaccggcgaagggagcg

SEQ ID NO: 1552 - DNA, 195 bp, Chlorella sorokiniana
  unsure (1)..(195): unsure at all n locations; Clone ID: LIB3602-012-Q6-K1-B4
tgttgagcgatgccgcctgtgctgcggcagatttcatgcctgaaaccgatttccttgttgatgcacgcctttcatgcggcggtgttaccgtcaacagaataccatgtaaagaacaaangggaaaaaaaaaaaaaaaaaaaaaaaaaaaaaaaaaaaaaaaaaaaaaaaaaaaaaataataaggggnggncgatct

SEQ ID NO: 1553 - DNA, 494 bp, Chlorella sorokiniana
  Clone ID: LIB3602-012-Q6-K1-B5
gccggagctgcgccaactgtggcgcgcactgctgggcggcgttggcatcgaggcctgcggtctggatgcgccttgggtgctgggcgtggccatggccctggccatcaatgactttgctttccagcaagcccagaccggcctgccgctcagcctggatgaaatggccccgctcgaggctccgcttgcactgctaggcaccgcgctgaagctggtgccagagccgacgcttgcacgcagcctggcccaaaccccagagctgctcagccagctgaaccgcgcagttgcgggcttacaagcagggatcgctctggacgctcaacggggagccctgaaccacctgtgcctgccgcccaacggcgctctggcagcactgtggccggtgctggcctccctggcgccgcacctgccggggctgcaagccaaccagcgcgccacgctgctgcaagccgtggcaccgctccccaacccgggtacacccctggagtatatgggac

SEQ ID NO: 1554 - DNA, 395 bp, Chlorella sorokiniana
  Clone ID: LIB3602-012-Q6-K1-B6
tgcttgtgctgggctttttgctagtaggcgtggaaaacatcggaatacaaatcgagaaccccgtgcgtgttctcccgatgcgccgcttctgcgtcggcaaccgcgcagcggcgctgtcattggtccggcactatggcgaagtgcagcaggcgattgaggccggtttgctggcagcggcagcagcagcagcagctgaatcaccgacagcagcatttgcaggtggcaaggggcatgcggcagccaatggtggccatcatagcagcagcggcggagtgcaggcgggcttaccactggcggcgccgcccgcccccgccatgacacggggctaggtctggtgtgctcgcacagttgtgtacactgaggaatgaactggctgtgtaaggcattgccacctt

SEQ ID NO: 1555 - DNA, 528 bp, Chlorella sorokiniana
  Clone ID: LIB3602-012-Q6-K1-B7
cggacgcgtgggatggcttacctcaagatgatgggcgaggtgtacgacacctttgggctggactacaagatggcgctgtccacgcggccggagggatacctgggagagctggaggtgtggaacgaggcggaggcggcgctggaggaggcgctgaatgctaccggccgcgagtgggagatgaaccccggcgatggcgccttctatggccccaagatcgacatcacggtgtatgacgccctgcgccgcaagttccagtgcgccaccgtgcagctggacttccagctgcccatccgcttcaacctggagtaccaggcagacgacggcggcttccaccggcccgtcattgtgcaccgcgccatcctggggtccgcggagcgcatgtttgccatcctgactgagcactggggcggcaagtggccgctgtggatctcgccgcggcagtgcatggtggtgcccatctcggaggctgtgtacgactacggccaccaagtgcggcgcaagctgcgggcagcgggcctgcacgtggac

SEQ ID NO: 1556 - DNA, 532 bp, Chlorella sorokiniana
  Clone ID: LIB3602-012-Q6-K1-B8
gctgcccatcgatgggtgctccatcaacccggcccgcagcttgtgccccgcaatcgtgagcggcacctggccaaccagtttctggatcttcgtggtgggcccgttcctaggcgccattgcctcggtgccgctgcacctgttcttcgcatccaagtggtttggtggcagccgcggcgcatcccacgatcccctggctctcagcgctgcctctggcggccagggcggcaagagtggcagcggcggtgctccgagtccggaccaggggcgtgggggagtggcccgcggcggcggcgacagcgcttctgccacccctcgcatgctggctgccaacatggtgtgaagtgcttcagggagcctggctgagaggcatgaccagctgctggctgagaggccgtagctcatgacatagcatggcatccagatcaaaatggcggcgctgccggccaccagcctgcctgattgcatgtgcaaggcacacacgatgctgagctgttgagtgtgtgctgctctgctttatggtgcccctgcaagt

SEQ ID NO: 1557 - DNA, 584 bp, Chlorella sorokiniana
  unsure (1)..(584): unsure at all n locations; Clone ID: LIB3602-012-Q6-K1-B9
cggtttcccggtcgaccacgcgtccggcagcacttcctgtgccggcacaggacataagcctgcacacctgccggccgtgcccgccggtgcatggcagcacagcaggtgcagcgtggccgggtggacatccagaccagcctgggcagcgcccatgccagcctgagcagcatgccgttaccacttccctttcataccctgaaaactcaccctcaataaacagttctcaagatgagcctgcgccgctgtaggcgggttgtgctcctttgcgcatccagctgcatgcctccagagccacattgttgtttatgtgctggcgacatgcgcaggtgacccctagctgcacctcccacccggccaacttcctttcattgcactgttccagcccgaaaccaacagaactccattcttctagtgcacagccctctgttttcccatttttccattgttactacctgcttagtgcgccaccagtctgctactccatctgctcatcagcgtgccctaccacccttgcccnctctaagtgaagcctggcccttctccttctgacgactgcttgngaaataatttgcaaaaaagcagtc

SEQ ID NO: 1558 - DNA, 535 bp, Chlorella sorokiniana
  Clone ID: LIB3602-012-Q6-K1-C1
cgcgctccggtttgggcggcgccaccgccaccgcctggctgccgcggagtaggatcttgtggagcagggcagcagccctgtgtgggcctggggcggcgccgccctgctcttcgcctacatctgcctgctgctgtggcaggtgctgctggtcgtgtacagttgggcggggcggggcggcaagctgcccctcatgtccaaggacgcagccatggagtcgagcaccgccttcactgaggccagcctggccagtgagctgtgaggaggggcagccagccgcatggcgagcaacttgatttggcagccagcagcaacgcttggcggagggtcaggcaaattaccaggcgtccatcagcctgtgctcagctggcctgctgaatgcacacagcaggcctggctggcgctagcgagcggtgagatcgttggctcaattcaccagctgcccaccagccggcaatgttatcaccttgtgtacctgctcgcaaagcaagcgcactctcaatagacttccctgctgcaattcgtttggtggtgcatg

SEQ ID NO: 1559 - DNA, 559 bp, Chlorella sorokiniana
  unsure (1)..(559): unsure at all n locations; Clone ID: LIB3602-012-Q6-K1-C10
ttnntttttttttttttttttttttttttttttttttttgctgggggctatgttacagccggtaatggtacatggacaggcaagaggatggggaaaacacaacaagagccgttgatcgctgttcggttgtgcgacagcacctcgattgtttggtgccatcaagtgaggcgcgacacgtgcaacgatgcatgcctgccacgcgcagcgtgcgcttggcaaggagagtggggtagagaggcagagggaaaacgggcgcttgacgagaagggggcaggctggttggttggggtcttgcgttgcgctagaataggatacaaaaagcgtgtgcgtgtgtgggacaggacgtgcattgtatttggggcagggctgggacaggaaaccccaagccattcctataagcaactgcaaaaactggtctgttgtgcaacaagctggattggcccaaaaaaagcggggaagcgccaagcggtagctggtgcancgcgagaggtgagagtggcaggcaaaaaacatggcgctacaatgaacgcgtggcaggcgccagcgtggtgggcttcaa

SEQ ID NO: 1560 - DNA, 345 bp, Chlorella sorokiniana
  Clone ID: LIB3602-012-Q6-K1-C11
acgtggtgttccaccgccccaagaccctcgatcgcaaggggcggccgcaagttaccccgcatgagtgcgcacggccaggcccgactggatgagcactccatgatcaagtaccccctgaccactgagtccgccatgaaaaacattgaggacaacaacaccctggtcttcatcgaggacaagcgcgccgacaagaatgcgatcaagaaggctgtggcctcgtctgtacgacatccagaccaagaagatcaacacactaatccggcccgacggccagaaaaaggcacacgcgcgtgtgaccgccatctacgacgcgctggatgtggccaacacgacaggcgggctcta

SEQ ID NO: 1561 - DNA, 596 bp, Chlorella sorokiniana
  Clone ID: LIB3602-012-Q6-K1-C2
agcacctggctgtggacatgttcctgactgaggaggagggcaagaaggtgctcaaggtggactgccactttggcaagcgcaagagcctggcgtgcatccgcacctgcacctcgcacgtgctgaacatgatcaccggcgtgaccaatggctacgagtacaagatgcgcctggtgtacgcccattttcccatcaacatcaacatcgagaacaagggcggcaaggtggagatccgcaacttcctgggcgagaagattgtgcgcgtggtggacatgctgccgggcgtgacctgcgagcgcagcgccgccgtcaaggacgagctgatcctgaccggcaacgacatcaagctggtgtcccgcagcagtgcgctgatccaccagaagtgcctggtgaagaagaatgacatccgcaagttcctgagacggatctacctcagcgagcgcggcaccctggtgaagcccgagtaagcggagcccgcacgttgcagtagaggtggaggcacgagcgcagtagtgcgcagcgctcacgcccgcgccggcggagcattagcggcggcagacggccccagctgcggcgctgcacgccatgtaacgcacacg

SEQ ID NO: 1562 - DNA, 586 bp, Chlorella sorokiniana
  unsure (1)..(586): unsure at all n locations; Clone ID: LIB3602-012-Q6-K1-C3
cggacgcgtgggagaacggccgctgggacctgtccctgttcaagggtgcggacggcgagaccgactgggacgctgtgattgatgctgagatggctcgccgcaagctgctggaggactcgcccatcccttgcaccaacgaggaccccgtgctgtttgacactgcggagatcccctggtgggcgtgggtgcgccgcttccacctgcccgaggcggagaagctgaacggccgcgccgccatggttggctacgtgctcgcgctgtttgtggaccagctgacgggcgtgggcctgctggaccagcaaaactcgttcctgggcaaggtgctgctgcacgtcgccgtgtttggcatcctgctcatccgctcctcctctgacattgacaagttccgcggcctgatcgacgaggccaccttctacgacaagcagtggaacgcgacgtgngagggccaggagcggcccagcgagtgagccgcgtgacgaccggtggcggcagcaggcgcaccattctgcgcctctacctgccaggtgccaccttcggcagcagcagcagcagcagcaatgccaacatgaaacgttacacgtcactc

SEQ ID NO: 1563 - DNA, 579 bp, Chlorella sorokiniana
  Clone ID: LIB3602-012-Q6-K1-C4
ctagttctagatcgcgagcggccgctcttttttttttttttttagctaatacttcttacacgaacccgggtatatgtgtgggagcatccgcctgccgttatgggcaccggcgctgtcaacaggagatctgtaggcatcgaacagataagtgtgggacaacggcaagcagataagtgtggaaggagggtgcagatgtacaggcgtgcaccagtgaggggggaattttaggaatcgaggacaaatcgggggtggttcttgggggttgcaaggcagagtgggcctggtctggtctgaatgaattgcaaagagtgactaggagggtcattcagctacgcaacgccatcgggcgggcgcatggttgctggcacttcattcagtagccagagaggcggcgggagtggtagccaccggacaggcggcggccgtggcgggtgggcaggggcactgccgcggcggccttcgcacgagcggtgaacagcgagcgcgccagggggattccattctccagggggttggtcacgctgctcagcttgcggtagccgctcaggcggcgatagccggtgagctggcggccagtga

SEQ ID NO: 1564 - DNA, 615 bp, Chlorella sorokiniana
  unsure (1)..(615): unsure at all n locations; Clone ID: LIB3602-012-Q6-K1-C6
gcttgggttggggtagagcactagaagcagctcaagatgccgcccaagttcgaccccaacgacatcatcgaggtgtatgtgcgtgccaccggtggtgaggtgggcgctgcctcttccctggcacccaagattggccccctgggtctgtctcccaagaagattggtgaggacattgccaaggagacggccaaggagtggaagggcctgcgcgtgacctgcaagctgacggtgcagaaccgccaggccaaggtcaccgtcatcccctccgcggcagccctggtcatcaaggcgctcaaggagccggcgcgcgaccgcaagaaggagaagaacatcaagcacaacggcaacctgacgctggaggatgtgtatgaggtggcgcgcgtgatgcgcgaccgcagctgcgccgccaccttctcgggcaccgtcaaggagatgctgggcacctgcgtgtccgttggctgcactgtggagcacgaggacccccgcgacatccagaccaagattgacgagggcgaaatcgtgtgccccgaggcgtgagcacgcccncggcacacagcagtagcggcctagcagcagcagtgtagctgtcatgtaacacactgctgctgnnnaaaa

SEQ ID NO: 1565 - DNA, 571 bp, Chlorella sorokiniana
  Clone ID: LIB3602-012-Q6-K1-C7
cggacgcgtgggagaaggtgctcaaggtggactgccactttggcaagcgcaagagcctggcgtccatccgcacctgcacctcgcacgtgcagaacatgatcaccggcgtgaccaagggctacgagtacaagatgcgcctggtgtacgcccatttccccatcaacatcaacatcgagaacaagggcggcaaggtggagatccgcaacttcctgggcgagaagattgtgcgcgtggtggacatgctgccgggcgtgacctgcgagcgcagcgccgccgtcaaggacgagctgatcctgaccggcaacgacatcgagctggtgtcccgcagcagcgcgctgatccaccagaagtgcctggtgaagaagaaggacatccgcaagttcctggacggcatctacctcagcgagcgcggcaccctggtgaagcccgagtaagcggagcccgcacgttgcagtagaggtggcggcacgagcgcagcagtgcgcagcgctcacgcccgcgccggcggagcatcggcggcggcagccggccccagctgcggcgctgcacgccatgtaacgcacacgttagc

SEQ ID NO: 1566 - DNA, 109 bp, Chlorella sorokiniana
  Clone ID: LIB3602-012-Q6-K1-C8
tggctctttagcagcctcgtttttctgtactttgctccaagctgtatgcctgcagagcccgatacaatcgctggcccacatccctccacctatgtaacgactgatttct

SEQ ID NO: 1567 - DNA, 472 bp, Chlorella sorokiniana
  Clone ID: LIB3602-012-Q6-K1-C9
gtcgaggtagccagcacgatggccaaaatcaaggcccatgagctgcgcggcaagggcaaggaggagctgctgcagcagctcaaggagctgaagcaggagctgagcggcctgcgcgtggccaaggtcaccggcggcgcccccaacaagctgtccaagatcaaggtggtgcgcaagggcattgcccgcgtgctgaccgtggtcaaccagaagacccgggacgctctgaaggaggcgtacaagggcaagaagtacgtgcccctggacctgcgcgtcaagaagacccgcgccatccgccgccgcctcaccaaggcgcaggccaacgccaagactgagaaggctgccaagaaggcgcgcgccttcccgcagcggaagtacgcgctcaaggcgtgaaggccttggaagcagcccgctgcagccgtgcaggcacacctctaggcagcggccgctccggccccatgtaacttgacgcccg

SEQ ID NO: 1568 - DNA, 655 bp, Chlorella sorokiniana
  Clone ID: LIB3602-012-Q6-K1-D1
gcgagctggaggtgatccacgcccgctgggccatgctcggcgccctgggctgcgtgacccccgagctgctgcagcgcaacggcgtcgccaacttcggcgaggctgtgtggttcaaggctggcgcccagatcttccaggagggcggccttgactacctgggcaacccctccctgatccacgctcagtccatcgtggccatcctgctgacccagctggtgctcatgggcctgattgagggctaccgcgtcaacggcggcccggccggcgagggcctggatgccctgtaccccggtgaggccttcgaccccctgggcctggctgacgaccccgacaccttcgctgagctgaaggttaaggagctgaagaacggccgcctggccatggtgtccatgctcggcttcggcgtgcagggcctgatcacccgcaagggccccattgagaacctggctgaccacctggcggcccccgacgccaccaacttctgggtggactacgcccccaagtccgccggcatcggctactaagctgtttccgtcgctagactggcgccgcccgctcggccgcccgctgagtttacggccactcgcggcaacaggcagcagcggcgtctgtactttctgactcctccggcgattgctggtggcgcaccttgctt

SEQ ID NO: 1569 - DNA, 488 bp, Chlorella sorokiniana
  Clone ID: LIB3602-012-Q6-K1-D10
ccccagggccgcaagggcaagggctacggcgtgtaccgcttcgccaacaagtacggcgccaacgtggacggctacagcccgatctacacccccgacacctggtccgagtctggcgactcttacaagctgggcaccaagggccttattgcttgggccggcctgattgtggtgctgctgggcgtgggcatcaacctggtgatctccacctctgccctgggccagtaaatggcgacgccccccgcgtcggcagcagcagcagcagccagcagcattcccttgcagctaccccccgagaagacaaaccctcaccctaccctagctggcggcgtcaccatgcgccgctcccttgctttccgtttcactgtccctttcgttcctgcgttcgtttagtggaggaggcccgcctgtgtacctgacctggtggccgcgtttttggttgagcggcttgtagccgcacatctgtattatcagctacgtcatggcaatcg

SEQ ID NO: 1570 - DNA, 506 bp, Chlorella sorokiniana
  unsure (1)..(506): unsure at all n locations; Clone ID: LIB3602-012-Q6-K1-D11
cctccttgtttcttgccctgcaccagatctccaagcaacgatgcaggctgcccagctccaggctcgcgccacccggcccgccgtggctcgccgcaccaccgtgcgcgtgcaggctcagcaggccgcgccccgcgctcaggcccccaagccccagcagtttgctgctggcctggctgccgccttcgctgccgtgaccctggtgctggcgcccgccgccaacgctgctgaggcccgcgcggaagtgaagagcgtggtgtgcgccagcaaccccacctccaagatctgcctcaaggacagcgccaagaactgaggcgtgccagctggactgagcgagcgctgagcccttgctggccgcacctgaggcaggcagccattgctgactgccggggggcaccgggccgccacccgctgcccggcagcatgggcgaggcggcgtgagaaagagaggacttgtgcactgccacacagttttttggacacctgtgctgtaacatatacttnggggg

SEQ ID NO: 1571 - DNA, 343 bp, Chlorella sorokiniana
  unsure (1)..(343): unsure at all n locations; Clone ID: LIB3602-012-Q6-K1-D12
cccacgcgtccgctcatgctcctcttcaaacgaccaccaataaacaccgccccatcaagctgaaacccatgccccctgcccatcacaagacacctcccatggccctgaccgccccaacccaatcgccaccatcactctcggttcataccatctacccatgcagcagcaggtgccgcaatgctggcagtaacagtctgctgcccctccgctgctgttctgccacgcaccagcaccagcctgctgcacaccccaccgccatgtatgccatcgccgcctgccaactcgttgtatgccagcagcctttggcactcggctcagtgcatgagttgtaaatgtcacagnt

SEQ ID NO: 1572 - DNA, 568 bp, Chlorella sorokiniana
  Clone ID: LIB3602-012-Q6-K1-D2
attgtgaccacgccccagaagctggccttcatcgacgtggccaagggcatccgcatgttcgctaagctcatggtgccgtgcgtggcggtggttgagaacatgtcctactttgaggcggacggcaagcgctacttccccttcggccagggctcaggcgagcgcatccagaaggagtttgggctgcccaacctggtgcgcttccccatcgtgcccgacctgtcggccgccggcgacaccggcaagccagtggtggtggaggatcctacgggccccacggctcaggccttcctggagctgggtgcggcggtggtgcgcgaggtggccaagctgcgcatggcgcccaagaacagcgtgcggtacgaccgtgagctgggcgcctttgtggtgcggctgcccaacggccaggaggacttcctgcttgatgccgcggtggtgcgccgcaacgacacatccgccctctccatcaacgagtggacgggcgagaagacgctcatggacgaggacattcccgacaacattgagccggccgggtggcagccagtgagcaactacgctgtgcagatcacgt

SEQ ID NO: 1573 - DNA, 183 bp, Chlorella sorokiniana
  unsure (1)..(183): unsure at all n locations; Clone ID: LIB3602-012-Q6-K1-D3
agcgaacgaagaaaagaaagaaagcaaaaaaaaaaaagaaaaagacacacaagaaacaaaaaaagaaggggccgggcgacacggggcagggaacacgcccccccncacagcaacagcccgcaccgcccccggccaccacaaagcacangcgcgcgcccacagcaagcacgagcgcaaacgaaa

SEQ ID NO: 1574 - DNA, 517 bp, Chlorella sorokiniana
  Clone ID: LIB3602-012-Q6-K1-D4
gcggttcgcctaagaagcagccctgccgcgccagcatgttgtcctgcgtgctgcgacgcagcgggctgccgctcctggggcgccgcttgggcgcgccgctgagcgacggcgccaccgccgccttcaccagcacggccgccgatggcaaagccgacaagaagcgcgacccggcagatgacttcatcttcaaggagaagtgcaagggcacgcggcaggtgtccaaggacgcagaggcggtgaagcagcggctgcgccgcaccaactttggcgcgccgcgcaaggaccgtaccggcgcgctgggcgctgtggccccctccgcctcagaggaccgctccacacagccgcaggcgggcagcctgcacaccgcagcggccagctgggcggcgcagggcggcggcagtgcagaggacgtggctcaagagctcgttgagaaagagcgacgacgggcgggaggagctgcgccagggcagctttgacctggaccgaaccgccgagcgcattctggaggaggggacca

SEQ ID NO: 1575 - DNA, 78 bp, Chlorella sorokiniana
  Clone ID: LIB3602-012-Q6-K1-D5
aaaaaaaaaaaaaaaaaaaaaaaaaaaggacggacgaacaaaaaagaaaccaagcaaacaaacacacgcaagcgaggg

SEQ ID NO: 1576 - DNA, 454 bp, Chlorella sorokiniana
  Clone ID: LIB3602-012-Q6-K1-D6
gcagcagcggcagcggcgggcagagcagtggcaggcacgagttggtgaccgtttggcgtgacaatgacttcccgtactacctggagcccggcatcacgcacgtcaacctgtgggccaaccgcccgctgagccggcaggaggtagagcagcagattgcgcagcatgtgccgcccggagcagagacactttggtttgtcaacccgccagttctgcaatcggtgccagccatctggcatgcccacatccttgtgcggcagccagcaggggccgcggcaccgcagcagcagcagcagcagcattcaacagcagtgtgatgagtagcagccggtggcgcaggcggcggcagcagcaggagcggcagggaacagcatatctggcctgtgtggtctgaggttgtgacctcttgtaactgcctgatctgctcattgcttctgtaccttgcaaaaaaagaacg

SEQ ID NO: 1577 - DNA, 642 bp, Chlorella sorokiniana
  unsure (1)..(642): unsure at all n locations; Clone ID: LIB3602-012-Q6-K1-D7
cggacgcgtgggcgccaccaacagcttggatgcggaggcgcaggaggagcgggtggcgtaccactgcttcagaggactgctcacccatgagacgcaaatctacctgcacacagccgatcaacaggcagcagacaagcagcagccgtcaacacctccagcagcacagggcgcagcggcaggggcggcacaaccgaccgacgatgcgagcagcagtagcagcattagtagtagcagcagcgacagcggcagcgagcctgatctgccgcagagtttggcggcggtgcggggcagcgtgcagctgctgaatgcaaagcagcggccaacgagcgggccgtctcgcagctgtgtcatcgtgcggactttggatggagagtggttccctgtgagctgctgggcgggaccctgaccactgtggcactgctgccatctcatgctatcgcaacattgcgatcagcggctgccacgtgccggcagctcagcgctgcaccacccacctggcctgcgactgcatgatctcccgcgcttccacctacaggtcaagcgcaagctgctgggctgttcaagtggtgcgccctacctaacctgaactgcgtcctgctctctcgtacatgcaggtcaagcgcaagctgctgcggncgtgca

SEQ ID NO: 1578 - DNA, 302 bp, Chlorella sorokiniana
  unsure (1)..(302): unsure at all n locations; Clone ID: LIB3602-012-Q6-K1-D8
nnaaaaaaaaaaaaaaaaaaaaagacgggcggccgcacaaaaggaaccaagcncacgcacgcgagcgagcgacgacaaagcaccagcgagagggacaccnaaaancaanngacgggccgccgacaaacaacggagggacagggaaaacccaggcgccacccaacgaaaacggcgggcagcacaaccccaanccgccagcgggcgaaacagcgaagaggcccggaccgaacgcccaaccaaacaggcgcgcagccggaanggcaaangggacgcgcccagaaggcggacagaaagcgcggcgg

SEQ ID NO: 1579 - DNA, 448 bp, Chlorella sorokiniana
  Clone ID: LIB3602-012-Q6-K1-D9
gggcgcttagggccgtttcaactgggtggaactgaacaagcagaccggggccgttgttgggacagcatttgggggggaagttttttgtttgttgggcagaccaattcaggggttggttgaccgcgatgcgcatttgctccactgttttcactggggacccagtttcagtacatgggagctttcaacctggggtttgggtttgttgtccgggctttttttccccattcagggttttgccagccaagggtgtttctttttttttttgccctttatttggcgccttgcgcgccttttgggggggccatggggggggcccccaggcctttcaaaaacgccgtcacctttgccgggaaatttacagggggggcgccgtttccgtgctgggtttccgccttggccgtttgcgctttttttggcggggggggccgcactttttgttcggggcggt

SEQ ID NO: 1580 - DNA, 73 bp, Chlorella sorokiniana
  Clone ID: LIB3602-012-Q6-K1-E1
ggagaaaaaaacagagaaaaagaaaaaaaaagggcggccgccaaaaaggaaacagacaacgaacacgagaagg

SEQ ID NO: 1581 - DNA, 410 bp, Chlorella sorokiniana
  Clone ID: LIB3602-012-Q6-K1-E10
gttcaacctgaccaaggatgacgacgtgcgccactacgtgaagatctacggcaagaaggtggagaagaacggcaagaccaccatcaagtgccccaagatccagcgcctggtgacgccccaggtgctgcagcgcaagcgccggcgggccgccatcaagaaggagcgcatctcgcgcaagaagaccgaggccgccgagtaccacaagctgctggtgcagcgcctgaaggagcagcgcgagcgccgctccgagtccctggccaagaagcgggccatccgcatggcctctgttgcctccaaggaggcgtaagccgtccctatgccgcctgcatagtggcgcctgccgcctgcttgttgaggcgaggggcgcggcgcggcgcgaggcgcgggcagccctcccctgcctgcttgca

SEQ ID NO: 1582 - DNA, 405 bp, Chlorella sorokiniana
  Clone ID: LIB3602-012-Q6-K1-E11
cgcctccagtggtttatagcttcttattaaaggagctcgctagggcagaacttagtgcacatgtgacccagttgcaaaaaatgaggtgagaggtgagggtgaccgctgaagtacagggttgcacaagggtgctgaatggccaggagagggtagagatgcacaccaattgagtggaaagatcaggcatggtgagtgtgattcacttgaacctggcagaggcgcatgcatctgactcaaaagagggggctaggacatgccagtgtactgcacgtgcaagacgaggcaggtcggcctgcttccccaagcttttcggcgaagcacaagtcttggctgggggttaaccagagtgaagctggttgaatgctgcccaagaaaggcatgcatgagtatgaaggtgactactgc

SEQ ID NO: 1583 - DNA, 411 bp, Chlorella sorokiniana
  unsure (1)..(411): unsure at all n locations; Clone ID: LIB3602-012-Q6-K1-E12
gcaagatggcccctaaggagcagaagtcgaaggaggcgaaggcgcttgccgccgccaactccagcaagggcaagaagaagaaatggtccaagggcaagctgaaggagaaggtgaacaacctggtcctcttcgacaaggccacctatgagaagctgctcactgaggtgcccaagtacaagatgatcactccctcggtgctgtccgaccgcctgcggatcaacggcagcctggcgcgcgccgccatcaaggagctgctgggcaaggggctgattaaggaggtggccaagagccgcgcgcagcagatttacacccgcgcgacggcagccgccagctaagcagccacccagcagtttggcagcatgctagtgcactcgttgtgcttgccaatctggtaacaggtccctcgcnnaa

SEQ ID NO: 1584 - DNA, 531 bp, Chlorella sorokiniana
  unsure (1)..(531): unsure at all n locations; Clone ID: LIB3602-012-Q6-K1-E2
ggccagcatgcacggcgggtttgtggaggacgcgtcgcagcaggacgaggcccgcaagctgcgcctcagcttcgagcagttccagcagagcctgtggccgcagttttcggtgtgggagccgcacaacgaggaccgcagcgaggcggcggagacggagagcgcgcggcgcaagtttgtgctgctggacgtcgattcagacaactacctgactgcagaggagctgctgccggcgtttgcggacatccacccaaccgagagccgatacgcccgcatgcaagctgagcacatgatggacatggccgactgtaaagacgaccgcctgacgctggagcagatgcttgcggtgccgcacgccttctacaccgtggtgcatcacgacaatcatgacaatacggagctgtgacacgcagccgccagctcccccagaacctcaatctgcaagctgccctgctgcactcagcangcgtgtacccctcgtgccttacttcccctgcgcattgtttttgcttggcaacctcttttcatgtgatc

SEQ ID NO: 1585 - DNA, 473 bp, Chlorella sorokiniana
  Clone ID: LIB3602-012-Q6-K1-E3
cgcatctactgggctggcaccgactacgccaccagcttcctgggcttctacgagggcgccatccagacggcggaggcggttgccgacaccctgtcgggcctgctgaagaaggcttaagggctccacactcgacggcagtgcgcacgtgctgcatgggcagatagatgcccccacaacccacccagggcgggagcccccgttagcaagattgcttacccgcgcggacgtgacgtgtgagcgtgttcgctcgcgtaggcacatattcaacgccaacgcatggcctaacaatgtcttgattttacattgaccctcgatgctctctcctgcccgagcacggcattgcgtgctgcggctgatgcgctcctttatttgtcaagccttttgctcgctggattgctccccaagccgatttcttccattgatgccgctatgccatatgctatgctgcagtaaatttcatagccgcaagtaac

SEQ ID NO: 1586 - DNA, 449 bp, Chlorella sorokiniana
  Clone ID: LIB3602-012-Q6-K1-E4
ggcctggatgcgtggtgggcaccacggatttctacctgtcccgcccgcacggcacgcgggcggtgtgccgcagcagcgtggcgcgcgtgctgcgcttcagccgggctgcgctggagcggctgggagtggaggcgccgcaggcgctgaatgtgctgcaaatggccgtcatgcgggccaacacactggatctgagccaggcggcgcagcaggcacccgccctgacatcttgactgggtccgtttgtagctttatagtttcactcacatccgatcatgaggctatcaatcatgccagcattgtgttgaaggaacactcaagctttcacttgttcttcctgctgcttcacttgtctgttgaccagtcccctgcatctatctcgctcccttgtaccccccacctctgggtttgtgtatccttgtctttagcagtgattgttaccaagtcaacgc

SEQ ID NO: 1587 - DNA, 481 bp, Chlorella sorokiniana
  unsure (1)..(481): unsure at all n locations; Clone ID: LIB3602-012-Q6-K1-E5
naaaaaaaaaaaaaaaaaaaaaaaaaaaaaaaaaaaaaaaaaaaaaaaaaaaaaaaaaaaaaaaaaaaaaaaaggggaaaaggggaaaaaaaaaaagagggggagaggaaaaaaagggccggccgcccaaggggacccaagcnaccgcccccggccagccgccgnaaagccnnnaaaagggggcccccaaaagccaanccccgggccgcggnaacccacccccgggccgggaaaaccccggccgacccccaccaaaacccccgggcaccccacccccctnnccccggcggccgaaaacccgaagggccccgccccgacccccctcccaaccagggccccacccggaagggcaaaggggcccccccctcgcccgccccataagccccgcggggggggggggtcccccccagggggcccgttcccctgcccggcgccctaccccccgcccctttccttttttcccctccctttttccccccgt

SEQ ID NO: 1588 - DNA, 135 bp, Chlorella sorokiniana
  Clone ID: LIB3602-012-Q6-K1-E6
cggacgcgtggggtcggcgtggcatacgcactgatgcccacctgccacacaccactagcttgcgttgaatgatggttgatgaagatggcaacaaaaacagctgttcaatgttccattccttgtaaagcagcgagc

SEQ ID NO: 1589 - DNA, 641 bp, Chlorella sorokiniana
  Clone ID: LIB3602-012-Q6-K1-E7
atcccctgctcctccaagaagatgggcatcgaggagtcgttcatgaaggtggcctccatgtgcgcgggcaacgtggtgaacacaaacgtgccctgctgcggcatggccggcgaccgcggcatgcgttacccggagctcaccgccgcctcgctgcagcacctgaacgtgggcggctgctccgacggctactccaccagccgcacctgcgagatgagcctgagcaaccactcgggcatcaacttccggggcctggtgtacctggttgacgaagccaccaagcctaagcagcaggcggcgcagcagcaggcggcagccaattgaaggccgccgcaccctgccagccgcagctgactgtgcatgacatcgcaccccgcccgggctgccaacgcatgaccaagccacggcgctgagctcagctggattgcaagccaccgtcacgggcctgaagcccccggtcggcatgctgcgtcctgcctacctcgccctgcgccccggcagttttgtctctccctcttcaggtttctgtagcagccgctctccgctccccccatccctgccagccgttctcccagccgcacacaggcagcgccagcggcgcttgcggcaggggaggcacccactgcagcactggtcttttccta

SEQ ID NO: 1590 - DNA, 652 bp, Chlorella sorokiniana
  Clone ID: LIB3602-012-Q6-K1-E8
cccaaacctggtggcggtgaacgcggcgctgcgcagctacaagacggcctgggactcgtttgtggactcctggctggtggtcaaggtggcgcagccggactacgcctaccgctggcggctgcaggcggagcaggcgatgcgcgcgtccggcaagccggccatgacagacgagcaggtggccgcctctgtggaccgcttcatgcccgcctaccgctgctacctgccggggctgtatgggcagggccccaccaccgcccgctccggccacctgcttgtggtggaggtggatgaggggcgggagccggtggcgcagcagccagaccccatcatgtgaacacagaagcagcagcacgcagcgtgcagagcagcgtgtgtgtagagcagcgtaacccatgccacgactggccggccgtgtaccgctgggccgaaacaaagcgccgtgcaagccggcttcccaatcagcctccctcaaatatatgaccccctgtctgcgcaccgcctgattctgcaacccctctgattaaccccttgcccttgtatgtttgctcagatgttcgtttgctaaaaccaacctcggttcagcagtttctgattgatcaccacaagcatgctcagcacatgcagctctgtaatgccgagccactctaggcac

SEQ ID NO: 1591 - DNA, 411 bp, Chlorella sorokiniana
  unsure (1)..(411): unsure at all n locations; Clone ID: LIB3602-012-Q6-K1-E9
gactagttctagatcgcgagcggctgcccttnnttttttttttttttttttttttttttttttggtttttggtttttttatttttgggtttttggttttttttttttttgtttgtttttgtgtggtgtgtttgctttcttgtggtttggttgttggnggtttttttgttttttttgttnnctgtggggggggggggggggngcgnntggtgttattagtgggggggtgcgggcccccctggaaaagggtgtggaaaaagggcatcctgccatttaaggctctactgggaaaaagggggaagtgcaacaaataaaaaaaaaaaaaaggtggcacacgctgctgccttaacattagaaaaaaactttaacggggaggtaaaaattttttctggaaaaaaaagaaggttgttat

SEQ ID NO: 1592 - DNA, 593 bp, Chlorella sorokiniana
  unsure (1)..(593): unsure at all n locations; Clone ID: LIB3602-012-Q6-K1-F1
cggcccatgagcggctgccttgcacgcatggtgcggcacggcctgctctgcggcccttcatacctttgtacctttctgtatcatcttgcagcaatggcagccggctgcatctttctaacatcgtcaccggcccactcgtttgtgccatgcccacctgcctccaacgtcacccttcatcaaccctcacccaacccatccacctgccacccatccactcaccttccctccgccacaacctctgccacccactcaccacccatcacccgctcaacgccctccatgcaccatcctccccatccaccaaatctgccaccccaaacgcacgtccgccgctgcaccacctgccgccccctcacccgcacccatcttccacccgccacctttcctgccgctcaccgncgcacatnctacctnccacacctcactccatgtccacccttcacccgcgcttcacacagcggctgctgcatgcaaagctgctgcaaacccatcatcatgctcgacaacactacccaacgtcaacgatcagaccatttcaggccgatgacaggcttttggtctatgccactgtccagactatgtgacaatgttgt

SEQ ID NO: 1593 - DNA, 559 bp, Chlorella sorokiniana
  Clone ID: LIB3602-012-Q6-K1-F10
ctgacttgttggcgcctagagaaagggccacagcctgcgccgagagcgaatcctccaagagaaccacaatgaagtttgagctggacgacgacacggtgctgcgcctgtcgggcgtggccaccgccgcttacagcgccacgctgctggtggtgccccgcacctcccacgacatcttctacgtagcgcagaatggatccacggccagcgacgagcacatcgcaaccgcccgctggtttggtgcagcgctggcgtgtgacgccgccaccaccctgtctgtggggctgtctgagggcagccaggatgccaagcgcaacgcactgcgcgcaaacggcctgtgctgggtggcctgcggcggcatgcacctctacaacgccggcgctggtgtgcagaagaaggaggttgcctactcgtccgctgcgctggcaggcgtgctgggggcgctgtgcctgtggcgcggcttccgcaacaacgatgacgatgccaaggagctgtgagcttcaacacaatttctgacaccttttgtgtttgatgcgttgcacaactgatgggaacaatgagc

SEQ ID NO: 1594 - DNA, 454 bp, Chlorella sorokiniana
  unsure (1)..(454): unsure at all n locations; Clone ID: LIB3602-012-Q6-K1-F11
aaaaaaaaaaaaaaaaaaaaaaaaaggaaaaaaaaaaaaaaaaaaaagaaaaaaaaaaaaaaaaaaggagaaaagggaaaagagcgggaggggggcacggcgctgcacctgaagggcgaggccaccgacgataacagcggggggggggggggggcgccccgcaccttccacaacatcttntacgtagcgcagaatggatccacggccagcgacgagcacatcgcaaccgcccgctggtttggtgcagcgctggcgtgtgacgccgccaccaccctgtctgtggggctgtctgagggcagccaggatgccaagcgcaacgcactgcgcgcaaacggcctgggctggggggcctgcggcggcatgcacctctacaacgacggcgctggtgggcagaagaaggaggttgcctactcgtccggtgcgctggcaggcgagctgggggcgctgtgcctgt

SEQ ID NO: 1595 - DNA, 184 bp, Chlorella sorokiniana
  Clone ID: LIB3602-012-Q6-K1-F12
gatccgttggtcaatttgtagaaaattttttacatgtttggacatgtgctaatgatcataaaagataaaatgcgggcttgagtgaaagtttgaacattggacacaaaggaaagatgcatttggggccaccaggaaggatttgaaatgacaaattaagaggcaggggcgaatgcaacttggagtt

SEQ ID NO: 1596 - DNA, 310 bp, Chlorella sorokiniana
  Clone ID: LIB3602-012-Q6-K1-F2
gcagaaccgacgccccgattttatctccaacttcatcgagaacctgatcgactggcagcgcgtggagcagcgctacctggccgccaccaagcagtgagcagccgctgcccccagcagcgggctcgccctgccatgccgagcggcggcgccgcctcattgcggcggcccgccgcccgggagaacgcacactcccacacttgcgcacacaaacgatacgccgcccccacgcacttgatgtctgattgttctgaagcatttcattttgcacccaccgagtgtaagccctccaacttaaaaaaaaacaaataca

SEQ ID NO: 1597 - DNA, 420 bp, Chlorella sorokiniana
  unsure (1)..(420): unsure at all n locations; Clone ID: LIB3602-012-Q6-K1-F3
cggacgcgtgggtgcactgcgactacccccggtgggtggagttcctgtgcttcgacatcaacgtgcacgtgccgcaccacgtgatgtccaagatcccctggtacaacctgcgcgctgccaccgacagcctgcgccagaactggggcgactacatgacggagtgcaccttcaactggcgcatgctcaagtacattttcacccactgccacgtgtacgataaggaccggaactacgtgcccttcgacgccaacaagcccgagatgctgttcgaggtgcagcgcaaggtgctgcccgagacgatgtgattttgcccccgctcgtttgctcatcaagagtgctaagtggtcactgcaatctgagctgtatgtaattcaagtaagagaaccctggcnnnnnaaanaannnnnnnnnnnnnnnnnn

SEQ ID NO: 1598 - DNA, 435 bp, Chlorella sorokiniana
  Clone ID: LIB3602-012-Q6-K1-F4
gcacgtgtgggcggctctgcagtttggttggagcgagcaagtgcagccgctggcagcagcgctaggggagcggctgagggggcgcatgctggatttggtgtcgcgagcctacagcaacatctcgccagccaagctgggagtgctgctgggctgctcagcagaggaggcggcggcagcggcagcggcgcgcgtctggacggcggcagatgggctgattgaggtgcagccgccggtgccgggcggcggagcgggcgatgcggcggcgcagcgcagcctgcagcggctggctgagtatgtggtgcacttggaggcctgagcagctgctgcaatgacagccatacgtgagccgccgaacacagtgggcgcagcaacagcaactgggctgcatggcgctgcaattggtatgaaacatgaaagcatgggctggcgctcatg

SEQ ID NO: 1599 - DNA, 339 bp, Chlorella sorokiniana
  Clone ID: LIB3602-012-Q6-K1-F5
agctgtaccacgtgatggaccgcgactcgggcaagtgctccttccgcatctcctgctacatgctggagctgtactgcgacgacctggccgacctgctggcggagcacaagaagggcgacaagctgcacaaggcacccaagctggagatcaagaaggaccccaagggcgtggtcacggtgccgggcgccacggtggtggacaacatctcctcggcccgcgagctgatggatgtgatcgaggcgggcctggcgcgccgccgcgtgtcctccacccagatgaaccgcgagtcgtcccgctcgcacctcatcatcacggtgtgcatcgagtcgaccaacctgc

SEQ ID NO: 1600 - DNA, 566 bp, Chlorella sorokiniana
  Clone ID: LIB3602-012-Q6-K1-F7
atgcaggccgccgtcgctcagcgcctggcgctcgtcaaggccagccgggccacccgccaggtgaccaaggcttccgccgagttctatggccccgaccgcgtgaagttcctgggccccttctccggcaacaccccctcgtacctcaagggcgagtaccccggtgactacggctgggacaccgcgggtctgtccgccgaccccgagaccttcgcccgctaccgcgagctggaggtgatccacgcccgctgggccatgctcggcgccctgggctgcgtgacccccgagctgctgcagcgcaacggtgccgccaacttcggcgaggctgtgtggttcaaggctggcgcccagatcttccaggagggcggcctcgactacctgggcaaccccaacctggtgcacgctcagtccatcgtggccatcctgctgacccaggttgtgctcatgggcctgattgagggctaccgcgtcaacggcggcccggccggcgaggtggtggaccccatctaccccggtgaggcctttgaccccctgggcctggctgacgaccccgacaccctggctgagct

SEQ ID NO: 1601 - DNA, 313 bp, Chlorella sorokiniana
  Clone ID: LIB3602-012-Q6-K1-F8
actgccaaaaccaagcggttaccaaaataaacccctttggacagcaggcgtattagccaagagggcgtaacagatagcaggtccgaacagatggccattccgaatagtgaatgagactcaccgggtaacgggacattaactgcagcggctcattaagctacgcgcatgtggaccttaccactagccagacccctacactcggcagcttccgatcgctcgctttttttgcttgccaccttcgctggcttgccacgtcaagctgtaaatccggggatgctttaaaggggccgatccattgatggacgggacctag

SEQ ID NO: 1602 - DNA, 581 bp, Chlorella sorokiniana
  Clone ID: LIB3602-012-Q6-K1-G1
cctgttcaagggctactgggaggacattggtacggtgcgcgccttctacgagtccaacctcgccctcaccgactcgcctaaccccaacttcagcttctacgacaaggacgcccccatctacactatgagccgcttcctgcccccctccaaggtcatgggcgccgaggtggagcgctccatcctgggcgatggctgcatcgtggagccggacgcgcgcatcctgcactcggtggtgggcctgcgctccatcattcgcgagggctgcgtgattgaggactcgctgctcatgggcgccgactactacgagcagtacgaggagtgcgaggcgttcacggactgcctgccgctgggtgtgggcaagggcacgcacatcaagggcgcgattgtggacaagaacgcgcgcatcggcaagttctgcaagatcgtgaacgcagagggcatccaggagagcttcaagacggaggacgacggctgggtgatccgtgacggcgtggtggtcatcatcaaggactccaacatacccgacggcaccatcatctgagcccaaaaagccagccgggcggcagcagcacctcaacatc

SEQ ID NO: 1603 - DNA, 435 bp, Chlorella sorokiniana
  unsure (1)..(435): unsure at all n locations; Clone ID: LIB3602-012-Q6-K1-G10
gcggaatacctcgactgcccgacaggctactgcccctgcctgacatgccccaacacctgctgtggcaaatgcatggatgccacaagccctcagtgcaccagcatcaagtgccttttcggctggggctcatgctcgtgaggccacttaagtgaagttaagaagcttctctgttgaacactgcctagcatgcttcaacccctgacatgcaaagcatacagaatcctgcatgcactggcgtccttttattatgctcctcgccttcccccacgtatccctcctccccgcctacagcaccgtcctcatacaaaaccttcccatgcatgcccgttagctgccgctttggggcctgctcttaattaccattgaggtctcctatgctttttgtgcgcgactgcagttgagtcgatagcgcttcgtgtgatcgatcatcctnna

SEQ ID NO: 1604 - DNA, 505 bp, Chlorella sorokiniana
  unsure (1)..(505): unsure at all n locations; Clone ID: LIB3602-012-Q6-K1-G11
gtaggcgggagcacagtcggtcgtgaaacacgcgcctccccacaatggccggcgagcgtgtgcggctctacgtcacgggccagttcctgggctacaagaggagcaaggccaaccagtacaaccacaccgcgctggtgaaggttgagggcgtgaacagcaaggaggagaccgagttctacctcggcaagcgcctggcgtacgtgtacaaggcgaagaccgagaagaagggcagcaagtaccgcgtgatctggggcaaggtgacccgcgcccacggcagcgtcggcaccatccgggccaagttccagaagaacctgccccctgcggccatcggcagcaagatccgcgtgatgctgtacccctcccgcgtgtgagggtcggttgcttcccggagcagcagcggtgcggcacggcgcggcggtgacgagtcgtggcagtgcgaccccgctcggcacggccgcccgggtggcgccgccgtcgcctccatgtaacccttgattagccnana

SEQ ID NO: 1605 - DNA, 509 bp, Chlorella sorokiniana
  unsure (1)..(509): unsure at all n locations; Clone ID: LIB3602-012-Q6-K1-G12
acagaccctgccggtcagcgcacccgcttcaggcgtttgtggtggtgggcgactacaacggccactgcggcctgggcgtgaagtgcgccaaggaggtggccaccgccatccgcggcgccatcatcctggccaagatggccactgtgccggtgcgccgcggctactggggtaacaagatcggcaaggtgcacaccgtgcccaccaaggtcaccggcgagtgcggcagcgtgaccgtgcggctgatccccgccccccgcggtgccggcattgtggcggcccgcacccccaagaaggtgctgcagatggctggcattgaggactgctacacctgctcccgcggctccacccgcaccctgngcaactttgtgaaggccaccttctacgccctggccaacacctacggcttcctcacccccgacctctggcgcgagaccgtgttcaccaagagcccgctgcaggagtactccgactttctggccaaagccgtggttggcaaggcctacttgagc

SEQ ID NO: 1606 - DNA, 278 bp, Chlorella sorokiniana
  Clone ID: LIB3602-012-Q6-K1-G2
aaagaaaacacaaaaccaaagagaccaaacagacaggacagaacctaaaaaagtaaagaaaccaaaaagcaaaaggggcagggaaaaaaaaagaaaagcgagaatgacccccccccctcacatctggctctggggcgggggggggctttgggaaaaagaaagggccccccccttcgaaaataccccccccgcccaaaagaaaaaaccctgttcagaacaaaaaaggtttgggggcccttccgggcctgggccccacccagaaaggggggggggtgccc

SEQ ID NO: 1607 - DNA, 580 bp, Chlorella sorokiniana
  unsure (1)..(580): unsure at all n locations; Clone ID: LIB3602-012-Q6-K1-G3
ggtgtggacccccctgaacaacaagttcttcgagaccttctcgtacctgccccccatgaccgacgcggagatctcccgccaggtggactacatcgtgtccaacggctggaccccctgcctcgagttcgcgggcgctgagtctgcctacaccagcaacgagaactgcgtgcgcatgcagaacaccacctgcctgtactacgacaaccgctactggaccatgtggaagctgcccatgttcggctgcaccgatggcggccaggtgctgcgcgaggtgcaggcgtgccgccgcgccttccctgacgcctacatccgcgtggtgggctttgaccccgtgcgccaggtgcaggtgtctggcttcctggtgaaccgccccgcctctgtgcgcgactaccagggcccctccacccgctccgtgtaagcggtctgcggcatgatggccagactgtgcgcctgacgccccttcaccagggctgatggcgcactgcagcatacattntttgcagcggcggcagcccggagccgcccgccctttttgggcggcgcggcgggcctgccttcgtggcanggcggcggggcagcg

SEQ ID NO: 1608 - DNA, 453 bp, Chlorella sorokiniana
  Clone ID: LIB3602-012-Q6-K1-G4
ctgccatcaacatcgactacctgggctgggtgcagcagctggagcagttttgggacaacggcatggacctgcggggcaagttctcgcgctcctacaagccttgggaggcgcggcagctgaacggtgcacctgctgccaacgctgcagcagcagcaggagcaggcgcagcggcagctgccgaggcaccagcaggtgcagcggcggctgccgaggcaccagcaggtgcggcggcggctgccgaggcaccagcagcaggcgcggcggcggctgccgaggcagcagcagcaggcgtggcgatggaccactagcgcaacaggcagcagcagcagtcaccacctgtagcgttgcatcgtatcatagcttgtactgtattgtagcatttcctgggagctcaaacgcaaccctttttactgtctcaagcagagcttgctgccatctgtaaagttttttttg

SEQ ID NO: 1609 - DNA, 119 bp, Chlorella sorokiniana
  Clone ID: LIB3602-012-Q6-K1-G5
aaaaaaaaaaaaaaaaaaaaaaaaaggaaggacagaaaaaaaagaacaaaaataaagcacacaaaaccagcaacggcgaacgcgaaaaaagcggggcggcccgcgggggggggcccagc

SEQ ID NO: 1610 - DNA, 70 bp, Chlorella sorokiniana
  Clone ID: LIB3602-012-Q6-K1-G6
aaaaaaaaaaaaaaaaaaaaacacaagaaaaaaaaaaaaaaaaaaaaaaaaaaaaaaaaaaaaaaaagaa

SEQ ID NO: 1611 - DNA, 549 bp, Chlorella sorokiniana
  unsure (1)..(549): unsure at all n locations; Clone ID: LIB3602-012-Q6-K1-G7
cattgacaccgaccagatcatccctgccgagtacctgaccctggtgccttccaagcctgacgagtacgagaagctgggcagctatgcgctctgcggcctgcccgacgacctctaccccacccgctatgtggaggtagacagcatgaagaccgactaccccgtcatcatcggcggccagaactttggctgcggctcgagccgcgagcacgcgccggtggccctgggcgccagcggcgccaccgtggtggtggccgagagctacgcccgcatcttcttccgcaactgcgtgtccaccggcgagctgtacccagtggagacggatacgcggctgtgcgaggagctggagacggggcgcgaggttgaggtggacatggaggcggacgtgctcacagacctgaccaccggcaagaagtactcgctcaagccgctgggagacgcgggcccggtgattgacgcgggcggcatctntgagtttgcgcgcaagagcggcatgatcaaggccaaggcatgagggacttctggttggaagggctgagctgggctgtgtcc

SEQ ID NO: 1612 - DNA, 380 bp, Chlorella sorokiniana
  Clone ID: LIB3602-012-Q6-K1-G8
cccaaacgcacgtccgccgctgcaccacctgccgccccctcacccgcacccatcttccacccgccacctttcctgccgctcaccgccgcacatcctacctcccacacctcactccatgtccacccttcacccgcgcttcacacagcggctgctgccatgcaaagctgctgccaaacccatccatcatgctcgcacacccactcacccacacgtccaacgtatccagacccattttcaaggcccgactgtacagtgcctttttgcgtccttatgccgatctggtaccaggacttaatgtgtaacaaatggtgtgtaggacgcaaaaaggcactagacagtcgggccaagaaaggggctcaggacacgttggacagtgaaga

SEQ ID NO: 1613 - DNA, 483 bp, Chlorella sorokiniana
  Clone ID: LIB3602-012-Q6-K1-G9
gcctgcagtaggagcacagcggcaccggccttgtttgtgcacacagcgcaaacatggctaccatccgcactcgcaagttcatgaccaaccggctgctgggccgcaagcagtttgtgctggatgtgctgcaccccggcaaggcaaacgtgtccaaggccgacctgcgcgagaagctggccaagatgtacgacgtgaaggacctgaactgcgtgttcgtgttcggcatgcgcacccagtttggcggcggcaagagctccggctttggcctgatctacgacaacgttgaggtggccaagaagttcgagcccaagtaccggctcgtgcggaacggcctggcggaggcggtgcagaagtcgcgcaagcagatcaaggagcgcaagaaccgctccaagcctctgcgcggcgtcaagaagtctggcaagaagtaagcagcccgaggagcgcgccacgcgcgcgacctgtaacacattgccttcgcaaaaa

SEQ ID NO: 1614 - DNA, 383 bp, Chlorella sorokiniana
  unsure (1)..(383): unsure at all n locations; Clone ID: LIB3602-012-Q6-K1-H1
cgcacgcgctcgcacaagcgcgcggactaccgaggccactcgtgaggcgactgccctgctgcctgacgtgcgcatgagaggacgcatgagacgatcccacagctagtcctactacacaccctcctagacactgcctntgaaggcggctcggcatgacacccgtctgcagatgctgctgctgctgctggaggcacgcaagcagacccacaagctgagacactctntagcacatcatccagcggcgcagcccgcggcagcctgcgctccagtccgcgatccggcgccggacacggctgggaacagggcaggaaattaggcacatgcaccagacaatgcactacacacgcgggttgctgaacagactgcaaaaaaaaaaaacaaaa

SEQ ID NO: 1615 - DNA, 295 bp, Chlorella sorokiniana
  Clone ID: LIB3602-012-Q6-K1-H11
cgagcaacaggcaaccatgccgtcccagaagcgcttcgccatcaagaagaagctggccaagaaggccaagcagaaccggcccatccctccttggatccggttccgcaccaacaacaccatccgctacaacgccaagcgccgccactggcgccgcaccaagctgggcatctaagcgccccccacgaggagcagctgacggcagcagccccggcacggcaggcagtgcgctggccgcgcttgcaaggcagcccgtcagtggcatgatgacagcttaagcttgtaacgatggcctagc

SEQ ID NO: 1616 - DNA, 429 bp, Chlorella sorokiniana
  Clone ID: LIB3602-012-Q6-K1-H2
cccacgagcctggaagcggacatcatgcttggcgccgacggccccgacagctgcgtggccaaagacattgacgcgggcgagttccactacgcgatcgccttccaggagcgcatacgcatccctcaggacaagatgtgatgctacaaggacctggcggagatgtacgtgggtgacgacgtgtgcaccgactgctacggatgggtgttactcaagtacgaccacttggcggggggcaccggcgccgcggtgaacaagacggtgatcaagtagtaccagcaggccaaccgcgaccgcgccaaggagaagaccgagggcggtcagatcatccgcgtggaggctcaccccatccctgagcacccccgttcgcgccgcgtgaagggccgcgtcaccctggtgggcgacgccggcggctacatgaccaagtgctcc

SEQ ID NO: 1617 - DNA, 369 bp, Chlorella sorokiniana
  unsure (1)..(369): unsure at all n locations; Clone ID: LIB3602-012-Q6-K1-H3
caggctgctagcacgcagcaagcggcccaaggggggcggcagctctacagcgccaggcagcttgaacccttttgcaggttttgccctctactgaccagaacacattgccctgtgctcaacaagccactcgacgtggctcatgcaaacaaaaaagcntcaaanaaaaaaaaaaaaaaaaaaanaaaaaaaaaaaaaaaaaaaaaaaaaaaannnnnnnnaaaaaaaaaaaaaaaaaaaaaaaaaaaaaaaaaaaaaaaaaaaaaaaaaaaaaaaaaaaaaaaagttttttttttaaatcgggggggcccttttaaagggatcaaattttacttcccggggttgggaacgtaaaatcttttttttggggcc

SEQ ID NO: 1618 - DNA, 189 bp, Chlorella sorokiniana
  unsure (1)..(189): unsure at all n locations; Clone ID: LIB3602-012-Q6-K1-H4
caagaaaaaaaaaaacaaaaaagcgaaccaaggagaaaaagaagaaaaacaaaaaaaaaaaaacaaggccggccgggcaagaggagccaagcaaacggccgcgagcgggcgacgnaagcgccacccgccaggggccccgaaaggccaagacggcgcccgcgccngngcaccgcggcgactgggaaaacc

SEQ ID NO: 1619 - DNA, 402 bp, Chlorella sorokiniana
  unsure (1)..(402): unsure at all n locations; Clone ID: LIB3602-012-Q6-K1-H5
tccggaagacccacgcgtccgaccacgcgtccgacagcagcagcagcatggacaagcacgctgctgtggccgctgctgcgcctgctgagcccgctgcggaggaccagccgcagcaggagtgagcggcctangaagggcggcggtgcggcctgagcggnggctaagcccctcggatcagagccgccgccctgcaatggcagcagcagcgcggcacgccggctgcctgctgcacccatgagagtgatacagacaaattggatccagcccggcgattgattcccgctctgtcttgagctacaacattcccagtcttgcttgtttttcccgctgtcgtttccctttgctgattagcccggctagtgacctgctcggtcgtgctgagattctgtaacgctaggcaga

SEQ ID NO: 1620 - DNA, 361 bp, Chlorella sorokiniana
  unsure (1)..(361): unsure at all n locations; Clone ID: LIB3602-012-Q6-K1-H6
acccacgcgtacggcgcagaaggtgccacgcagcagccgcagccaatgctgttcagcgcacctgccgccggcaatgcggcggcggcggcacctacacccgccacgggcggctttggcgcggcggccgcggcagccgctgcgccacctgcggatgtgactatgctgccagccgcaggcgcgcacgagtttgatcgagtgctgggcctggcaccagccgccgctggcggcagcaggagcaagcgccggtggggcggcagcgcgtaccgctgattccagatcttcaggccttttgcatgtggtgcgcagtaactcaccatacattgagaatgcaactccttgagctgtaaagcanagcaagatg

SEQ ID NO: 1621 - DNA, 254 bp, Chlorella sorokiniana
  Clone ID: LIB3602-012-Q6-K1-H7
ggcggcgcctagtgaaggggcgaccgcagctgcggcagacgaggaggcggtagcgttcgcagttgctgttgcaacccaggaggagcagcagaagcgtgcactgcgaatgacgtcagccagaataaatgcaatggttgatgcagagaacgctcgggtggagcaaggttgttgcagcggtgaagtgcatcagctgcaggtgtgtacgctgcacgccgtctgcggtagaatttcaccaatgtacatattgcgccgaa

SEQ ID NO: 1622 - DNA, 369 bp, Chlorella sorokiniana
  unsure (1)..(369): unsure at all n locations; Clone ID: LIB3602-012-Q6-K1-H8
nnaaaaaaaaaaaaaaaaaaaaaaaaaaaaaaaaaaaaaaaaaaaaaaaaaaaaaaaaaaaaaaagaaaagggaaagggggggccgggaaggaggaccaagcaagaacgcggcaggcgacgcaaagcccnnaaaagggaaccaaaacacaacaacgggcggcggnnaacaacgncgggacggggaaaacccgggggnnacccaacnaaanggccgggcagcacaacccccnnncgccagcgggggaaaaagcgaagaggccggaaccgancgcccnnccaaacagnggcgcacccggaagggcaaaggggacgcgcccggaaggggcgcanaaagcgcggggggggggggggnaacgcgcagggggacc

SEQ ID NO: 1623 - DNA, 365 bp, Chlorella sorokiniana
  Clone ID: LIB3602-013-Q6-K1-A11
gcgcagtacaccacgggctaacatcgcagcaggccggcaccatgtgccgcctgctcttcagcagcctgctgcggcaactagctagcgtggggcaccagcagccagccaccttccctcttgcaccacctctgctgctaccacatttgcgcaatggcagcgaggcattgctgcactttgtattcacatcactgctttccagcttccaactcttctcaagctcagcctctcccgccaaacctttctgattgctctctttttgccaccctcattgtggtgcccatttgcaccgttcccatcattgactgcccttctcgacctgcacacgcactcgttgcggcaagtgcatcatgtgaagcagggcctcc

SEQ ID NO: 1624 - DNA, 345 bp, Chlorella sorokiniana
  unsure (1)..(345): unsure at all n locations; Clone ID: LIB3602-013-Q6-K1-A12
aaaaaaaaaaaaaaaaaaaaaaaaaaaaaaaaaaaaaaaaaaaaaaaaaaaaaaaaaaaaaaaaaaaaaaggggggccgcncaaaaggagcaaagcnaacgnacgcgggcaggcaacgnaaaagcccnncaaaaggggaaccaaaagcaaancaacgggccggcgnnnaaaaacgncgggacgggaaaaacccgggcgnnaccaaacnaaancgccnggcaaaaaaacccccnnncgccagcgggcgaaaaagcaaaaaggcccgaaccgaacgcccnnccaaacagnggcgcagccggaagggcaaaggggacgcgcccngaagcggcgcaaaaagcgcggcgg

SEQ ID NO: 1625 - DNA, 562 bp, Chlorella sorokiniana
  unsure (1)..(562): unsure at all n locations; Clone ID: LIB3602-013-Q6-K1-A5
ngctgaccgacgtgcccaacctgttcaccgccaacccaaacgtggaccctgatgcccagcccatctatgaggtgttcgacctgtccaagctgaatgtggacaccagcaccaagggcacgcagtggggcaccggcggcatggccaccaagctcactgcggcgcgcatcgccactgcagccggctgccgcatggtcatctgcagcgctgtcgaccccgccgtcatccccaagatcattgcgggcgagcgcatcggcacggtgttccaccctaacgtgcagccgctcaagggccgcaagcgctggatcctttcggtgccggtgcgcggagaggtgtggctggacagcggcgcgcaggcggcggtgcaggaccgcaagaagagcctgttctcagcgggcatcatcaaggtggacggcgagtttgaggcgcangacgcggtgcggctgtgcgacgagcagggcagcgagtttgcgcgcgcgctcatcaactactccttccacgaggtggacaaagtcaagggcatgagcagcaaggagtttgcggctgggctggggtacatggggca

SEQ ID NO: 1626 - DNA, 311 bp, Chlorella sorokiniana
  unsure (1)..(311): unsure at all n locations; Clone ID: LIB3602-013-Q6-K1-A6
ccgacgcgnccgngcgggcgcncctgcgggggcagaaggagaagccgaaggacaaaacgggcagcgcacaggagcgggcgcagcagcgcgcgcaggggaccgccggcgccacgggcggcaccacggccgccggcaggggaccggccgggagggcgcgcaggacgggcagcaggcaacgcagcgggcaccgccacagcccaggacaccgcaaacaaccccacaagcagccaccacggangccacacgcgacggcccacgcaacngccaaaaaaaaaaaaaaaaaaaaaaaaaaaaaaaaaaaaaaaacaaaa

SEQ ID NO: 1627 - DNA, 370 bp, Chlorella sorokiniana
  unsure (1)..(370): unsure at all n locations; Clone ID: LIB3602-013-Q6-K1-A9
aanaaaaaaaaaaaaaaaaaaaaaaaaaaaaaaaaaaaaaaataaaaaaaaaaaaaaaaaaaaaaaaaaaaagggaaaaaaaaaaaaaaagaagggggggccgcccaaaaggaccaaagcnaacgnaggcgggcaggcgacgnaaaagcccnncaaaaggggaaccaaaancaaancaacgggcgggggnnnaaaaacggcgggacggggaaaacccgggggnnaccaaacnaaanggccgggaagaaaaacccccnnncgcaagggggggaaaaagcaaaaaggccggaacggaaggcccnnccaaaaaggggcgaagccggaagggcaaaggggacgcgcccggaaggggggaaaaaagcgggggggg

SEQ ID NO: 1628 - DNA, 426 bp, Chlorella sorokiniana
  Clone ID: LIB3602-013-Q6-K1-B11
gggcggcgccgccattgtgctgggcctggccacttatggccaccgcgtgatgcgggccctgggtgtgaagatgactcgcctcaccaactcccgcggcttctgcgttgagctgtccgtggccgctgtggtcatcgttgcctcgcgctacggcctgcccatgagctccacccctgctactgtgggcgccattgcgggcgtgggcctgctggagggccgctccggcttcaacacccgcctcttcctcaagttctgcgccggctgggtcatcaccatcgtcgccaccgtgctcctgagctgcgccttcatggcccaaggcctctactcccccaacaagagctgcgccacccagcgtgccgatgtgggcgcttacctgaacagcaccgccaattatgtggccacggtgctgtacaatgcgggcaacatgac

SEQ ID NO: 1629 - DNA, 455 bp, Chlorella sorokiniana
  Clone ID: LIB3602-013-Q6-K1-B12
ccagaacgagatgatcgacgccatcgccatcaccaagggccacggcactgagggcgtggtgacccgctggggtgtgtcccgcctgccccgcaagacccatcgcggtctgcgtaaggtggcctgcatcggcgcgtggcacccggcgcgcgtgggctggaccgtggcccgctccggtgccatgggcttcaaccaccgcactgagatgaacaagaaggtgtaccgcatcggtgtgaagggcgaggccagccacgccgccaccaccgagcacgacgtgacggtgaaggacattacccccatgggcggcttcccccactacggcgtggtcaaggaggactatgtgatgatcaagggcgcctgccccggcgtcaagcgccgcgtcatcaccctgcgcaagagcctgttcccccagaccagccgcaaggcgctggaagatatccccctgaaattcatcgata

SEQ ID NO: 1630 - DNA, 538 bp, Chlorella sorokiniana
  Clone ID: LIB3602-013-Q6-K1-B3
ctgtgcggcggctacaacaactttgtgatcaagaaggctgagcagcgctaccgcgagctggatgccatgggcatttccgtgcgcctgatctgcgtgggccgcaagggctccgcctacttccgccgccggccgcagtacaagatcgaggccacctttgaggtgggccagagccccaccatcaaggaggcgcaggccatcgccgacgacatcttcgccgactttgtgtccgaggaggtggacaaggtggagatgatctacaccaagtttgtgtccctcatctcctccacccccgtcgtccagacgctgctgccgctgtccccctccggcgagatctgcgacatcaacggcaactgcgtggatgccgccgaggacgaggttttcaagctcaccacccgcgagggccagctggtggtcgaggccgaaaaggtgcgcaccgagaccggcgactttgacgccggcctgatctttgagcaggaccccgtccagattgtggacgcgctgctgccgctgtacatgaacgccacccttgtgcgctcgc

SEQ ID NO: 1631 - DNA, 513 bp, Chlorella sorokiniana
  Clone ID: LIB3602-013-Q6-K1-B4
ggatgcgcatctgcttcgagctgctcgacatgctcaaggcgcacaagaaggcgattcggcgcgccacggtcaacacctttggatacatcgccaaggccatcggcccccaggacgtgctggtcacgctgctcaacaacctcaaggtgcaagagcggcagaaccgcgtgtgcaccacggtggccattgccattgtggcggagacgtgcgcgcccttcaccgtgctgcccgccttgatgaacgagtacaaggtgccggagctgaacgtgcagaacggcgtgctcaaggcgctgtccttcctgttcgagtacatcggcgagatgggcaaggactacatctactcggtggtgcctgtgctggaggacgcgctgatggatcgagaccttgtgcaccgccagaccgcgtgcgcggttgtgcagcacatgtcgctgggcgtggcgggccttgggtgcgaggacgcgctcatgcacctgctgaactacgtgttccccaacatcttcgaggtgtcggcccaca

SEQ ID NO: 1632 - DNA, 471 bp, Chlorella sorokiniana
  unsure (1)..(471): unsure at all n locations; Clone ID: LIB3602-013-Q6-K1-B5
ggcgctgtccatccccaccggcctcggcatggtctgcgcctcggacaaggcgctggcggccatgaagacggccaccagccggcgcgtgtactacgactntgccgacatgctgcgcaccaaccccaccggcaacgtgccgtacacccccatcctgccgctgctgtacggcatggaggcgtcgctgaagctgctgcgggacgagggcatggccaacgtggcggcgcgccaccacaggctagcggagggctgccgcaaggccgtggagggctggggcctgcagacgctgtgccgcgacccgcgctggaagagcgacagcctgacggtgatcgaggtgccgcagggcgtggactcgcaaaaggtggtggacgtggcgtacgccaagtacaacctgtccctgggcattgggctggcggacgtgaagggcaaggtgttccgcatcggccacctgggcaacatggacgagctcatgct

SEQ ID NO: 1633 - DNA, 524 bp, Chlorella sorokiniana
  Clone ID: LIB3602-013-Q6-K1-B6
ccggcggatactgacgcagcgggcgcgctacttcaacattgtgctggatgacgtgtccatcacgcagctcaccttcagccgcgagtacacgggcgcggttgaggccaagcaggtggcgcagcaggacgcggagcgtgccaagttcattgtggagaaggcggagcaggacaagcagagcgcgatcatccgcgcgcagggtgaggcgcagtcggccatgctcatcggccaggccatccagcagaaccccgccttcctgacgctgcgcaagatcgaggcggcgcgcgaaatcgcgtccaccgtgtccgcctccgccaaccgcatcttcctcaactccgactccctgctgctcaacctctccgactacgaggccgcccccggcaagaggaagtagagctgagcagcccgatgcagagcggcgaggaaggagctgcgagggcggctgggtcaggaggaagcagccagccagctggtggatgcgcagccctgctgctggagagtgctggcacctcggtgcagcatgcact

SEQ ID NO: 1634 - DNA, 501 bp, Chlorella sorokiniana
  Clone ID: LIB3602-013-Q6-K1-B9
gcctctccacttgcatgcagacccgtagcgccacttgctacgacggtgccggcaccgagcttgcagacagcgagtgcggcggcagcgacagcaagcccgccaccgtgcaggcctgtgacgactgctcggcccaggcccccagtgcagctgttgcagcgccagccggcggcagcaccgagggcggcagcggcctgaccggcaccaccctcgtcattgtggctgtggcagcgggggcggccgtggcggcggccgtggcggcgggcggtttcttgctgttccgccgcagccagcgcaagcgtgtggaagatcggtccatgggcagccagctgcccccgcccccgcccatgccagctggcaagtggtcctgcgatgagggggtggcagctgatgccatagatgtcatccctctgcccaagcacctgcgccccatcgcaaccgggcgcagcagccggcgcagcccccgcctgcagcagccggggggcggcgcaccgcagggcacgc

SEQ ID NO: 1635 - DNA, 613 bp, Chlorella sorokiniana
  Clone ID: LIB3602-013-Q6-K1-C1
gctacagcaaggccaacaaggagaaggcggtgatgtggagcgaggagacgctgtatgagtacctgctcaaccccaagaagtacatccccggcaccaagatggtgttcgctggcctgaagaagcctgaggagcgcgccgacctgattgcttacatgaaggaggcctgcaagtaaacgggcccgccagcccacccgccgcacggcccaccccagcccactgaaccaagatggtgtttgctgggctgaagaagccggacgagcgtgctgacctgattgccttcctcaagcaagaaaccgccaagtagacggccggctcctttgcaaaagagaagcagccaggatggcgctctcagcggcggcgcccatttttgctgccaggagcggcgcggcggcggccaccacgggcgctgcattggcgcccctggctgcccccgcaacacccgcctgtcgtgcttttgtgttttgtgcgaacccccaccaacccgctaagcgttttccttgccagcactttcactttccgccatctttccttgccgccctcgggcacctgactgcgcccgcgtcgcatgtcggccctcgcgcgcatgcaatgttgacatgtgaaatgcctatac

SEQ ID NO: 1636 - DNA, 385 bp, Chlorella sorokiniana
  unsure (1)..(385): unsure at all n locations; Clone ID: LIB3602-013-Q6-K1-C10
cggacgcgtgggcgagtagggcttgggccagatggtgctcaagacccagacctgccgcttcagcggcctcaggatctaccctggcaagggtgtgctgttcatccgcgtggatggccagcaattcctgttcctgaagcagaagtgccgctcgctgttcaaccagcgcaagcggcccgccaagcttgcctggaccaccctgtaccgcaagcagcaccgcaaggacctggaggcgcangttgcccgcaagaagcggcgcaacgtgaacaaggcggccacccgctccgtggcgggcgccagcctggaggtgatccagaagaagaagagcgagaagcccgaggcgcgcaaggcctcccgcgaggcggcgctgcgtgagatcaaggagcgc

SEQ ID NO: 1637 - DNA, 436 bp, Chlorella sorokiniana
  Clone ID: LIB3602-013-Q6-K1-C11
agaagcagctctaccccgcggtgaaggagatccgcaaggtgggcggcagcggcgtgctggtgcagcccatgacgtacatctttgatgaggagcccgcccgctggcgcaacctgctggatactctgggcgtggaccccaagaccgtggatgtggcgtaattgacgagcttaccgcgatgagccaactgcggcaggggcgccagctcgcgcatggcgctgacaactgctccagatgtgcgggcacactgcagttgcgcccggctgcccttcccaagtgctgccctgcctcgcatgccggtcccattgtattgacgacttcctgtcgcacattctgtgcccttgttcagacccctttgacgtctggatcatatccattgtctgtcagcctacccccgggcctgacaccttttgctacagcctgtaaatggcagcaccaa

SEQ ID NO: 1638 - DNA, 450 bp, Chlorella sorokiniana
  Clone ID: LIB3602-013-Q6-K1-C12
ctaccgcttgtgcaccttatcgacctctcaaacgcgacccccgcttgcctcgagcagtctcccacgcgcgccaagcctacgccttccctcccacagactgcgccgatgcctgcctgcgcctgtcagcaacgatatatgccggtggcgcgagcaggatcgcccctgaccgcgcgggctgccgtcgccggcgcccgcctgcagccccgccgtgccgccagccgcctgcggccacagcggcgagtggcggtggcagtgcgcgccgaaggagcggcttcgctccacttcctgaccagcttcgtctgtttctacactgcctggacctggttgggcctgcggcgagcgcgcatccaggctgagaagattgagcagctcaaccggcagcgagaggcggagcggcaggagcgcctgcgccggctgcagccccgtgccgtgcccgcagccgtgcctgca

SEQ ID NO: 1639 - DNA, 311 bp, Chlorella sorokiniana
  Clone ID: LIB3602-013-Q6-K1-C3
gcgcctgcctccctggagtcccttcaaagaagtccaggcctgccgctagtcgactaacaaatagcacttcgtcgcgctttattcgtctctctctgctactggttgctgcctagggtgatgtgcacttgtgcccacttgtgcttgctctgcttatcgttatcatatcagatgtggtgcctgtaccttgtactctgctgtgtctcctcacaagaccaagtgctgtcgtgaacagcctactgcaacatgttgttgcgctgcctcatctgacgtgcgacctctcttctctgaacaaaacctgtgacacgtctgca

SEQ ID NO: 1640 - DNA, 150 bp, Chlorella sorokiniana
  Clone ID: LIB3602-013-Q6-K1-C4
ccctccccaaaccccctctgtaccaaccctaacccctgagaagaaaaaactgaaccaccgatgcttttgtttgtagctgcttgcatgcgcgcgccctagcccggagccgcatgatttctgtcataggttgtgtgtaacccctcagccgct

SEQ ID NO: 1641 - DNA, 72 bp, Chlorella sorokiniana
  Clone ID: LIB3602-013-Q6-K1-C5
aaaaaaaaaaaaaaaaaaaaaaaaaaaaaaaaaaaaaaaaaaaaaataaaaattaaaaaaaaaaaaaaaaaa

SEQ ID NO: 1642 - DNA, 344 bp, Chlorella sorokiniana
  unsure (1)..(344): unsure at all n locations; Clone ID: LIB3602-013-Q6-K1-C6
ccgcccggccgcatcgnccgcaaaatcgagttcccgctgcccgaccagaagaccagcgccgcatcttcagatccacacggggcgcatgacgctggcggacgacgtgaacatcgaggagtttgtgatggccaaggacgagctgagcggcgcggacgttaaggcgatgtgcacggaggcggngctgctggcgctgcgcgagcggcgcatgtgcgtgacgcaggaggacttcgtgaaggccaaggagaaggtgctgtacaagaagaaggagaacgtgccggagggcctgtacatgtgatgcacccgcctgttggccttcgccaccattgtaacacaccgcactccaa

SEQ ID NO: 1643 - DNA, 483 bp, Chlorella sorokiniana
  Clone ID: LIB3602-013-Q6-K1-C7
agacgcaggcggccggcgaggacaagaagaaggagcggtcggaggtctgcaaggtctgcggcggcaccgggcaggtgtcgtacgagaaccacatgcaggcgtacgacggcactgtctgcccctgctgcctgggcaagggccgcgtgaagcggtatcagggcaacctcatcagcgcgctgctgtcgttcgacccctgaacctgccggcacgccccctgccgcttgccgctctctcctcttggcagcaccagtggctcgccgcccagccacactcgcgagggtcgccaacccacagaccttcgctggtacagccgtggcggcctctgtcgatgccactcgtgcgtgcgcccctccaaataacatacgcccgcccccgctcgccttgccttgcatgtatgtccgccacaccccctggacttgagaaatgaatctaatgccactgcacttctctccctgcgtgccattcatcccgtcccattgtatg

SEQ ID NO: 1644 - DNA, 289 bp, Chlorella sorokiniana
  Clone ID: LIB3602-013-Q6-K1-D1
ggttcggccgtcgtcgaggtagccagcacgatggccaaaatcaaggcccatgagctgcgcggcaagggcaaggaggagctgctgcagcagctcaaggagctgaagcaggagctgagcggcctgcgcgtggccaaggtcaccggcggcgcccccaacaagctgtccaagatcaaggtggtgcgcaagggcattgcccgcgtgctgaccgtggtcaaccagaagacccgggacgctctgaaggaggcgtacaagggcaagaagtacgtgcccctggacctgcgcgtcaaga

SEQ ID NO: 1645 - DNA, 507 bp, Chlorella sorokiniana
  unsure (1)..(507): unsure at all n locations; Clone ID: LIB3602-013-Q6-K1-D10
ctttctaacatcgtcaccggcccactcgtttgtgccatgcccacctgcctccaacgtcacccttcatcaaccctcacccaacccatccacctgccacccatccactcaccttccctccgccacaacctctgccacccactcaccacccatcacccgctcaacgccctccatgcaccatcctccccatccaccaaatctgccaccccaaacgcacgtccgccgctgcaccacctgccgccccctcacccgcacccatcttccacccgccacctttcctgccgctcaccgccgcacatcctacctcccacacctcactccatgtccacccttcacccgcgcttcacacagcggctgctgccatgcaaagctgctgccaaacccatccatcatgctcgcacacccactcacccacacgtncaacgtatccagacccattttcaaggcccgactgtacagtgcctttttgcgtccttatgccgatctggtaccaggacttaatgtgtaaca

SEQ ID NO: 1646 - DNA, 421 bp, Chlorella sorokiniana
  unsure (1)..(421): unsure at all n locations; Clone ID: LIB3602-013-Q6-K1-D11
ggtgtgcagaagaaggaggttgcctactcgtccgctgcgctggcaggcgtgctgggggcgctgtgcctgtggcgcggcttccgcaacaacgatgacgatgccaaggagctgtgagcttcaacacaatttctgacaccttttgtgtttgatgcgttgcacaactgatgggaacaatgagcaggacgcccaggcatgtggagacgggggctaaagggcagttgggggatgccgagctgcagcaggaggcagctggcggacagcaaacagcctgactctgaatgatttttgtgcacagcagggacgaggcgcttgtgcatcgccctgccctggcacacgctcctgacgcccttttggctttgatccgttgcatagcgcaaattcgactagcgttgctgtactgtaatcgtatggacacannnna

SEQ ID NO: 1647 - DNA, 488 bp, Chlorella sorokiniana
  unsure (1)..(488): unsure at all n locations; Clone ID: LIB3602-013-Q6-K1-D12
ggcgcgcagcacgcacagggcgacacgtgcagtaggctggacggaacagcaccatgatgcctgctagtcacggaactgtaggccggaccagacgtgaggcccacgagcgcacccgaatgtgcaagggagtgcacggagggcggcacgattttgatttgtaggtgcacggtgtctgcccaatccttactagcactcacagcggcctcatcctggcctttctgcgagctcccctttccactcattcagcagcagtcttgacctcttttctacttgcaatcggacatgtaaatcaacttctttnaaaaaaaaaaaaaaaaaaaaaaaaaaaaaaaaaaaaaataatagcgcaaaaaagaaaaaaaaaaaaaaaaaaaaaaaaaaaaacactaaagaaagataaactagtaatttcatggacccaaaaaaaaaaaaacaaaaatnggggggcgcccctttaaaaaaataaaaactttctcccccgggattgg

SEQ ID NO: 1648 - DNA, 522 bp, Chlorella sorokiniana
  Clone ID: LIB3602-013-Q6-K1-D2
gtagggcttgggccagatggtgctcaagacccagacctgccgcttcagcggcctcaggatctaccctggcaagggtgtgctgttcatccgcgtggatggccagcaattcctgttcctgaagcagaagtgccgctcgctgttcaaccagcgcaagcggcccgccaagcttgcctggaccaccctgtaccgcaagcagcaccgcaaggacctggaggcgcaggttgcccgcaagaagcggcgcaacgtgaacaaggcggccacccgctccgtggcgggcgccagcctggaggtgatccagaagaagaagagcgagaagcccgaggcgcgcaaggcctcccgcgaggcggcgctgcgtgagatcaaggagcgcgccaagaaggccaaggccgacaaggcggtgcagaaggcgcaggccaaggcctcgggcgccggcaaggctgtcaagaacatgcctaagggcgcgggcaagggcggcgccaagagcaccggccgctaagccagcggcaatgcagcgggcgtagc

SEQ ID NO: 1649 - DNA, 249 bp, Chlorella sorokiniana
  Clone ID: LIB3602-013-Q6-K1-D3
cacagaacaagcgaagatgcgcgctaagtggaggaagaagcggatgcggcgcctgaagcgcaagcggcggcggcagcgggccaagtaagcggcctgccccgcagcccagcagcgctgcggcgcctgggcgcagccgcccgctcgcacgcgtgcaacggcgctgcagcggccagccggcgtcacggagtccgggcgcccggcagccgccgatgaaatgtgacggccgagtgtgtaatgctcacgaccgtg

SEQ ID NO: 1650 - DNA, 397 bp, Chlorella sorokiniana
  Clone ID: LIB3602-013-Q6-K1-D4
gcgggcggcactgtggccaaggacgctctgggtaacgacgtcaaggccaccacctggctggcgacccacgctgtcggcgaccgctccctgacccagggcctgaagggcgacgccacctacctgattgtgaacaacgagggcgccattgagaagtacggcctcaacgcggtgtgcacccacctgggctgcgtcgtgccctggaacaaggccgagaacaagttcatgtgcccgtgccacggctcgcagtacaacgccgagggcaagaagatccgcggccccgcccccctgtccctggccctggcgcactgcgacgtgaacgacgacatcgtcaccttcaccgattggaccgagaccgacttccgtaccggcgaggctttcctgtggaacttgagcggtg

SEQ ID NO: 1651 - DNA, 400 bp, Chlorella sorokiniana
  unsure (1)..(400): unsure at all n locations; Clone ID: LIB3602-013-Q6-K1-D5
agatcccagcacgctgtgggccggccgccgcccgtgcggctcgagcggccgccgctgcagctgctcgcggagcggcctcgccgcaactgcacctcatcgaagtcttccccagcatactgcgtaggcgtcagcggcacgccaggcaacggcaggcgagcgagccgctggtgaaccagctgtgctgtcgcgtgcgccgctgcggcaccttccccggcctctagcggaggtggacatgtggcgtagcctgctcgtcttaccccacctcatggagatcggtatcgtgtggaaaaagcatgctntgcctaagcgctgtcagccaccagtgtcagcgagagcgtgcaggacgaagcccgctggccactgctctgagtcgaagagcggcatgctgcaccggcgtgcc

SEQ ID NO: 1652 - DNA, 476 bp, Chlorella sorokiniana
  Clone ID: LIB3602-013-Q6-K1-D6
ctcacgcgttcgctagcgagctgaccaagaacccgacggagctggtggtgaacgacatcgggtgtgtgcacggcggcctgctgacgtaccacctgaagtacagcctgcaccacatgactgactaggtgactgactggatgagcggcaccgggcgccacgactggaggcagtcgtcggcgatgttccactccatgagcgactacaacaacctgcagtggaaccagacgtgcgtcaacgagcacgagtgcaactacaagcgcatgcacatgaacatgcaactgcatgccacaatggaggcgctcaacgcgcgcgccatgacggtggaccacacccggcagatcagcgacttcaactgccagtgctatcgcccggattcccgcacgaattccggcatgagctatgccgtgctggatgccctccaccacatgctggactacaagcggaacgaggaggggcacatgatgccgcacatgatg

SEQ ID NO: 1653 - DNA, 237 bp, Chlorella sorokiniana
  Clone ID: LIB3602-013-Q6-K1-D7
agcggcgccgccacggtcgcccgcgggtggagcgctgcccacagccgtgcgccgactccgccgccagcagcgcccgattctttccgctcccctcggtcccctgtctcaccccagcccctcccccctcgtgtgcggtctgtgtacccccgccggcagcacagtgtgtcggtcaatttgatttttgaaaacagtttttaggcaattgccttctgctcctgttatgaatgaagccggctc

SEQ ID NO: 1654 - DNA, 574 bp, Chlorella sorokiniana
  Clone ID: LIB3602-013-Q6-K1-D8
ctgagcgcctgcagctggcagaaatcaatttcgcttcgcggtgcgagctgaaggacgcattgctcgaccagaacatgcctgcagacgagcttgctttgttggaggagaacgtgcgcgtcactggcgctgggctccagaagctggcggcagcggcgcgaggcgagcgctagatggcgcagcggcggctggttgcgtcggcacgatatgtggaggctcggaacgacgccatgtggagcgacctgttccacgctgacgtacgcgctgctgagtggagcctggtagccatgccttggctgcagctgaacgctctgccgcagtacccaaactcgatctggtactgcctgcgagtcggtgtggcagtactggcattttccaagagcagtgggcgtgccgtggcgcgctctgttcatcacactgactggctgtcgctcatttgcttcgacctctgccgcacgttcttccaagcccccgctgctctggagcggcgcctctgcattccctctcctttcctcccaacatttcatcagctcagctgcagctctctcgctaacaacccctggtaaatctgtgactc

SEQ ID NO: 1655 - DNA, 265 bp, Chlorella sorokiniana
  Clone ID: LIB3602-013-Q6-K1-D9
ccctgccccgtggcggtcatgcgcaaggtgcagtcagagatgcacatgcgggacgtgaccatctgctacggcatgactgaaacatcacccgtctccttccaaacctgcactgaaaactcggaggagcggcgtgtgtccaccgtgggccgcattcacccccacctggaggcgaaaaggggtgacccgcggacagggcgcacccttgcccgccggcaagtgggcgaactgtgcctaccgggcttcagtgggatgctgggatactggg

SEQ ID NO: 1656 - DNA, 424 bp, Chlorella sorokiniana
  unsure (1)..(424): unsure at all n locations; Clone ID: LIB3602-013-Q6-K1-E1
caacgtttccacccatctccccacccccctttccctgatttggcgcaggcaagaaccagctgcacgagctgggccccggccagcagatcaaggccatggtgcgccgcattgacaactccgcctggagcgccttcaagaacgtctccgcctaaacagctggaggcagtgcagccggagaggcaccgctgctcgcacatgccaggctgcatagcaataaacccaggcgctgccgttgatgccatgccagtctagacagcaccactatttccacctctcttttggggcagcatggggttgcacacccacgtgcctcgccttcactctttgcacatcgacgagcagtctgctaattacactcatgcaaaatcaacgtctcaaaaaaaaaaaannnnnnnnnannnnnnnnnnnnnnnnnnnnnnnnna

SEQ ID NO: 1657 - DNA, 496 bp, Chlorella sorokiniana
  unsure (1)..(496): unsure at all n locations; Clone ID: LIB3602-013-Q6-K1-E10
gacagatcagaggcatcggcatccagccgaggggcaggggcgctgcacaagcacgagcagcagggtttggtctgtctcgtcgcgcccaggctgccccaagaggctgagagacgttagatcgagactgcaaccacatcggcgccagcacaggccgaattgctagcagtggcggccggcgatgcggggcttcaggacaccgggcgacaagcggccactggtcctccttttgggctggctcggaagtaaacaccagcacctcaacaagtacacacagatgtggcaggagttgggggcgcaggtggtgccgcaccagccgtccatcctgcagacggccatgccctcggcgcaagacaaagcgctgctgcgcttcatgaaggacttcaactacctgtactcctcgctctgcaccgtgcggngagacacaccacccgtgctagtccatagcatgagcaacgcgggcttcatcgcctatggcaccatgctgcacctggtgtcg

SEQ ID NO: 1658 - DNA, 208 bp, Chlorella sorokiniana
  Clone ID: LIB3602-013-Q6-K1-E11
gcagcgccggccgatgccgcgcgcatgctcatgctcccaacacacacatgcacccccaaacacgcacccccaacccaacaccccaacacccccaaccaaccgtggcccacagcggccctcgccagattattaacttagccctgctgaaaactgcatgatgttagcttggcccccagtcaagcccgatgtgatgtaaatagagacgtgc

SEQ ID NO: 1659 - DNA, 414 bp, Chlorella sorokiniana
  unsure (1)..(414): unsure at all n locations; Clone ID: LIB3602-013-Q6-K1-E12
cgctgctgccctncagccngngggacacgngcggctgggccacaccctnngnggnggagaacggcgcctncctgctgctgggcgtgaaggagattggcctcacaattgaggagcccttcagcattctgcccctggaaaccatctgcaacacaattgagaccaacgtgtgggagctgcaccgcacccacagcaccgcggcggcagaggcgcagcaggaggcgcagcgcggcagctggtcgcagcaggcgcagcaggcagagcagggaccacagcaggtggatgcggatctgctggtcggatcccttgtgtcatcctggggcggccggcggtggtaaggcacctgcgcagctggtccccggggcatgcatcgtgttttgtactctcagccgctaacccattccctctcgagagtga

SEQ ID NO: 1660 - DNA, 612 bp, Chlorella sorokiniana
  unsure (1)..(612): unsure at all n locations; Clone ID: LIB3602-013-Q6-K1-E3
cgcgtacgtggccaaggaggagatccgggaggacggcaccgagaagagcaagaaggtgtttgccaacctgcccaccgaggtgggggccaccgaggcggaggagattggcgtggagcacctgctgcgggatgtcaaggacgcggcggtgtccaccctggcgtcagaggtgggcgacatggtgacggggctgcgcggcctgcgctcccgcctgctggagatccgcgaatacctggaggcggtgctggcgggcaagctgccggtgaaccacgatatcatgcgcaacctgcaggacatcttcaacctgctgcccaacctcaacgtggcggagttgtcgcgctccttcacggtggagtccaacgacatgatgctggtgctctacctggcctcgctcatccgctccatcaccgcgctgcacgacctgatagacaacaagcagtcacgccagtggcacgagaagcaaaagcaagccaaggaggaggcggccaaggcggagaaggagggcggcaagaaggcggcggccggcggcgaggcggcgccagcggcaaagggcggcgcagcggctgacggcagcgagaagaaggcgaggacngcagcagtagttgcggcgtggtg

SEQ ID NO: 1661 - DNA, 565 bp, Chlorella sorokiniana
  unsure (1)..(565): unsure at all n locations; Clone ID: LIB3602-013-Q6-K1-E4
cgcgcgaggcggggcgcctctgagctccgnctccgacgcagnccggcatcagcggccccgcagaggatgcagcagcggcgggcggcagcgccgatggggtagcagcgcccatggatgcagacggcggcgaggggcgggcgggcggcagcggcggcggngaggaggagcaagagggcggngagggcggcgggctggctttggatgcggagctgacccctgaggagatcatgatgatgcagcagatgggcatcccattcggctttgacacctcccagggcaagaagcacgaggacgctggagccatcaaaatcaagtccacccgcggcgcgcggcaatacatgaaccgccggggcggtttcaatcgttccctggatggcgaggggacaggagagaaggtccgtatcgagtggctgcgcagctaggcccggcccgtcagtgggacgtgaatgcagctcagctgtccaaagcgcagttcacacttgtgtgcagtgcatgcccagcctgtgtggtggcttccgctgcagctttgtcttactgttgcccgctctgctacagcacatgtaat

SEQ ID NO: 1662 - DNA, 516 bp, Chlorella sorokiniana
  Clone ID: LIB3602-013-Q6-K1-E5
gtgtggttcaaggctggcgcccagatcttccaggagggcggccttgactacctgggcaacccctccctgatccacgctcagtccatcgtggccatcctgctgacccagctggtgctcatgggcctgattgagggctaccgcgtcaacggcggcccggccggcgagggcctggatgccctgtaccccggtgaggccttcgaccccctgggcctggctgacgaccccgacaccttcgctgagctgaaggttaaggagctgaagaacggccgcctggccatggtgtccatgctcggcttcggcgtgcagggcctgatcacccgcaagggccccattgagaacctggctgaccacctggcggcccccgacgccaccaacttctgggtggactacgcccccaagtccgccggcatcggctactaagctgtttccgtcgcttgactggcgccgcccgctcgcccgcccgctgagtttacggccactcgcggcaacaggcagcagcggcgtctgtactttctg

SEQ ID NO: 1663 - DNA, 402 bp, Chlorella sorokiniana
  unsure (1)..(402): unsure at all n locations; Clone ID: LIB3602-013-Q6-K1-E6
aaaaaaaaaaaaaaaaaaaaaaaaaaaaaaaaaaaaaaaaaaaaaaaaaaaaaaaaaaaaaaaaaaaaaaaaaaaggaaaaaagagaaaaaaagagaaaaggggaaagaaaaaaaaaannaaagggggggggaggnagagggggancgagnnnanggaagggggggagggggaggaaanaggggaaaaaggggggaaaaaaaaaaaagggggggggccggagnaaaacaggggggaggggggaaaacccggggggggcccaaaaaaaggggagcggacaaaaacccccggccgacaaggggggaaaacaaaaagggggccccaccgaacggcccggccaaaaaggggcccccccggaagggcaaggggaccccccccagaggggccccaaaagggcgggggg

SEQ ID NO: 1664 - DNA, 439 bp, Chlorella sorokiniana
  Clone ID: LIB3602-013-Q6-K1-E7
ccggcctcaaggctgcccaggtcgcgctcaactccctgcgccggcagcaggaggaggaggcggccgctgaggcaggccaggagggcaaggagatggtggccgcctaagccagctggactcgccacagctcctcgcctttcaagcctttcaggctggcgtagcgctgtccgcagcagccgccagtcagctgcaagtgtacttcagcctttgttgaactcgctgccgcctctgattgcgccagtcagcagctactttgcccaacacacgccggggggttccctgggcgggcttccatcccgagcaataatgccatgcagcgctgaacgccacacgacacacccctttcagagaactgcctttcatctcgccctcagctgccatcccctgcctagcgcgatagcgtgcatgcaggcatggcacatgtaaatacactgctgag

SEQ ID NO: 1665 - DNA, 77 bp, Chlorella sorokiniana
  Clone ID: LIB3602-013-Q6-K1-E8
aaaaaaaaaaaaaaaaaaaaaaaaaaaaaaaaaaaaaaaaaaaaaaaaaaaaaaaaaaaaaaaaaaaaaaaaaaagg

SEQ ID NO: 1666 - DNA, 571 bp, Chlorella sorokiniana
  unsure (1)..(571): unsure at all n locations; Clone ID: LIB3602-013-Q6-K1-E9
cttcaaaaccaaggcgcaggagcacatgtggaatatgccgctgcagctgagctgccccaccttttacgactgcggcagccggcccacggatgcggaccaggcggcgctggaggtgcaggagggagacattgtcgtgctgggcagtgatggcctgtttgacaacatgtgggatgaccaaatcctggaggcagtggaggaggagcaggtgggcggcgccggcagcgtggaggagctggcggaggctctggcgctgcgcctggcgcgcaccgctcaccgccagtcattggaccccaacttcctgtcgcccttcacggcggagctgcaagagcgagcgggccctgacatgggccgcatcctgccgcagtcgggcggcaaggcagacgacgtcacggcggtggtggcggtggtggcgcgcggctagtgggcgcggcggttggctagcaggctgggctgccggtggcagaggggaagcggcaatgcgcacgcaagcatgcggcttggggagcgagcgccgtggcgcccgccctgcgttgtcccccagctgnctgcccgatgtaactgtgacactgnc

SEQ ID NO: 1667 - DNA, 91 bp, Chlorella sorokiniana
  Clone ID: LIB3602-013-Q6-K1-F1
aaaaaaaaaaaaaaaaaaaaaaaaaaaaaaaaaaaaaaaaaaaatttaaaaattaaaaaaaaaaaaaaaaaaaagaggaaagaggaaaaaa

SEQ ID NO: 1668 - DNA, 541 bp, Chlorella sorokiniana
  unsure (1)..(541): unsure at all n locations; Clone ID: LIB3602-013-Q6-K1-F10
cggcagccctcgtggccgtgccggcggccggcactgccgcagctagccgtcggcgccagcagcccagctgaacgactcatctgtgcggccgctgggccgctgtgattcatttgcatcggcccatgagcggctgccttgcacgcatggtgcggcacggcctgctctgcggcccttcatacctttgtacctttctgtatcatcttgcagcaatggcagccggctgcatctttctaacatcgtcaccggcccactcgtttgtgccatgcccacctgcctccaacgtcacccttcatcaaccctcacccaacccatccacctgccacccatccactcaaccttcctccgncacaacctntgncacccaatcaccacccatcacccggtcaacgcccctcatgcaccaatcttcccaatcaacaaaattgcaacccaaacgcacgtccgcggttgacaacttgcggccccttaaccggaaccatttttcaaccggcaacttttctggccgttaacggcggacattctaacttccacaacttaattc

SEQ ID NO: 1669 - DNA, 238 bp, Chlorella sorokiniana
  Clone ID: LIB3602-013-Q6-K1-F11
cgaacttaggcttgacagccactgtgcagctgccagcctgatagccaccctgcagctgctttgagcgtagagcgtgagccagttgaccgctgcagcggcgcgtcacccttcctgctttgctaactttgcattgagcgctgctgccacaacgaatgaaattgagcgatgaaggactgtaagccgtcaaaaccaaaaaaaaaaaaaaaaaaaaaaaaaaaaaaaagggaagacgatataa

SEQ ID NO: 1670 - DNA, 414 bp, Chlorella sorokiniana
  Clone ID: LIB3602-013-Q6-K1-F12
ctgctttcgcacttgcgcagctacgaaggcatgggggtggcgcatgtgcggtgcgtggcaggctgcacatgttcgaccacctacctggacggcacctgggagcagcaggccacgctgcagtacatccaccgcttcaaggtctcgcaacatgccgactgccgcgtgcgtgtgcgagtgatgagccaggctgggagcgtgccgcaggagggtcacaaggtgtccctgatggggctgatggtgtcacacatccccatccgcatgcacacgcgggacgaccatgccgagcagctcagcaatatcacccgacgcctgctgtgagccccttccctgcctcgctgcccctggagttggggccttccaaatacaatccaaggttaaccacgtatgctctgcatttgatcccgtcacacccca

SEQ ID NO: 1671 - DNA, 465 bp, Chlorella sorokiniana
  Clone ID: LIB3602-013-Q6-K1-F2
cccgatgaggtgtctatcgaggtcaaggcgcggcgggttcgcgtgaagggccctcgcggcacgctgcagcgcgacttcaagcacctggctgtggacatgttcctgactgaggaggagggcaagaaggtgctcaaggtggactgccactttggcaagcgcaagagcctggcgtccatccgcacctgcacctcgcacgtgcagaacatgatcaccggcgtgaccaagggctacgagtacaagatgcgcctggtgtacgcccatttccccatcaacatcaacatcgagaacaagggcggcaaggtggagatccgcaacttcctgggcgagaagattgtgcgcgtggtggacatgctgccgggcgtgacctgcgagcgcagcgccgccgtcaaggacgagctgatcctgaccggcaacgacatcgagctggtgtcccgcagcaacgcgctgatccaccagaagtgcctg

SEQ ID NO: 1672 - DNA, 101 bp, Chlorella sorokiniana
  Clone ID: LIB3602-013-Q6-K1-F3
gtaagtgaccgctcctgccggtagctcgctgcttcctgcttcatgccagcgctagcggcgggcatgtccttcccctgatgtctgtgtaagcacgtttagag

SEQ ID NO: 1673 - DNA, 129 bp, Chlorella sorokiniana
  unsure (1)..(129): unsure at all n locations; Clone ID: LIB3602-013-Q6-K1-F4
nnaaaaaaaaaaaaaaaaaaaaaaaaaaaaaaaaaaaaaaaaaaaaaaaaaaaaaaaaaaaaaaaaaaaaaaagaagggaaggggaaaaaaaaaaaaaaaaggaaaagggggggcggccgcccaaaagg

SEQ ID NO: 1674 - DNA, 361 bp, Chlorella sorokiniana
  Clone ID: LIB3602-013-Q6-K1-F6
cggccgcctgaacaagtgcggcgcgatctcgccccgctacgacattgcggccaaggacattgaggcgtgggtgggccgcctgctgccctcccgccagttcggccacatcatcctgaccacctcccagggcatcatggaccacgaggaggccaggcggaagaaggtgggaggcaaggtcctcggcttcttctactgagcggccttgttggatgcgccgcagcagccacggtggaccacagccgtggcggatgcagcacggccggcgcgcccggccgcggtgtttgctgcagcaccggcggcagccctgggtgctgcccccctcttagattgctgcaccgcacggttgtaacagaggttacat

SEQ ID NO: 1675 - DNA, 513 bp, Chlorella sorokiniana
  Clone ID: LIB3602-013-Q6-K1-F7
gggcaattcgttcgcgatggtgaacgtcccgaagaccaagaaggccttctgcaagggcaaggagtgccgcaagcacaccatgcacaaggtcactcagtacaagaccggcaaggcgtcgctctacgcgcagggcaagcggcgttacgaccgcaagcagtccggctatggtggccagaccaagcccgtgttccacaagaaggccaagaccaccaagaagattgtgctgcgtctggcctgcaccgtgtgcaaggcccagcacatgcacgccatcaagcgctgcaagcacttcgagatcggcggcgacaagaaggtcaaggggctatactagtaaaaaaaaggagagcggcaggcggagagcatgaccgagaaatggaggcagcggcgcccgctcaccctgggcggcctgctccccgcccggcgcctcgctttggcccgctctggccactcgtacgccttcttgtccatgcccttgtgctttctgagctgccaacctgcatgcaagcagctgccgtc

SEQ ID NO: 1676 - DNA, 298 bp, Chlorella sorokiniana
  Clone ID: LIB3602-013-Q6-K1-F8
gccaacaccaacccgctgttcttcctgctgcgcgtgctgctgggcacaattggcggcttctggtacttcctcctgcccatctacatgtggctcaagaacctggtgtggccgcgctccggccccctggctgacaagttttgattgggaactggacgaatagttatgcgctgtgcactgcgacataggatgtgaagttgattgatttgctgaacagaactgctctgcttacacgtgatgtatcatacatcaccttgctttctgcatgctgctcgaacgtgttgcaacacccggttgctgt

SEQ ID NO: 1677 - DNA, 265 bp, Chlorella sorokiniana
  unsure (1)..(265): unsure at all n locations; Clone ID: LIB3602-013-Q6-K1-F9
cccacgcgtccgnaaaaaaaaaaaaaaaaaaaaaaaaaaaaaaaaaaaaaaaaaaaaaaaaaaaaaaaaaaaaaggaaaaaaaaaaggggggcggaaaaagaaaaaaaaaaggnnaaaaacaaaagaaaagcggggggaaagcncaaaaagagggaaacggaaaaccaaggaaaagggaagnggaagacaaagaaaggggcgggaaaaaacaaaacgacgggcaaggaaaaaaaaagggggaaaaggaaaaaacgggggggggcg

SEQ ID NO: 1678 - DNA, 394 bp, Chlorella sorokiniana
  unsure (1)..(394): unsure at all n locations; Clone ID: LIB3602-013-Q6-K1-G1
aaaaaaaaaaaaaaaaaaaaaaaaaaaaaaaaaaaaaaaaaaaaaaaaaaaaaaaaaaaaaaaaaaaaaaaaaagaggaaaaggggaaaaaaaaaaaaaagggaaaaagaaaaggggcggccgcccaagaggacccaagcnaacgaccgcgggcaggcagacgaaaagcccncaaaaggggccaccaaaanaacaacaacgggccgcggnnaaacaacgccgggacgggaaaaacccgggcggaaccaaacaaaagcgccgggcagaaaacccccctnncgccagggggcgaaaaagcaaagaggcccgaaccgancgcccnnccaaacagnngcccacccggaagggaaaagggaacccccccggaagcggcccataaagcgcgggggggggg

SEQ ID NO: 1679 - DNA, 311 bp, Chlorella sorokiniana
  Clone ID: LIB3602-013-Q6-K1-G10
cgcaaggtcgtcaagtgctcctgcgccgtgatcaccgactacggcgaggagactgagggcctggccatcctgcaggagtacctgaagagccggtaaacggccaggctgggaacaggcggctaaattcgggcggcttgaaggagccacctgagtgccgcctggccctgcctcgcggctgccagctccaggtgccgcccggcccggctgcgtcagcctggccctgctgggcgccagccgggcaccggcttgcacctggcactcggtcgtcgcctttgctgacagagctgcggcggcgcgaaatggagcgggcg

SEQ ID NO: 1680 - DNA, 439 bp, Chlorella sorokiniana
  unsure (1)..(439): unsure at all n locations; Clone ID: LIB3602-013-Q6-K1-G11
cattggtgcatcgtttggcctgcccaccactgcttgcaagccagcgttgcgcagcagccgcagccccgcgcttcctctggctagctttgaacatggtgcccatccgcctgatcatagtgggatggcgcaagggcgtcagcaagctggacgctgccctggtggacaaggaggatgaggaggctgtgcagcagtacgagaagcgccggggaaccaagcacggcatcatgaaggccccctacgtgatcatgaacctgtttagaaagattggcggcaagaagaagaagacgaagagcggcagccaggcagcagcacaggagcaggaagacccaaacactgcgccgcangctgtgccgctgcccggcagcggcggcggccaggccgggtacgcagtggtctgagcggcacagtggtctgagcggcacagctgcgcctgacgtgt

SEQ ID NO: 1681 - DNA, 346 bp, Chlorella sorokiniana
  Clone ID: LIB3602-013-Q6-K1-G12
caccactttgcaatcgcttcgcgcatccagtctgcgcctggactgggacacggtccttaagctgctgccgcagttcaaggcactcgaaatcatcgacctgtctggcaactggggccctgtggaccgtaccgcgctgctgctggctgccgaggctgctccaaatttgcacaccatcagtgtgtttgaggtggatcttcagccgccggatggcttgcacaacatgtcgggcagcagacatgacagtgaccgccggcgccagctgctcattctcacctgggacagctagattgctatgcgtgttcgataggctttgtcaaactgctgctgttgcaagttgtgattggtg

SEQ ID NO: 1682 - DNA, 531 bp, Chlorella sorokiniana
  Clone ID: LIB3602-013-Q6-K1-G3
cagatccgcattgagtcacgcatcaaggtgcctcgtggcatgggtgtatggcccgccttctggctgctgccgagcgacggcgccaacatgggttgctcggggtgtggccgccacggcgtttgggcggccagcggtgaaattgacatcatggagctggctaacgacatgaagtcaatgcagggcaccctccactacggtggcgagtggcccgccaacgcatacacaaccgcatactatcagctgcccggcggcgcctcgtttgctgacgactggcacaccttccgcctcgactggaccaagaagcagatgaagtggtacgtcgacggcaagcttttctccaccaagtatagcggcaacggcactcgcaacggctggttctcactgggagccagccctgctggcgatccagccacggccgcccccctgcccggcgatgggccatttgaccagaagttttatatcatcctcaacctggccctgggcagcgagggcacgcagtttacgaccaatcacaacaacggggcgcccgtg

SEQ ID NO: 1683 - DNA, 434 bp, Chlorella sorokiniana
  Clone ID: LIB3602-013-Q6-K1-G4
gtgaccgacgagatgaccatcgctcaggaggagatctttggccctgtgcagtccatcctcaagtaccacaccactgaggaggtgattgagcgcgccaacaacaacgtctacggcctggcatcgggcatcatcagcaacgacgtcaacttcatcaacaccgtgtcccgctccctcaaggccggcactgtctgggtcaactgctacaacgtgtacgaccatgctgtgccgttcggcggctacaagatgagcggcatcggccgtgacaagggcgagtacgcgctggagcactacacccagaccaaggcggtgtaccaggcgctggagcccaaccagccctggctgtgagcacagcaggcgcagcatgagcagcagccacggcacagcaggcgcagcatgagcagcagccacggcacagcaggcgcagcatgagcagc

SEQ ID NO: 1684 - DNA, 461 bp, Chlorella sorokiniana
  Clone ID: LIB3602-013-Q6-K1-G6
gcgcgctgagggcgccgacctggccaaggttgagcgcgtggccaaggtgggcggcctgtacaagaacttcaccagcggccaggccctgtcctacctggacggcaccctccccggcgactttggctttgaccccctgggcctgtgcgaccccgagggcgccggcggcttcatcacccccgagtggctgtcctactccgaggtgatccactgccgctgggccatgctgggcgcggctggcttcctggcccccgagatcctggccaccgctggcctgatccccgccacccccgaggaggccgtgtggttccgcagcggcgtgatcccccctgccggccagtacggcaagtactggatggacccctacagcctgttctggattgaggccatcctcatgaacttcgcggagctcaagcgctggcaggacttcaaggagcccggcagccagagcaagcagtactttc

SEQ ID NO: 1685 - DNA, 425 bp, Chlorella sorokiniana
  Clone ID: LIB3602-013-Q6-K1-G8
cggacgcgtgggtgccgccccgcgagcctggctcgccctgctgcagcccgccggccggctgcccgtcgcgcccaggtggtgacgcgtgccttcgcgcccatggagatcgtgcagctggcggctgacgctgccgagaaggcgcccggcaccgtggacgcgcccatctgggccatcgtcgtcggcgccgtggttgtgaccgctgccagctttgcgctctctgccggcctgaagtccggcaccgacgccgcttctcagatgcagaagcgcgatgccaagaagttcaacaagtacgattgaacagccagcatgctcggctgagcccaacctaccagtcccaacacagttttaacaaatcaatccagcgacaacggtttccacaacggatcctggctcagcatggctgctgcggacctgacggcttacaa

SEQ ID NO: 1686 - DNA, 454 bp, Chlorella sorokiniana
  Clone ID: LIB3602-013-Q6-K1-G9
ggtgcgggcccagcccacccagcgccgtgccgcccgcaccgcggtggtcgcgtctgctgaccgcaaggccgccgccggcttcaccgccgctgccctggctgccgccgtgctgctgaacgcgcccgtggcccatgccgacctgaccgaggacctgctggccaagaccgccgccaacaaggccctgaacgacaagaagcgcctggtgtcttcctactccaacttcgcccgcagcacctctgtgtctaacggcagctgcgcactgcccaacaactggttcggctgcgacgtgactgttgtggctcccgacagcatcatcaagcaggacatcaagctggagtgcgagggcaaggagcccggcaagtgcgcctccaacatgaacatccgcaacatcaacaactagatgttaggcagctcgctgcgctgacgtggcgcggcggcagctaagcgtacgccc

SEQ ID NO: 1687 - DNA, 490 bp, Chlorella sorokiniana
  unsure (1)..(490): unsure at all n locations; Clone ID: LIB3602-013-Q6-K1-H1
cggacgcgtgggccgaggccaagccgnggctcgacgccgacgacatcgcgcgcctggtggagaaggtggacaacttcaccgcctggctggacgacggcgaggcggcgcangccaagcgcgccgcgcacgaggaccccgccttcaagtcggaggaggtctcctcctggctcatgcgcctgcaaaaggagttcacacggctcaactccaagaagaagccgcgcccgccgccgnncgccccttccgccgcggatgccaacgccaccgatgccgagggcgccaaggcagagggcgagggccaggcagatggggagcagcaggctgagggcgagcacgcggagcagcaggggcagggcgaggagaagcagcaggagaagcagcaggagcaggaggagcagcccgctggcgccgaggaggaggaagacaagcttgatcatgatgagctgcgcangtagagcggtagagcgaatctttcttggcatgtgccccgtgt

SEQ ID NO: 1688 - DNA, 445 bp, Chlorella sorokiniana
  unsure (1)..(445): unsure at all n locations; Clone ID: LIB3602-013-Q6-K1-H10
aaaaaaaaaaaaaaaaaaaaaaaaaaaaaaaaaaaaaaaaaaaaaaaaaaaaaaaaaaaaaaaaggagaaaaagaaaaaaaaaaaaaaaagaaaaaaaaaaaaaaaaaaaaaaacaaaaaaaaaaaaagaaaaaaacaaaacaaaagcaaaacggggggggggcggcaaaaaaaaaaaaaagaaaccacccgggggcgggaagaaaaaaacnnnacaaaagggggaagaaaagaaaaaaaaaggggcagggannaaaaaaaggcaggagggggaaaaacagggggaaccaaaaaaaaaaccgcacgagaaaaaaaccccccnnggaagggggggaaaaaaaaaaagagggcccaaaaaacggccccaaaaaaagagggaaaacaaaaaaggggaaaaggagggcccccccgaaagaacaaaaaaaaggaggggggggggggggaa

SEQ ID NO: 1689 - DNA, 494 bp, Chlorella sorokiniana
  unsure (1)..(494): unsure at all n locations; Clone ID: LIB3602-013-Q6-K1-H11
tgagcagggactaggtggtccacgcacctgcctgcgtaaccgtgtttgctgcagccccacccacccgccgcttatcccccttcactcgccaacctccaacaggcacggcggacttcctgcgcaaccctgttgttcattaaccatcgtgtctctcctgtttccccgcccctcccccaggcacggtcgacttcctgcgcagcctggagatgagcgctacaaggcaccccacacctccctccatttctgcgactccaagctccccaactgatccccgtatcgctcctgttccaccccactccccaggcacggtcgacttcctgcgcaaccttgagatgagcgatgatgagctgtccaaggccatcatcggcaccatcggagatgtggacgcctaccagctgccggacgccaaggggcgcaccgncttcatgcgccacatcctgngcgtgagcgatgaggagcggcaacagcgcagggacgagattctgggcaccact

SEQ ID NO: 1690 - DNA, 643 bp, Chlorella sorokiniana
  Clone ID: LIB3602-013-Q6-K1-H12
ctgccgcaccagcgggcgcgcctgtcgcaccgcaagacgatgagcttggacacgggtgcggcggcggcggcgcatgaggcggcagccgcggcgctgctgcagcagctgcaggagggtagcagtggcggcccagcccatgtgtcgcccaccaaggagctgcagcggcgcggcagcaaccttgctgagatggcggccatgcagcacatgcagcggtcggagaaccgcgtgcgcgccccctcccgcctggcgtgcttcaccctgtgcggccggcggccggcagtgaaggatgagtgagagcgcctctttcttagattgcacgatagactgccaccatttgggtggattgactgaccgactgactgaccccatgtgggatgcctgccactgcggcaggacctgccaaggacaattagcagcgttgacatgcttgctgttgccgcccaagaccaccctgccctggtttgctcatcatctttgcacccctatttcggacgtgcagactgcttgccgagtgcgtgagaactgtcgagcctgagccctttgtatacccagtctcttctccacctttgacaacccatcgctgctctgatcacctgttgccggcgcttttgactggtacagtactgtaaagctggcgtatgct

SEQ ID NO: 1691 - DNA, 74 bp, Chlorella sorokiniana
  Clone ID: LIB3602-013-Q6-K1-H2
aaaaaaaaaaaaaaaaaaacaaaacaaaaaaaaaaaaacaacaacaaaaaaaacaaaaaaaaaaaaaaggggcg

SEQ ID NO: 1692 - DNA, 324 bp, Chlorella sorokiniana
  Clone ID: LIB3602-013-Q6-K1-H3
gttcatgaacccatggtccctcatcgtgctggcggtcctggcgctgctgtggggatacgcctacgtcgtgcgcaccacgccgctggtcatcaatggccgcgagctcagcgaccgcgagaagttcctggcgctgagcggcacctcgctggtggtcatcttcttcctcaccagcgtgggagccacgctcttctacgccctcggcctgtccatgctgctcataggcgcgcacgcggcgatgcgggtgccagacgacctgttcctggacgatgtgcccgagtcgcagcagggcggcttcctctccctgctcacaggcggcgccaagcc

SEQ ID NO: 1693 - DNA, 433 bp, Chlorella sorokiniana
  unsure (1)..(433): unsure at all n locations; Clone ID: LIB3602-013-Q6-K1-H4
caacaagatcaagtacgtggagctcggctaccccggctttgaccccctgtcgttctccaagaacaactttgatgagtggaagctgaaggagatcaagaacgctcgcctggccatgcttgccttcctgggcattgtggcgcagcacaacgcgcagccgggcagccccctggagcagctgggtgctcacctggccaacccctggaagaaccacttcatcaacaacggcgtgtccctgcccttcatcaacgacaccgtgcacaatattttgggcggcagcgcatgatgccttgtaatgcagcttccagcgccgatgagctgtgcgtgagcgcagcttgagagaaccgagcaggcgggcacgctgggggcccttccncctgcaagcctgcctgccgcgttgtaccggcgtgccccgcgccagccacgtnaccaccct

SEQ ID NO: 1694 - DNA, 575 bp, Chlorella sorokiniana
  unsure (1)..(575): unsure at all n locations; Clone ID: LIB3602-013-Q6-K1-H5
acgcgatcttcaacgaggacggcctgaactacctgagcaacccctccctgatccacgcccagtccatcgtggctgtgctgctgacccagctggtgatcatgggcgccgccgaggcgtaccgctacagcggcgagggccccgtggagaccagcggcgactccctgtaccccggcggcttcttcgaccccctgggtctggctgacgaccccgacaccctggctgagctgaaggtgaaggagatcaagaacggccgcctcgccatgttctccatgttcggcttcttcgtgcagggcctggtgaccggcaagtcccccctggaaaacctggctgaccaccttgctgagccgtctgtgaacaacggcttcgcgtccgccaccaagttcctgcccctggcctgaacgccgtcgtcaacctggagcgacctgngcatcccatattaacggcggccagccggttttggacaagcacacacaacatatgagattcccaacctccctgcgcactgcttgtaacaatcctggctccctcttgtacccttgacccgcactcgggcgtggatatgtaacgttccgcgg

SEQ ID NO: 1695 - DNA, 87 bp, Chlorella sorokiniana
  unsure (1)..(87): unsure at all n locations; Clone ID: LIB3602-013-Q6-K1-H6
ctgccgcaccacggcnggcgccagacgagccggnggacgaagagcaaggacaccagccccgcggcggcggcgcgggaagcggcagcc

SEQ ID NO: 1696 - DNA, 223 bp, Chlorella sorokiniana
  Clone ID: LIB3602-013-Q6-K1-H7
ggccgcctgcggcgcctgctggccgagaccgccggcagctgacgccgtgcgacgacctgaggggcacacttgcacagccgtgcaaacactgctgggacttcagaatagggcggctggggcgcagaccaccaccacccatccactctgcatcccatgccgaccgctgccgatctggcgccttcttcctccctccgttgtgatgatttaacccctggtaccactg

SEQ ID NO: 1697 - DNA, 369 bp, Chlorella sorokiniana
  unsure (1)..(369): unsure at all n locations; Clone ID: LIB3602-013-Q6-K1-H8
cttgcacgcatggtgcggcacggcctgctctgcggcccttcatacctttgtacctttctgtatcatcttgcagcaatggcagccggctgcatctttctaacatcgtcaccggcccactcgtttgtgccatgcccacctgcctccaacgtcacccttcatcaaccctcacccaacccatccacctgccacccatccactcaccttccctccgccacaacctctgccacccactcaccacccatcacccgctcaacgccctccatgcaccatcctccccatccaccaaatctgccaccccaaacgcacgtncgccgntgcaccacctgccgccccctcacccgcacccatcttccacccgccacctttcct

SEQ ID NO: 1698 - DNA, 354 bp, Chlorella sorokiniana
  Clone ID: LIB3602-013-Q6-K1-H9
cgtaccccaggcacgcggggctgtgcctggagacgcaagcgttccccaacgccatcaacacgcccagcttcccgtcagtggtcctgcgtcccggagaggagtaccgtcacaccgtggtctaccagttcttcacagagcagagctgagcagtaccgtgcagcagctttacggagcagagctgagcagtgccgtgcagcagtgcagctgctccctgccgcttgcaaagaaactcagatgtgcagcaccgagcggctgcaggcgagacacctgcgccttgggcggcgtggtgcgctgcactagaaaccgtgctgccttgcccggctatgaacgtgtgctgcatggcagcagacctgt

SEQ ID NO: 1699 - DNA, 231 bp, Chlorella sorokiniana
  Clone ID: LIB3602-008-Q6-K1-A1
aatgaagggaagttaaaagcggtttccccaagctgcttgcgagcgggcgcacaataggcagcatcaaccagaggcggacaaaatgaacgctcttacttgaactacttggatacagccagctagctgccgactggttggttcgattcggttgcaagggcggggttgccggcacatgctccgggcccgccatgttaaaatgccctgaaaagcatccaacgaagaggggaggga

SEQ ID NO: 1700 - DNA, 392 bp, Chlorella sorokiniana
  Clone ID: LIB3602-008-Q6-K1-A12
gcagcaacagcagggcgtgagcatggcaagacatggcgtcagcagctagtagcaacagcagcagcacagcagccagcagtgggcagccatgccactgcaagttccccctccatccttccattctccctgcctgcaacttgagctgcacctgctttcgcatggcgctcacgagtgcggttgttgcatggcgcgcgcttgtaagagcggtgggcttaaaaaaaaaaaaaaaaaaaaaaaaaaggaaaaacaaaaaaaaaaaaaaaaaaaaaaaaaacgcaaaaaatggaagaaagaaaagggggtgtggtgtgaaaaaaaaatcaatattactggtcggggttatacaacaaatgtaactgttaaaaaggctggcgttacacaacttaatagcc

SEQ ID NO: 1701 - DNA, 528 bp, Chlorella sorokiniana
  Clone ID: LIB3602-008-Q6-K1-A2
accggaacggaggcccggctcgacgtaccgggtcccacgttgcctgaacctgaatacttttcgccgcttctccacccaggggtgcggcagctggccccccctttgatgtccagcccagcactaggctgccacgcctcaccccttttgcccctcgggccctgcccgcctcaccatgtttgctgtttgtatatgtacatcaaacccgccaacccagcggcgccgcaccctgctcgcacatgttgtgctcagcgtgcgtcccacccacgcccccacctccagatgcgttcggtttgcatcgcctcccaattttgccttttcagcacggttttgcgtctctgccccctcttgcaacctctccgcatgcgaccggccttgttagtagggctctttgatcctgcgactgccccacggagacacgctgcacctccggatccctgcccctcctgcccaggcagtctttcatgattcatttcaaagcgtactgtgccccaccccttttctcgcttctatttaccctgccaccctgca

SEQ ID NO: 1702 - DNA, 354 bp, Chlorella sorokiniana
  unsure (1)..(354): unsure at all n locations; Clone ID: LIB3602-008-Q6-K1-A3
gtccggccacctttcctgccgatcaccgccgcacattctacctnccacacctaactgcatgtgcaccctctaccggcgcgtggacacagcggctgctgccatgcaaagctgctgccaaacccatccattatgctgcggcacacacttacccacacgttcaacgtattcagacccattttcaaggcccggctgtacagcgcctttttgcgtccatatgcccaactggtgccaggacttaatgtgtaacaaatggtgtgttngcaagcaaacaactgctttcacgtggcctgtatgtgcaatgctgaatgctgctggaatgctctgcggatgcctggctgacgtgcccatccccag

SEQ ID NO: 1703 - DNA, 506 bp, Chlorella sorokiniana
  Clone ID: LIB3602-008-Q6-K1-A4
cgcagctgcaggcggtgtcgctgcggatagcgacgctaaagtccacgcacgccatgggcgaggcgatggcgggggccaccaaggccatgggcgccatgaaccgccgcatgaacctgccggcggtcgccaagatcatgcgggagtttgagaagcagaacgagcgcatggagatgacgagcgagatgatgggggatgcggtggacggcgtgtttgaggagggcggcgaggaggaggagacggacgagcttgtggggcaggtgctggacgagattggcatcaacctcaacgcctccctggtgtcggcgccggggcagaaggtggcggcggcggcgcccgcggcggcagcgcagcagcccgtggcacagccaatgggcgcagcagaaggcggcggcggcacggcaccagggctagacgatgacctgcaagcgcgactggaccgcctgcgcaagtcataaggccggctgcgtgcacagtacgctagaactgtagggacctaccatcatgct

SEQ ID NO: 1704 - DNA, 503 bp, Chlorella sorokiniana
  Clone ID: LIB3602-008-Q6-K1-A5
agcgaggcccaggagcaccatggtgtcgctcaagctgcagaagaggctggcggcctctgtgctgggctgcggcctgcgcaaggtctggctggaccccaatgaggtcaacgatatctccatggcgaactcccgccagaacgtgcgcaagctggtgaaggacggcttcatcatccgcaagcccgagaagatccactcgcgccaccgcgcccgcaccgcagcagaggccaaggccaagggccggcacaccggctacggtaagcgccgcggtacgcgcgaggcgcgcctgcccaccaagatcctgtggatccgccgcatgcgcgtgctgcgccgcctgctcaagaagtaccgggacagcaagaagattgaccgccacctgtaccacgagctctacctcaaggtgaagggtaacgtgtacaagaacaagcgcgtgctcatggaggccatccacaagcagaaggcggagaagatccgcgagaagaacattgcggaccagctggaggcgc

SEQ ID NO: 1705 - DNA, 522 bp, Chlorella sorokiniana
  unsure (1)..(522): unsure at all n locations; Clone ID: LIB3602-008-Q6-K1-A6
ggcggaccaacgcgtccggccggcgcttcgatcttcaacgaggacggcctgaactacctgggcaacccctccctgatccacgcccagtccatcgtggctgtgctgctgacccagctggtgatcatgggcgccgccgaggcgtaccgctacagcggcgagggccccgtggagaccagcggcgactccctgtaccccggcggcttcttcgaccccctgggtctggctgacgaccccgacaccctggctgagctgaaggtgaaggagatcaagaacggccgcctcgccatgttctccatgttcggcttcttcgtgcagggcctggtgaccggcaagtcccccctggaaaacctggctgaccaccttgctgagccgtctgtgaacaacggcttcgcgtccgccaccaagttcctgcccctggcctgaacgccgtcgtcaacctggagcgacctgngcatcccatattaacggcggccagccggttttggacaagcacacacaacatatgagattcccaacctccct

SEQ ID NO: 1706 - DNA, 490 bp, Chlorella sorokiniana
  Clone ID: LIB3602-008-Q6-K1-A7
tacctgatctgcagtgggccatctactccgaggccaagcaggactgcccccaccagaccgacatcattgcctgcttccacccgtaccgggctcagtggtatgagtttgtcaaggactgcgctctcttccagtggggcgcctcgggcagcagcgctgagggtgagggcgagagcggcagctccagtagcagcagctccagcagctccagcaccagctccagcgctgcggcggagggcagcgtcgcggcagagggcgcggccccgacaaccacagcagccgaggggagtgcagcggcggagggcgctgccccgtcgccgccggctgctgcagatgccaacctggggcggcggcgcgtgctgctgcaggaggctgaggccgcgctgggcgacggcaccgtgaacgtgtacaacggctgcttccccggcttcaaggacgtggaggagtttgaggactacatggacggcaagtacgagttccctagcgactcggc

SEQ ID NO: 1707 - DNA, 377 bp, Chlorella sorokiniana
  Clone ID: LIB3602-008-Q6-K1-A8
ggcctgtttggaggcggcagcagcagtggcagcagcaactactagcagatggagcctctggagaacgatgagggcggcctgatggtggcgctggatgccaacagctcggggtcgctggacggcagcagcgaggagccctttggccccctggccctgctggcggtgggctttgcagcacacgagtttgagcggctgcagcggctgctgcatgaggagatggaggccgcgatggtgaaactggtgccggcttctgcgtccatgctggagggcagactgggggcggcgctggagcgggagccagtgccatcattctaacaagcgccgctaggcacgcggcgggcggtctttctgtcaagcatgtacgcagcagaagtgat

SEQ ID NO: 1708 - DNA, 89 bp, Chlorella sorokiniana
  Clone ID: LIB3602-008-Q6-K1-A9
aaaaaaaaaaaaaaaaaaaaaaaaaataaaaaaaaattatttaaaaaaaaaaaaaaaaaaggggggggggaaaaaaaaaaagagggggg

SEQ ID NO: 1709 - DNA, 495 bp, Chlorella sorokiniana
  Clone ID: LIB3602-008-Q6-K1-B1
gacaggtgtgtgccgcgcgccggggctggcgtggggactcggagcagttgttggcttgccaaccctcattgtgcgccccctcatgtctgccacagctcctcgcgttcttgtcctgcgttgaaaaatctgtccctcgctgcgtccccgcctttctctatctgcagccgggcgctgtacccgctgggctggatccacacgcaccccacgcagacctgcttcctgtcgtccgtggacgtccacacacactgcggcttccagacgatgctggacgaggctgtggccattgtgatggcgcccaaggacccatccaagcgcgtgggcatcttccgcctcaccacccccggaggaatcaagctggtgcagcgctgcccgcagcgcggcttccatgcacaccctgccaccgacacggggcagcccatctacgagctgtgcggccacgtgtacctcaacccccgggccaagtacgaggtggtggacctgcggtgactagcggag

SEQ ID NO: 1710 - DNA, 486 bp, Chlorella sorokiniana
  Clone ID: LIB3602-008-Q6-K1-B10
ctcgatgcttgctacacataccatgcctctgtgtcatgtgtgatgcatacgcctacatgccgcaaaccagaatactgcagaaagggtggctggcagcagggctgagatggaatgcaggagtcggtgaacaaggatgggctgatcaatatgtgtgtgtgggagggaaaatgcagtcagtcacaaggaagttgcagagagttcaaaggagcacagtggaaatcagagcgcaagtagatcgccccgctgttgcaccgcactgcgacagcccggctgcagcagagcacaccgcttggtcagcaatcaccgcgccggccctgctgcgctccctgtggtcagccggcggtgcacgtgcttggcgcaatagtcgaatccggccacaaagctgaacagcaggttgaacacagccgcctgctcggcctctgaagcgggctcccccagccaggcaactgtctcagtcaccagcgcagaggtctgcttggaagcagc

SEQ ID NO: 1711 - DNA, 501 bp, Chlorella sorokiniana
  unsure (1)..(501): unsure at all n locations; Clone ID: LIB3602-008-Q6-K1-B11
ccgctccctgacccagggcctgaagggcgacgccacctacctgattgtgaacaacgagggcgccattgagaagtacggcctcaacgcggtgtgcacccacctgggctgcgtcgtgccctggaacaaggccgagaacaagttcatgtgcccgtgccacggctcgcagtacaacgccgagggcaagaagatccgcggccccgcccccctgtccctggccctggcgcactgcgacgtgaacgacgacatcgtcaccttcaccgattggaccgagaccgacttccgtaccggcgaggctccctggtggaactgagcgggtggcggcagcagcggctgatgaggcgcaatgttggacccccagcagcacaccccgccagcccgcagctccccactcgccgcccgttgagcggcggcggcttgtaaacccggcccagctccgcggctggctgtcctattctttgattgcagctntcgtccccttgtgggctgcgcgcggccggggcg

SEQ ID NO: 1712 - DNA, 498 bp, Chlorella sorokiniana
  Clone ID: LIB3602-008-Q6-K1-B12
ggcatccgctgttgacggcacttgtgccgcgcggcaagcagctggatgcactcaacctgaatctctgctccttccagctgcctgctgcgccgccggtgatgctggcagcgcagcagtgggcgcagctgcgccagctggagctgtgcgactgccgtggtgaagtcaacatggatggagttgtgctgcagctgctcgccagcgcgccgcggctcgccgtgctcaagttctgctcggctaccgacccctaccctgagagccgcctgcgcgccttccctactgccatcttcagccaccccgctctggtcagggcagaagtgctcagcacgtttgcagaggactgggcctcgttccggctgccaccgctccccgaccctcgtgagtgcggctgactgtggcgattgctgcctggcgggttggcttcgctgctcccacagcgtgcgtcgccccagcaaacatttctgtgccatgtgctgggtgttgcttgcttgatactttgac

SEQ ID NO: 1713 - DNA, 454 bp, Chlorella sorokiniana
  Clone ID: LIB3602-008-Q6-K1-B2
ccctgatcaagtcgtggaacgagatccgctccgagggcctgacctgtaactgcaagatacccggcgtgcacgatgctctgtaccctgagtactccatcctgaagcaacgcattgcccgccggctgtggcacgagggagccaccgacgagttcgtgaaggggctcaacctgaccgacatcaacaaggtgggtgagcgcaccattagcgacgaactggagttcctgatcttccaagccgtggaacccaaaaaggccgactacccaaggatcactggggtgcagatacacaaatggggcaacaactttgaggaagactcccccaaactggagtttgtgggttccactgacgactacgtggtgggcaacggtgtgaagacccacaatgacctgaccgccctgccgcctttgacggcgcgccaaacccccctgtttaacggcacccccgagctgagcgc

SEQ ID NO: 1714 - DNA, 407 bp, Chlorella sorokiniana
  Clone ID: LIB3602-008-Q6-K1-B3
caaagttcgcatgtatgccctgcttccaaagcagctttaacatgtgcgctaacatggagaaaaaatggagtggcggtagacaatgatgcagccgttcaagctttgcagcctgccgtacaggcccttgcaacagctgcccttgcgacgcagtaagaatgcaagtttggcatgcggttgattattgtaaaagatacgagccccccaaaaaacagaacatgatgacttgaacacgagggcggtggcccacacggtggccgcctacgcatgcttgactgggctgcggacactgtgctgggcctacacctcccatgacaggctcgtgcgcatttttctaagtggctcccactgaagactctgccttggccaacgttgtgcggaccccggttgatatgcccatcttgccacct

SEQ ID NO: 1715 - DNA, 482 bp, Chlorella sorokiniana
  unsure (1)..(482): unsure at all n locations; Clone ID: LIB3602-008-Q6-K1-B4
cggtgtcacaccttgttgtgggcggcttgttccaagttgtggggcaccagcagagggcatccacggcgggttcatgccgaaaatcaaccgcggcggcctgttgttgatctaccaaatcttggccgacacttngcaggcggacatcgcaaaggcgcttcaggtcataaccgcgtcgttgcaggcgcgccagccttgcatgttcttttgcaagctgggcaaggaccgcaccggcctcatggcggccttggtgctggcagcctgcggcctgagcgaggaggaaatcgtggccgactacgtgcgctccgacggcgtgcacgaggtggcgctgggcgtcattgagaaggacagcgacctggcgggcatggaccaggccgtgtttgcggcggcgccgcccgaggccatgcgcggcctcatgcagtacctcaaggagcggtatggccgcatgcggcactacatggagtacataggctttggcgcggagc

SEQ ID NO: 1716 - DNA, 112 bp, Chlorella sorokiniana
  unsure (1)..(112): unsure at all n locations; Clone ID: LIB3602-008-Q6-K1-B5
cggaaannccggggccaaccaacccgtccggggtggtgagcaaaaaaaaaaaaaaaaaaaaaaaaaaaaaaaaataattaaaaaaaaaaaaaaaaaaaaaaaaaaggggagg

SEQ ID NO: 1717 - DNA, 505 bp, Chlorella sorokiniana
  unsure (1)..(505): unsure at all n locations; Clone ID: LIB3602-008-Q6-K1-B6
tcatgcccgaaaccgagtacgaccaccccgagaagggcgacgcgctgtacgccatggagctgtcgctgtccctggagaagctcaacttcgacaagctgctgcacctgtgggaggtggtggacaagcacggcgacccgcagctgacgcagtacgtcgaggacatgctgcaggagcaggctgaggacatcaagaaggtggccgactatgtgagccagctgcgtcgcgtgggcaagggccacggcgtgtgggcctttgatcacgagctgtacgaggaagagatccgggcccgcgccacgcccaacgcatgagcgctcatcgtgccagagttgggcatggcgcagccaggagcagcctgagggcgagccgcgcccgctgctgcgcccagcacagcctcggcctctggatcgcagcccagccctccggaagtggcttgacaagcgcgcacatgcccagtgccaaagcgcggcttgtgccaattntctggagcagaagcagcgggcaggca

SEQ ID NO: 1718 - DNA, 493 bp, Chlorella sorokiniana
  Clone ID: LIB3602-008-Q6-K1-B7
ggcaagcgccgccggtttgctgctgcccaccaggcagctgatgccgtggccaaggcggtggctgctgccggcgttgacagcctgactccggcccagaaggacgcttacaaggcggcgctgctggcgaatcccatgcacaagcagatcgcgcaggacatggcggacgtgtgggtcgagggccagccgctggctgtggcagccgctgagctggctgaccacattccgctgctggaaatgctgctagtgggcgaagcctctgaggagcagctggcgtcagctccagcggctatgcgggcggcgctgctggctctggcaccgctgggctttgaggcggcgctggggttgacccctgccactcaggaactcgactggatagagtttagcggcgacatgctgcggggcatggtggagcggctggatgctgatgtggccaaagagcaggcccgggcctgaaaggcagggcgccagctgccagcatgctgcgcaagcgccg

SEQ ID NO: 1719 - DNA, 488 bp, Chlorella sorokiniana
  Clone ID: LIB3602-008-Q6-K1-B8
gcatttttcttttttttctgttatttatcagccagggtaccacgttgcctgaacctgaatactgttggccgcttctgcacccaggggtgcggcagctggccccccctttcatgtccagcccagaactaggttgccacgcctaaccccttttgcccctcgggccctgcccgcctcaccatgttggctgatgggatatgcacataaaacccgccaacccagcggctcctcaccctgctggcacatgttgagctcagtgtggatgccacccacgcccccacctccagaagcgttccgattgcattgcctcccaaatttgccttttcagcacgggttcgcgtctatgctccctgttgcaacctatccggatgcgaccggccttgttagtaaggctctttgatcctgcgactgccccacggagacacgctgaacctacggatccctgcccctcctgaccaggcagtgtttcatgattcaattcaaagcgtgct

SEQ ID NO: 1720 - DNA, 495 bp, Chlorella sorokiniana
  Clone ID: LIB3602-008-Q6-K1-B9
gaccggggcaactcagtgctgcacatggccgcgggccagggccgcccaagcctggtgcggttccttctgcggcacggcgcacgagtggatggtgctgcgcacgccggccgcccgcaatcgccgtggacgcccctgcacaatgcggctgagacgggcgcggtggcggtggctgaggcgctgcttgatgcaggtgcgcccgtggatggccggccggtatctgaagcgcccgcggctggagaaggtgggagcggcgaggagccaatcgcgccgcccagcgacactcccctgcatgtggcagctagccagggccacacagccatggtgcagctgctggcggcacggggcgcagacctcaaagcgttgagcacgaacgggcagcgccccttggcgcgcacagggcgccaacccacagtttacggattcgttcggccagaccgcgctggacgcagcggcgggtggtgatgccgaagcacgccgtgctttgaagcgggaagc

SEQ ID NO: 1721 - DNA, 493 bp, Chlorella sorokiniana
  unsure (1)..(493): unsure at all n locations; Clone ID: LIB3602-008-Q6-K1-C10
cgatggcacacctgccagacagctctgccggctacgtgagcggcctgaacttcttcatctacaaattcgaccggcagcaagcgggcctggcggggctcagcttcgacgagggcgagtttggcgtgtgcggctacattgtgcagggcctggatgcggtcagcaagctggagagcggggaccgaatcgtggcagcaaaagtggtctccggactggacaagctgactgccacatgacgcagcagccgcagcggatactagctggggcctccgcagcaacactccgaccgtgcaactgcatttttgtcaatgctgtggggctaactgtcttgtgcgcatgccactgtgttagcatgagccgctcccagacttgccgctggctttctttcttgttgcatgaacctccaatgaccttgagattggtaacatgcgcaattgcnnaanaaaaaaaaaaaaaaaaaaaaaaaaaaaaaaaaaaaaaaaaaaaaaaagggcgg

SEQ ID NO: 1722 - DNA, 500 bp, Chlorella sorokiniana
  Clone ID: LIB3602-008-Q6-K1-C11
gcagctggcacctgtcacagtcgtaagggcacagtcgagtcaccatgactcgcgtgtcggttcttgctgatgccctgaaaactatgtacaatgccgagaagcgcggcaagaagcaggtgctgctgcgcccctcctccaaggtgctgatcaagttcctctcgctcatgatgaagcacggctacatcggcgagtttgagtttgtggacaaccaccgctcgggcaagattgtggtggagctgaacggccgcctgaacaagtgcggcgcgatctcgccccgctacgacattgcggccaaggacattgaggcgtgggtgggccgcctgctgccctcccgccagttcggccacatcatcctgaccacctcccagggcatcatggaccacgaggaggccaggcggaagaaggtgggaggcaaggtcctcggcttcttctactgagcggccttgttggatgcgccgcagcagccacggtggaccacagccgtggcggatgcagcacgg

SEQ ID NO: 1723 - DNA, 359 bp, Chlorella sorokiniana
  unsure (1)..(359): unsure at all n locations; Clone ID: LIB3602-008-Q6-K1-C2
agcagccggttctttgctagtatgcgtaagggtctaagctgccacgagttttctgcctttcttagcacttagcgccgcaggaggagcaaaacacacacacatatttggctgcagccaagcaccgcacatatgtgagcccgggccttgtacgccggcgtgcccaagaaagacctatttttccctgcctcccctgtgattgctgacctctgatttgctccctgttttatgctccgcccgtcgccccacccccagcactgcctccaaaactgtttcaccgtccttggcagccgccgtctggcacaccctccctgtgtgcgacggcagcagctcagctgtaatgccttacagcgcnnnnnnna

SEQ ID NO: 1724 - DNA, 485 bp, Chlorella sorokiniana
  Clone ID: LIB3602-008-Q6-K1-C3
cggacgcgtgggggccaagcagcccaactccgctatccgcaagtgcgcgcgtgtgcagctgatcaagaacggcaggaagattgcggcgttcgtgcccaacgacggctgcctcaacttcatcgaggagaacgacgaggtgctcatcgccggtttcggccgccgcggccacgccgtgggtgatatccccggcgtgcgcttcaaggtggtgaaggtgtccggtgtgtccctgctggcgctcttccgcggcaagaaggagaagccccggaactaaacggcccgcgcccagcagcggcagcagcggcgcgcctcggcaacggggggcgccgcgtccgccagcactgcacctgcctggcggcggcttgggagggcgtgcagcgcatgcagcgtgcaccgccgcggccctcccgatagtttaggaccccacaaccagctccctctgctcccactactgatgtaacacgcaactgccaaaataaaaaatatta

SEQ ID NO: 1725 - DNA, 220 bp, Chlorella sorokiniana
  Clone ID: LIB3602-008-Q6-K1-C4
gccgggggggtttttcaaaggtgaagaggcaccaccccaaagctttttttaccaaagcgaaaaaacagcatgggacctcaaaactctggtttaaaaaaaaattaaaactttttatatccttttcgcactttaaaacaataattttccctgaatatttgaaaaaaaaatattttcaccacacccccctgtattcaaaattgaaaaaaaaaaattttctttc

SEQ ID NO: 1726 - DNA, 465 bp, Chlorella sorokiniana
  unsure (1)..(465): unsure at all n locations; Clone ID: LIB3602-008-Q6-K1-C6
tcggcattgaggccaagcagcccaactccgctatccgcaagtgcgcgcgtgtgcagctgatcaagaacggcaggaggattgcggcgttcgtgcccaacgacggctgcctcaacttcatcgaggagaacgacgaggtgctcatcgccggtttcggccgccgcggccacgccgtgggtgatatccccggcgtgcgcttcaaggtggtgaaggtgtccggtgtgtccctgctggcgctcttccgcggcaagaaggagaagccccggaactaaacggcccgcgcccagcagcggcagcagcggcgcgcctcggcaacggggggcgccgcgtccgccagcactgcacctgcctggcggcggcttgggagggcgtgcagcgcatgcagcgtgcaccgncgcggccctcccgatagtttaggaccccacaaccagctccctctgctcccactactgatgtaacacgcaactg

SEQ ID NO: 1727 - DNA, 494 bp, Chlorella sorokiniana
  Clone ID: LIB3602-008-Q6-K1-C7
gcattgaggaggagctgggcgatgccgccgtgtacgccggcgagaactaccgccacatcgccatcgcctaagcgcttcagcgatgagcatccgctgggccgaggcagtgcagcccaggcactgctgctgccactgtgcaagccgcggaactttgccgggcctgagtgcacttgcggtgggcaccgagcaaacccaaacatgaggcacggcggggatgaccagctcctgctagccgcagattgagcagcccgcagcagccgccccgtcgtgcggcggtgcctgatccgtggacagtgcggcgcgcattagcgctcgctgcccgcggcacatgtgccagccatgatctaattctagatttcccttgctgcccgcgtggcgcctgcgtgcaccacggggcctctccctcttgcgcctgcccctgttgactacccaggcgcttcgctttctcccatgccattgctgcgaagacccttttgacacaaccacacgaaaaa

SEQ ID NO: 1728 - DNA, 56 bp, Chlorella sorokiniana
  Clone ID: LIB3602-008-Q6-K1-C8
aaaaaaaatacgaactgaacaatgcctacctgtacatttttttaactcaccgacac

SEQ ID NO: 1729 - DNA, 482 bp, Chlorella sorokiniana
  Clone ID: LIB3602-008-Q6-K1-C9
gacgcagcggacagagcagccggtcaccatggtgcagcgcctcacctaccgccggcgtcacagctacgccaccaagtccaacaagcagcggatcctgcggacccctggcggcaagctggtgtaccagctggccaagaagaagacctcccaccccacctgccccatctccggccagcggctcaatgggctgcccgcggtgcgccccaacagcctgcaccgcgtgaacaagagcaagaagacggtgcaccgcgcgtacggcggccacctggcggcgggcgtggtcaaggagcgcatcgtgcgcgccttcctggtggaggagcagaagatcgtgaagaaggtgctgaagctgcaggctgccaaggaggctgcgcaggccaaggccgcggccgcaggcagcaagggcaagaagaagtccaagaagtgagcggcgcacgcgagcggacagttgcgccccatgctcccgctgtaatgcaccctcgatg

SEQ ID NO: 1730 - DNA, 310 bp, Chlorella sorokiniana
  Clone ID: LIB3602-008-Q6-K1-D1
tcgaccacgcgtccgggacgctggcgtgacgctgggtcacagaccaccctggattgctgcggcctgaggccgcctgatgcgtgaatgctcggagatcgcggacacacaggcgaagcagaccaggcagcaggcggatgagcagggcagcacgccgacagcagggggtgctagggcagaccatgcacggcggcgctgatgcgttaatggcagccctgtgggagtagaaaagctgccctgttctgtatgggcgtcactggcacagcttgacatttattcctctacacgcacgcagctgtaagagacagctgtg

SEQ ID NO: 1731 - DNA, 384 bp, Chlorella sorokiniana
  Clone ID: LIB3602-008-Q6-K1-D10
ctatctcagccagggcgaggtggagaaggagtggagcgagtcgtactgagcggccctgcctgctcggccggggtggctcacaagggactcttaccagcatgcggcgccgccgccgccgtgcttttgcagttcactccctggctttgccgcacccggctctggcccccgacccgccctcaccccgtctcacacccccgccgcaatccatagtttgagcgagtcagctgcgcgttcacatcccaaatttcagtgcccgcttgctctcccctcctgacctccgttgccgcctcccttttgattgctttccgctgcgctcgtgggggcagcagaatggccgcgcccccaatcgaatcatactaaagcacttgtaagatatctgcggtt

SEQ ID NO: 1732 - DNA, 85 bp, Chlorella sorokiniana
  Clone ID: LIB3602-008-Q6-K1-D11
gttttaccgtctgtacgctggcacatgtgccgcccgccctttttgctgcaacaccttgcaccccaatgatgttagacctcttcag

SEQ ID NO: 1733 - DNA, 77 bp, Chlorella sorokiniana
  Clone ID: LIB3602-008-Q6-K1-D12
aaaaaacaaacagaacgaggagaaaaatgagtgcaagcaagttatacatgaaagaacatgaaatgggggggcggttt

SEQ ID NO: 1734 - DNA, 347 bp, Chlorella sorokiniana
  Clone ID: LIB3602-008-Q6-K1-D2
cggacgcgtggggttccagggcggcgtgctcatggtgtcgcacgaccaacacctgattgagtccacggtggacgagctgtgggcggtggagggcggccgagtaaccgtgttccatgggacctttgaggactacaagaggcggctgcgcatgctgaaccggtgatgctcctttggcacggcagcggggcgtgcggatgcaggcagcgagcggagccggggaggcatgcagcagctggcgcttcagtcgcatctcgaaccagcctgcccatgccttcatttgttgactggcatcattcagtgtggcttgcttgtcatgctgcggccagcgcctgtgaggaacagaagtg

SEQ ID NO: 1735 - DNA, 245 bp, Chlorella sorokiniana
  Clone ID: LIB3602-008-Q6-K1-D4
gccacagccaacgaggtgttcgttgcgggcggcggcgacggcattgattggtatgactcaatggtgcgctacgatcgcaaggccggcctcatgggcggttggcaggaacttgcaccgttgcaggtggcacgtggcagcctggcggctgcagtggcggccggctacctgtttgtgtatggaggcggaaagcccaacgagcagtacaacgtagtggagtggtacgaccccacatccaaccgctggct

SEQ ID NO: 1736 - DNA, 452 bp, Chlorella sorokiniana
  Clone ID: LIB3602-008-Q6-K1-D5
gacctaagctggcatcacatgttcaatacttcttgatttgattgtaactatcccgggaagcagggtgatagcgggagcacggcaaggtcagtgcagtgcttgctgccggctgttggcagggcacctgcccttgttcgccgcgccgcccagcatgctggcagggggggccctctccgctcgtcaccgcaggtccaccacctcgtacttggcccgggggttgaggtacacgtggccgcacagctcgtagatgggctgccccgtgtcggtgggcgggtgtgcatggaagccgcgctgcgggcagcgctgcaccagcttgattcctccgggggtggtgaggcggaagatgcccacgcgcttggatgggtccttgggcgccatcacaatggccacagcctcgtccagcatcgtctggaagccgcagtgtgtgtggacgtccacggacgacaggaagc

SEQ ID NO: 1737 - DNA, 495 bp, Chlorella sorokiniana
  Clone ID: LIB3602-008-Q6-K1-D7
gtcagtgtggggcatcgtcggcatgctgctgggcgcaatgtggcgctccatgctgggtgctgtgcgcctcggcccgccatacaagttcgtcatgcacgattgcacggccagcaagggcctggaccagatcgctgccctgatggccgagggcaaggtcaaggtgcacctcgacaaggtgttcactcttgaggagctggccgctgcacacgagtatgcagagcaaggccacgtgcgtggcaaagtggcagttacgatctgtgacgaccccgctgccaggtggctggctgcgtcgtagagggcggcggcgcagccgcagcctgcgcggcagcccgaggcgcagccgacggctgtgcacctgtacagctcatgttcacactgctttggactactttgaaccacgctgagtcatgtgcggccttcagccttcctgccgccctccgtacttgtttgcaccgagttaggtactatgttttgtctttctagaaacctgcgcac

SEQ ID NO: 1738 - DNA, 496 bp, Chlorella sorokiniana
  Clone ID: LIB3602-008-Q6-K1-D8
catgaatgaggatgcctaccactccgtggtgcagcgcatgcggctgccctccggcctcctgtttggcctgcctgtggtgatggacacctccaatgatgccatcaagccgggcgccaaggtgctgctgacgtacaaggggcaggacgtggctgtgatggacgtggagtcccattggcagcccaacaaggtggttgaggccagcaagtgctacggctccacctccctggagcaccccgcagtgtccatgattgccacggagcgaggccgcttctacctgggcggcaaggtcaccggcttcgagctgcccaagcgcgtgttcccatgccacacgccggagcaggtccggagcgagctgccgcccaacactgatgtggtggcgttccaggtgtggcagggagaaagtggtgtaacttttcggagagccatcggtgaggcagggtgggcatcggtgtgactggttgctggttgcgcatgcccaccgcccccgcagctgcat

SEQ ID NO: 1739 - DNA, 151 bp, Chlorella sorokiniana
  Clone ID: LIB3602-008-Q6-K1-D9
gaagaactaaccaaccctcacagtttctagtgccacagcgtgtacgatacgtcctggcaattatgtctgtctcattaaatgctgctgctgtttttgttgcaaaccgctagatttgcacacccctctctcccggccgtgtaaggctgaaccc

SEQ ID NO: 1740 - DNA, 496 bp, Chlorella sorokiniana
  Clone ID: LIB3602-008-Q6-K1-E1
ggcaccccgcggcagcaacgttcgctttgtactcatcggcatgggctccgaagccgacctgcactcccccgcctttgcgggacaggtgctgcgcactaagtcgaccacctaccagaccgcggagctgatgcccacggtggtgcaggaggtggatgtgcagctgcaggcggcgggccgctgggacgtgtactgccaggtgcacgaccactacacggccggcatgcgggcaacgctggtggtcactgatgcttgatgacaggccagccccgcagcagcagcagccgcagcaacagcaacagcagcagtcgcgggccccaccgggctcgcagcctcctagcagcaacccatccccccatgcatttttcctgtgccggtgcctgcacatggtggcttgccgccacacccccaaacccttggcacgtgcttttgctcgctcctttcgctcccctttgttcgtccttttgcattcatactcctttctaccctacacagcacc

SEQ ID NO: 1741 - DNA, 348 bp, Chlorella sorokiniana
  unsure (1)..(348): unsure at all n locations; Clone ID: LIB3602-008-Q6-K1-E10
gcaaagccagcagcagcggcggcactagtggcagcatcggcagcagtagtagcagcggcgtcggcggcagcagcagtagcagtggcgtcggcggcagtggggtgccgccaaaagcgtgaggcagccgctgccggttgtgtcatacccgtctagcattttattcacgtctgtgctcacagcttgccttggttacgatatgtgtgctcttctgccactgtgtatgccttgctagattctgcattgcttgctgccgcttgacccagctcctgtcttgcacaaatcttctgactcagcttgtgctttgtagcagccaaatgaatccccacgctgtaaatgtgcagcngcnna

SEQ ID NO: 1742 - DNA, 494 bp, Chlorella sorokiniana
  Clone ID: LIB3602-008-Q6-K1-E11
ggagacgttccccacagacctggaccggcagatcaagtttggcagcaagagccacgccgagtgcgcgggcttctcgcccgacggccagctgctggtcacgggcagcgtggacggtttcgtggaggtgtgggaccacctcacgggccgcctcaagctggacctgccgtaccaggcgcaggagcagttcatgctgcacgactccgcggtgctggctgccgccttctcccgcgactccgagctgctggccacgggcgaccaggacgggcggatcaaggtgtggcgcgtgcgcaccggccagtgcctgcggcgctttgactcggcgcacagccagggcgtgaccagcctggccttctcgcgagatggcacccacgtgctgtctgcctcctacgacacactagtcagggtgcacggcatcaagagcggcaagatgctcaaggagttccgcggccactcctcctttgtcaacgccgcggtgtacagctccgacggcacgc

SEQ ID NO: 1743 - DNA, 500 bp, Chlorella sorokiniana
  Clone ID: LIB3602-008-Q6-K1-E2
cgctgatggggcacgccgcgggcgccaagcacaagcggcgggccaaggctgcgctggcagccaagaacggcgggcagccggccgagcagcaggaggcagccggccaagcgcagcaggccgcagatgctgccggcgctgcgcagccagcggagcagccagcggagcagccggcagagcagcaggagggcagcaagaaggagaagaaggagaagaaaaagaagcgcaagagcgaggcggcagcggcagaggaggcgcagcctgctgcggagcccgacagcggcaagcaggcaaagaaggcgaagacagaggggaaggagaagaaacggaagagcaaggcggaggatgcgcagcctgaggcggccgcggcagcgcccagcgaggccaatggcagcagcaagaaggggaagaaggggaagaaggagaagaagcagaagcagctggcaggtgaggcggatgcggcagccaatggcgcggcaccggcagcacctgcagccccggca

SEQ ID NO: 1744 - DNA, 238 bp, Chlorella sorokiniana
  unsure (1)..(238): unsure at all n locations; Clone ID: LIB3602-008-Q6-K1-E3
naaaaaaaaaaaaaaaaaaaaaacacaaaaaacaaaaaaaaaaattaataaaaaaaaaaacaaacagggcacgggggtggagacgaaacaagcggaagggaggcaaaacaaacaaacacaggggccgcccctttaaagggaccaaagttcactccccgggccatccaacgaaaaaacttctcatatggggcacccaaaataaaatcaacggcccggcgtttaaaaaccacgcacttga

SEQ ID NO: 1745 - DNA, 293 bp, Chlorella sorokiniana
  unsure (1)..(293): unsure at all n locations; Clone ID: LIB3602-008-Q6-K1-E5
cgaatcccggtcgacccaccgtccgcgcggcgacttccagaagcccggcggcttctagcagcgccctccccgccagtgagcgtaccccaggaggagcggcgtggcgctgcggcggcagcccaccctcngcancagcagcacaccagcggcagcccaccacagcggcgatgcgcggccgggcggacccgtagcaccatgacgcccggtcagctgcagccgccgccgcgcctgctgtaacgaacctttccgcgaaaaaaagaagtnaaaataaaagaagtaaaaaaataatatgg

SEQ ID NO: 1746 - DNA, 385 bp, Chlorella sorokiniana
  unsure (1)..(385): unsure at all n locations; Clone ID: LIB3602-008-Q6-K1-E6
ggcgtgagcccggccgccccgccccgctgctgtagccgcgcccttgccagccggcgcagcctggtccagcctcgcttgtgcaaacaagcatggagccttgctttgttcgcaccgaatgcccaggacacatacaatgccaacacttcagtatgcttcacccggccccggctgctgtgcgccgcgccattgcgtgcgtaacacgccggacccggctgccatttgtcgctctgccccattttattcgtgtgagtgagcactccatcctgctgcccttcttcttgctgaactgtacctcacgcttctaattcacacacagcctccaccattcaaatgtaatgtacagaaacgaannnnaaaannnnnannnnnnnnnnnnnnnnnnnna

SEQ ID NO: 1747 - DNA, 85 bp, Chlorella sorokiniana
  Clone ID: LIB3602-008-Q6-K1-E7
aacctgtttgacctggtggtgggcggctcgttggcagccaaaatcgaccgccccgaaggcgtaatccgtttttcccaccgaaccg

SEQ ID NO: 1748 - DNA, 495 bp, Chlorella sorokiniana
  Clone ID: LIB3602-008-Q6-K1-E8
ctggctgcagcggcacgagccagcagccaccgcgctgcacctgcggtcatcctctgcgattttgagaggactgtcggtgccggcgcagctgcaggctctgcacgttacgctcgacgccttgatgcagcgtggcacctaccccaacttctttgttggggtgattgctgggcccctgcttgagcgctgcaacccggccatgctggcggtgctgtcgctcaagggctgcttactgcgccagctgccgccgcagctatcacgcctgacggcgctcacggcactcagcctgcggcagaacaagcttgcttttggatctaatagacggcgcaccgacttcgcgccagtggctgcactgactggcctgcggcgcctagatttgagcatccaggatggcttgtttgagatcccgccggcgttgcagactctcacccagctgcagtggctggatctgtcgggcgcccctgtccgccgcggttggcatgtgctcagtcgcttgca

SEQ ID NO: 1749 - DNA, 211 bp, Chlorella sorokiniana
  Clone ID: LIB3602-008-Q6-K1-F1
gccaatagcagcggggggagcagcctgcgggcatcccttgaaggggagtggagcctgttgactggccggtgacagcacaaactgacactgatatgataagaatcctgtaacctcaccaaaggcccaaaaaaaaaaaaaaaaaaaaaaaaataaaaaaaaaaaaaaaaaaaaaaaaaaaaaaacaaaaaaaaaaggggcggccgttttaaag

SEQ ID NO: 1750 - DNA, 171 bp, Chlorella sorokiniana
  Clone ID: LIB3602-008-Q6-K1-F10
agcttgagaaccatgcaacgctctcgactattttatagcgattctgcttctttaaatagcaggtccactgctgtgctgtcaattgcatgccataccacgtgtcctgcccactgctgtataggcacactttgcattgtagcataacttctgtaggaattatgtgcccccaaa

SEQ ID NO: 1751 - DNA, 503 bp, Chlorella sorokiniana
  Clone ID: LIB3602-008-Q6-K1-F11
gtgaaggacggcttcatcatccgcaagcccgagaagatccactcgcgccaccgcgcccgcaccgcagcagaggccaaggccaagggccggcacaccggctacggtaagcgccgcggtacgcgcgaggcgcgcctgcccaccaagatcctgtggatccgccgcatgcgcgtgctgcgccgcctgctcaagaagtaccgggacagcaagaagattgaccgccacctgtaccacgagctctacctcaaggtgaagggtaacgtgtacaagaacaagcgcgtgctcatggaggccatccacaagcagaaggcggagaagatccgcgagaagaacattgcggaccagctggaggcgcggcgcgccaagaacaaggcggcgcgcgagcgcaaggctggccgccgcgaggagcgcttcgcgcagggcgtgaccgccgccaccgagagccagaagtaagcggctccgtctcggcggcagcaaggccgcggcggcggcgacgcagtgtgctc

SEQ ID NO: 1752 - DNA, 497 bp, Chlorella sorokiniana
  unsure (1)..(497): unsure at all n locations; Clone ID: LIB3602-008-Q6-K1-F12
ccggaanngaaggcccgacccacaccgacccgttcggaacaagtcgggtcgatctgacgagatcccagaccgatttacttggtccacaccgtcgcggactggggcggggccaacgccaatggtgcgcacagcacttacgctaagcgccccgtgaagaacgagcaggtggttgccagcatgaccgtcgccaccgccgcggtgctggccaaccccctggcgtgcccaagctgctgccacccccagactgaacaacctgatcggctccacgagctctacctgactggtactggtcaccattgcatgaacaatcacctgctgatgcaacttatactccatcacacgctaagatataccgactgatgtacattacccaccgaagagaatcaaccccttgcttgataagcgctgcttacaagcgcaacggctcaccgctggaggagcgcttggacacggtatgaccgacaacacctgtaggcactaatgaggaattttatctt

SEQ ID NO: 1753 - DNA, 500 bp, Chlorella sorokiniana
  Clone ID: LIB3602-008-Q6-K1-F2
gcatgctgccgcaatgctctcccccgctcgatcaactgatgctgccgcttgctgcctcatgcacgctgggcaggcgcatctcacccgcatgttgtctcgctgctgcgtgagatgctgcggcacgaaggcccgggaggtgaggcttggcagcccagcggcatccggttgatctgtagatcacgcttgcaataacccccatgcagtgctctgtcgcagtgtgctgctatgggatggtgcaagatcacgcagccctgctcaagagcgactcgactgcacaccatcaactgcgcatgcaatacacgagcagcacttctggtgctggcccatgggctgcctctggctcaagctgccattaatgctccgtctgctgcagccctgttcaatggggtaactctgacgctggtcaagcaggcgccgaccatggccatcacgtttgctgcgtatgagatggccaagcagttcctggagttgtgagcggatttgcccaacaaagcttcagc

SEQ ID NO: 1754 - DNA, 195 bp, Chlorella sorokiniana
  Clone ID: LIB3602-008-Q6-K1-F3
gaccacgcgtccgccagcttgtgctctggagcggcgccgctgaggaggagaaggttgctctgccggcgggcggccgccgcaggagtgcgcggtggcgccgcaggcggcagcctgggggcggagacactgcgccccgcccccgccctgtagcccggttgggtgcaaggctgcaggcgcgtgtaaacacccgctagc

SEQ ID NO: 1755 - DNA, 375 bp, Chlorella sorokiniana
  Clone ID: LIB3602-008-Q6-K1-F4
ctccccctatatgggcagcgagggccacagcaagagcaggctattgtttcaggctggcagcggcgtcagctcgcgggcgacaggcccgcccaaaactgctcttgcccaccgagtgggccatgccggttccccccctttgactgcccccagctgaacttttccagcttgcaactgcagcttgggtaccatgccacgctctggactattttatagcgaatctggttctttaatttgctggtgcactgctgggcttgcagttgcttgccatacccgctggcctgcccactgctggataggcacactttgcattgtagcatagcttctgtaggaatcatggtccaaaaaaaaaacatataaggaacgataattgttgag

SEQ ID NO: 1756 - DNA, 472 bp, Chlorella sorokiniana
  Clone ID: LIB3602-008-Q6-K1-F5
accggaacggaaggcccggctcaacctacccgaccgatgcaaggactgctgcagcatctgtaagacgcagaggatacaatttaccgggcggaccagcagctgattagaggccaatgccgaggtccgccgcaccggctccggttagctctttggtacgagcgaggcgctcgtgcccagcaagatcctgtgcagccctcgcatgcgctagctgccacgacttgtcaagtaataccgtgataggaagaagatagatcgtgatctgtaccacgagcgtctacctcaaggctaaaggacatggtacattaacacgcacgtgctaatataggccattcacacgaacaaggaaaggaagacttgcgagaagaatatattaatgcagctgaatgcgccacacaccaagatcatgaccttgcccaagtgcacggttgacccaatttattagccctttcagcagagacttaccgttgccacc

SEQ ID NO: 1757 - DNA, 259 bp, Chlorella sorokiniana
  Clone ID: LIB3602-008-Q6-K1-F6
acccaatcgaaacgactcggcgcgacatgacgtgaccgccgccctgcttgcttgctccttgctcccttgctctgtgcggctccttcagctatattctcccgtgcatttgatctacctgagcactgtaacagacctgcgtgaaaaaaaaaaaaaaaaaaaaaaacaaaaaatgcacaaaaaaaaaaaaaaagataaaaaaaaaaaagaaacagcgggaagattgaccggcgcctgtaccacgagctctacctcaaggaga

SEQ ID NO: 1758 - DNA, 494 bp, Chlorella sorokiniana
  Clone ID: LIB3602-008-Q6-K1-F7
ggagccgctggcatcgacgcaacagagccttcaagatgggctctctggtgggcagcgacaacttcacgcacattctgcgtgtgctgaacaccaacgtcgatggcaagcagaagatcatgtatgcgctgaccgccatcaagggtatcggccgccgcttctccaacatctgctgcaagaaggctgaggtggacctgagcaagcgcgccggcgagctgtctgccgaggagctggagagcatcatgaccatcgtggccaacccccgcgcctacaagatccccgactggttcctgaacaggcagaaggacgtcaaggacggccgctactcgcaggtgacctcctccgcgctggacaccaagctgcgcgatgacctggagcgcctgaagaagatccggaaccaccgcggtctgcgccactactggggcctcaccgtgcgcggccagcacaccaagaccactggccgccgcggcaagaccgtgggcgtggctggcaagaag

SEQ ID NO: 1759 - DNA, 421 bp, Chlorella sorokiniana
  Clone ID: LIB3602-008-Q6-K1-F8
ggagccgaagggctagcatcaacagattctttaagttggtctatctggtgggcagcgacaactagaggcgcattctgcatgcgctgaacgccgacctcattggcccgcagaagatcatgtctgcgctgaccgtcatcgacggattcgaccgacgcttctacaacatctgctgaaagaaggttgaagttgaccagagcaagcgcgccctcgagctagaagtcttggagctggagatgcatcatgaccatcgtaggcaacccgcgtgcctacaagagccatgactgggtcctgaacaggcagaacgacgtataggacgagcagctactctcaggtgacttactacgccctgcataccagaatgctcgaggaccttgagcgcctgaagaatatccgtaacaagcgctgactgtgcacattactg

SEQ ID NO: 1760 - DNA, 498 bp, Chlorella sorokiniana
  Clone ID: LIB3602-008-Q6-K1-G1
tgcagagaagttctgtcgctgtggacggctctgtttcgccgtttgctgccgagtgacgcaacgcactgaggatgctgagctgcgctgcccccactcagctggcgcagcattactgctgagctggcactgagctggtgcatctccattcgcaccgagagccacgcccatggccccacgcaacacctggccacctgtacccttgcctgcgctgctccacaccttgcaccttgcacatgtgtagctgttccttactctttcccaaccttccccttgagcactccaacagcacttgcctctcgtgtgacgcagccctcggcggcagcccaccctctgtttttgggctatagtacccaccattgcagccttgcacccttgcatgcacactcgtctcacactgcacacccctctacaccccagcagccccagttttcctgcccctttttccaacctgcgatacgaagccctccaacaaagatgagccgataagtttgatgagcc

SEQ ID NO: 1761 - DNA, 327 bp, Chlorella sorokiniana
  unsure (1)..(327): unsure at all n locations; Clone ID: LIB3602-008-Q6-K1-G11
ggacacgcacgctgcggtggcggaggaggccctccgtcgtgccaagttcaagttccccgggcgccagaagatcgtggctagcaggaactggggcttcactccctacctgcgcgacgattacttggagtggaagcgtgagggccgccttgtgaacgacggtgtgaatgccaagctgcttggcaaccacggcccgctggacgcacgggagcccggccagattttcgagggtcctgcccgtctgtggcgtgtgccggtgcatgcctaacatgttgcttgggttctaaagatgtaacgaacatctgagccngggaatgccaatgttgccag

SEQ ID NO: 1762 - DNA, 477 bp, Chlorella sorokiniana
  Clone ID: LIB3602-008-Q6-K1-G12
gcggttctagatcgcgagcggccgcccgccatctaaaactagtgctgacgcgtgggcggacgcgtgggcgcgccgaccgcctaagttgaaggacggtgacagaaacgtaccgactattccgtcactgggctggctcctagctgtgctgtcgcatcctctgcactgtccacttgggctttggcctgcttgacgctggcgagcctccatggtgccatgtgactgctaggtgctatgcttgtaacgcactgcttgctccccgaccaagctgcagccgcccgcggcgccagacgccgctgaggcacaggccgagggggaggccaaggctgacgccccctcctcgtaaacctgcggagtgcagtgcgcactggcgcctttgtacagctatctgttcatgcatgccgtcacgcatgccactgcttactgctacttccctgcttttcgcacacctgcagtctgcactgaatgcaacttgaactc

SEQ ID NO: 1763 - DNA, 383 bp, Chlorella sorokiniana
  Clone ID: LIB3602-008-Q6-K1-G2
ccattcccacaacatcctctgtgggtgtacatttcaaacttcacttaataagcacaaaactctatattattttatgaacaacaatctctttttatcaattttagggctaaaaaaaaaatactaactacatcccgcagagaaacaccctctttacctgctgcaaacctagtctaatcatcttcaatatcattttatgactaatctacaaaccttgcactactaacactaaaatattactaacctatcaattcaacctcccctcccaaacaaaacaatttcagaatcacatacataaaaaacaccaacaccacttttcaaacttttatttatcacaccacttacattacatactattttataaaactaaccactaaaattccctc

SEQ ID NO: 1764 - DNA, 233 bp, Chlorella sorokiniana
  unsure (1)..(233): unsure at all n locations; Clone ID: LIB3602-008-Q6-K1-G3
atgtggtcttcatcgagcagctgctcaagcagcggctggacgtggactgagtgttgaaggctgacatggacgacagctcagctagctgtcagacagtgctcgcctgctggagctggctgcgtgcgagagtgctagtgcngcatgcaacagcggcagcagcgaacagccacagcgcagtgcaggctagctaggtttgcgtgacagcgcagaccagattgattttgcattgatta

SEQ ID NO: 1765 - DNA, 478 bp, Chlorella sorokiniana
  Clone ID: LIB3602-008-Q6-K1-G4
ctcagccacgatgcaggccgctctgtgcagctcccagaccgtctttgtgcgccccaccgtggcggccaagccccagcagcgcgcggctcgtgcggcccggcctgtggtgtgcagcgccgtgaagaaggagcaggtggctgccggcgtgaccgccgccgccgccgcggtgctggccaaccccctggctgcccaggctgctgccacccccagcctgaacaacctgatcggctccgtggtggcgggcggtctggtgctggccgccattgctggcgccatcaccgcggtctccaacttcgactccatccgccgctaagctatgcggactggtgtaccgcaccccgagaagagaatcaaccccttgcttgctaggccctgcttagagtttttgctgctcagcgctggggcgccggcgggacgccctatgtcggacaacacctgtgtgcactaaagaggaattttatcctgtaacttcccggcc

SEQ ID NO: 1766 - DNA, 100 bp, Chlorella sorokiniana
  Clone ID: LIB3602-008-Q6-K1-G5
ggactcgccctgtagagtggcattaagcgcacaacgtgtggagtgtacaaacactgtgaccactacacttaacagcgtcctagcacatcctcctttcgct

SEQ ID NO: 1767 - DNA, 371 bp, Chlorella sorokiniana
  Clone ID: LIB3602-008-Q6-K1-G7
gtctggcgactcttacaagctgggcaccaagggccttattgcttgggccggcctgattgtggtgctgctgggcgtgggcatcaacctggtgatctccacctctgccctgggccagtaaatggcgacgccccccgcgtcggcagcagcagcagcagccagcagcattcccttgcagctaccccccgagaagacaaaccctcaccctaccctagctggcggcgtcactatgcgccgctcccttgctttccgtttcactgtccctttcgttcctgcgttcgtttagtggaggaggcccgcctgtgtacctgacctggtggccgcgtttttggttgagcggcttgtagccgcacatctgtattatcagctacgtc

SEQ ID NO: 1768 - DNA, 498 bp, Chlorella sorokiniana
  Clone ID: LIB3602-008-Q6-K1-G8
gcggtggccaaccgcaccgacgcctgcttcatccgcgtgattggcagcgagctggtgcagaagtacgttggagagggcgcgcgcatggtgcgcgagctgttccagatggcgcgggccaagaaggcgtgcatcatcttcttcgatgaggtggatgccattggcggcgcgcggcacgacgacgcaagcggcgacagcgaggtgcagcgcacaatgctcgagattgtgaaccagctggacggctttgatgcccgcggcaacatcaaggtgctcatggccaccaaccggccagacacgctagaccccgcgctgctgcgccccggccgcctcgaccgcaaggtcgagtttgggctgcccgacctggagtcgcgcacgcagatcttcaagatccacacgcgagccatgaacattgagcgggacatccggtttgagctgctggcgcggctgtgccccaactcgacgggagccgacatccgcagcgtggccacggaggcgggcatg

SEQ ID NO: 1769 - DNA, 444 bp, Chlorella sorokiniana
  Clone ID: LIB3602-008-Q6-K1-G9
ctcgagctgctggatgatgccggctacacctgcctggtcgggctcaagggcggctttgccgcatggacccgggtttttgacagcaagggcgcccgccgtggagcgtctgagacggtgacagcctgagacagcctgagctgaccacctgagacggcagccgacgttggagccggctgccgctgcagcttggagggcggctgttcctttgtccgcccaaacgcaccctgtggagctcccttgcaagggctcttttatttctcacctcagaggccgcctgaacaaaggcccccattcttccctccctgcatccttctccctacgtaaataatactattgttgtagttctggacaggctctggaaacgagccctgatttttcgttttgcagcttagttgccccgcaagcccgcctgtgcccccattgtttgcaggctcgtcctgcctc

SEQ ID NO: 1770 - DNA, 425 bp, Chlorella sorokiniana
  Clone ID: LIB3602-008-Q6-K1-H1
cagcagcagcagcagcgcgtcggccggcggcaagggcggcaagaagaagggcggcaagcggaagtgagcaggcgtggtttggaagccagctggcactgctcaagccctcgcccttgaaaacagcatccgtatactttgatttgaggttgcaaggatgacacattctctccggcaactgaattctaatgtcacgtcgcaagctcgcacgctcccactgctcccttgcttccgtatcctcagcctctcgtgttgatttccacttttctcctgctgctgacccctgctgcaccaccttcatgcaacccgtacttctcctgcttttctccacacattttggcttgcacgcatgttaggcatgaggcagggctgaatcaggggtcgagtgcccattcataatgcacaatgttgttggtaagcacagcaag

SEQ ID NO: 1771 - DNA, 187 bp, Chlorella sorokiniana
  Clone ID: LIB3602-008-Q6-K1-H10
gcggttggcggcggcatccccaacttcacagacgtggcggttatgttcaatggcatcatccacgcgttccgagagaaggcctacgcgctcaaggctgtcaagataaatatctttctgtggggaggtgggctcaactactagtgagggcttggcattatgcgcgctcttgtagactagatttgtgtgc

SEQ ID NO: 1772 - DNA, 314 bp, Chlorella sorokiniana
  Clone ID: LIB3602-008-Q6-K1-H12
ctgacgcgtgggccgacgcgtgggcggacgcgtgggctgacacttgggggacgagttaccctgcgacgaggcgtatagcatggcccattctcacctggccacacctcttaccctatcctgaagctaggggtggcacatgcagagcgctgcctatgcaacgccaacgccaatggcgccacagttgctgcctgtgataagtgcttgcatgccgctatgtacgtgttgcacacgtactgtgctaacccattattgctcaagtttattactgcaaccctcatgtctcttgaagctcggctctgcgatctgaacaaata

SEQ ID NO: 1773 - DNA, 501 bp, Chlorella sorokiniana
  Clone ID: LIB3602-008-Q6-K1-H2
gtggaggctcctctggagtcagctccggcgcggcagctggtattggcatcggctgcgcggtggcgggcgccctgctgggcgcgctgggcatgatgatgtttgccaagcgcaagggcggctggcagcgccacaacgacgcgctgtccgccaccggcgccggctccgaggcctacaagctctgagctgagccgacatcttttgcaacagctctgagccgctgagctgaccctggctcatgccagctggcatgctgcagcacccccagcccgccaagcagcctggacagcagctggctgattgtttgcccgctggcctgtgcagcaggggcgctgcccggctgccacagtaatgcatccttaatccacagcatccctcacttcacctcgctgcgtgctgcatctcacgagcactattattgccgctacgttgcttcataccttggattgcgcagcctgccgccaccggtcttgcttccgtgccgccaggctgtgcaatgcaaag

SEQ ID NO: 1774 - DNA, 467 bp, Chlorella sorokiniana
  Clone ID: LIB3602-008-Q6-K1-H3
tccggagaaggctcctatggagtcagttccggcgcggcagctggtattgttttcggctgcgcggagacgggcgcgctgcgggacacactgggcatgatgatgtctgccaatcgcaagggctgctgtctacgtcacaacgactcgctgtccgtcaccggcgccggttcctaagcctacaagctctgagctgagccgacatcttttgcaacagctatgagccgctgagctcaccctggctcatgccagctggcatgctgaagcacccccagcccgccaagcagcctggacagcacctggctgattgtttgtccgctggcctgtgcagcaggagcactgtccggctgccacagtgatgcatccttaatccacagcgttcctcacttcacctcgctgcgtgctgcatcttacgagcactattattgccgctacgttgctttataccttggattgcgcagactgccgccacc

SEQ ID NO: 1775 - DNA, 464 bp, Chlorella sorokiniana
  unsure (1)..(464): unsure at all n locations; Clone ID: LIB3602-008-Q6-K1-H4
acgctgacgcctgctctgggcgaccgcacccgtgaacgtgtacaacgtgttgtcttacccggcttcaaggcacgtggagcgaggtgtgaggactacagtggacggcgaagtactcagtaacctagcgactctgggggcgagtgggcatcactgctcagctgtgctgctgcattctcctccctgtgtgctacgtggagctttggctctgcccaagttatgtgaagcactnccctcgtgccatggcaaggccaaggtgaatggctggaatgtgcgccgtcccgccccgcccaagctgcagccgcccgcggcgccggccgccgctgaggcacacgccgagggggaggccaaggctgacgccccctcctcggaaacctgtcaagtgcagtgcccactgtccccctcgtacagttatctgttcatgcatgccgncacgcatgctactgcttactgctacttccctgctt

SEQ ID NO: 1776 - DNA, 502 bp, Chlorella sorokiniana
  Clone ID: LIB3602-008-Q6-K1-H6
acggcggcactgtggccaaggacgctctgggtaacgacgtcaaggtcaccacctgggtggcgacccacgctgtgggcgagcgctacctgacccagggcctgaagggccacgccacctacctgattgtgaagaacgagggcgccattgagaagtgctgcctaaacgcggtgtgcgcccacctgggctgagtcgcgccctggaacaagggctacaacaagttcatgtacccgtgccacagctcgtagtacaacgcatatggcaagaagattcttactgcccccctcatgtctctggacctggcgcactgcgacgtgaacgacgacatcgtcacatgcaccgattggaccgataccgactttcatgccggagaggctcactggtggcactgagagcgtgcttgcagcagcggctgatgaggcacaatgttggacccttagcagcacaccccggcagcccgcagcttctcactcgccgaccgttgagcggcggaggcttgtaaacc

SEQ ID NO: 1777 - DNA, 467 bp, Chlorella sorokiniana
  Clone ID: LIB3602-008-Q6-K1-H7
ggtagagcaagtcaagatggcgaagggcgacaagcgccaggaggtgtgcacccgcgagtacaccctcaacctgggcaagcggctgcacggcatcaccttcaagaagcgggcgccccgcgccatcaaggagatccagaagtttgcggccaagcagatgggcaccaaggtggtgcgcgtggacgtcaagctgaacaaggcggtgtggagccagggcatcaagaacgtgcccaaccggctgcgcattgtggtgcagcggaagcgcaacgaggacgacgaggactctgaggagatgttctccctggtgaccctggctgaggaccagaacaccaagaagggcgtggttgtgctggaggcgtaagcgcctgccgcacgccgcagcaccaaattgacgtcacctcccaccgcagcagccgcactctcccgacttccctgcacgcgttgcagcagcatgtaacgcgcgcgctagc

SEQ ID NO: 1778 - DNA, 432 bp, Chlorella sorokiniana
  Clone ID: LIB3602-008-Q6-K1-H8
aaaaaaaaaaataaaaaaaaaaaaaaaaacataagaaaatatttttttacaaaaaaaaaaaacactctgggcggcgggtatttaggttccaggcttctccacgcatacatcgccctcctaactataaaatagtagacactaaaaatacagttaagtggcatgacattaacatcttgcgcattgctaaaaccttgaacaatgcccaattaaatcacattatcgcacatatccctatccccatttgtagtaaaggctaaaagacgcacaacaatcaccattatgaatattttcacatcctaaatgtgtaatggtacctgccttttaaaacactaataagggcgtggttttactggatattcacaccttgccccatacactatcaacaaacttacgtccccttccttcggaatactctcattcttttgactcccc

SEQ ID NO: 1779 - DNA, 456 bp, Chlorella sorokiniana
  unsure (1)..(456): unsure at all n locations; Clone ID: LIB3602-008-Q6-K1-H9
catggagatcgcctcctttgagaagttcctggttgacaagatcaaggtgcagggcaagaccggcgtgctgggcgacaacgtcaaggtgacccgcgacaagaccaagatcacggtcaccagcgagatccccatgagcaagcggtacctcaagtacctcaccaagaagtacctgaagaagcacaacgtgcgcgactggctgcgcgtgatcgcctccaacaaggaccgctccgtgtacgagctccgctacttcaacattgcggaccaggctgaggaggaggaggacgaggagtaagctgcttgtctgcacaccagcaggcgagcgccctccccgcagcagcagcgcgcggggggcggagggggtgaatgcagcgcgcgggtgccccctccgnccgcaccccgcccacccgttttgcttggggccgcccccgcggcggcagcttgtaaggcacacctagc

SEQ ID NO: 1780 - DNA, 209 bp, Chlorella sorokiniana
  unsure (1)..(209): unsure at all n locations; Clone ID: LIB3602-009-Q6-K1-A1
aaaaaaaaaaaaaaaaaaaaanntaaatttaaaaaaaatttttaaaaatttaaaaaaaaaaaccacgcgcggagaatagagaatataggcttacggacccatatattcntcatcatctctttcttttaattcctcctcacttttatttgctccccatttgatatcaaattactccttttaaaaaaccttatttttccccaaattaaaac

SEQ ID NO: 1781 - DNA, 411 bp, Chlorella sorokiniana
  Clone ID: LIB3602-009-Q6-K1-A10
gtcttcgactgctagccgcaggcatgatgcctgtgtctggcctccagcagcaaagtcatgcagttcagcaatgcaatttgtgtccaagtccgcagtaccaagcattccataccacagcagcctgctactatgtgtctgcgttcaagcccttctatcagcccctctccgctcctaccctgttttcccagctgaaaccactcagccttttgtgagccgcactaatgcatgccgcagcgctctgcaacgttccaggattcaagactccctgttgcacaacctgtgtgccttctgcctgtgtttacaatacaaacctggctgtgaccgccggctggcctgcgtctctgtgcctgccctgcaactcgagccatgcctgtattacctcctctgttcctgttaaacctcctctgctcc

SEQ ID NO: 1782 - DNA, 535 bp, Chlorella sorokiniana
  Clone ID: LIB3602-009-Q6-K1-A11
aaaaaaaaataaaaaaaaaaataaaaaataaatttttatatttaaaaaaaaaaaaaaaaagggggaggagtataaatttttaaaagaggataggattattaatgggttttttttttagatgttcgatttttactaactgtgtattttaatatatttgtttttttatatagtatattaatttaaatttactggcctgatttttataaagtttttattggaaaaatttttgtattactaaatttatttaaattttacaatatttatttttttctggttgattatatagtgaataggtttgaatatttttattttataaaattttgtaaagtatgattggtatatgggtttttttctttaattgatttttaaacgttttggtttttgggtttattgaaaatttaaatggtttaattttttattgctattaaagcctagatttttttatttttttttattttaatttatgggaacgtttttaggttttaattataaatttttaaattggggtttttttaaggtttattattatttgttt

SEQ ID NO: 1783 - DNA, 369 bp, Chlorella sorokiniana
  unsure (1)..(369): unsure at all n locations; Clone ID: LIB3602-009-Q6-K1-A12
cccatggccgtcaactttgccaccaacggcgtgtccctgcccctggcgtaagcgcgcccctgtagcagcggctgtacccagcacccgcggcgcatcagcagacgggtggcccatgtgtggcctggttgtctctgcccgtgtggtctgtacgcttgttcctatttgctctcctgttgctcattgctcctgactgcacacccgagaagattcaatcaacccctcctgctaccatgtggctgtaaggcacagcttacanaaaaaaaaaaaaaaaaaaaaaaaaaaaaaaaaaaaaaaaaaaaaaaaaaaaaaaaaaaaaaaaaaaaaaaaaaaaaaaaagggggcggccgctcgcgaactaggactagttct

SEQ ID NO: 1784 - DNA, 449 bp, Chlorella sorokiniana
  unsure (1)..(449): unsure at all n locations; Clone ID: LIB3602-009-Q6-K1-A2
aaagggggtcaacatgccgaacaaccagatcgccagcatccggaagtaccggaagaagtggcaggacaaggtggtcacatggttcaaccagccggcccgcaaggagcgccaccgcgccgcgcgcaaggctaaggccgaggccgtggcgccccgccccgtggccggcctgctgcgccccgtggtgcacggccagaccgtcaagtacaacatgaagaagcgggctggccgcggcttcaccctggaggagctcaaggaggcgggcatcccctccaagctggcgcgctccatcggcattgccgtggaccaccgncgncgcaaccgcagcctggagagcctgcaggagaacgccaaccggctcaaggcctacaaggccaacctggtggtgttcccccgccgcgccggcaagcccaagggcgggcgacgcctcggccgaagagctggcgaccgtg

SEQ ID NO: 1785 - DNA, 443 bp, Chlorella sorokiniana
  unsure (1)..(443): unsure at all n locations; Clone ID: LIB3602-009-Q6-K1-A3
tggtncggaattccacccacgcgtccgagctcgctgctcaactgcggcgcaccatgctccttccctttaccgtccctgcaccttggccctcatagtgctgccgtccgtcgcctgccgtgccccgccagccaccctcatggggcgctccatgcagctcacatccccctggcaggctggctgagcacttaggctagacagcagctgcccgttggcctccctgcacccggttttgctcccttcttgcttccacaacccgcttgcagcaacgttgctcgtgcactgctcccagcagttggtggtgctcaacgatggggtcacccggacacccgacctccgctgttgttgtttcattccagcattgcatgcccacgttgtgttgtttccagagccagtcagcctgtggaccaggcccagcctctgtaacccaagcaagcaagcaaaat

SEQ ID NO: 1786 - DNA, 56 bp, Chlorella sorokiniana
  unsure (1)..(56): unsure at all n locations; Clone ID: LIB3602-009-Q6-K1-A4
taaaaaaaaaaaaaaaaaaaaaaaaaaaaaaaaaatnnnttttcggattttataaa

SEQ ID NO: 1787 - DNA, 201 bp, Chlorella sorokiniana
  Clone ID: LIB3602-009-Q6-K1-A5
aggcgatcaccccctgcccaacgatgctacacaccttaaacaaaggtacacaccctacgccacgctcaccccctgcttttccaagcaaagcaaagccccttttttgccgcgccgactgcttgagacaatacacaaagaagccgttgtttgattcggggctgcatgtacacgctccccatatggtgtaagaggacttggaag

SEQ ID NO: 1788 - DNA, 292 bp, Chlorella sorokiniana
  Clone ID: LIB3602-009-Q6-K1-A6
acgactccaaggacgcgcgccgcgcgcagcgcgagcgcctgcagaactatgtgcgcatcctgaaggccgacaacgtggagggtgtggccagcaccacctcccccacctggcagaagtcgatcgccacctcggcgcccgcccgccaggagggcgacaactccaccttcatcgaccagaagttcgccagcgctgccgccgacgagctgaaacagatccgggagaagctggaagagaagtaccaggctttgcgcccctgaacgcgcctgacaggctgagccctgcgatgctcaaa

SEQ ID NO: 1789 - DNA, 244 bp, Chlorella sorokiniana
  Clone ID: LIB3602-009-Q6-K1-A7
ccttgccatgcgctgctttgttcttcttggactggctgctcctggcattgtaacatgggcaagctgaaaaaaaaaaaaaaaaaaaaaaaaaaaaaaaaaaaaaaaaaaaaaaaaaaaaaaaaaaaaaaaaaaaaaaaaaaaaagaatggcaaaaaagaaaaacaaaagctaaaaaaacgcgaaaaagggaacgcctatcggtttgtaaaaatgtttttttaataaaaaaaattagaacaagttt

SEQ ID NO: 1790 - DNA, 408 bp, Chlorella sorokiniana
  Clone ID: LIB3602-009-Q6-K1-A8
acatcaacatcgagaacaagggcggcaaggtggttatccgcaacttcctgggcgagaagattgtgcgcgtggtggacatgctgccgggcgtgacctgcgagcgcagcgccgccgtcaaggacgagctgatcctgaccggcaacgacatcgagctggtgtcccgcagcagcgcgctgatccaccagaagtgcctggtgaagaagaaggacatccgcaagttcctggacggcatctacctcagcgagcgcggcaccctggtgaagcccgagtaagcggagcccgcacgttgcagtagaggtggcggcacgagcgcagcagtgcgcagcgctcacgcccgcgccggcggagcatcggcggcggcagccggccccagctgcggcgctgcacgccatgtaacgcacacgttag

SEQ ID NO: 1791 - DNA, 377 bp, Chlorella sorokiniana
  unsure (1)..(377): unsure at all n locations; Clone ID: LIB3602-009-Q6-K1-A9
cgtttggggagcccaagatggtggcggacaagaaggccagcaaccccatgcgggagatccgcgtgtgcaagctggtgctgaactgctgcaccggcnagagcggcgatcgcctgcagaaggccgccaaggtgctggagcagctgactggccagcagccggtgtttggcaaggcgcgctacaccgtgcgccagtggaccattcgccgtaacgagaagatctcggcccacgtgaccgtgcgcggcgagaaggcgatgcagctgctggaggcgggcctgaaggtgaaggagtacgagctcatccgccgcaacttctccgactcgggcaactttggctttggcatcaacgagcacatcgacctgggcatcaagtacgacccc

SEQ ID NO: 1792 - DNA, 477 bp, Chlorella sorokiniana
  Clone ID: LIB3602-009-Q6-K1-B1
gcgtccatgagatggccaacttctacgccgacctgtgcagcaagtatcccatcatctccattgatgaccccttgaacgaggacgactgggagagctacggcaccttcaccggcaagggcctgacccatgtggtgggcgacgacctgctgtgcaccaaccccacccgcgtgcagaatgccatcgacaccaaggcctgcaatgcgctgctgatcaaggtcaaccagattggcagcctgaccgagtcgatccaagcggtgaagatgagcaaggcggccggctgacgcgtcatgacctcacaccggtctggcgagaccgaggactcgttcattggcgacctggctagaggcctggccactgggcagatcaagaccggcgcgccctgtcgctccgagcgcctgtacaagtacaatcaggtgctgcgcattgaagatgagctgggcgatgccggcgtgtacgccggcgagaactaccgacaca

SEQ ID NO: 1793 - DNA, 468 bp, Chlorella sorokiniana
  Clone ID: LIB3602-009-Q6-K1-B10
ccaggcgccgcaggagggtaaagagcaaagatgccggcgggccagggctaccgcgcgcgtacgcgccacatgttcagccgcggcttcaggcagaagggcttcatcccgctgtccacctacctgaccaactacaagctgggtgactatgtggacatcaaggtcaacgccgcggtgcacaagggcatgccccacaagttctaccacggcaagactggctgcgtgtggaatgtgaccaagcgcgccgtgggcgtggagctgctcaagcaggtcaacgggcggtacatcaagaagcgcatccacgtgcgcatcgagcacgtgacccccagccgctgccacgaggagttcctgcgccgctgcaaggagaacgacgcggcgcggcacgcggccaaggtggagggcaagccgctgccggtgctcaagcgccagcccaagggcccccgcaccgaggccatcatgctggagaacgtg

SEQ ID NO: 1794 - DNA, 287 bp, Chlorella sorokiniana
  Clone ID: LIB3602-009-Q6-K1-B11
atccagcgtaaaaaaaaaaaaaaaaaaaaaaattttaaataaaaagggctaacaaatcaagggagcacaggataacatacacataaataacaaaaacataacatatataaaaaaaaaacatatatctaaaaaaactgcaacattaatttacaatgtgggcgtctttttaaaccattcaatttctctatgtcattcctcaaaaagaacatctctttttttctggcctctaataataatttaaaggcccgcacttttcaccttttccaacagaaaaaccccctgtttcc

SEQ ID NO: 1795 - DNA, 487 bp, Chlorella sorokiniana
  unsure (1)..(487): unsure at all n locations; Clone ID: LIB3602-009-Q6-K1-B12
cgagaatgtgaaggccaagatccaggacaaggagggcatcccccctgaccagcagcgcctgatcttcgccggcaagcagctggaggacggccgcaccctggcagactacaacatccagaaggagtcgacgctgcacctggtgctgcgcctgcgcggcggcatcattgagccgtccctgcagatcctggcccgcaagtacaaccaggacaagatgatctgccgcaagtgctacgcccgcctgcacccccgcgctgtgaactgccgcaagaagaagtgcggccacacctcgcagctgcgccccaagaagaaactcaagtaaactactcgcttcggcacgagcggaagcggcatgagcggcagcaaccgcttgcccccccccgccccgccagccgggatgccatgacagcaccggctgctcagctgctgatgtgctgcatgtcaattgctgctgcggaaatgtaacggtggtagcgatcgaananaaaaa

SEQ ID NO: 1796 - DNA, 384 bp, Chlorella sorokiniana
  unsure (1)..(384): unsure at all n locations; Clone ID: LIB3602-009-Q6-K1-B2
acccacgcgtccgcccaacaacaacgcatgcttttccaacgcaccaaacccaacccttttcccagcatgctgtcttctcttgcccacaggcaccaatctgtcttacactgtacccccgttgtgccttgtatcgttgttgtgagctgcgccctcaccttgccaacctgacctgtggcggtcctctgcccaccctcatcagtcttcgtccgcactcatgatcaccaagtcttgagcggctgcttggatgacgtgctgcttcaaatctgcattttgtttgcccacatgcaataaatccgccgtnnaaaaaaaaacaaaaaaaaaaagctcaaagactcatacattggcaagctgcctacaggcctggcctctgggcaaatcaagacc

SEQ ID NO: 1797 - DNA, 528 bp, Chlorella sorokiniana
  Clone ID: LIB3602-009-Q6-K1-B3
cctgccaggagatgaacaccaattgggttgcaacccttgcccaaggatcgacgccttggtacttcccttgttgtgcgcacccacgtttctgtgttgccctccatcatgccccctggctaatgagtgacaccgtgatgcaactaatctgcccaaacggatgcgccaattgcatgagagtgcttacggagcgttctcagcaaaccctggccttctgcttccctcctctctgttctctctcctctcagccagcctgccaatgtatgcctcccccattgagttgcatgtggcccctttttatgcagctggctgctagctgatgcagccagcacagcgtgcagcacgcgcagcgctaaagctcttgcaatcacccttgacttttgcagccagagctttttgttgcgtgctccactttctgatgagtcaagcactgtttgcctgccgttccgcagctgagttgtgctgcgtgatttcttatgcctcacagccctgcttcaaagcacctggcaaagtgacgaatagttgcacagt

SEQ ID NO: 1798 - DNA, 429 bp, Chlorella sorokiniana
  unsure (1)..(429): unsure at all n locations; Clone ID: LIB3602-009-Q6-K1-B5
ggcggcccgccctgccatcagccaggcacagcggggcaggagcagccgccggcaccgcatgcggccaaccgcgccgcgcggccctcccgccagcagcggctgtgccagctggctgtgcggcacctggtggtgggagcggcggagctgccagagggcacagcgcacacagtgccctgcaagctgtacgtgctgttggaagggccgccagtggccgcagcagacgcagcaggcgcagcagcagacatggcagcagactcagctggagatgcggcggcggtgcaggtgccccctggcttcacaactaagcgccagttccgcctcagcatgcgcaagggcacgcacgtgcggctgctgctgggccagcatgcanaggaggatgaggagcaacaacgggtggctgaccaacaacggcggcaggcggaggagcag

SEQ ID NO: 1799 - DNA, 265 bp, Chlorella sorokiniana
  unsure (1)..(265): unsure at all n locations; Clone ID: LIB3602-009-Q6-K1-B6
cggcgttttgcgtctgctccgctcatcgaaccatccccctccttgcctgcggcaccttttcattctcatcaccacgtgtgtgctccaataagatgtgccctactactgttctgtactgttgctgcctcagtatgtgaacgatcctggcaaaaaaaaaaaaaaaaaaaaaaaaaaaaaaaaaaaaaaaaaaaaaaaaaaaaaaaaaaaaaaaaggggcggccgctcgcgatctanaacagttctagatcgcgagcggccgctctag

SEQ ID NO: 1800 - DNA, 382 bp, Chlorella sorokiniana
  Clone ID: LIB3602-009-Q6-K1-B7
gctgggcggcagcgagtggcctaacatccgcgctgatctgttggagctggcgggccccggcggcgtggacagtcgcctgcgcgtggcacagcgcatgatgcgcagctacactgtgttccaagcccgcatgtagctgttgctgcagcgatgcagtggcgagcagcatccagcaggaacgctgtgcagatgtggccttcagtagcaatgatgctgcgcagctatatggtgatccaagcccgcatgtagcaaccaggcagcaggaacggcattgatctatgtgcagccagcaggagcggtggtttaagcgttaattcagtgcacaagcttgccaagcgctcacttttgtcctgccgacggcgtttttttacctgggtgctgttac

SEQ ID NO: 1801 - DNA, 72 bp, Chlorella sorokiniana
  Clone ID: LIB3602-009-Q6-K1-B8
aaaaaaaaaaaaaaaaaaaaaataaaataaaaaaaaaaaaaaaaaaaaaaaaaaaaaaaaaaaagaaaaagg

SEQ ID NO: 1802 - DNA, 67 bp, Chlorella sorokiniana
  unsure (1)..(67): unsure at all n locations; Clone ID: LIB3602-009-Q6-K1-B9
aaaaaaaannnnaaaaaaaaaaaaaaaaatttaaatataaaaaaaaaaaaaaaagggggaagaggag

SEQ ID NO: 1803 - DNA, 393 bp, Chlorella sorokiniana
  unsure (1)..(393): unsure at all n locations; Clone ID: LIB3602-009-Q6-K1-C1
ccctttgagcctagcggggctaggtctgattgttccttcccttcccatccatcgcaccacccaccctgtcttgcgtggcatcaatcggcgcccccggccgcgcgccccccgtctgtgcgcggccggccgccctgcactgcaccgcctttgatgcaattgcccagcgaatttcgctgcccgcacacacacacacttgcgtttcatgcctgatgagtagaacgccctcgagccacgcacccacctaccaccccaaccacaccaacctgcaccccggtttctcatctttgattcagccgcccggttgaggctgccggaggctccatccccttcttttccgctttcattcgtcactacactntgagttttgcggctgtggttgtaacgcaatttttg

SEQ ID NO: 1804 - DNA, 406 bp, Chlorella sorokiniana
  Clone ID: LIB3602-009-Q6-K1-C10
ggccctcttccaagcggcggcggcggcgggggttgcgccgcccgccgatgccgccgctccgcctggggctgacccgcccgcccgcctgctgctggcactggtggacatctggctggacaagtttgactccatcggccagcccgccgcacgcaagctatcggcgctggcgctcgcggtgctgctgaccgcgccgctgccgccgctgctggagcggctggagctggtggtcacgcacatcacctcggtctggttcgaggtggaggggtctgacctggcgggcagcgtgcccatcgcgtatgagctgctcagcgcctcccgggatggcgacgacccaaacaccgtggtgccctctgaggaggcggaaggggagtgcaaccgcaagaaggcactggtggatgccgaccct

SEQ ID NO: 1805 - DNA, 517 bp, Chlorella sorokiniana
  Clone ID: LIB3602-009-Q6-K1-C12
agaacgtggaggagatgctgggcaacctgggcctgcccgctgagtttgccacccactcccagatccgcggcctgtcgggcggccagaaggtgaagctggtgctgggtgccgccatgtggcagcagccccacatcctggtgctggatgagcccaccaactacctggaccgcgagtccctgggcgccatggcctccgccatcaaggagtacggcggcggtgtggtgattgtgtcgcatcaccacgagtttgtgaaccaggtgtgccaggagaagtggaccgtgggcggcggcaagctggaggtgaccggccagtccgcggccgctctggaggccgccaagctggagtggaagcgccaggaggagaccaccgacgccttcggcaacaccatcaagatcaaggcccccaagaaggagctgtcgcgcaaggagaagaaggccaaggccaaggccaacggccgccgccgtgcgcgcggtgaagaagtgtctgacgacgaggatgactactgaggcggcgcttt

SEQ ID NO: 1806 - DNA, 530 bp, Chlorella sorokiniana
  unsure (1)..(530): unsure at all n locations; Clone ID: LIB3602-009-Q6-K1-C2
ttctgacccggccctagagaagcagaaggcggcaagtgaggacagcgccggcagccgcgcgcggcagtggctgcgcctcctacttgacttcttcacaggcaaatacctgtacgacacgtggagaaagagtggcagcagcagccatgccagcagcggtgcagcaaataaagccagcggctgtccctttgcccggctgcatggcggcggcaccggagcagcggatgcccagacagcggcggcggcagccggatgccctgcgcacaagcatgcagcggcagcggcagcggcaggcagcgaccggcaagggctgcacaaagaataggcagtgcccgccgctgctgtggctgacccaaaacctgcatcatgcaggcatccactgtccctgctgtagctaccattgctttgaccacatttcatacccatcaagctntcggcatacccttttcagtatttgaacgcttcctgctgcctgccaaggatcaccattgttgatgcacgcatgtcctgttgatttaacgtaacagccaaat

SEQ ID NO: 1807 - DNA, 505 bp, Chlorella sorokiniana
  Clone ID: LIB3602-009-Q6-K1-C3
ggctgaggtggtgaccgactttttcgacgcgctcaagtcgcgcagccgcggctacgcctccatggagtgctcgctcactggctaccgcgagaacgacctggtgctactggatgtgaagatcaacgccgagatggtggagccgctggccgccattgtgcaccgcgacaacgcctactacgtgggcaaggcgctggtgaagaagctgaaggagctgatcccgcgccagcagttccgcgtgcccatccaggcagccatcggctcgcgcgttgtggcctccgagtcgatccccgcgctgcgcaaggacgtgctggccaagtgctacggcggcgacatctcgcgcaagaagaagctgctgaagaagcatgcggcgggcaagaagcggatgaagagcctgggccgggtggacgtgcctcaggaggccttcatggcggtgctgtccatcaaccaggccacaaccagcaccgacgactgagcacgcacacatggcgcaagcagtgcggccatg

SEQ ID NO: 1808 - DNA, 533 bp, Chlorella sorokiniana
  Clone ID: LIB3602-009-Q6-K1-C4
aagaatgggaggatgagcggcgggcgattgatcgcgcggtgcgccgcctgctgctgccatccaccagtgctgtgttgccacccaccggcggcgcagcagagcagccagagcaggcagctgggcaataaccagggcaggagcagcaagtggaccagcagcaggtattggagcgagagcagcagcaggcagagcagcagcagcagcctgttgcagcccactggtgcctccggcggcagctcgtgcagcagcggtcgtccgccagccaagcgcagctgcaagagatgctgctgctgcacctatttgcagctgcattcctggtgcagcagctgtccagcagcggcggccgggaggatgcggagcagctgcagcagctgctggcttcgagcgggctgcctttcgagctggtggcagcggcctcgccagctggtgaacggcacgctgagcacggcaagcggcggcggcgcagcagcagcaaacacaagcgcagcaagcggcggcacagcagcaagcacagcggcagcagcagaaaggag

SEQ ID NO: 1809 - DNA, 530 bp, Chlorella sorokiniana
  Clone ID: LIB3602-009-Q6-K1-C5
cccacgcgtccgcccacgcgtccggccagccggcgctgccggcagacacgctagcaggcaggaggcagaggtgcaggcactcctgctggccgctacagcctaccacatggctccagatgtgctggtgtgggcggggctgcagcaaaagcgattgggccagtactgccggcgccgcctcagcctggtaggcggcagctgggaggcagcctattcacctgccctgcagccactgggcgggctgctgctcaaactggtgttcactcagtctcccgtttcgccggagcagtctttgcgagttgcaagggccgctgctcggcaggcacagtcagctgccgacaccatcagccggcagatgcagcagttgcagagcagcagtgggcagcaggtgcttacggcggcgcagctggaggcagcattgcaccgcataacgatcatcagcgctgcaggtgtgctcaaggtctacgcacgccagcatgtggctccccaagaggtcaggtcaattgcagatgcacttgttgtcggcagcgagc

SEQ ID NO: 1810 - DNA, 478 bp, Chlorella sorokiniana
  Clone ID: LIB3602-009-Q6-K1-C8
gcgagctactacgagggctccttctccaacatctcccgcaacgatgccggcgagtacgtggcggtgtcgagccgcggcaacttcttcatgacctggtcgccaggccagacctactggaagccccacaaccgcccctccacgcggcggctgcagaacatgggctacacgcccgacagccggatctggctgaccaccaagggcggcgacgtttactatgtcgacggcagcggcgagggccagttcgccccggccaagatcaactcgcgcggctttggcatcctggacatcaagtttgtggacgaccgcctgggctacgcgtgcggcggcagcggctccctcttcaagaccgaggatggcggccagagctggaagcgcgagaaggcggccgatgagctggcggccaacctgtacgagctggtcttcacgcccggcggcctcggctttgtgctcggcaacgacggcgtgctgctgcggcgca

SEQ ID NO: 1811 - DNA, 387 bp, Chlorella sorokiniana
  unsure (1)..(387): unsure at all n locations; Clone ID: LIB3602-009-Q6-K1-C9
agccagcgcgggcgcgctgccgccgcactcggcgggcgccgtcagccagcgcctgcacgtgcacaacagcctgcacggccagaaggcgctggtcatgcggctgcgcatctcctaccagctgggaggcgcgccggtgctggagcagggggaggtgtccaacttccctgccggctggtgaagcatctgcgcgctggcaacaggtgctgcctgcagtgagccctgtgtctctctcccgccagcttgcaactccctgtgcttgtacccattctttacccagcaactgacccgtacaggcgctgtgccgatcgccgatcgatgtttacagacagtagcggtaggcaggacatgaggaagcaggaccatgtaaacaagcaagcnaacaanana

SEQ ID NO: 1812 - DNA, 534 bp, Chlorella sorokiniana
  Clone ID: LIB3602-009-Q6-K1-D1
gctccaggcgccgcaggagggtaaagagcaaagatgccggcgggccagggctaccgcgcgcgtacgcgccacatgttcagccgcggcttcaggcagaagggcttcatcccgctgtccacctacctgaccaactacaagctgggtgactatgtggacatcaaggtcaacgccgcggtgcacaagggcatgccccacaagttctaccacggcaagactggctgcgtgtggaatgtgaccaagcgcgccgtgggcgtggagctgctcaagcaggtcaacgggcggtacatcaagaagcgcatccacgtgcgcatcgagcacgtgacccccagccgctgccacgaggagttcctgcgccgctgcaaggagaacgacgcggcgcggcacgcggccaaggtggagggcaagccgctgccggtgctcaagcgccagcccaagggcccccgcaccgaggccatcatgctggagaacgtgaagatggagaccatcacggccatcccctacgatatcctcaaggagggcgtgctctgagcgtga

SEQ ID NO: 1813 - DNA, 349 bp, Chlorella sorokiniana
  unsure (1)..(349): unsure at all n locations; Clone ID: LIB3602-009-Q6-K1-D10
ggcaacctttgatgtcctaacccaaatgtgcctgtgctttgccaatcgctttcccctcggagcacccgtaaccttgcctgcttttgtcatacaatagataccccctctccccaaaccgacccagcaacaaccgccacctggttaggcccgggctgcttgggccacccagccctcgccgccggccctgcccccaaagtttttccacgcacgacgcgcaccgcaccacagccgcctgacgcctagcgcctactttgggcggaacgcacgagcactgcctgttggcgcggcgtcaccgcccgtgccccgtgccttgacaacgtctccccaggtgtaatcgatttatgntnna

SEQ ID NO: 1814 - DNA, 364 bp, Chlorella sorokiniana
  unsure (1)..(364): unsure at all n locations; Clone ID: LIB3602-009-Q6-K1-D11
ggaggagcagcaggaagagcccgcagcagaagaagttacggcggcttggggcaggccgctgcctgcaggcgtgcgtgtgcggaacctgtactttgagcccacgcccctcagcctgctgactgctgttgtgactgaggaggggcggttggagccagcagacatcactgcggcggtgcaggcacgaaagcagcagtaccgcacagccttccagctgccttgagtgtcatgcgctttggagggggcacccggcggcagcatgttttgtacagtactgtatgcgagtttgcaagtgcttgtgagggcgcatgaatcgattctgatgcattgggatgttagcatgtatgcaatcactaagcttggcnna

SEQ ID NO: 1815 - DNA, 490 bp, Chlorella sorokiniana
  unsure (1)..(490): unsure at all n locations; Clone ID: LIB3602-009-Q6-K1-D12
ggccaaggacagcatgcccaaccgggtggccgcacacgtgctggagcggctgatgggcaacccgcccaaatatgttcgctcgggtgccaccatccccgccctggccgccttccagaagcacctcaacgccacaaccaccgtgtttgcattcggcctgcccgacggcaacctgcacgcccccgacgaaaacttgccggtgtccatgtaccgcctggcacgcaaggcttgggtggagtacctgtgtgcgctgggggatgccgccgctgtggaggctgacgccgcagccagtgcgagcgagagcctcgaggcggaggcagaggacagcagggccgcggtggcagcagaggttgatggggaggagagcgccgaggggacagccgatcgcagcgagctgtgaatggacagctgtgtgctttgtttgtatcattccttcactcgtttacaaactctgaattgaccagtacggttgtgagaactaaaaggcnnnnna

SEQ ID NO: 1816 - DNA, 334 bp, Chlorella sorokiniana
  unsure (1)..(334): unsure at all n locations; Clone ID: LIB3602-009-Q6-K1-D2
cgcgtccggttccagtcgccanaggagggtaaagatcacagatcctgttttggctctggctaccgctcgcgtccgcgcgacaggttcatttcgagggttgaggcagacgggcttcatgccgctgtccacctacctgaccaactacaagctgagtgactatgtggacatcaaggtgaacgccgccgtacacaagggcatgccccacaagttttaccaacggaagactggctgcgtgtggaatgtgacacaaacacgccgtatgcgtggagctgctcaagcaagtcaacggtcggcacatcatgaagcgcatccacgtgctcatcgagcacgtgac

SEQ ID NO: 1817 - DNA, 524 bp, Chlorella sorokiniana
  Clone ID: LIB3602-009-Q6-K1-D3
cggacgcgtgggggagagcgaccgcactgcttacattttcctttctggtggtctgggcaccctagacgagttcttcgagatcctgacgctggtgcagctgcgcaagctgggcacaaaattccccgtgcctatcattctggtggactacgatggcttctacgccgggctgctgcagttcctgatggcctgcgacagccacggcaccgtgggcgcccccgagctgcgcgacttgattgtggcgcacgacaatgagggagtgctggacgtgctgcgccagtactacaagctggatggcggccaggcggagggcggcaagcgcagccccagcaaggtgtaccgcgcctccgtcttcctgcagctgggcagcgaggagcgtgcagaggcagccggcctgtgaggcgggcgcagcagcgggcacagctcgctcatccctggacatgtgggcacgagcctggaatgctggcctagcaggggcgacgctggctggtccagtatgcacacaacttgtgatcccaatgtcaaca

SEQ ID NO: 1818 - DNA, 560 bp, Chlorella sorokiniana
  unsure (1)..(560): unsure at all n locations; Clone ID: LIB3602-009-Q6-K1-D5
nntccgcttttcacctcccccagcnaaggaagggacnngaggcgcnntgaaccggctttgggcgctcgacaaggttnntgtggtcagccgcnaacaagggnnaggagatggaggggcggcggccggcaccgctggacggcattcgtggacaaccgtgtccgccaagcancgacctcgtcacctacttgtccctcctgaagacaaacggcaagtttgtgattgtgggcgtgcccgccgagccctttgagctgccctccttcgctgttgtctttaagcgcctgaccgtgggcggctccctcatcggcggcatcaaggagacgcaggagatgctggactttgcggcgcagcacggcattgtgtgcgacaccgaaaagatcggcatcgactacgtcaacactgccatggagcgcctggtcaagaacgatgtgcactaccggttcgtgattgacatccanggcagcctggtggcgtgaggcggcggctggacagcccaagcggcagcagcggcctgcacattggcagcgccagctcgccggctgatgggcatgccccgcccccct

SEQ ID NO: 1819 - DNA, 500 bp, Chlorella sorokiniana
  Clone ID: LIB3602-009-Q6-K1-D6
cgcaggtgcctgcggtggagggcggcgaggaggaggagcccacggtgctcacgctggccagcgatggcaacgtggagggtctgaaggagctggtggcgcaagagggcacggatgtgaacgagaaggacgatgagggccgctccgcgctgcactttgcctcgggctacaacgagattgagtgcatgaaggtgctgctggaggcaggcgccgacgcaaacgcggtggacgccaacgacaacaccgcgctgcactacgccgcgggctacggcaacctggaggccgcgcagctgctgctggacaagggcgcggacgcgggcatcaagaacgcggagggcaagaccgcgggcgaggtggctgagatgaacgagcaggcggcggtggttgagctgctcaaggccaaggcggcataagcccccctgtttctggcgtcttgctcaccgcccagcttgctacacccgcgggcggcgcaaccttgcacgcatgttgctcgcatacagttg

SEQ ID NO: 1820 - DNA, 521 bp, Chlorella sorokiniana
  Clone ID: LIB3602-009-Q6-K1-D7
ggcctggacggcctgtcccagcgctgcgccgactactacaagcagggcgcccgcttcgccaagtggcgctccgtggtgtccatccccgccggcccctccaccatcgctgtgcgcgactgcgcctacggcctggcccgctacgccgccatcgcccagaacgccggcctggtgcccattgtggagcccgagatcctgctggacggtgaccacgacatcgaccgcaccctggaggtggctgaggctacctgggccgagaccttcaagtacctggccgacaataacgtgctgttcgagggcatcctgctgaagccctccatggtgacccccggcgccgagcacaagaagaagtccacccccgaggaggttgcttcctacaccctgaagatgctgcgccgccgcgtgccccccgccgtgcccggcatcatgttcctgtctggcggccagtctgagctggagtccaccctgaacctgaacgccatgaaccagagccccacccctggcacgtgtcggtctcgtacgct

SEQ ID NO: 1821 - DNA, 410 bp, Chlorella sorokiniana
  unsure (1)..(410): unsure at all n locations; Clone ID: LIB3602-009-Q6-K1-D8
ggagagggctaggactacgacatgaaggacgtggagcgcttccacgaggaggcaactaaggacgccatgatgcgccgcaagtgaagccgcacccggcggacaccaaggccgacaagcgacagcgtgggccggagccggcgcaatgatgcgccgcaggtggagccaacacactggcttacgactccagcctttgtagtggccgcggcagactgctgacgccagaggctgctgcggccgtggcatggtccacagtcgcagccatggtcagagtaaatgcatgatatgccgcaaccccagttgaaagtgcagccgcagcgggcccgcccctcacactgaacaccttgcttttgcacactagccttcctggcagccgcaccctgcacatncgatttattgcatgccctgttttt

SEQ ID NO: 1822 - DNA, 524 bp, Chlorella sorokiniana
  unsure (1)..(524): unsure at all n locations; Clone ID: LIB3602-009-Q6-K1-D9
ctccttgtttcttgccctgcaccagatctccaagcaacgatgcaggctgcccagctccaggctcgcgccacccggcccgccgtggctcgccgcaccaccgtgcgcgtgcaggctcagcaggccgcgccccgcgctcaggcccccaagccccagcagtttgctgctggcctggctgccgccttcgctgccgtgaccctggtgctggcgcccgccgccaacgctgctgaggcccgcgcggaagtgaagagcgtggtgtgcgccagcaaccccacctccaagatctgcctcaaggacagcgccaagaactgaggcgtgccagctggactgagcgagcgctgagcccttgctggccgcacctgaggcaggcagccattgctgactgccggggggcaccgggccgccacccgctgcccggcagcatgggcgaggcggcgtgagaaagagaggacttgtgcactgccacacagttttttggacacctgtgctgtaacatatacttgaggaaaaaaaaaaaaaannaaaaa

SEQ ID NO: 1823 - DNA, 525 bp, Chlorella sorokiniana
  Clone ID: LIB3602-009-Q6-K1-E1
cggacgcgtggggctgcaccgtgggcgaccgcgcgcttgtgggcatgggcgccacgctgctggagggctccgtggtggagccgggcgcgatggtggccgccagcgccgtggtggcgcccggcacggtggtgcgcagcggcgagatctggggcggcaaccccgccgtgttcctgcgcaaactcaagcccgaggagactgcgttcctgggggagtcggcggagcactatgcgcggctggtggcagagcatgcgcaggagacgtccaagccgctggagcagattgcggctgagaagggcctggctgcgtgatgaccctctgctggagcaccaccccagcttgccttgcccacagctactcagcactacccactgcggcggagctgctgttgccgcaccgtagcggcgttgcacaggagctgcgcaggaggctgacgccccatcctgctccgtgcacgttgcacagttcccccagctttgttctcctgtttcgctgacctctccttgagtacttcacactgctgtaact

SEQ ID NO: 1824 - DNA, 380 bp, Chlorella sorokiniana
  Clone ID: LIB3602-009-Q6-K1-E10
gctgtggcagccgtaattgcatcatcgttttgctactcttctgctgcagggcactgctggcgtcctgctcagcggactcggggtgacagccacccactgagcacacgtgcgaggcagagctgccggcgagcggcggcagcggcctcagcgcaacggcggcagcgccggcagaacatattctcatcgggaacgaagtcgctgcagctcaaagcagcaagcacacacctgttggacgtaccggcgccctcttttcgcatcgagtgctagtggcatcggcatcacactccgggcccatgccattacctgcgccatcgggacttctgcatattctcatcaacgtgacttttgcgtgttgtcattttcggttccagttctgcgca

SEQ ID NO: 1825 - DNA, 68 bp, Chlorella sorokiniana
  Clone ID: LIB3602-009-Q6-K1-E11
aaaaaaaaaaaaaaaaaaaaaaaaaaaaaagaataacgtttaaagaaacaaaaaaacgggaaaagaaa

SEQ ID NO: 1826 - DNA, 349 bp, Chlorella sorokiniana
  unsure (1)..(349): unsure at all n locations; Clone ID: LIB3602-009-Q6-K1-E12
aaaaaaaaaaatatnnttaaaaaaaaaaaaatttaaaatttgtaaaaaaaaaaaaaaaaacgaaataggggtacaatgtttatgaacaattgtattcataatattgggtctcctatattcaatccaatgttcatttccctgcccctccttttctaacaaaccccttgggtaacccttctcattccccaactacctcatttttctacccacccctcttttaacacctagcatgaccccaccgatcccccttccgaacacctttccctactgaatggcaacttgaacgcccactgtccctccccatttagcgttaccattaagtgcggttactctcatggttactcctaca

SEQ ID NO: 1827 - DNA, 242 bp, Chlorella sorokiniana
  Clone ID: LIB3602-009-Q6-K1-E2
aaaaaaaaaaaaaatgaaccaaaaacaaccaaacacttttaaacttaaaaaacaacactaataaaagaggtacgaggttgaacaaaaaagcggtggggccttttataggttccaggctttccttctaaggaatccaacttcataactattttatggtgaaacctaaattcatttaattggccatctaaatacaatcgagagccctgggaaaaccaagtcgttaccaaactaaaccccgttgt

SEQ ID NO: 1828 - DNA, 492 bp, Chlorella sorokiniana
  Clone ID: LIB3602-009-Q6-K1-E3
gcattgaggaggagctgggcgatgccgccgtgtacgccggcgagaactaccgccacatcgccatcgcctaagcgcttcagcgatgagcatccgctgggccgaggcagtgcagcccaggcactgctgctgccactgtgcaagccgcggaactttgccgggcctgagtgcacttgcggtgggcaccgagcaaacccaaacatgaggcacggcggggatgaccagctcctgctagccgcagattgagcagcccgcagcagccgccccgtcgtgcggcggtgcctgatccgtggacagtgcggcgcgcattagcgctcgctgcccgcggcacatgtgccagccatgatctaattctagatttcccttgctgcccgcgtggcgcctgcgtgcaccacggggcctctccctcttgcgcctgcccctgttgactacccaggcgcttcgctttctcccatgccattgctgcgaagacccttttgacacaaccacacgcgc

SEQ ID NO: 1829 - DNA, 139 bp, Chlorella sorokiniana
  unsure (1)..(139): unsure at all n locations; Clone ID: LIB3602-009-Q6-K1-E4
naaaaaaaaaaaaaaaaaaaaaaaaaaaaaaaaaaaaaaatttaaaaattaaaaaaaaaaaacaaaaaagaggaaaggggcggccgttttaaggggtccaggcttccttccccttccttgcgacccaatattttttttt

SEQ ID NO: 1830 - DNA, 525 bp, Chlorella sorokiniana
  Clone ID: LIB3602-009-Q6-K1-E5
ggctgctgccggcgttgacagcctgactccggcccagaaggacgcttacaaggcggcgctgctggcgaatcccatgcacaagcagatcgcgcaggacatggcggacgtgtgggtcgagggccagccgctggctgtggcagccgctgagctggctgaccacattccgctgctggaaatgctgctagtgggcgaagcctctgaggagcagctggcgtcagctccagcggctatgcgggcggcgctgctggctctggcaccgctgggctttgaggcggcgctggggttgacccctgccactcaggaactcgactggatagagtttagcggcgacatgctgcggggcatggtggagcggctggatgctgatgtggccaaagagcaggcccgggcctgaaaggcagggcgccagctgccagcatgctgcgcaagcgccgcacaacagagtgccagcagtccaaccggcatttggctggccgtgccggcatgctaccatgagacatactttgtctgagatgcatttgcagc

SEQ ID NO: 1831 - DNA, 98 bp, Chlorella sorokiniana
  Clone ID: LIB3602-009-Q6-K1-E6
aaaaaaaaaaaaaaaaaaaaaaaaaaaaaaaaaaaaaaaattaaaaatttaaaaaaaaaaaaaaaaaaaaggaaagggagaaaaaaaaaaaaagagaa

SEQ ID NO: 1832 - DNA, 75 bp, Chlorella sorokiniana
  Clone ID: LIB3602-009-Q6-K1-E7
aaaaaaaaaaaaaaaaaaaataaacaaaaaattaaatttaaaaaaaaaaaaaaaaaaaagagaaagggataatag

SEQ ID NO: 1833 - DNA, 451 bp, Chlorella sorokiniana
  unsure (1)..(451): unsure at all n locations; Clone ID: LIB3602-009-Q6-K1-E8
cttcgaccccctgggcctggctgacgaccccgacaccttcgctgagctgaaggttaaggagctgaagaacggccgcctggccatggtgtccatgctcggcttcggcgtgcagggcctgatcacccgcaagggccccattgagaacctggctgaccacctggcggcccccgacgccaccaacttctgggtggactacgcccccaagtccgccggcatcggctactaagctgtttccgtcgcttgactggcgccgcccgctcgcccgcccgctgagtttacggccactcgcggcaacaggcagcagcggcgtctgtactttctgactcctccggcgattgctggtggcgcaccttgcttgctttgatgcttgcttcgggggcctaggcaccctcccatgcaacacatgaacctncaccacccctgccaacccaagtcttagcctgtgtttgcg

SEQ ID NO: 1834 - DNA, 314 bp, Chlorella sorokiniana
  unsure (1)..(314): unsure at all n locations; Clone ID: LIB3602-009-Q6-K1-E9
gcttctgcagttttcaaagctcaccacccctgcttgccaatggctggcaaccacaaacgctgccaacagatgcctccctccctactggcgaccccctccctcccacactcccaaacaccctgccctccaccagtccggtgtcctgtcttgcccaccacgctccctgtggctgccgctgcttggcggcaacacgctcccattgcgccaccaaaccaaaacgagcgaaacctaaccctatgcttcccgctgcactgtactctaaactcccccgctgttgcgtgccctgataccaactgtcagtaaattacaccnaa

SEQ ID NO: 1835 - DNA, 369 bp, Chlorella sorokiniana
  unsure (1)..(369): unsure at all n locations; Clone ID: LIB3602-009-Q6-K1-F1
gcgccggcccacgctgcctccgctcctgacattgacagcctgcttgcaacctcccctcctgctctgctgctcctgcgttgccgttttctctcagtcccttgccccgctgggccctcagctcgcattctctcgcccctaggtcggcggcccctgccccatcaggcccgcgccccagcgcctgccatccccgccttgcctgccctgtacccccaccctgctccggcacacccagtcctaaccgtgcatgcctgcaacctctgctacctgtagcccttccactgattgtttcccagcttgcacagacctttggtgcacacgccctgcnnaanaaaaaaaaaaaaaaaaaaaaaaaaaaaaaaaaaaaaatag

SEQ ID NO: 1836 - DNA, 461 bp, Chlorella sorokiniana
  Clone ID: LIB3602-009-Q6-K1-F10
ctccaaacctccgcctgacagcacacctgcgccggcggcacgagggctgctgctgtgcacccgccaaggcgggaagtgcaccatgccgccgcctgtgccgtttgccggccagtgactgagcgatgtgtgcggcgtgaaccgttgactatgcgaccttgcatgctccatgcaccctggaattagcacgctattgctgcacttgcccgccaagcagcgggcgcgcgacacccctgccccatcgcatgcagcattccacttgcattttgcactacgaacccttcccgcaaggctgctgggctgcggtacggcaagcagcccgcctgctggccatgcggctttgatacgaccccaccccccaaacccaacgacagcttcattcccgccaaagtttttcaaaccccttccggagccgttggacggcgttcctttggttttgcaaacacaacccgctcactttgcat

SEQ ID NO: 1837 - DNA, 524 bp, Chlorella sorokiniana
  Clone ID: LIB3602-009-Q6-K1-F11
cggacgcgtgggcttcgaccccctgggcctggctgacgaccccgacaccttcgctgagctgaaggttaaggagctgaagaacggccgcctggccatggtgtccatgctcggcttcggcgtgcagggcctgatcacccgcaagggccccattgagaacctggctgaccacctggcggcccccgacgccaccaacttctgggtggactacgcccccaagtccgccggcatcggctactaagctgtttccgtcgcttgactggcgccgcccgctcgcccgcccgctgagtttacggccactcgcggcaacaggcagcagcggcgtctgtactttctgactcctccggcgattgctggtggcgcaccttgcttgctttgatgcttgcttcgggggcctaggcaccctcccatgcaacacatgaacccccaccacccctgccaacccaagtcttagcctgtgtttgcgcgcggtgaaggcaatgagaagaacagacccttgtaccctgcctcgctgctgcgtttttgct

SEQ ID NO: 1838 - DNA, 505 bp, Chlorella sorokiniana
  Clone ID: LIB3602-009-Q6-K1-F12
gtgctgccccttgtggctctgtcacggctcctctgcgccctcctcggccccccagtcggcaagctttctggcgttctgcgcttcgtgttggtccctgtggtccgcgccgctgccccgagcccgagtcgccgccccaggcaccgcccgccgccgcaccgctgctgccactttgctggctcgtccgtcgccgtctcggcacgctgctgctccgtgttggcttccgccgccgcccgtcatcgccgccgctgtgcgctcccgagtccctggcgcttgctgtctggcgctttttgcggctgggtgtttgcgtcgtcgcgagcccaagtcccccgcccccgagcaagccgccgcgtgctgccctggtcttggccccttggtcttggctccccaccgcgcaccggcgccagctgccagctcccgcggcgctcctgcagctgctgaactatttggtccctgcttgcgctctgctcccctgactctcacgctccactatcctgttgggtctgtc

SEQ ID NO: 1839 - DNA, 458 bp, Chlorella sorokiniana
  Clone ID: LIB3602-009-Q6-K1-F2
caccgctcatcggggtagttgcagcagcaggcctgccggcggcccgaccccaccctgcccgccgcaacgcagcagcactgataacctgcgccccactttgcctgagggcaaactgagtgcgcccctgcctcaatctatctaacccacttcttcctgccacgcctgccaagccaggcggctccaactgcatttgatgtctccaggccgtcccgccatgtacctactacctccccccaactgccgccactgtacccaactgctgccgccgccacgcgcgcagcaggcgtgcaacccccctctctcctccctccccccggccgacctgaattgtgggtgtgcacctgcctcccttccctctcatggtcgactgtcctctgagcctgaccccgaaagagcgctcccacgtgtgtgtgcgtgtttgggcttttcccctcagcttgccccagtgtaaacagctc

SEQ ID NO: 1840 - DNA, 460 bp, Chlorella sorokiniana
  unsure (1)..(460): unsure at all n locations; Clone ID: LIB3602-009-Q6-K1-F3
gtggggctggcgcgagcactggaccaggcatccctctccctggccggcggcggcaccatcctgtatgcggcccctgagcagctggccaacagcacccccggcttggcggcagacatgttttcgctggcgtgggtcatccacgagattgccaccggcgagcggctgctgcgccgcgggcagggccgcccgctgagggctccagaggactgcccagacgcaattgtgcagctggtggggagctgcctgcaggtggaccccagtgcacgccccacagcagcagaggcagttgcggtgattgcgacaagccttgcagcggcgcaaggccagccgccatgatgggccagcctcaacgtatgcaaacgggttacacattgaacatgcccagtcaacgaaataaaccctggcaacaagctgccaattatgaaactgtatccatcaccaannaaaannaanannanaa

SEQ ID NO: 1841 - DNA, 54 bp, Chlorella sorokiniana
  Clone ID: LIB3602-009-Q6-K1-F4
aaaaaaaaaaaaaaacctacaaataaaaaaaaaaaaaaaattaaaaattataag

SEQ ID NO: 1842 - DNA, 475 bp, Chlorella sorokiniana
  unsure (1)..(475): unsure at all n locations; Clone ID: LIB3602-009-Q6-K1-F5
cggacgcgtggggttgcaaggagcaatttggggaatcgagttcggctcgaccgaacgcgaaacagccaaccagccaccatgctgatctccaagaagaaccggcgcgaggtgtacaagtacctcttcaaggagggcgtgctgtacgcggagaaggacttcaacctgcccaagcaccccgagattgatgtgcccaacctggaggtcatcaagctcatgcagtccttcaagtccaaggagtatgtgaccgagcgctacgcctggcgccacttctactggttcctgaccgactctggcattgagtacctgcgcgagttcctgaacctgccctccgagatcgtgcccgccaccctcaagaagagcacgcgcccnctggagcgcgagggcgcgcgcccgccccgccgngacggtcccccccgccgcttcggcgaccgcgagggctaccgctccgagaaggcgggcgcccccggcgagtacc

SEQ ID NO: 1843 - DNA, 210 bp, Chlorella sorokiniana
  unsure (1)..(210): unsure at all n locations; Clone ID: LIB3602-009-Q6-K1-F6
gttccccaagtacgaccacgtggcggtgggcaccggcaccgtggtgaacaagacggcgatcaagcagtaccagcaggccacccgcgaccgcgccaaggtgaagaccgagggcggccagatcatccgcgtggaggcgcaccccatccctgagcacccncgtccgcgccgcgtgaagggccgcgtcaccctggtgggcgacgccgccggcta

SEQ ID NO: 1844 - DNA, 506 bp, Chlorella sorokiniana
  Clone ID: LIB3602-009-Q6-K1-F7
ggaggtggtggagaagggcgtgacggagaacatctttagccagtttatgtataaaactatggtggagaacaaccttagcatgtggactgtaaaaaagcagtttgcgctaagcactgcgatgtcagcggtggcatgtcacacgctgctcctcaccgggcgctcgccaagcaagctgcttgtgtctcggtgtatgggaaccatcacgcacgccgacctcatctccacctacgattcgcgtttccagctggagcgcggccaagagacggtgccattccgcctcacccgcaacatgcagtccttcattggcccacagggcatggaaggcatggtggtttgcgccatcactgcagcagcgcaggcgctgcaggcagagcctgccatcacttcatctatcgttgccctgttcttcagggatgacattctgtcctgggcagctcggcgcagtggagcgcgctgcatcgcggcactgaacgccagcctgaagacctcccagctggagacgtgcg

SEQ ID NO: 1845 - DNA, 72 bp, Chlorella sorokiniana
  Clone ID: LIB3602-009-Q6-K1-F8
aaaaaaaaaaaaaaaaaaaaaaaaaaaaaaaaaatatttattaaaaaaaaaaataaaaaaaagagagaagag

SEQ ID NO: 1846 - DNA, 462 bp, Chlorella sorokiniana
  unsure (1)..(462): unsure at all n locations; Clone ID: LIB3602-009-Q6-K1-F9
ggccgcgtaagcagccatccggcagccgcagcagcgccgtctccccggcggcccaccgttgagtcgtgccaaccgcccgccagcccccccgcgcggtgcggacgcccctcgtcgaattattttttgccgcattgctcccttccgccgcccctggatggctttcctgctcccctctgtctcgtcggttcctcaggcctcggggcgcattttgtccgatgccgggcccctcttgcaccgcatttcatcttgtgaacacaccggacttcanaaaaaaaaaaaaaaaaaaaaaaaaaaaaaaaaaaaaaaaaaaaaaaaaaataaaaaaaaaaaaaaaaaaaaaaaaaaaaaaaaaaaaaaaaaaaaaataaaaaaaaataaaagggggggggcctttttaaagggtcacaatttttttccgcttgtttgcaaagtaatactttttttataggggcccctaaatta

SEQ ID NO: 1847 - DNA, 148 bp, Chlorella sorokiniana
  Clone ID: LIB3602-009-Q6-K1-G1
ccacgcgtccgaaaaaaaaaaaaaaaaaaaaaaaaaaatttaaaaaaaaattttaaaataaaaaaaaaaaaaaaaaaaaggggagaggtaaaaaaaaaaaaaagggacggggcgccccttttaaaggttccaagtttccttccccttc

SEQ ID NO: 1848 - DNA, 328 bp, Chlorella sorokiniana
  Clone ID: LIB3602-009-Q6-K1-G10
gtgcctcaacgatctcagccagcgtgccctcacacactgccaagtagcctgacccaggcccccacccgtgcataagtctctactctaccgctgctgagtcaccctacgacctcgtgtgttgtggctccgtgctgctgcttcactcaacattcattgtcgctgaaaagcgatcccgcacccataataaatcatcaccacctcacatcaacctgtgctgcctgtgccttcaatgtttactgtcgcctgctgctgtcctgccgcacacttgcacatgctttgggcctggctccgtctctcatcacctgtaatgaggcgttttatccgccta

SEQ ID NO: 1849 - DNA, 363 bp, Chlorella sorokiniana
  unsure (1)..(363): unsure at all n locations; Clone ID: LIB3602-009-Q6-K1-G11
cgcagtacggcggcaggcagcattgctgccgtttttgctgcgtgacccgcagccatttatgaattggttgaccaagtacgctctctgattcctctattctgcgcacttcccctaagtaccgcttttgactcatttccacctgtcacaacagccgtactagtctccctgcctgtctctcatctttctcattcttcatccccagttcatcgcgctacgtggcgaggcgcgcaacacataaagtgttgcacgcacgtgagctgaatagcgacctcagcggtaaatagtaactatatgaatgtnaaaaaaaaaaaaaaaaaaaaaaaaaaaaaaggggcggccgctcgcgatctagtttagatcgca

SEQ ID NO: 1850 - DNA, 500 bp, Chlorella sorokiniana
  Clone ID: LIB3602-009-Q6-K1-G12
gcggttccgacagcccttggctgctgagctgcatccccacataaagggacttggctatcaagagcagcatgcagcccacgcgtcggctgcgccccttggtcaagtcaatggttgccgccgctgctcctctgccgcccgtgctgcttgctttatctgcaggcgggcattgatctggcgcgacgtgatctggtggcggttggcatgcagcccaccaaggggcggcggcagtgcggttggggaggtggacgagctgcaacgtgctgcaggaggatgaacttattgttggccggccgcctcgtgccaattgcagtgggcaagaacaacaagatgctggtgcgcaccgcggcatgagctgagcggctgcatggcatgagcggtgcgcacggcggcggcccatggtggcagcatgggacgtaggcgtgagcggcgctggcctgcgtgctctggagcagccgctcctgccattcaatattgccatggcatgtaagagcagacatgtt

SEQ ID NO: 1851 - DNA, 457 bp, Chlorella sorokiniana
  unsure (1)..(457): unsure at all n locations; Clone ID: LIB3602-009-Q6-K1-G3
ggtgggcgtcaacgaggtggccatcacggcagaggtgaggtgttcgcctgagtgggtacttcgacgtagctgcgttcccgcagtgctgctgctgctgccgctgtcgcgagctgttggctgctgttcctgatgcttcatgttcctggcctgcaagccccccctccctcccgccccggccatcccccacaggtggcgccatttggcggcgtgaagcaaagcgggctgggtcgtgagcagtccaagtacgggctgcaggagttccaagatctcaagaccgtgtgcctgggcctgtgagggacggctgcgcagtggcgtgccttccagcggctgccttcgcacaggcagttctgtccatatgcttctgtcctgatcgctgctgccactgctgtaccaatgttaccaatgttgacccactgtttgatctgatgtggagctgtgtaacatcatgtatgatnna

SEQ ID NO: 1852 - DNA, 84 bp, Chlorella sorokiniana
  Clone ID: LIB3602-009-Q6-K1-G4
aaaaaaaaaaaaaaaaaaaaaaaaaaaaaaaaaaaaaaaattaaaaaaaaaaaaaaaaaaaaaaaaaaaaaaaaaaaaaaaaaa

SEQ ID NO: 1853 - DNA, 472 bp, Chlorella sorokiniana
  unsure (1)..(472): unsure at all n locations; Clone ID: LIB3602-009-Q6-K1-G5
gcagacctggctgtacagcacggcgcgcgcccgcctgcccgcctcggctgtggagacggccacgccctacctgaccaccgtggtgcagcacctgaagcccattgccgcgtgagcagcgccgtggtgaggcgcgtgcgcggcacaggccgcagctgctccctgtgggacagcccgccttgccacccgatgcttccaacatatgtagcggtatggccgtgcctgccgtggctgctaggactgggataatgttttgcaacagcagcccactgccaggcgtccaggccatgcccatcggcagccttgcgggcagcagcccagcatgtcagccccctttgaacaatggttcgatagagatcccctgccctgtttcataattgccatcccctagcgctgtacttccgctgccacaaatngatngctgcttgggcgccccatacatacccacatgtcatacatgcgtgctgaacgcccc

SEQ ID NO: 1854 - DNA, 279 bp, Chlorella sorokiniana
  Clone ID: LIB3602-009-Q6-K1-G6
gtcagaggcatgttacaccgtcacgggaggtacagatttaggcagtgcttggaagatggggggtctagaggtctttgagccttcccagcgttaaagctgctcttgcgcgcgcttatggggctaaggggctaaggagggggcgcgggccgccctttacttgaagtagtcttggagcggcacctgcttcagcgcgcccttggacatgttccgcagcgccttcacagtggcgcgggcggccccaatggtggtgatgatgggcaccttgtgcgccagcgcggt

SEQ ID NO: 1855 - DNA, 242 bp, Chlorella sorokiniana
  Clone ID: LIB3602-009-Q6-K1-G8
ggtgtctgcggtgcggcggctggaagacggccggttccagctggacctcgctttccagcaggggcaggcagcagagcaggacaagacccagcaacaaggccggccagctgtgcagcagggggcagagggaccgtttgatgctgtcattctggcgacaccactggagggcagcggcatcagcctggaagggctgtccgacaagccgctgattcccgcccgcaagtaccaaaaggtggtgacca

SEQ ID NO: 1856 - DNA, 287 bp, Chlorella sorokiniana
  unsure (1)..(287): unsure at all n locations; Clone ID: LIB3602-009-Q6-K1-G9
gcaggggcgcctgttcctggaggccagctggacgccgctcattgcggctggcggcatgtcttgagcccctggaatgtgtgcctgagagcttgtaagatcgagtgcttcaaaaaaaaaaaaaaaaaaaaaaaaaaaaaaaaaaaaaaaaaaaaaaaaaaaaaaaaaaaaaaaaaaaaaaaaaaaaaaaaaaaaaaaaaaaaaagggcggntgattgttgggttctaaatttaatgaaccctttcatcacaccataaaaaatcttttttactgtgccaaaaatttaaaa

SEQ ID NO: 1857 - DNA, 450 bp, Chlorella sorokiniana
  Clone ID: LIB3602-009-Q6-K1-H1
aggagacggtgcgtggcgagctgtcgagcgttggagacaacctggctgccagcgtggcaccagctgtgcaggccgccctggccgcctccctgcccaaagagctgtcctgcgccgtcaaggctgggctggacaagcagctggcgcccgcggtggccgccagcctgtccggcaagccgctgcaggaggccttccgttccgcctttgccaagcagctggtgcccgcttttgaggcggccacgcaggccatgttccagcagatccagtctgcctttgcggccgggtttgaggagcacctgcaggccacacgcagctctctggcggagcctgcgaagctggcttcccagctggcggcctccctcagcagcgcccagtcgctagcgtcctccctcagccaaggccagcagcagctgctgcgggcacaatccattggtggcgcccccagcggcgcgc

SEQ ID NO: 1858 - DNA, 268 bp, Chlorella sorokiniana
  Clone ID: LIB3602-009-Q6-K1-H10
gtttgacccaaccatgggcggctaccagctaggcatgcctggcggcgacccctatgccgctgcggcctttggcatgcagccccagccggatgctgccatgttccaggcctaccagcaggccaacggtgcagccctggccaacctgatgcggccaaatggaatgggccccggcgggcccggcgttggcggcccgcccggccctgtgccgcagcccgtcaacagcggagccgccagcagcggcggtgcggcgccctctccctctgtagcc

SEQ ID NO: 1859 - DNA, 500 bp, Chlorella sorokiniana
  Clone ID: LIB3602-009-Q6-K1-H11
gttggcgcggtggagtgggcaattcgttcgcgatggtgaacgtcccgaagaccaagaaggccttctgcaagggcaaggagtgccgcaagcacaccatgcacaaggtcactcagtacaagaccggcaaggcgtcgctctacgcgcagggcaagcggcgttacgaccgcaagcagtccggctatggtggccagaccaagcccgtgttccacaagaaggccaagaccaccaagaagattgtgctgcgtctggcctgcaccgtgtgcaaggcccagcacatgcacgccatcaagcgctgcaagcacttcgagatcggcggcgacaagaaggtcaaggggctatactagtaaaaaaaaggagagcggcaagcggagagcatgaccgagaaatggaggcagcggcgcccgctcaccctgggcggcctgctccccgcccggcgcctcgctttggccgcctctggccactcgtacgcctccttgtccatgcccttgtgcttcctgagc

SEQ ID NO: 1860 - DNA, 401 bp, Chlorella sorokiniana
  Clone ID: LIB3602-009-Q6-K1-H12
ggttcgcgcctctgccgagggcgtcgaccgccgcgccgccctgggcctgctggccgctgccgctgccgtcagcaccgcgcagccctctgaggccgcctacggtgatgccgcccgcgtgttcgccggcaacatcaccaacaagtccggcttcatcccctacgccggcgagggcttcgcgctgctgatccccagcaagtggaacccctccaaggagcaggacttccccggcgtggtgctgcgctatgaggacaacggcgacgccgtgaacaacctggtggtgctggtgcagaaggtgggcaagaacaacatcgacgagctgggcagccccgacaagttcctgcaggacaacgcctacctgttcggcgagtccgcggccttcaccggcgagaccctgtctgagg

SEQ ID NO: 1861 - DNA, 512 bp, Chlorella sorokiniana
  Clone ID: LIB3602-009-Q6-K1-H2
gccacgcacgacgtccagcaaggacctgcagggtgcgctggctgcggtgcctcccccttcggacaacatgcacacggcggtgcatgacgtggccctgctgaaggacctgagcttgaaggccaagctgagcatcatggccaccctgctggcctcgctgcaccgtcagccgggagaccccagcgagctggtgccgccggaggcatgcctggcatctgcactgccggccatgccgctgccacccctacctgagcttgagatggaacagtgagcggtccggccatgagcagcgagagccgcgaccacatgagaggggctgctgaatgccgcagctgcgctttttgcctcgccgtgatggcacagtggagagccatagccgtttgtttggctgatcaggagtgtgcgccagccgcgattgtatgcttcacgcttttttgctcgagaactcgcttgccaccaacctttggcacaatggttgcactgttttgcagcactttctgtaacatattggttcc

SEQ ID NO: 1862 - DNA, 183 bp, Chlorella sorokiniana
  Clone ID: LIB3602-009-Q6-K1-H3
cggctacatcctgtagggccgcgagctcgagttctatgtgaagaagatgcagaagaagaagggcaaggctgccgcgtaaagcgccgactagcgaggccgcaacccccgggtgccacttgctggataggatcaagttgtcaggcaccaactcgcactacaaaaaaaagaagaaagaccctaaaa

SEQ ID NO: 1863 - DNA, 376 bp, Chlorella sorokiniana
  unsure (1)..(376): unsure at all n locations; Clone ID: LIB3602-009-Q6-K1-H4
tggagcgccatccagcctgttcaagacaccgtgcgccgacagccggcgcgaaaaggcggcactgaaaggcggggagctgcgaggtctgtaggcaggcaggcattgtgcacaacggcccagcgcttggctggtctcggcagcagacaagcgaaatggcaccaggcagctgcaggcaggaggagtggtaggcaccagaaccacagcagcatacagctctgctcccggcctcgtccctgctctgtttacacaagccacgtgttggtagctcctgagcttgatctgaatagacattgcaacggcttgaaacttcctgcccatcgaacggctgactcaggcctgctgaaggttgctgctgtaaaccgatgctagtgcnnaa

SEQ ID NO: 1864 - DNA, 249 bp, Chlorella sorokiniana
  Clone ID: LIB3602-009-Q6-K1-H5
tggcaagctcagcttcataaacacacaccacacagctttcattctttgtgtcgcgagccggttggcacgagcgctctcttccccctgtactgccctgcgcctgcccaccctgcccctgatttttcgctcctgccatttttcccctgtagcaccctcacagcactcctctgccttagctctgcttagctctactatcagctccgactccctctgctgccctgaaatatgtggtgttgacagggcaaggtc

SEQ ID NO: 1865 - DNA, 415 bp, Chlorella sorokiniana
  Clone ID: LIB3602-009-Q6-K1-H7
cgcgtggccaccccaggttgacacagcagcgcggcagccatggcgtccaagcgtaagggtggcgtgggcggcaacaagttccgcatgaccctgggtctgcccgtggccgcggtgatgaactgcgccgacaacagcggcgccaagaacctgtacatcatctcggtgcacggctggggcgcgcgcctgaaccgcctgcccgccgccgcccccggcgacatggtcatggcgaccgtgaagaagggcaagcccgacctgcgcaagaaggtcatgcccgcgattgtggtgcggcagcgcaaggcgttccggcggaaggacggcacctacatctactttgaggacaacgcgggcgtgattgtcaacaccaagggcgagatgaagggctccgcgatcaccggccccgtggccaaggagtgcg

SEQ ID NO: 1866 - DNA, 432 bp, Chlorella sorokiniana
  unsure (1)..(432): unsure at all n locations; Clone ID: LIB3602-009-Q6-K1-H8
agcggcgccaagaacctgtacatcatctcggtgcacggctggggcgcgcgcctgaaccggctgcccgccgccgcccccggcgacatggtcatggcgaccgtgaagaagggcaagcccgacctgcgcaagaaggtcatgcccgcgattgtggtgcggcagcgcaaggcgttccggcggaaggacggcacctacatctactttgaggacaacgcgggcgtgattgtcaacaccaagggcgagatgaagggctccgcgatcaccggccccgtggccaaggagtgcgccgacctctggccccgtgtggcggcagcagccaacaccattgtgtagagcggcggccgtccggctgggcgtcgcggcaacgcggaccacactgcaatacccaccgnctgccgcgcttccggcgcagcatgctgtaatgcacatccagcg

SEQ ID NO: 1867 - DNA, 354 bp, Chlorella sorokiniana
  unsure (1)..(354): unsure at all n locations; Clone ID: LIB3602-009-Q6-K1-H9
cgagcacatcgacctgngcatcaagtacgacccctccaccggcatctacggcatggacttctacgtggtgctggagcgccccggctaccgcgtggcgcgccgccgcaagcagctggccaaggtgggcgtgcagcaccgcgtgacgaaggaggacgcaattaagtggttccagcagaagttcgagggtgtggtgctcaacaaggcccacgccgcctaagcggcaggacggccaccgcctcggcgcgccggcacctctcagacgacaggcagacagcacaccccctgcaccacggcgctgcgctgcactgccccgctggcttgttgctgcccatcggatgtaatagcggacaagtg

SEQ ID NO: 1868 - DNA, 309 bp, Chlorella sorokiniana
  Clone ID: LIB3602-010-Q6-K1-A1
gcggatgcccagacagcggcggcggcagccggatgccctgcgcacaagcatgcagcggcagcggcagcggcaggcagcgaccggcaagggctgcacaaagaataggcagtgcccgccgctgctgtggctgacccaaaacctgcatcatgcaggcatccactgtccctgctgtagctaccattgctttgaccacatttcatacccatcaagctttcggcatacccttttcagtatttgaacgcttcctgctgcctgccaaggatcaccattgttgatgcacgcatgtcctgttgatttaacgtaacagcc

SEQ ID NO: 1869 - DNA, 530 bp, Chlorella sorokiniana
  unsure (1)..(530): unsure at all n locations; Clone ID: LIB3602-010-Q6-K1-A11
caccatcatgcccaaggacatgcagttggcgcgccgcattcgcggccccgtctacggcgtgtgcagctattgagggccttgtgccatgcagcagcatcgcgctcacatttggcctatcagtggctcaatttgggcagggctgctgccagccaggccccagccattgtgcctagcccaatggcctttcgtttgtactctaggtagccagcagcagcaggagcagcaggagcaacacacactgaccgcaccacacgcaatacttgctttgcctggaggactttaacattgcctcctcaccaccaaccaaaccgcacgttcagcagccactccctctgtgtaaagcacgacgcactttanaaaaaaaaaaaaaaaaaaaaaaaaaaaaaaaaaaaaaaaaaaaaaaaaaaaaaaaaaaaaaaaaaaaaaaaaaaaaaaaaaaaaaaaaaaaaaaaaaaaaaaaaaaaaaaaaaaaaaaaaaaaaanggggggggcctttttaaaggatcaaagtttattgccccgggcatgca

SEQ ID NO: 1870 - DNA, 187 bp, Chlorella sorokiniana
  Clone ID: LIB3602-010-Q6-K1-A12
aaaaaaaaaaaaaaaaaaaaaaaaaaaaaaaaaaaaaaaaaaaaatttattaaaaaaaaaaaaaaaaaatagaggggattaataaaaaaagggtggggttcataaaaacactatttaaatttaattatgtcgattttattattaaattgttgtgaaaacttaaattttattattattaaaattttat

SEQ ID NO: 1871 - DNA, 247 bp, Chlorella sorokiniana
  unsure (1)..(247): unsure at all n locations; Clone ID: LIB3602-010-Q6-K1-A2
ttaataacaacacaaagaataggcacaacccnccactactgtagctgacccaaaacctgcatcatgcaggcatccactgtccctgctgtagctaccattgctttcaccacatttcatacccatcaagctttcggcatacccttatcactattagaacgctacctgctgcctgccaaggatcaccatagttgatgcacacatgtcctgatgattcaacctaacacccaaaaaaaaaaaaataaaaata

SEQ ID NO: 1872 - DNA, 531 bp, Chlorella sorokiniana
  Clone ID: LIB3602-010-Q6-K1-A3
cagacacagtcaacggcgccaagtttgtgcgggacctgtaccagaagagcggcgacacgtttggcaagtacacggtgcccatcctgtgggacaagaagaagggctgcattgtcaacaacgagagcagcgagatcctgcgcatgttcaacgcggagttcaacgatctggcgggcaacccgggcctggacctttaccccgaggagctgcgggcccagatcgatgccgtgaacgactgggtgtacccaaacatcaacaacggcgtgtaccgctgcggctttgcaaccagccaagaggcgtacgagcaggcgtttggcgagctgttttccgcgctggacaagtgcgaggagatcctggggcggcagcgctatatcgtgggcgaccgcctcaccgaggccgacatccgcctgttccacacgctgatccgtttcgaccacgtctatgtctcctacttcaagaccaaccgcaacttcatccgcgagatgcccaacctgcgcggctatgtgtctgacctgttccagacgcccggcgtgg

SEQ ID NO: 1873 - DNA, 533 bp, Chlorella sorokiniana
  Clone ID: LIB3602-010-Q6-K1-A4
gccccccctcctggctgaagatcacccccggcgaggtgtctgacaccatcgccaagatggccaagaagggcatgaccccctgccagatcggcgtgatcctgcgcgacagccacggcatcgcccaggtcaagtccgtgaccggctccaagatcctgcgcatcctcaagggccagggcctggcccccgagctgcccgaggatctgtaccacctcatcaagaaggcggtggccatgcgcaagcacctggaggccaaccgcaaggacaaggacggcaagttccacctgattctggtggagtcccgcatccaccgcctggctcggtactacaagcgtaccaaaaagctgccgcccaactggaagtacgagtccgccaccgcctccgcgctggtgcagggctgagcgctcgcctcgcgcgtgagctgacggctgcagccacggctatctccaactggtgtgccagcaggcatcaccacgaagcagccgcagctctccagctggctctgcctgcgtttgcagcccctggcttgatgtgct

SEQ ID NO: 1874 - DNA, 534 bp, Chlorella sorokiniana
  Clone ID: LIB3602-010-Q6-K1-A5
ggtgtctgacaccatcgccaagatggccaagaagggcatgaccccctcccagatcggcgtgatcctgcgcgacagccacggcatcgcccaggtcaagtccgtgaccggctccaagatcctgcgcatcctcaagggccagggcctggcccccgagctgcccgaggatctgtaccacctcatcaagaaggcggtggccatgcgcaagcacctggaggccaaccgcaaggacaaggacggcaagttccacctgattctggtggagtcccgcatccaccgcctggctcggtactacaagcgtaccaaaaagctgccgcccaactggaagtacgagtccgccaccgcctccgcgctggtgcagggctgagcgctcgcctcgcgcgtgagctgacggctgcagccacggctatctccaactggtgtgccagcaggcatcaccacgaagcagccgcagctctccagctggctctgcctgcgtttgcagcccctggcttgatgtgctgctctcttgcatgcatgcgccaagcgcatgtgtaa

SEQ ID NO: 1875 - DNA, 530 bp, Chlorella sorokiniana
  Clone ID: LIB3602-010-Q6-K1-A6
gcggcatcacgctgagcggcgggcagaagcagcgcgtggccattgcgcgcgccatcgtgaaagaccccaaggtgctgctggtggacgaggccacgtcggcgctggatgcggagagcgagcgcatcgtgcaggacgcgctggaccggctgatggtggggcgcaccacggtggtggtggcgcacaggctgagcaccgtgcgggacgccgacagcatcgcggtggtgttcaagggcaaaatcatcgagcagggcgcccacgacaagctgatggccatcccccacggctcgtacgcgcgcctggtgcgccaccagctgacccgcaccaccacaagctccctgtccacccgaggccccagccggcgaggactgccggcccctgcacccggcaaggagtagcgcagtacggcggcaggcagcattgctgccgtttttgctgcgtgacccgcagccatttatgaattggttgaccaagtacgctctctgattcctctattctgcgcacttcccctaagtaccgcttttgactcattt

SEQ ID NO: 1876 - DNA, 530 bp, Chlorella sorokiniana
  Clone ID: LIB3602-010-Q6-K1-A7
aaaaaaaaaaaaaaaaaaaaaaaaaaaaaaaaaaaaaaaaaaaattaaaataaaaaaaaaaaaaaaaaaaaagaggaagggaaaaaaaaaaaaaaaagggaaaaaaaaaaaaaaaaaaaaaaaaaaaaaaaaaaaaaaaaaaaaaaaagggggggcccttttttaaggatccaatttttttccccctttttggcaggcctaattttttttttttgggccccaaaaattaatttctctggccccatttttaacactccgtgtatggaaaaacccttgttcaccccatataaaatcccgtgcacacacttccctttttctcaatgtgttaaaaaaaaaaaaggccttccaaatttcctctttaccaaatgttctccccttaaatgcctaaggggcccccccttttccggtccctaaaaccccgggggtttgggtttttctccccacaggacccctcttttattttgtcgccctctaaaagcctgtttttttggtttttccactctctttttcccccaattgggcggtttttc

SEQ ID NO: 1877 - DNA, 323 bp, Chlorella sorokiniana
  Clone ID: LIB3602-010-Q6-K1-A8
gctggtgcagcttctggtgatccaagatgtggtggctcttgctcggagagacaagaagaagaattaggggggctgcgcagcagttgagagatcttgccacagctgaccgccaagcgccagcggccatgcgtgccatgagtgcgagagtgagagcagcaccctgggcagcataccctgtacactgttcaaataacctgtaccgactccctcatgactgaggatgtaacatgccttgaccaaaaaaaaaaagaaaaaaaaaaaacaaaaaaaaaaaaaaaaaacaaaaaaaaaaaaagaaaacataagttgcggacgctttggtt

SEQ ID NO: 1878 - DNA, 73 bp, Chlorella sorokiniana
  Clone ID: LIB3602-010-Q6-K1-A9
aaaaaaaaaaaaaaaaaaaaaaaaaaaaaaaaaaaaaaaaaaaaaaaaaaaaaaaccttgttttagatcgcga

SEQ ID NO: 1879 - DNA, 342 bp, Chlorella sorokiniana
  Clone ID: LIB3602-010-Q6-K1-B1
cgtacaacgatatgcctcgcaagctctgcttctgcactcgccgagctcctctcggccacgctcgtgctctttttcggttctgcttgcgcgcgggctcatttcattagcgcatgccttgctgttcgttgagctagagaacaagtgtgaatataacagactaaaaaaaaaaaaaaaaaaaaaaaaaaaaaaaaaaaaaaaaaaaaaaaaaaaaaaaaaaaaagggaaaaagatataaaaaggacaaagttaagaacgagtgaatgctatagtgtaatctattgtatagtgtaacctaaattaaattacctggccggggctgtaaaaagcctggcttggcaaaac

SEQ ID NO: 1880 - DNA, 526 bp, Chlorella sorokiniana
  Clone ID: LIB3602-010-Q6-K1-B10
cggtgctggtggagaagcgcagccggcgcatggagctggcgctgtacctggcggcacgggcggccgagtcgtttgcgctgagcctggcggcctggggcgtggtgcggcccagctcgctgccgcgccgcctggacgtcctcctcttctccctcgccgccggctggatcctgcactgctacagcgaccactttggcgagcggcgcgacgtcttccgctcctcctacctcgccgtcttcgacttcatcctgggcaacacaggctttagccaggcgtccatcagccaccagcccagcaatgccgagctggtcatgcggtcagtcaggtccatgagcaacctgctgcagcgcagcagcgctgccggcggccgcagccggtcaggaaccaacggcagcggcaactggagcgccggcgcttctcctgtgctgacgccactgattacgccgcgggagacatcggcggaggaggcagcagagggtgcagcggcggcgggcggcggcaacgatcagtaggcgggggcataggaagg

SEQ ID NO: 1881 - DNA, 526 bp, Chlorella sorokiniana
  Clone ID: LIB3602-010-Q6-K1-B11
ctccttgtttcttgccctgcaccagatctccaagcaacgatgcaggctgcccagctccaggctcgcgccacccgggccgccgtggctcgccgcaccaccgtgcgcgtgcaggctcagcaggccgcgccccgcgctcaggcccccaagccccagcagtttgctgctggcctggctgccgccttcgctgccgtgaccctggtgctggcgcccgccgccaacgctgctgaggcccgcgcggaagtgaagagcgtggtgtgcgccagcaaccccacctccaagatctgcctcaaggacagcgccaagaactgaggcgtgccagctggactgagcgagcgctgagcccttgctggccgcacctgaggcaggcagccattgctgactgccggggggcaccgggccgccacccgctgcccggcagcatgggcgaggcggcgtgagaaagagaggacttgtgcactgccacacagttttttggacacctgtgctgtaacatatacttgaggaaaaaaaagaaaaaaaataaaaa

SEQ ID NO: 1882 - DNA, 479 bp, Chlorella sorokiniana
  Clone ID: LIB3602-010-Q6-K1-B12
gggggaggggtctgccgcggggttgctgtgggttggttggtgtggcggcataacattaatgagtagcatgacaccaggctgcgggccgcaagccatgccaaacttggtgattgcaggttgcgcctgccctgtgcaagggttgtggacttgctacgccgtgcactcatctcaccgccccctgcccgtcctgcctgcagctgctgcgccaccagcggcgagggcctgtatgagggcctggactggctgtctcagaacatcgctaacaaagcttaaaaaaaatactggcgagccgggcggccaggtgccgccgccggcagcagcagcagcagcagctggcgaggcgcatactgcgtctcagttagcttagaattaacccccttgtgtggactttccctttcttgctcctcctctgtgtgacgttcaaacaatgatgcaacatcacggcaatcaagagcaaagacaaaaaaaaaaaaagacac

SEQ ID NO: 1883 - DNA, 196 bp, Chlorella sorokiniana
  unsure (1)..(196): unsure at all n locations; Clone ID: LIB3602-010-Q6-K1-B2
ggtccgacccacgccgtccgactccgatttgtnccaaactgcctattcgctttccttttggtgggcgctccattctcgccaaattcaattcatgctgctccaactcaacgtcaagctcgtactgctccatgcaaagcgctgcagnnctgaaaaaaaaaaaaaaaaaaaaaanaaaaaaaanaaaaaaanaaaaagg

SEQ ID NO: 1884 - DNA, 524 bp, Chlorella sorokiniana
  Clone ID: LIB3602-010-Q6-K1-B3
cgagaagctcatccccaagttcaccctgctggcctcccgcggcgagcggctgcccgtgcacggcgacggcagcgcgactcggtcacacctctatgtggctgacgtggcagaggcattcgacatcatcctgcacaagggcaccacgggagaggtgtacaacatcggcagccaaagggagcggacagtggtggaggtggcggccgacatctgccggctgtttgggctggaccctgagcaccagatcaagcatgtgcgggatcgtgcattccaagacaagaggtacttcatctgcgatgccaagctggcggcgctgggctggcaggagagcacagactgggcggatggcctgcgcagcacggtagattggtacctgtcgcacggcttctcagactactgggactcagtggcggtggagtctgcgctggagccgcacccattcagcacagccccgggctcgcaacagtcactgtcacagtcaaacgggacagccaacggcaacgcaacgggtggcggttaagctgcag

SEQ ID NO: 1885 - DNA, 502 bp, Chlorella sorokiniana
  Clone ID: LIB3602-010-Q6-K1-B4
cggacgctgtgggctggacgctgtgggctggactgctgtgggctggactgcgtgggctttttactgacggcactcgccgcctctgatgagaggatgtgtactggcaagctagatcctgcccgtgttcccccttgaagctccgtcaacaaggtcagctctgggtgactttcggcaccaagcgctttgtggacgccgagaagcaggccgcgtaaatgcgcgccgctgcagcgcctgcgccctaactcaacgtcttgccgtgccaaacccgggcctttgcgccccaccaaactcaactacccaacgtcctgacccctgttcatttccccacctgtttcctctgctgtttcatccctcgctctgctgcccccctcgcccggaattgacttccgaatcacaccccacgcacatacacgccgtgcacttgcactgttgcgccagcggtttttacgcacaccatacccaattttggctcgttgaagcacggtgtaagcaagagcagtac

SEQ ID NO: 1886 - DNA, 531 bp, Chlorella sorokiniana
  Clone ID: LIB3602-010-Q6-K1-B5
cgggtcattggcggcatctacctggctgccttcgaatccggctcctttggcagcccagccgccctgccacgtcagcgtgggcggctctgcgcgcccaaccccgccaccgccgacaacgaggcgtgcagcagcctgaaggccagcgactaccgggtgcacgtccccggcttccggccagaggggtggggcgagtgcgacctcgcgcccgagcaagtcaactttgtggcggctgacgtggacggcaagacgcagcagccaaccaagtacgccaatgcggagagctgagcaagctgctctgcttgggatgctgcttgccatcaaatttcttccactcgcgtgcacacacaaacagccagcagcaacagaacaacaaagcgcacaccaaaaagaagagccagcagcaccctacccgaccaattgacagacactcttcgtttctatacgcgacagttgacggcaccctttctgactgtgttgacgttgcatgtgcatagccctttcctaaggcgcgcccccaaagcgcgccatgct

SEQ ID NO: 1887 - DNA, 350 bp, Chlorella sorokiniana
  unsure (1)..(350): unsure at all n locations; Clone ID: LIB3602-010-Q6-K1-B6
cggacgcgtgggcttggaggcctgagcagctgctgcaatgacagccatacgtgagccgccgaacacagcgggcgcagcaagagcaactgggctgcatggcgctgcagttggcatgaaacatgaaagcatgggctggcgctcatgccggcatgcctgacattggtcatgaggggcatggctctccctttccagaccaccaatcccgcaatgcacctctgccagtgcatgcacccctccctgtatatgagtgtaactgagtgtaggcncaacaaaaaaaaaaaaataaaaaaaacaaatataaaaagaaaagaagataaacataaaaaaaaattacaatccagtgcacacac

SEQ ID NO: 1888 - DNA, 525 bp, Chlorella sorokiniana
  Clone ID: LIB3602-010-Q6-K1-B7
ccagcaaacaagtccctgctgctgctctgcggcagatgctgctgtcatgcttgccatggctgctgccgccaagctcgctacgctgtcggctgccctctcctgtgccgcaggctggggcgcaggctttggcattggcacccagtacatcaacgtcagcccagagttcacagagggcaagcagcacaggtgcgagtggacagctgtctcaagccccacactgggcgcagattgggggagtcgcagactgtacccgctcggctggctgccagccgcgtggccgacgcaagctgcaccgtttccatttgttgtgttgacagccggatttctcacaacagcacgtgcggcacacactgtgctgccggccacacttcccactgtgcaggccaaatgtgatcaagcaagctcaatacctctggaagcggctgtctacgctgcagagcacgccaggtggcgcctcggcagcacactgatctggagcagcagcaacatacgcggcaggacagcgtgcagcaggttggaatggcg

SEQ ID NO: 1889 - DNA, 526 bp, Chlorella sorokiniana
  Clone ID: LIB3602-010-Q6-K1-B9
gcttctctaacccgggcgaccacacggggcaggccagccacggctaccgctggccctacggccccgtggcgctcatcacccctttcaacttcccgctggagatcccggtgctccagatgatgggggcgctgtacatgggcaacaagccgctggtgcactcggaccacaaggtgtgcttcgtgctggaggagtttgtgcgcctgctgcaccactgcggcatgtcgctcacagaggtggacatctgcaacggccgcggcgcgacggtcaacgaaatcatggcgcaaggccagccgcgcagcacgctgttcacgggcagcaagcgggtggcggagaagctggccaaggacttccacggcaggatattcctggaggacgcgggcttcgactggaagatcctgggccccgatgtgcacgaattcgactacgtggcatggcagtgcgaccaggacgcgtacgcgtgcacgggccagaagtgcagcgcgcagtccattgtgttcatgcacgacaactgggcagaggcgggcct

SEQ ID NO: 1890 - DNA, 528 bp, Chlorella sorokiniana
  Clone ID: LIB3602-010-Q6-K1-C1
agctccccgactccttcagccagcccctgaaggtgtaaacacgatgcaggccgccctgtgcaacacccgcgtgttcaccgcgcgcactcagagccggagcgcgtcccgccgctccgtgcgcgtgcaggctgccgaccgcaccctgtggctgccgggaatccaggcccctaagcacctggacggcaagctcgctggcgactatggcttcgaccccctgggcctgggtgtcgactccgaccgcctgaagtggtacgccgaggctgagaagaccaacggccgctgggccatggctgccgtggcgggcatcctgttcaccgagatcctgggcaaggccaagtggttcgaggctggcgctcaggagtactggatggacaacggcccgctgcttgctgttgaggcggtgatcatgggcttcctggagctgaagcgcttccagggctggaaggagaccggcaccagcggcttcctcaacgccttccccttcgaccccgctggcatgaactccccctccatggccaccaaggaggt

SEQ ID NO: 1891 - DNA, 76 bp, Chlorella sorokiniana
  Clone ID: LIB3602-010-Q6-K1-C10
aaaaaaaaaaaaaaaaaaaaaaaaaaaaaaaaaaaaaaaaaaaaaaaaaaaaaaaaaaaaaaaaaaaaaaaaaagg

SEQ ID NO: 1892 - DNA, 245 bp, Chlorella sorokiniana
  Clone ID: LIB3602-010-Q6-K1-C11
aaaaaaaaaaaaaaaaaaaaaaaaaaaaaaattaaaaaaaaaaatttttttttaaaaaaaaaaaaaaaaaaaagggaggggggtttccattttagaggttccggtctttcttacccttccattcggcgccttctcttttttttgccgtcccttaatttcaattccttggcctttgttttccaactttttgactgtgaaacccctttctttccccaacttaattgccttgtcgcacattccccttt

SEQ ID NO: 1893 - DNA, 108 bp, Chlorella sorokiniana
  Clone ID: LIB3602-010-Q6-K1-C12
gcaggggcgcctgttcctggaggccagctggacgccgctcattgcggctggcggcatgtcttgagcccctggaatgtgtgcctgagagcttgtaagatcgagtgcttc

SEQ ID NO: 1894 - DNA, 387 bp, Chlorella sorokiniana
  Clone ID: LIB3602-010-Q6-K1-C2
gcgatacggaaaaaaaaaaaaaaaaaaaaaaaaaaaaaaaaacaaaacattaatttacaaacaaaaacaaaacaaggggggcgggctcaaaaaaaaacaaagggattggctctctcttcccacacttacactcttatataactgcccaaaccctgtctttactccccttatttacacacctgcacatccggaaatcccctgcttatgcattaacaaaacggttcgtaccaatccctttttcccacatctgcgcatcttcaaaagcccatcgcactccccctttttcaccacatcatcacctcccattttccctgttacgccccccctgaccgctcctcttacccgccccttatcccccaatcactcccctatccccctttactttct

SEQ ID NO: 1895 - DNA, 213 bp, Chlorella sorokiniana
  Clone ID: LIB3602-010-Q6-K1-C4
gctgcgacccccttacccagcccctgcccagccccgcaccctgtcagcggggtcctctgtaccatcaactgcccgggtagcgccccatctctttgtctgccttgcgtccctcctggccgcctgcctgccgcgatactacccctgacccggatcggttgacgtcactcccaccacgcacctgctgctcttaagccatgtaatgtgtgaactatt

SEQ ID NO: 1896 - DNA, 539 bp, Chlorella sorokiniana
  Clone ID: LIB3602-010-Q6-K1-C5
gcccaattagaacacgcattcgcgcgtggccacgcctccccgtcccccaatgccatgccgtgcctgctacccgggcggcggccccgcggccatcgggcacttgtacctgatcagcatcttgctgcttgtaccaccctctctgttgtctgaacctatggagaacttcaacccaatgctgtaaaggcccttgctcaaaaaaaaaaaaaaaaaaaaaaaaaaaaaaaaaaaaaataaaaaaaaaaaaaaaaaaaaaaaaaaaaaaaaaaaaaaaaaaaaaataaaaaaattaataaaataatattattttaaaaaaaaaaaaattctccctaaaaaaaaaaaagggggggccttttttaaagaaaaaaatttttcaacccggtggtgcgagaaaaatatttttttttagggggcccaaaaaaaaaattagggggcccgggtttaaacaactttggggaggaaaaaacccgggtgaacccaaaaaaaagaattttagaaaaaattcccttttcacgaggtgggtaaaaaaaaaaaaccccccc

SEQ ID NO: 1897 - DNA, 104 bp, Chlorella sorokiniana
  Clone ID: LIB3602-010-Q6-K1-C6
ctggcaattgagctctcatcagcaggtggcggcattgatgcagggccctcgcgccgtgtcacccgctcacaggcccgcctggctgccgctcaggcgggcgccca

SEQ ID NO: 1898 - DNA, 524 bp, Chlorella sorokiniana
  Clone ID: LIB3602-010-Q6-K1-C7
cgggccttgggcgagctcggtgtcccgctcctgcgtcacccagccatggcggcgatttccaagacccgcaaggccgtcgccgatggcgtcttctacgctgaactcaacgagctcctcatgcgggagctgggcggggagggctactctggtgttgaggtccgcgtcacccccatgcgcacggaggtcatcattcgtgccacgcgcacgcagaatgtgctgggcgtcaagggccgccgcattcgcgagttgaccagtgtggtgcagaagcgcttcaagttcccggagggctctgtggagctgtacgccgagaaggttgccaaccgtggcttgtgcgccgtggcacaggcggagtccatgcgctacaagctgctgggcggcttggctgtgcgccgtgcctgctatggcgtgctgcgcttcgtgatggagagcggcgccaagggctgcgaggtgattgtgtctggcaagctgcgtgcgcagcgcgccaagagcatgaagttcaaggatgggtacatggtgtcgagcgg

SEQ ID NO: 1899 - DNA, 521 bp, Chlorella sorokiniana
  Clone ID: LIB3602-010-Q6-K1-C8
ctattgcctgtggggtctcaggagcaggatggtgaagttcctgaagcccgggaaggtggtcatccttctgtccggccgctatgccggcaagaaggcggtcatcgtgaagaactacgatgatggcaccagcagccgcccctacggccacgcgctcgtgtgcggcctgtctaaggagccccggaaggtgatcaagcggtcgtccctcaagacccaggcgcgccgctccagcctgaagaccttcatcaaggtggtcaactaccagcacatgatgcccacccgctacacgctggaggtggacctcaagggcgtggtgaccgccgagtgcgtggacaacagcaccaagaaggtggaggccaacaaggaggccaaggcgctgctggaggagaagttcaagagcggcaagaaccggtggttcttcaccaagctccgcttctgagggagtttcttggagagcctaggttgcagcagccgtgacgtgacgtgctccttgccccgagacgccatgtaacgtcacaccccgc

SEQ ID NO: 1900 - DNA, 526 bp, Chlorella sorokiniana
  Clone ID: LIB3602-010-Q6-K1-C9
ctgaagcccggcacctacaagctgggcaagttctgcatggagcccaccagcttcaccgtgaaggaggagtctcagttcaagggaggcgacgcggagtttgtccccaccaagctgatgacccgcctgacctacacgctggatgagatgagcggccagttcaaggttgacggcagcggcaatgtggagctcaaggagacggatggcatcgactacgcccctgtcaccgtgcagctgccaggcggcgagcgtgtgcccttcctcttcagcgtgaaggagctggacgccaagggcaatgctgatggctttggtggggagtttgtggtgccctcctaccgtggtgccaccttcctggaccccaagggtcgtggcgctgcgactggctatgacactgctgtggccctgcccgccgctggcgacgatgaggagtacctgaaggagaacatcaagtcggccggcgcaatgaagggccaggcagtgttctccattgccaaggtggatgctgccaccggcgagattgctggcgtgt

SEQ ID NO: 1901 - DNA, 319 bp, Chlorella sorokiniana
  Clone ID: LIB3602-010-Q6-K1-D1
aaaaaaaaaaaaaaaaaaaaaaaaaaaaaaaaaaaaaaaaaaaaaaaaattttatttaaaaaaaaaaaaaaaaaaaaaaggggagggaaaaaaaaaaaaaaaaggggatggaaaaaaaaagggccggccattttaaaagatcccaaccttcctacccgcttccttccaacaaaataaccttttttttggggtcccctaattaaatttcattgccctctgtttccccccaaggagtgagctgcacctggcacacaggcggccttgccttcccacaccgctggcccgccttgccggctcaagttgcagccctgaccgcccc

SEQ ID NO: 1902 - DNA, 424 bp, Chlorella sorokiniana
  unsure (1)..(424): unsure at all n locations; Clone ID: LIB3602-010-Q6-K1-D11
gcgccacgtgctgcgaggaccagcagcactgctgccccgaggacctgcccgtctgcgacaccgtggcggggcgctgcctggccaaggcgggcgccggctttaagggctcggtgccgctggtcaagaagcagccggccacctatgtgccgcgcgactggtggggccccttccgcccccgccgcgtgaatgccgcctgagtgggcagccgcagggctgcaccccgtcgcacagccttcagccttgggagccaatgtcttccacgctccaccctgccggcctgctgctgccggcgcccagcccatgggcacgacacacatgcatttattctctgggaatcccgcccgcgtgtttgccccgngccgcccccgttccccccgggccggccggtgtactttaccccgcccccacgtgcacccttttttct

SEQ ID NO: 1903 - DNA, 304 bp, Chlorella sorokiniana
  Clone ID: LIB3602-010-Q6-K1-D12
ggcctttgtcaccgaggcgacgcgactgcagtcgctgcggcatcccaatgttataggcttttatggtgtcagcgtcacgaacaacaagggggttgtcattatggaattcgctgagggccgggacctgcaatcagcattgcaagtcagagcggcaggatccagccagcgcctcttcagctggcagcgccgcggccggcgggtggcttttgaacttgccaaggcaatcaactatctgcattcaagagaggttattcattttgacatcaagagtcaaaacgtgctcctcacagccaatggggcggtg

SEQ ID NO: 1904 - DNA, 505 bp, Chlorella sorokiniana
  unsure (1)..(505): unsure at all n locations; Clone ID: LIB3602-010-Q6-K1-D2
atttttctctgcctatgtgttgcagcaagttcggcaacggccgcttccagacctcggaggagaaggccaagatcctgggcgcgcctcaaggcctgagcccagaaggcgtgctgagcggggagcgcagcgcgcacagcacgccgcccgcccgccggcggcggcggcgctctgcgcccgcccagctagattgcggcgcaggcgtaggcggctgggccgctgcgccggccgcctgagtgccctgcagcagctgtgcatgcatgcctgggaggagcatgtaacaaacctgctgcaaaaaaaaaaaaaaaaaaaaaataaannaaaaaaaaaaaaaaaaaaaaaaaaaaaaaaaaaaaaaaaaaaannaananaaaaaaaaaaaaaaaaaaaaaaaaaaaaaaaaaaaaaaaaaaaaaaaaaaaaaaggggggggcctttttaaaggatcaaagtttacttcccggtgtttgcaacgaaaaagtttttttttggggcccccaaaataaaa

SEQ ID NO: 1905 - DNA, 531 bp, Chlorella sorokiniana
  Clone ID: LIB3602-010-Q6-K1-D3
ctgcgccctcccccagtccccaccagcgcccaaacgcttgccgcagcccgcactatggcgcagcaactgagcgacgagatggtggcggagttccgggaggccttctccctcttcgataaggatggcgacggcaccatcaccaccaaggagctgggcacggtgatgcggtcgctgggccagaaccccaccgaggcggagctgcaggacatgatcaacgaggtggaccaggacggcaacggcaccattgacttccaggagttcatcggcctcatggcgcgcaagatgaaggacaccgacagcgaggcggagctgctggaggccttcaaggtgtttgacaaggacggcaacggctacattagcgcggaggagctgcggcatgtgatgaccaacctgggcgagaagctgacggacgaggaggtgaacgagatgatccgggaggcggaccaggatggcgatggccaggtggactacagcgagttcgtcaagatgatgctctccaagtgagaccgctggtgcggcgggcagcgctgc

SEQ ID NO: 1906 - DNA, 526 bp, Chlorella sorokiniana
  Clone ID: LIB3602-010-Q6-K1-D4
ggcagcccgccctactactgcacagtcaacaacaagcagccgctgtccaacgcaggctgcctgcctcaggactataacccggtgtatggccgggccatcgaggggccggtatatgctggcattggcccacccaccgccctgacccagctgtccagcgcaagtgaacctgacgaggccggcaggggctacaccatccaaatcgatgcgaccctagtgatcagtgggttgaaggaaggcgcgcgatacaaggtgtacaagctcacctcactgccggcggtaccggcggcccccaacccagccctgctgagcggccctcccgagtttgagttcacggcttactacaccaggcactgccagcgagtcagcttcaactcaggcagcccggcctattacattgccgtcacggcctgaacacggcccgtgttgcatcggcactagcttgcctgccccattggtagtgccggcgggtgcagccgcgctgccgctgctgctgctgcccagcgccgtgccgacgtgtgctcttcat

SEQ ID NO: 1907 - DNA, 458 bp, Chlorella sorokiniana
  Clone ID: LIB3602-010-Q6-K1-D5
aaccagtggatgcgggtcgacgccgtggtgcttggagagactgggcgcatgcggtgcctgggtcccactgtgcgggtgcagcagatgcaggaggagccgctggctgcggcacccggcagcgcggccgccgcactgcagcgtgcgcagcagctggccctggaggcagcagcagcagaggcggaggacgaggaggaggctggggcgctgcgtgccgcggcggccgatgtagcggcggcggcggcagcagcagacgccgccgctgcaccgctgcggcggcaggtcggctcgtttgacctcaccccgcccgccgcgtgcttggcgctgcccgaggctgttcgctcggcgcgcgtgcgcatggagattgtggccgaccggctggctctgcgcggcgtggctgagatcagcgcatacatgcactacgagacgggagagctggtggtggtggatgtgtgcaccct

SEQ ID NO: 1908 - DNA, 527 bp, Chlorella sorokiniana
  Clone ID: LIB3602-010-Q6-K1-D7
ggaggacattgtgtacgccaagaacttcctcacctttggctacggcccgcactactgcgtgggcaaggagtacgccatcaaccagctggtgctcttcctgtccatcgtctccctggagtgcgagtgggagcgcaagcgcacgccgcagtcggacgacctcaagtacctgcccaccatctaccccggcgatgccctgctgtcgctgcggccccgcaaggcgtgagctgcgcctggcacacaggcggccgcgccttcccacaccgctggcccgccttgccggctcaagttgcagccctgaccgcccctgcgcataagctggaaacgaatctcctctccctcccgcctaccccactaccacccccagcattgtcctttcgccctctccctgtcaccctgtgtcgtgcccgctgtacctgcagcactcacccccgtgccaacacttgacgctttgcttgccggcgctgctgcccacagagctagatgcagcaggccggccccccttttcacatcgccgccgcgtcctacaa

SEQ ID NO: 1909 - DNA, 525 bp, Chlorella sorokiniana
  Clone ID: LIB3602-010-Q6-K1-D8
gtctggagtggcgcctgtgtcaacagagcgggcatcatgggtatctcccgtgattccctgcacaagcgccgcgccacgggcggcaagcagaaggcatggcgcaagaagcggaagtatgagctgggccgccaggccgccatgaccaagctgtcctccaacgtgtgcgtgcgccgcgtgcgcgtgcgcggcggcaactccaagttccgcgcgctgcgcctcgaccacggcaacttctcctggggctctgaggccgtgacccgcaaggtgcgcatcctggacgtgaagtacaacgcgtccaacaacgagctggtgcgcacccagaccctggtgaagggctgcatcgtggaggtggacgccgctcccttcaagcagtggtaccagcagcactacggcgcggaggtgggccagaagaagaaggccgccgccgccgcgcccgccgagggcgaggccgcctcccagagcaaccacgtgaagcggaagctcaagcagcgcaaccagggccgcaagctggaccagatgctggac

SEQ ID NO: 1910 - DNA, 515 bp, Chlorella sorokiniana
  Clone ID: LIB3602-010-Q6-K1-E1
aaaaaaaaaaaaaaaaaaaaaaaaaaaaaaaaaaaaaaaaaaaaaaaaatttttttaaaaaaaaaaaaaaaaaaaaaaaggagggagaaaaaaaaaaaaaaaaggggaggaccaaaaaaaaaaaaaaaaacaaaaaaaaaacaaaaaaaaaaaaaaaaaaaaaaagggggccccctttttaaaaaaaccaaattttttctccccttttttcaaaattatatttttttatttagcccccaaaaaaaaaattactccccccctttttaacacccttatatctgaaaaacccctttcttcccccaattaaatccctttacaaaacctcccctttttcccatttgggaaaaaaaaaaaaaagcccccccccaatcctctttcaaaaaattttccccccttatatgggaaatggccccccccctttacccccctataaacccccgggtgtttttgttttcccccccagttcccctttattttttccagcccctaaaccccccttttttaaaatttattcc

SEQ ID NO: 1911 - DNA, 522 bp, Chlorella sorokiniana
  Clone ID: LIB3602-010-Q6-K1-E11
gatggatgtctacaatgacacggcatgcctgctgttcactctgtcctacctcatctccgtgggagccagcatcgtggtcctgggcggactggcagccatgaccgcgttctgctgggacaaccagccactgggcctgggagccggcttcaaaatgaccccgtcgtacgccgcaaagaccatggaggtcatgcgcattgagaaggcggcggtcacttccaccgagggctccttccagtgcgacaagttcttccggtttgactggttcctgtggaccttccaggtggtctggctcatgattgtgggcctctgctggtaccggcgcaccctgcgcaagtaccagtctgcgctgtgggccatgggcgccactgtgaccgcctggcacttcttcaagatcaactacatcatcagcatggaccagtggaccatgggcgagctgcacacccagggcatcatcactgccggcggcctcatcttctgctgcatcggcaacttcttcatgttcctgtcgggcgccaactacgc

SEQ ID NO: 1912 - DNA, 394 bp, Chlorella sorokiniana
  Clone ID: LIB3602-010-Q6-K1-E12
ggccgcgtaagcagccatccggcagccgcagcagcgccgcctccccggcggcccaccgttgagtcgtgccaaccggccgccagcccccccgcgcggtgcggacgcccctcgtcgaattattttttgccgcattgctcccttccgccgcccctggatggctttcctgctcccctctgtctcgtcggttcctcaggcctcggggcgcattttgtccgatgccgggcccctcttgcaccgcatttcatcttgtgaacacaccggactacagaaaaaaaaaaaaaaaaaaaaaatgatgaatagagaatatatgttgaaattaaaatatcatttgataggacaaaatagaattaaaaaaaaataaaaaaaaataaaaaaaaaaaggggggggcctttt

SEQ ID NO: 1913 - DNA, 187 bp, Chlorella sorokiniana
  Clone ID: LIB3602-010-Q6-K1-E2
cgcgagctgccgcccaagagcagcccggggtccacaggcgcccgcccgtcgccgcctcggtattatccggggtactgatgactgatggaggggagacgccgtgccggtggctcagtgctcgacgcaggcatgcagtgcctgagggagtgtcacatgcgctggcaacatgtgtaagaaacgtgtcgca

SEQ ID NO: 1914 - DNA, 143 bp, Chlorella sorokiniana
  Clone ID: LIB3602-010-Q6-K1-E3
tgccccctctatgctccccactgtgcatcgcttcctggctcccttgggctgttggctggggagcatccccagctgcagcgcgttgcccgcattgccttgctgcttttgttctaatgctttcccactgtaaggcatgagacttc

SEQ ID NO: 1915 - DNA, 415 bp, Chlorella sorokiniana
  Clone ID: LIB3602-010-Q6-K1-E4
cggacgcgtggggcaggctgcatcaccattgcgggcctgctgtaccactggtttgcccccggcggcgccgactgcgcccgcaacatctccctcatcaccctctcgttggtgctgtgcatcgtgctgtccctcatcaccatgcacccacaggtgcagcgcggctcgctgttccccgccgcctgcatctccctctacaccatgtacctcgcctactcggcgctgcagagcgagccccgcgactatgtgtgcaacgcactgggcgcgcgcatgagcgcagtcagcgccaccacgctcactgtcggagtgctgctcacgctggtctcagtcgtctactcggctttccgggcggggtccaacacccagaccttcagcacgggcgggtacgacgagccgctcattgcgcggcacgagcggc

SEQ ID NO: 1916 - DNA, 527 bp, Chlorella sorokiniana
  Clone ID: LIB3602-010-Q6-K1-E5
gtacctgcgtgtggtgcgccctgctgcggcagcagtcactttgatggcatggcagcacagagttccagagcgcctgatgcagcggccatgcagcggtgctctcgccagcctgtgccacgacagtccacagctcaaactgactgtgcaactggatgcgatgcttggctagcaggtggcgtggatagacacggggcagctgaccatcccgcacatcgctgttctgtactatttccttcgattgacaaattgattggtactggttccatccgcaggtggcgcggatcgacacgggggagctgaccatccagcacaatgctgttctgtactacttccttcaattgacaatcgattggtactgattttattccatccgcaggtggcgcggatagacacgggggagctgaccatccagcagattctggagcaggtgcagagccgggcggaggagatggacacgatgcaggcaagcgataagaacaactaagttatcgatcattttggagggtctttgcttgttactgatgagc

SEQ ID NO: 1917 - DNA, 425 bp, Chlorella sorokiniana
  Clone ID: LIB3602-010-Q6-K1-E6
aggagcccaacatccagtgcgattggaatgatgtgcgcaacaagctgccgggatgcgcatgggagcccaccaagcgcatcgtggccacctggcgccctggcaagtgaggcgcatctcccagaaggcagcggccaacgtcgcttcacggcaaaccctgttggcagcccggcagcaaccaattccagccatgtatgccagcatgcatgcaacccacatttttgccattctagcatgtttgaatgggggcctttgggactctgccatctgtgttttgctccgtcacctccaccatcctgcgaccccatccctttgccgggcctcttccccgcatgtcttccatcaaagtacaatgcgcatcctggcatgctgccttggcttgcattggccagacccggccggagcgtgcgtgctgtaaatgaatgttc

SEQ ID NO: 1918 - DNA, 520 bp, Chlorella sorokiniana
  Clone ID: LIB3602-010-Q6-K1-E7
cgcagggcaatgccagtgcagctcgcggccccatcaagagcgcagtcaagctggagaacgacaccgagacgtttgagcacgagcgcgtgagcagcgagctgaagaagcagattcagcaggcgcggctggccaagaagctgacgcaggcgcagctggctcagatgatcaacgagaagccgcagctgatcaacgagtacgagagcggcaaggcgatacccaacccgcagattctgtccaagatgtcccgtgtgctgggcgtcaccctcaaaaagaaccccggcaagaagtgagactgcaggcgccggcatggcggcagcggcaggcccatacttcggctgctgcagcccgcatccggcaccccttgcctcgcttgagcatttgattttctccatgtagctgccattgctctgcccgcttgcttacctctgcgcttgtaccaccacctgggccggctgccatgcacgcgcgccgccgctgcccagccctgcagtcagcaacatcttgtaaggctgatgcttgc

SEQ ID NO: 1919 - DNA, 316 bp, Chlorella sorokiniana
  unsure (1)..(316): unsure at all n locations; Clone ID: LIB3602-010-Q6-K1-E8
ctctgggccccatacactctcgattcaccatgtctggcctgcaaaaggagatcacccaggagggcagcggtgccagccccaagcagggcgacaaagtgactgtgcactacacgggcaccttccccgatggccgcaaattcgacagcagccgtgaccgcgggcagccgtttgtgttcaacatcggcatgggccaggtcatccgcggctgggatgagggcgtgatggccatgaagattggcgagcgctgcaagctgacctgccctcctgactacgcctacngcgcgcgcggcgcgggcggcgtgatcccttccaatgc

SEQ ID NO: 1920 - DNA, 367 bp, Chlorella sorokiniana
  Clone ID: LIB3602-010-Q6-K1-E9
ggcacccaacgggttaaaaagtgaaaaaaagctcaaaaaaaaaaacaaggaaagggcttttaaaataaaggcaaacggggcttggaaaaagggcactgggcttttaagtttgaaagcccaacaatgcatttattaaacctaaataacgattcagggattcagggggggacctaaattacttttaaaggggaaaaaaaattaccttttttccaacaattttaaaaaaacaagtgtgcaaaaaaaagtttaaacttaaggaacccaaatgggccaaaaagaaaagggttttttgtgcaaaaactttaaagccaaccccttccaagtttttttggaaaaccgggccaacttacaaattataaagggggga

SEQ ID NO: 1921 - DNA, 375 bp, Chlorella sorokiniana
  Clone ID: LIB3602-010-Q6-K1-F1
cccatcccacctgtgttgctgtgcacgctctgagccccctccccaactacccagatttgtcccgattcaaccctgcttcagtgcgtcccagtcgcacgcaagtgggtgaacgcccctagccttagctgcatggtaggcaggcccctgtcctttgtcgcgctggagaactgcacaccctcgccagctggatagcagcaccccgtcccccactcccctgccgccccgctgctccagtctgccgctggctgcgccgcgcgtgcatatcaaccaaaaacttgaaaccgcccaaaacggcgcgccgctcccacgagcggcgcccgccctctcatttgcatttctcagcccatccgtccgctgtgtaacatgaacgtcttc

SEQ ID NO: 1922 - DNA, 79 bp, Chlorella sorokiniana
  Clone ID: LIB3602-010-Q6-K1-F10
aaaaaaaaaaaaaaaaaaaaaaaaaaaaaaaaaaactaaaaacttctttttacaaaaacaaactaaaaacgggggggtc

SEQ ID NO: 1923 - DNA, 507 bp, Chlorella sorokiniana
  Clone ID: LIB3602-010-Q6-K1-F11
agcagcgatggcgcccgcgaaggaggtggcacagggcattggcgcccacgggcgctccaagagctaccacaggcgcggcctgtgggcgctgaagaagaagaacggcggcaagttccctgtgcaccccaagcaggagaaggccgccgctgaggcgtccaagaagcccgccaagttctaccccgcagaggatgcgccccagcctctggcgcgccgcgtgatccgccgcgccgccaagctgcggccgtccatcacccccggcaccgtgctgatcctgctggcgggccgcttcaagggcaagcgcgtggtgttcctgggccagctgccctctggcctgctgctggtgaccggccccttcaagctcaacggcgtgcccgtgcgccgcgtgaaccaggcgtacgtcatcgccacctccaccaaggtggacgtgagcggcgtggacatctccaagtttgaccgacgcctactttaagagcgccgagaagaaacagaagaagcagagcgaggagg

SEQ ID NO: 1924 - DNA, 83 bp, Chlorella sorokiniana
  Clone ID: LIB3602-010-Q6-K1-F12
aaaaaaaaaaaaaaaaaaaaaaaaaaaaaaaaaaaaaaaaaaaaaaaaaataaaaaaaaaaaaaaaaaaaaaaaggaggggac

SEQ ID NO: 1925 - DNA, 528 bp, Chlorella sorokiniana
  Clone ID: LIB3602-010-Q6-K1-F2
ctccctcagaccaccaaacagcacaccatgcagaccgccctgtgccaggccctgcgcgcccctgtggcctccaaggcccagacccgcagcaacgccggccgcaccgtcgtggtgtgccgcgcgcagcagcagaacctggccgctaaggccgcggctgcgggcgtgtctgtccccgccctgctggcggcgcaccccgctctggcgctggtggacgaccgccttgcgggcgagggcaccggcaagatcctgggcatcaacgacccctccctgttctgggccatcaccattgtgttcaccatcgtgtggggcgtgttctacgtgtccacccgcgagattgacgctgcgtctgaccgcgagaactacgatgactttggcctgaccctctgagcgggcgcccagcatcaggcggcccgcgcggcgtaggcccacgggcctgccgggcaaattttcgtccttctgttgcagcttgtccgccatgtgtacgctaaatccaaatttcaccccgagaagagaactcgctatgtagca

SEQ ID NO: 1926 - DNA, 278 bp, Chlorella sorokiniana
  Clone ID: LIB3602-010-Q6-K1-F4
aaaaaaaaaaaaaaaaaaaaaaaaaaaaaaaaaacccacgcataaaaaattttattttaaaaaaataaaaaccccaggcggcggcgtgtgtaatcataaattgcgttgtgctgaaccctgctgtgcactcacttgcccactttgtgctggcgacaaatgaaacatgacgcccaaaacactctcccggagttgagcgaaccagtaccccctatcattatccccaatttgtaccttccttttctccctctggaaatgcccaatggataactgcgttgttt

SEQ ID NO: 1927 - DNA, 311 bp, Chlorella sorokiniana
  Clone ID: LIB3602-010-Q6-K1-F5
aaaaaaaaaaaaaaaaaaaaaaaaaaaaaaaaaaaaaaaaaaaaaaaaattttttttaaaaaaaaaaaaaaaaaaaaaggggggggttaattaaaaaaaatcgaaggttgcctaacccttcaatacaaaaaaaaaaaatatggggcgccctttttaaaatccaattttctctcccccttttttccccgttttaactttttttatcgttcccctaaattaaattaattggcccccgttttaaccccttttcgccgggaaaacccttgccgttccccacttaatcccttttcccaaaaacccctttttccccc

SEQ ID NO: 1928 - DNA, 232 bp, Chlorella sorokiniana
  Clone ID: LIB3602-010-Q6-K1-F6
ccacgcggcccactggtggccaaggcgaccaccgtggccaaggcaccgtcacgccgcggatgggaccgcttcctgcattacaagctgggtggcatgcgtattggaagcctgctgccgtgggcaatagcccttttcctgctcattctggtcgtactactggtcgtagctttcttattttgagttaaattgagtgcgctcaaccgacacggccgcgtgtaaccaattccccctt

SEQ ID NO: 1929 - DNA, 110 bp, Chlorella sorokiniana
  Clone ID: LIB3602-010-Q6-K1-F7
gaaaaaactgaaccaccgatgcttttgtttgtagctgcttgcatgcgcgcgccctagcccggagccgcatgatttggtgtcataggttgtgtgtaacccctcagccgctt

SEQ ID NO: 1930 - DNA, 326 bp, Chlorella sorokiniana
  Clone ID: LIB3602-010-Q6-K1-F8
aaaaaaaaaaaaaaaaaaaaaaaaaaaaaaaaaaaataaaaaaaatttttttaaaaaaaaaaaaaaaaaaaatgggaggagaaaaaaaaggggggtggttatgggagttttctggtttacttataagtgaatgcaatgtcgtggtttttttttgggggcatttaatttaatttttgtgggcgtcgatttaaattttttttttttgggatacccttttttttagttggcatatttttttggaggccctttctttttgcccttgtttggctgtttctctaagaggctgttgattgatcgtcttttttaaaagttgtgattttttaaag

SEQ ID NO: 1931 - DNA, 520 bp, Chlorella sorokiniana
  Clone ID: LIB3602-010-Q6-K1-F9
gcatgtgcgacccagccaatgccacctgggcatactacaccgacctcagcaacaagtgcatcctcaatcagattgtggactggatcgtgcccagggacagcgctgccggcagccctgaggctgcccccgttggcagccctgtgcctgcccctgcgcctgcgccagaggtggctttcatgcggcggctgcggcaggatcctgccccctccccctccccctccccgttgccccttgcggcagccgagctgactgctgcggctcccgctgcggcgcccacaggagtggatgccaacttccagcaatggctcctccggtcggtgtgctacctgtttggcacagacccctgccccctttgagttctttccatgccaacaatcttgtgcatccacagtgcatacatgcatcatgcatcatcgtacaaaacttgaacaaacgatcgtgtcgtctcacacatgccgcgccttgctggtttccgaagcctcagctcagttttggcgatccacctttcccattcgttatc

SEQ ID NO: 1932 - DNA, 520 bp, Chlorella sorokiniana
  Clone ID: LIB3602-010-Q6-K1-G10
atcctggagtagatccggcggcagcgcgaggaggaggagcgggtgaaggctgaggagaaggccaaggcccaggccatggccaccgcgctggccaccatcggcaagtttgtgatcaagaagaaggtgggcgagaaggaggccatctttggcagcgtgaccgcggcggagattgtggacgccatccgcatgcagacggcccgcgagctggacaagcgcgccgtgacgctgcccgagatcaaggccctgggcacctatgatgcctctgtcaagctgcaccccgaggtcaccggcttcttcaagattgtggtgcagaaggacacctctgcgtaagcaccgcattcacggcgcccaggcggcagcgtttggccgcgcacattgtgtggccgcgtcttccgccccgaccccattgttttcagctccccttcgctttcatccctcatttctgctgccccgctgtccctaccccgctgcacatgtaacgccgtagcaccatgaaaaaaaaaaaaaaaaaaaaataaaa

SEQ ID NO: 1933 - DNA, 519 bp, Chlorella sorokiniana
  Clone ID: LIB3602-010-Q6-K1-G11
gtgggcatcacgcggcggcaagtcggccgcctactttgcgcggtcctgcgacaagcggtacatcatcaaggagctgtcccgcagcgagcggcggtccttcctggagtttgcgcccgactacttccgctacgtggccaccatgctgcaccgcggccaggacacctgcctggccaagatcctgggggtgtaccaggtgtcggttcaatacagcggcgggcggggggcgcccagcggccccgcctggggcggcaaggagggggtgatggacttgctggtcactgagaacgtgttctatgaccgtgaggcgcaggtggctcgcatctacgacctgaagggcagccagcgggaccggtacgcagccgacgaccccaccgctgctggcgcagtactgctggatgagaacctgcaagaactcaacctgaccagccccacgctggtggggccccgcgcctacgcccgcctgcagcgcgcgctgtggtcagacacgggcttccttgcgggcctgggagtcatggacta

SEQ ID NO: 1934 - DNA, 171 bp, Chlorella sorokiniana
  Clone ID: LIB3602-010-Q6-K1-G2
gcccagcatcaggcggcccgcgcggcgtaggcccacgggcctgccgggcaaattttcgtccttctgttgcagctgggccgccatgtgtacgctaaatccaaatttcaccccgagaagagaactcgctatgtagcacccttgtgtgaacaccgcccctctggggctcccgac

SEQ ID NO: 1935 - DNA, 531 bp, Chlorella sorokiniana
  Clone ID: LIB3602-010-Q6-K1-G3
caaggttgcccgcgccatcgaaacgctgactggcgctttgttccagcggccacccctgatctcagcagtcaagcgccagctgcgcatcaggaccatttaccagagcaagttgatcgagtatgatgacgagcgcaacctggctgttttctgggtcagctgtgaggcaggcacgtacattcgcacactatgcgtgcacctgggccttctcctgggggtggggggccacatgcaggagctgcggcgtgtgcgcagcggcatcatgggggaaaaggacaacatgaccaccatgcatgatgtgcttgatgcacagtgggcgctggacaacctgagtgacgaggcgtaccttcgtcgtgtcatcatgccacttgagacgctgctcaccaactacaagcgggttgtggtgaaggacagcgcggtgaatgcgctatgctacggtgccaagctgatgattccaggactgctacgctacgaaaatggcatcgagctggacgaggaagtggtgctgatgaccaccaagggagaggcgattgc

SEQ ID NO: 1936 - DNA, 524 bp, Chlorella sorokiniana
  Clone ID: LIB3602-010-Q6-K1-G4
ggctgtccttcctcacgtacaccttcagcctgctgctcaagattgagtttgcggggcgggacctgtgggactgcagcattggcagcgatgagaacttcaacccatccgacccctggaactatgtggcctctgggcagtgcgagccggtcaaggacctgaacgacagcttcaacacatcggtggccctggactccccgccctgggaggcagcggtgctggtgggcatgctgctcgcattccgattggcggtttacattgccctccgcaagaagacgcagtaacgcgccgacaatgcgcggcggcttggccgagcagccgccctgacggccaggctgcatgccctccgggctggcaatctactccggcgctaacagaacacgtgttgtggctcaatggccaaatatggggagcggcctggcatgctgccggccctcccgcatgcatccttgatatgttcaacgaccataaatccaaaatcccaggcctcttgatacttgaacccgccccaactgggctgcaatagt

SEQ ID NO: 1937 - DNA, 284 bp, Chlorella sorokiniana
  Clone ID: LIB3602-010-Q6-K1-G5
ggacgcatggaagaaggaggagggcaagagcaaggagcaggccatgcaggagtacattgagctggtggcgcagctgaaggccaagtacgccgcatagatgggctgacgagtgcggctatggtgtgcccagcagccagccaattgcaatttggccaaggtcagctgggccacgcagcggctgcgccttccgctagtctaatgtgttttcctatgccgcttctgctctgatattcttacagttgctgcgctgtatagcttcccgcgtttgtgagaccgagacagtt

SEQ ID NO: 1938 - DNA, 435 bp, Chlorella sorokiniana
  Clone ID: LIB3602-010-Q6-K1-G6
cggacgcgtgggcgaggtgccgcaggcagctgtggcatagcgcacctagtgcaggcgcagcccccgggctgcttgagcgagggcgtaccgactgggcggggctggcgtgtggctgagcttcttgtcaggctgaggtggccggtgcggcagccatttttctcagcagcggcaggcgcccgccctgcgccgtgccgctgtctgtggctcttgcaccctgcctgcccctctagcctcagccagccagcctccttgccccttctgcgccccctattgaccttttgaccgacacgaagcagtgttttcaccgtcccttcgacacaactccccgctgctggatgctgctgctgctttcgtgtgctggcctttcctgcttctgaccccgcgctctgtacccccctctcaatgcgtaatgacgtcttgtaaattagattcgtt

SEQ ID NO: 1939 - DNA, 472 bp, Chlorella sorokiniana
  Clone ID: LIB3602-010-Q6-K1-G8
caggagcagtgacgtgttttcacacgccggctgctgcactgtttgatgttccacccaacttgctctttgggctggcttgagcagccaacgcatggttttactgcttttcctttttgcctggcttaagcagccaacacataaatgtactgctttccctttttgcctggctccaggagccaacacatgactatactgcttgttcagaatactgttaagctgtgccgttgctgtgcaggaaggttcacttgagtattcatatcggccaaaccacggcagtgcgttttgcaatctcggccaaccacagtggttcattgtaatcaaatgctgggacactcgattgagaatctacacctttcctaacacacgactaaatgtgttgaagaggttagcgcttgaacgctagcgggtggacactggtccaccccattctaagggtattaaacgttaaaacctccggtaattatcataatta

SEQ ID NO: 1940 - DNA, 529 bp, Chlorella sorokiniana
  Clone ID: LIB3602-010-Q6-K1-G9
gaagaaccgggcggcggcacactacggctgcgagatcaaggacctgtctgcccccgtggtcatgggcgcgggcgccaccggcggcatcctctactggctggccatcttccctgtggacgtggtgaagagcgcgatgatgaccgacagcatcgaccccgcacatcgcaagtacccctccatacctgtggccgtgcgcaagctgtgggccgagggcggcgtgtctcggttctaccgcggcttcagcccctgcctcatgcgcgcagcacccgcaaacgcggtcatgctcttcacagtggacaaggtcacgcacctgctgaacgagtgagcagcagcatgagagtggtgtggcggcccggccgtcggtgcagctgcaggcgatctgcagcccgcttgccgcaagccgcacgaagcggcggccatgaaaggagcggccctgcagcctcccgccatgcaaccttaccgtcccacctgccctttttgcctggcaccccatctcattccatcgttgatctgctgaaaccccgcccaa

SEQ ID NO: 1941 - DNA, 439 bp, Chlorella sorokiniana
  Clone ID: LIB3602-010-Q6-K1-H1
cggacgcgtggggccacattgttgtatatcagtacattcaaaaaaaaattaattaaaaaaaaaaaaaaaaaaaaaaagagaggaaaaaaaaaaaaaaaaagagagaaaaaaaaaaaaaaaaaaataaaaaaaaaaaaaaaaaaaaaaaaaaaaaaaaaaaaaaaaaaaaaaaaaatggggtgtccttttaaaaaaatcaaatttaattacccctggtataaaaataaaaagttttttaaaagcttccctaaaatcaaatttattgtccgtttattaaaaaaattgtaaattgaaaaaactttatttttaaaaaattaaaacttttatgataacctcactttttcccaatttctataaaaacaaaaaagccccttatcattccctattaaaaaataatttgatcataaaatgataaaaggatcccacctctattttaaat

SEQ ID NO: 1942 - DNA, 521 bp, Chlorella sorokiniana
  Clone ID: LIB3602-010-Q6-K1-H10
gcgccctatctggctggcccctgaagtgctgtccggcggcagcgcaacggcagccagcgatgtgtacagctttggcatggttttgtttgagctgctgacctggcgcttgccctggacgtttgcccagatgtcacccatccagattggtgccacagtcaggcagggcgggcggccggaggtgctgccgcgtgaagcgctgcccggccccgacactgccagctgggccggcttggacgcctacatgcagctgatgcgggactgctgggcacagcgacctggggaccgccccgcattcgacgaggttgtgggccgcctgcggcgcctgctggccgagaccgccggcagctgacgccgtgcgacgacctgaggggcacacttgcacagccgtgcaaacactgctgggacttcagaatagggcggctggggcgcagaccaccaccacccatccactctgcatcccatgccgaccgctgccgatctggcgccttcttcctccctccgttgtgatgatttaacccctg

SEQ ID NO: 1943 - DNA, 83 bp, Chlorella sorokiniana
  Clone ID: LIB3602-010-Q6-K1-H11
aaaaaaaaaaaaaaaaaaaaaaaaaaaaaaaaaaaaaaaaaaaaataatttaaaaaaaaaaaaaaaaaaaggggggggggttt

SEQ ID NO: 1944 - DNA, 467 bp, Chlorella sorokiniana
  unsure (1)..(467): unsure at all n locations; Clone ID: LIB3602-010-Q6-K1-H12
ttggattacagccggagtgccgcacagcaccaaaaacatcgcggcagtgaaatccaagtggttttatgtgagtgatgggcacatgccttgcagtgtagttgcgttctggagggcaggtgcgttttgcaaacgtgcacaggcaggagcgcgcttgcgtccgtcacgctgctgcttgcctgtgctggactgccaacccccgccttttcatttcttgcagggctatgatggagcggccaacagctggttctgaccgccaactgctgtgtacctgctgctgctcatgcgcagatatagtgctcagcttggcaggaaaggctgactgctgcagaccgaccgactgtaccacttgtgcttcattgcgcccctgttcatgtagatttcctgtaccaactgcctgactatactccctgaccatttgatgcacttctgctatacgtggttgtgatctggacttttcaaannnaaaa

SEQ ID NO: 1945 - DNA, 532 bp, Chlorella sorokiniana
  Clone ID: LIB3602-010-Q6-K1-H2
gacagcccgagccctgattgcgctgggaagcagcatcgcagccgtgaacaagcaaggccacacaccgctgcacctggcgggcgctcagcagcacccgctcatggtgcatgccctgctgctggctggggcgcagcacagcgccaaggatacgcagagctggacgccgctgcactgcgcagctgcgtttggttccacgcagtgcatcgacctactgactgaggcgggggctgccgtggatgagcctgcctatgatggcaggacgccgctggccctggctgccggcaacggagaggagaaggctgtccgggtgctgctagctctgggcgcctgcggagcgacagcagacaacgagggcgccacgccgctgcacctggcctgcaagccctggaaggggcaggaggggtgcatcgcggcgctgttggatgcagagggggtagagctggcggctactgatcgcttgggccaggtgccgctgcactatgcggcccgccatggcaacagccctgcaatccgtgcactcctgggcgccggg

SEQ ID NO: 1946 - DNA, 334 bp, Chlorella sorokiniana
  unsure (1)..(334): unsure at all n locations; Clone ID: LIB3602-010-Q6-K1-H3
aatttgtgcggcgcgcctttggtgccggcttgcttgcgcccggctcgctcctcgcttctgcccccctccctctccctccctcttgtacaatcactgatctatttctccacctggagcttgctgctctccccctcggtcgatctgatccttcctacccctgttgctttactctgcaagccccacaaccctgcccattcagcgggcaagcaccccccttgaattccttgccgctgtgcagcccgcccgtccgttggccctctgtcgatgctgctcagcgcagcctcaagctgtaactgagcaaatgacccannaaaaaaaaaaaanaaaaaaanaa

SEQ ID NO: 1947 - DNA, 458 bp, Chlorella sorokiniana
  Clone ID: LIB3602-010-Q6-K1-H4
gagaagggtctgcctaagaagggcgcgctgctcttcctcgcagacggaaggtactgcgcttcaagggcgtgcaaggctcttgtgaagcagccactgctgctagccgtgctaggcacactctctaggcgagcgcgccgctctggccccatgtacacttgactgcccgacatgaaaagcacaaaaaacctgggagaccgacccgcattcaacaagggttgtgggcctgacttgcggaactcttgctgggccaaaactcggcggcaggctaacgccatgccaacctacttgaaggggtcacactttgcaacaaaacatgctaaacacatggtgggggcgtgccgaataagggaggctgatgttgcagatcacctcccacccatgcaatctgcattccatgccggaccgctgacgatctggcgccttcttccttcctccggtgtgatgatttaacccctggt

SEQ ID NO: 1948 - DNA, 144 bp, Chlorella sorokiniana
  unsure (1)..(144): unsure at all n locations; Clone ID: LIB3602-010-Q6-K1-H6
ttcccggaccaccccgcgtccgaaagataacagaaagaaaaaaaaaactaatctaattaaaaatttcattttaacacaaaaancncaacggggggggcggtctcaatgatccaagggtacgggcccatccatccaaccttatca

SEQ ID NO: 1949 - DNA, 164 bp, Chlorella sorokiniana
  Clone ID: LIB3602-010-Q6-K1-H7
aaaaaaaaaaaaaaaaaaaaaaaaaaaaacaaacaaacagaaaaaatttaatacaaacaaacaaacacaaaccaggaagggcataacatcaaaacagcgccacctacataccacttcactgcccctccttgtcccccgtcttctctgccaaaaccctcacctct

SEQ ID NO: 1950 - DNA, 89 bp, Chlorella sorokiniana
  unsure (1)..(89): unsure at all n locations; Clone ID: LIB3602-010-Q6-K1-H8
ggtactgcggcgacngcgctaacaacttctgccccgccttgttcttgggcccccaggatgtgctgttggcgcgtgctgggcatgaactg

SEQ ID NO: 1951 - DNA, 312 bp, Chlorella sorokiniana
  Clone ID: LIB3602-010-Q6-K1-H9
cggacgcgtgggcggacgcgtgggccttgctgtcaccgctagccgctgcctgaccaagaatggccaagagcaagaaccacacggcggctaaccagtccgccaaggcgcacaagaacggcatcaagaagccgcagcgccagcgctactccagccgcaagggcatggaccccaagttcctgcgcaaccagcggtacgccaagaagcaccaggccgccaagaagtgagctcgagcagcaggctgcagccagaggcgcagcggttcttgccagcgcccctctgcctctgatgttcactcccgtgtaatgcttcgtt

SEQ ID NO: 1952 - DNA, 398 bp, Chlorella sorokiniana
  Clone ID: LIB3602-011-Q6-K1-A1
cgcgtccgcgcatgtctgctgactgttttattctttctactgctgagcaggtggcctcagctggcgcaggcgcacaaggtgccggtgtggggagccatccccgccctgcccatgttcatcctgtttgagaagggcaaggaggtggggcgcatcccccacatgtacgaagacggcagcatctccaccatcacggtgcagcggcaggacattgtcgccgactttgggctggatggctacctggcagccgctcaggacgaccagaggggtggtcccagcagggccgcggcagccaagggcggcagcaccaagaagcggcggtgaagggggaggcatgcgtggcttgcttgaatggagctgcttgcatctttgcacgtgagactggtgtaacccttgtcccg

SEQ ID NO: 1953 - DNA, 302 bp, Chlorella sorokiniana
  Clone ID: LIB3602-011-Q6-K1-A10
gttcatgatcacccaaccgtcggttcgttgcaaggcgctgcctgtcggtagcgccgcttgtcccgcgctgccgatgcccgtttttagtcctcctgtttccccccgttttgcacagctgctgtgcctgtgctcccctgtttcccccctgttttgttttcttcccctgtcgcacgccgccgccactggcgcgcccgtgccgtctcactgtgtagtccacgcatgcatcgatctctgatctttcagccccgaatctcttctttttcggatcgctccccaacgtccaagtgtaacatacctcgtgc

SEQ ID NO: 1954 - DNA, 322 bp, Chlorella sorokiniana
  Clone ID: LIB3602-011-Q6-K1-A11
tcgaatgggcgaccacgcgtctgaatgacctggcgagccatggccactcatggcggcggggcgggggaacggcgctggggacctcccccaagtattaaccacgaccgcatagagcctaactgtaaacgtcgggtaattatccattcactttgcacccgcgcggtaaacggccagcacacaccccctcaccaactctgcagcggaggtaccaatcaactcttgcaccactgcattccctgaccctccacttacactgtcagaaagacactggccacactgggagcgcacaaaagcatgcggtggctcctgcacaggtgaagac

SEQ ID NO: 1955 - DNA, 307 bp, Chlorella sorokiniana
  unsure (1)..(307): unsure at all n locations; Clone ID: LIB3602-011-Q6-K1-A2
aaaatacccaattaaaaaaanaaaaaaaaaacttttaataaaacttttattttaaaaaacaaaccaaaaaaaacagcggcgcctttttttatcaatccgggctgcctcccccttccttcgccccttcttatctcttctacattttcccctcattacattccactcccacttcattttccaaccttaaaccctattaaaaaccctttccccccccacctaaacccccttccttcccatccccctttctccacctctcttaatccctaaaagtcccacccccttccccctttctaacattttcccaacc

SEQ ID NO: 1956 - DNA, 533 bp, Chlorella sorokiniana
  Clone ID: LIB3602-011-Q6-K1-A3
gccccggcatgcaaagctggcggcggcgctggcagggcgcaggttgcggccgaacggcgcccctgcagagagcgggagtctggggatctgcggagttcactgcgcaggagcagcagggggtgaggaatgcagatgcagcagtggcagcagcaggcattgcaggtgcagaggtcaacctggcagctagcttggctgctgacttggcaccggtggatggtctggctgccagccagctcatgctgcagtcgctgtatgaacagagggaaccgcagccatcgcagccagcacagcaggcgggggcaggcctagctaccgtttccgccacagtagcagccgcaggagcagcagccgccggcccgctgcaccagctgcgtgcgcagcagcctcagcagcagcagcttgcgcagccactgcggcagcatggctttgcagcagtgcaagcgccgctgcccatcccacagcaggcgcctcgcagctcccggccaggcgccgcctcgcagcctgcttcggcgtccccgctgcatgcactgctg

SEQ ID NO: 1957 - DNA, 536 bp, Chlorella sorokiniana
  Clone ID: LIB3602-011-Q6-K1-A4
ctcgaaggctgttcctgcgcagcaggcagcggacggcctgaggcaggctggatgcgggcctgaggcaggcgggcaggcagaaggcccgtggctggatctacaagttggtcgtccaagtgccacgtcaagcggacattttttgagccaagtgcggcggccagagaagagccgagcatctgggaaggcatgctctgctggcttactcgccgccacgcctgtgcgttccaccctacattcttccagtaatcacaaaagcctcgtgtgtttgctttccaagcccctgctagccccctccttaccgttgagagagctcttccaattatgtgctgctgctgctgtgttgtggcggacccgccgtgcagctcccttcctgttgtcccctcccttgaatatagtcgcgttttgcacccgtgcttttccatagacctccttatttaaagcccctatgttccacccaactctctcagcactcttttcactccaagcacttctctctcctgcaatgccaccccgacacagtggttgtcttgtttaca

SEQ ID NO: 1958 - DNA, 505 bp, Chlorella sorokiniana
  Clone ID: LIB3602-011-Q6-K1-A5
gacggttggatgggttacacgacaagtgcccgaggatgcattcttgtcaggacagcggcaaggcgggggacagggaggcgactactgaggacagcaatcaatcgaccgtgcaagagcgatgtattggttggcaggttgtgaaaagcaaggggaggccgcgggggcagttagcggggcaggcacgaatgcgcgctgcacaaacgaataagttacagggaaaagccggacgcgggcgggggcgcgcccgcgcagagcagcagcacacagagggtggtgcgtcagcgtcaccgaaagcttgcctttgacagtcaagtggaagatgcctggaatgcatgtgtcatccctccgcagggctgcctgggcggataaggggtgccgcaggggcagggactgcgctgcgcacagcaatcgtggccggcagtcccggcccacaagggttctgctctccaggcgctcacgcctgggcggggggcttgcgctgcagcgccgcgggcagcttgaatgc

SEQ ID NO: 1959 - DNA, 464 bp, Chlorella sorokiniana
  unsure (1)..(464): unsure at all n locations; Clone ID: LIB3602-011-Q6-K1-A6
gtaacgacaccacgccgtccggctttgggntggagcacaaagcggctggcacccaatgtcgaacgcgtacctaagtatatgtctggaatcagtcggcaaggtaccggcacggcgcgtgatggcgtcttcgcgtgagggaagcgagatcaangaagatcagaagttaggccagacactccaagtaccttctgcagacttctgcggcaaagttcgccatgaagcgccaggtggttggcatctggaagtgcaaggcctgcaagaagacccaggctggcggcgcgtacgtgctcaacactgcggcgtccgtgactgtgnngtccaccatccgccgcctgcgggagcagaccgagaagtaagcgagcggccattgaggagtgaagcgggcggcggcggcagcgctgcagcagcgcgctgcagcgtgccgggtggccgctgcttcatgatgtaacgcagaaaagaacgca

SEQ ID NO: 1960 - DNA, 514 bp, Chlorella sorokiniana
  Clone ID: LIB3602-011-Q6-K1-A7
gctgcgcaacgcgccctgcgaccgcacgccgcaagtgcacagcagcaaggcggtgggcgagccgcccttggtcctgggcacctctgtgttttacgccctcaaggaagcctgctacgcggctcgcgccgatgccggcctgactggctggttccgcctcgactccccagccacccccgaacgcctgcgcttggcttgtgcagacgagctgaccgcgccatttgcgccgccggggctgctgcccaaaatcagctgttgagcggggccctgtgtggcccagattcgctgtcgagtagaggatgcagatgctgcatgcgaacggttcaattaaggcactcaaagtgggccacatggctcatcacgtgtacatcacctgttccctggctgctgcggcaccaactgtgtacaactatacccctcttcacccatgtttcatgtttatcctcctcagctgcgcgtctgcatttcattctctgcaggcttgtcctacagtcgcatttcatctctgtaatccagt

SEQ ID NO: 1961 - DNA, 254 bp, Chlorella sorokiniana
  Clone ID: LIB3602-011-Q6-K1-A8
gcggcagcagatcacaagtggaggggggcgttgtgtcagccgttacttcttcacgagctgacctgattgcatcgcgagcctgctttgcatcaagcacagcatcattaactgagcgctgcagtaccatctctgtcgaatctgtgaaaaaaaacatacaaaaaaaaaaaaaaaaaaaaaaaaaaaaaaaaaaaaaaaaaaaaaaaaaaaaaaaaaaaaataaaaaaaaaaaatatttaaataaaaaaataaattag

SEQ ID NO: 1962 - DNA, 413 bp, Chlorella sorokiniana
  unsure (1)..(413): unsure at all n locations; Clone ID: LIB3602-011-Q6-K1-A9
ccaggacgctgaccaacatcgccgtctgggcgggcctggtgccgtacgccgtctacatgggctgcgtcgcggagtggaacaaggtggacacgattgccaagcggcccgagcgggagatgtggggcagctccgactaagcagccagtgccatggctgtgtgccccacagcccatttgccgattggccggcgcataccacacctggcgttgaaaatgccagctcgtgctgccgctgagctctgccgttgattgcagccgctcccctccttgctctgcttctctgctcctgctcctcactgctcctcactgctgctgcacgccttctgtgcggcctgtacttgtctgcacctgtttcaactcacatccggctctcaacggcctgaggcctgggagcggtgtaaatagcacgcanaa

SEQ ID NO: 1963 - DNA, 120 bp, Chlorella sorokiniana
  Clone ID: LIB3602-011-Q6-K1-B1
cactcgttgtgcttgccaatctggtaacaggtccctcgcaaaaaaaataaaaataaaaaaaaaaaaaaaaaaataggagaagggaaaaaaaaaaaaaaaagaagggagcacaatataaac

SEQ ID NO: 1964 - DNA, 538 bp, Chlorella sorokiniana
  Clone ID: LIB3602-011-Q6-K1-B10
cccacgcgtccgacgcggcagaggtgttctatcgggtcatcaccgcgcgcggcgaagcaatgaacaagctggttgcgcggctggacggcctgccgctgtacctgctgtggggagagaaggacccttggtgcgtgcccgcccgcgccgaccagatccagcgctactacccggcagccacgcgcaccgacatcaacagcggtcactgtccccacgacgacacgcccgaactcgtgaacgagcgcctgctgcagtggctctccaagctggagaccaaggcgggcagcgcctgagcgtttcagcggttgagcgcaccagcagctacgcccatggcgaacatccaatgtccgactgaaactcatctgatgcttcggcagtagccacctggctgcggctgcgcagcgggcatcacctgcaaatcgagttgtttcattccgatcttatccacttcttagcacacaacgcatgattgcttttcagccgccccgccctttcagcgaaatgcactccctctgattgatcccctgcaaaccagcacctg

SEQ ID NO: 1965 - DNA, 540 bp, Chlorella sorokiniana
  Clone ID: LIB3602-011-Q6-K1-B11
gtcacacgccgacacacacgctttgagaacctctctcgtcagcagcccaagcgaacccggcctgaaaggcaccggggagcgtcggcgcagcttggaatccactgatagagcagcagagattctttgtgatgtccaacctgccggaggagattgcggcgcacgtggcgcgtgccgccgaggagctggcggcggcggcggcaaaaatcccctcgtgcgactgcgagcagatggaccctgaacgcatgtccaaggtggtggccgacgtgggaagcgcggagcatgcggcgcaagaggtgcaccgtgctttccggcagctggagaagcagcacggcggtggcccccgcaacctggccacgctcgagacacagtcgctggagggctgcaccgactgcgtggccccagtgtccgacaaggtcgacccgtccatcaaccagctggccgaacatgcaagcgccgaggcaaccggcgggcagtgctgctgaggaagattgtgctttgcataattttatacagccgcgtcactgcggcgggtgccatgct

SEQ ID NO: 1966 - DNA, 538 bp, Chlorella sorokiniana
  Clone ID: LIB3602-011-Q6-K1-B12
ctgatgctgaactgtccgccggcgccctggccctggacttcacctgcatgccaaggcagaagagcaggtgatggacccggctcttcaggcccactgcgggcctgagggcgcgctgctggctgagcatgcggcacgcgagcacagggaactgagccgcgaggtggactcagtgctgggcatcctgctggaggaccacgaccggctgctggctgggcagccgatgccggtggcggagctgctggtgaagcgccgccagctgatcaagcgcatgcaggagctggagcaggccttcattgcgcaccaagtggaggaggaggcaaatgtgctgccgcgcctcgccaccgcactgccagcacaagagcagcgcagcatggcggtggcattctaccatgccaagcaaaaggtggagctgctgcgacccggcggcacaacaggcacaggagcagcagctggaggcagcgtcatggctgttgacacgccggcaggtgcatgaggacagtgtcggctcctgcgatcgcgtcagtgcagccaagtctcc

SEQ ID NO: 1967 - DNA, 500 bp, Chlorella sorokiniana
  Clone ID: LIB3602-011-Q6-K1-B3
ctacgacggcaccgccgccctgatgaaggatgtgtacggcaagcagatcctgtccgtgttccccctgaagcccgtgaacaaggtcagcctgggtgacttcggcaccaagcgctttgtggacgccgagaagcaggccgcgtaaatgcgcgctgctgcgccatgcgtgcccttgctgcttgcggcgctcggccctcgggcctgcgctgctgaaacccaaccccctctgcctctttacttgcaaacccacgacccgcttccctgaatttggtgccctcacttcttgcttgcgtcggatacatacccagtccgcccaaattttcacggtgcgccgcccatgttgcccacacgccctccggactttcgttgcctgcccgctgccctggccgtgacattttccccttgttaagcccagcagcggacaaaaaaaaaaaaaaaaaaaaaaaaaaaaaaaaaaggggggaacatttaaaggaattcaaatattaaatacgcgtgcatgc

SEQ ID NO: 1968 - DNA, 542 bp, Chlorella sorokiniana
  unsure (1)..(542): unsure at all n locations; Clone ID: LIB3602-011-Q6-K1-B4
attcgcgtgcagggcatgagcgagagcgagtttggggacggcgagaagttcgccgccttccagaacatgcgcggcgggcgggtgcagctgatggcgctgcccatgcccgactccgactactacaacgcagagaagggcgacgcgctctatgcctttgagctggcgctggctctgcagaagctgaacatggacaagctcaaggcctgccactcgctggccgacaagtcggatgactttcaagcccaagatttcctggaggacgagatgagcgcccaagccaaagtggtgaaagagctgggagactatgtgtgcgagctcaagcgcgtgggcaagggccacagcgtcttccactttgatgagaggattgaccagggaggcctgactgctgcggcgtgagctgaccaggcagcaagttgcaaagggcgcagctgcaaaaatggcctgcaagcccagcggcgccagcaaggcggcaggcgtcggcggcggcaggcgtcngcgtggcatacgcactgatgcccacctgccacacaccactagcttgc

SEQ ID NO: 1969 - DNA, 541 bp, Chlorella sorokiniana
  unsure (1)..(541): unsure at all n locations; Clone ID: LIB3602-011-Q6-K1-B5
cgcagctggtgcgcaccgtggcgtcggcggcgggcgcggccggcggcgcctccaagccggtggtggagaaggagttcctggtataccgctggaaccccgactcctctgaggcccccaagtatgatagctacaaggtggacatcaacgcctgcggccccatgatgctggacgtgctgctgaagatcaaggacgagcaggaccagacgctgagcctgcggcggtcgtgccgcgagggcatctgcggctcctgcgccatgaacatcgacggcaccaacggcctggcctgcctcaccaaggtggaccgcgatgcctccaaggtcagccgcgtggcgcccctgccccacatgtttgtggtcaaggacctggtggtggacatgagcaacttctacgcgcagtacaagcacatccagccgtacctgcagaccaccaagcccaagcccgatggcaaggagttcctgcagaccaaggaggatcgcgccaagctggacggcctgtacgagtgcatnctgtgcgcctgctgctccacctcctgcccctccta

SEQ ID NO: 1970 - DNA, 94 bp, Chlorella sorokiniana
  Clone ID: LIB3602-011-Q6-K1-B6
aaaaaaaaaaaaaaaaaaaaaaaaaaaaaaaaaaaaaaaaaaaaaaaaattatttaaaaaaaaaaaaaaaaaaaaaggggcgcgggtctttttg

SEQ ID NO: 1971 - DNA, 528 bp, Chlorella sorokiniana
  unsure (1)..(528): unsure at all n locations; Clone ID: LIB3602-011-Q6-K1-B7
actcaaacgcccaccgccaggagtcgctgcagcgtgcttgtggagcgggaggcaatatgcagggcactcttgcgggcgcgcagctgcagagctgcaagagcagcgtgcaggccttcaaggccgcaagcagcagcagcagcggccgggcagcggtgcaggtggtggcgcagaagcgggtgcagaagaagcagcaggtggtgctgacgcgcgacgtgccgggcctgggcagcgagggcagcctcaaggcggtgcccaccggctactggcgcaactacctgcagccccagggcctggccgcctttgcggacgacaacatcctggagcagatccggcggcagcgcgaggaggaggagcgggtgaaggctgaggagaaggccaaggcccaggccatggccaccgcgctggccaccatcggcaagtttgtgatcaagaagaaggtgggcgagaaggaggccatctttggcagcgtgaccgcggcggagattgtggacgccatccgcatgcagacggnccgcgagctggacaagc

SEQ ID NO: 1972 - DNA, 534 bp, Chlorella sorokiniana
  Clone ID: LIB3602-011-Q6-K1-B8
gcggtgagggctgacagagcgccaccatgcggcagctcatttcttctcggaccctcgtcatccccgatgaggtgtgtatcgaggtcaaggcgcggcgggttcgcgtgaagggccctcgcggcacgctgcagcgcgacttcaagcacctggctgtggacatgttcctgactgaggaggagggcaagaaggtgctcaaggtggactgccactttggcaagcgcaagagcctggcgtccatccgcacctgcacctcgcacgtgcagaacatgatcaccggcgtgaccaagggctacgagtacaagatgcgcctggtgtacgcccatttccccatcaacatcaacatcgagaacaagggcggcaaggtggagatccgcaacttcctgggcgagaagattgtgcgcgtggtggacatgctgccgggcgtgacctgcgagcgcagcgccgccgtcaaggacgagctgatcctgaccggcaacgacatcgagctggtgtcccgcagcagcgcgctgatccaccagaagtgcctggtgaaga

SEQ ID NO: 1973 - DNA, 529 bp, Chlorella sorokiniana
  Clone ID: LIB3602-011-Q6-K1-B9
acatggtgggctgtctggttccagttcttcctactcgtgtttgtgggcctgactgcctgcatgggcagcgccaacgccaaccgcctgaggacctatctcatgctgatggtcactgtggtcatcatgcaagtggccaacgacgcgcgtgtccagctggatgttgcagatggcctgcgcccggtcagcggcgacgtcaagacggacctgcgcgccgtgctcgccggcaccatcctgtcgctcatcttcaacttcgtcctcatcatctactggggcctcaccgagcacagcacccaggcgctgtcgctgggccgcggcgccgctgctgaggcgccggccccagaggcgccaaaggctgtggaggtgcccaatgtcaccactgtgtaagccaagccccacgtgcgtccagcagccggcggcctgttgtggcgcgcgttgacttccatgcgccgccacgaacagcagcagctgcgtccgtgccaggtttgccgactggcccattgccgcggcagtgcggcatggccgtccatgc

SEQ ID NO: 1974 - DNA, 548 bp, Chlorella sorokiniana
  Clone ID: LIB3602-011-Q6-K1-C1
acccacgcgtccgcggacgcgtgggcggacacgtgggctagttctagatcgcgagcggccgtcctttttttttttttttttattttttgagtgggtttttttttattttttgtttttttttttttttttttttttttttttttttttgaaaacccgggcgttataattaaaggttacaaggggaaaagggggctgggcttttctccaatatttattgaaatttaaggactttaaaatcttgggggcccccccttctaccgaaaaccctatgttccctttaattaaaaaagaaaaacccattttccttttcctcttcttcttaaacatatatttattttttttataaggggggggagaaggaccacctattggggaatcaataaaatcagccattttataaaatataaactttattatacttttatttaaaaacattaatttttttttatgtcaaacaaaataaaaataattgccccgtttttaaaaattcatgaattggaaaaacccttgaatttccaaattaaattatttttaaaaaaataatcttt

SEQ ID NO: 1975 - DNA, 208 bp, Chlorella sorokiniana
  Clone ID: LIB3602-011-Q6-K1-C10
ctctccgcctgggctctcctgtacattacttcagccccgcctggcgctttcagttgacgccctgcctggcgcgtgggagttgacgcccaccggcggcgggtgccatcgatcgacttggctactggcccaccctgctggccgtgccccccttttccgtccatgccgtcacacacacaccacttcttgccatttcacctcacaattttta

SEQ ID NO: 1976 - DNA, 77 bp, Chlorella sorokiniana
  Clone ID: LIB3602-011-Q6-K1-C11
aaaaaaaaaaaaaaaaaaaaaaaaaaaaaaaaaaaaaaaaaaaaaaaaccccacgcgtccgactagttctagatcgc

SEQ ID NO: 1977 - DNA, 284 bp, Chlorella sorokiniana
  Clone ID: LIB3602-011-Q6-K1-C12
cggacgcgtgggcggacgcgtgggcatcgacaagaagcgcctgcactacatcgagggcggccaggccggcaaccgccaggagtacatcaacaacctggtgcgcgccatgaactgagcgctgagccggcgagcacagcgcagcgcgcgcagcacgcacagcgcggcgcgtgcagcagcctggacggagcggccccctgatgcctgctagccacggcactgttggccgggccagtcgtgaggccccgagcgcacccgaatgtccaagggagtgcacggggggcggg

SEQ ID NO: 1978 - DNA, 532 bp, Chlorella sorokiniana
  Clone ID: LIB3602-011-Q6-K1-C2
cctgcatgctgcttcacgcctttcagccttgagcttgctcggctgtcagcctgaagcccgcgtgcgcagctgcgtgccccccgagtgtgcaaccgcagcgccctgcagctcccagcctccccgccagtcagtgcaagccgccagcgtgccgccctaggcggctgcatcagtcttgacagcggcagctccctggtcccttttgctttggctgggctcagacccattcccttccccatacaccccagggccaccgcacccggagctgcgtcgcgcaggcgcggctgcggccgggttgcgtgccaggcaagggcggcggggcgcagcgctgcggcgcggctgttttgcgtgacgccccctgtggcgtttgctcacgtgagtttcgccgtattgtgccaccccttgctttgcccctctgcctttcccactcctcccgcccgatctgctctgcctgcccttcccctccttggtggttcccttccccttcccgacttgcacttgtgtcgctgcccctcctgggcgttgcttgatgcag

SEQ ID NO: 1979 - DNA, 257 bp, Chlorella sorokiniana
  unsure (1)..(257): unsure at all n locations; Clone ID: LIB3602-011-Q6-K1-C3
gctcgatgctgcttcacgcgtttcatccttgatcttgctctgctgttatcctttatcccgcgtgctcatctgcgggcccgcgtgttgttcaaccgggggcccggcaactcccatcctnccctccattcattgcaagccgtcatcgttccgccctatgcggctgcatcagtcttgacagctgcacatccctggtccctttttctttcgctgagctcagacccattcccttctccatacatccaatggccaccaatccc

SEQ ID NO: 1980 - DNA, 397 bp, Chlorella sorokiniana
  unsure (1)..(397): unsure at all n locations; Clone ID: LIB3602-011-Q6-K1-C4
ctgagttatgatgcctatgacgagggcgtgtactgccgctcccgcatttttttgctcatggcctacgccctcaggctcgacgccatttccggctctgtgctggtcatacttcaccncngntgcaaggtatccatcatccctcaagtagcctgcattctgcgggcgtctctttgtctcttcaccttctaagttaaaggcttatgtccataataactaccacccattcttacttgattcaattcacactcaaaccaccctgttccttggctcttttgttctctatcccaatctttttgcctctaacccagcctgccgctgcccagttttgctgctgccctaccgctctttacatcacacttcttctctgctcataaacttcctactgttacactttgtg

SEQ ID NO: 1981 - DNA, 522 bp, Chlorella sorokiniana
  Clone ID: LIB3602-011-Q6-K1-C5
ggagaagtgcgagaactttgaccagaaggtgggcgtggagatcatccagcgtgccatccgccgccccgccaagagcatgtgccaacaacgcgggcctggagggcgacgtgattgtgggcaagctgctggagcaggagggcgacgaggacgtgggcttcaacgccgcaatcggccgctttgagaacatggtcaccgccggcgtcattgaccccatgaaggtcgtgcggacggcgcttgttgatgccgcctctgtggcctcgctgctgaccaccgccgagtgcatcattactgaggcacccaaagaggcggcgcctgtggcccccggcatgggcggcatgggcatgggcgacttctaagcgcccacagctcccgccaacctgagacacgcagcagcttcctagcagcagggcgggagagcgacccctggcggcgccagtagccccctttgcggggcgtggcgccagccctgggatagctcgccgccctgcaccgcaccccagacccatcagccttctgttgctg

SEQ ID NO: 1982 - DNA, 434 bp, Chlorella sorokiniana
  Clone ID: LIB3602-011-Q6-K1-C6
aaaaaaaaaaaaaaaaaaaaaaaaaaaaaaaaatctaaaaaaaaaaaattttattttaatcaaaaataacaaaaaaatcgggtggcgtatattgcaagctaaatgggtttcactattcaacgcaaatctaactgtagtgactgggcaaaaccctacctttactcaactgaatcaccttgccgctcatacaacattggcccgtcgtgttatcccactagtaccgacctgctctcccttctgactgatgcccattctgaatcgcgaatggtaccccccctgtatccgtttttaatcgccgctcttgtgagtcgtacactgctgcccaccttatacacttgccagcgcattagcgacttctaattgccctccctttccttcctttttcgacacgtttgccgtttttttctgtaaagttttaaatcttttcctccctt

SEQ ID NO: 1983 - DNA, 82 bp, Chlorella sorokiniana
  Clone ID: LIB3602-011-Q6-K1-C7
aaaaaaaaaaaaaaaaaaaaaaaaaaaaaaaaaaaaaaaaaaaaaaaaaaaaaaaaaaaaaaaaaaaaaaaaagaaaaagag

SEQ ID NO: 1984 - DNA, 531 bp, Chlorella sorokiniana
  Clone ID: LIB3602-011-Q6-K1-C8
gctggctgtggcgctcggctgcgcctttgtgccgctccgcaagcccggcaagctccctggtgctacgctggcggaggagtacgtcacagaatacagcaccgaccgcattgagatgcacgtgggagcggtgcaggctgggcagcgcgtggtgctggtggatgacctcattgcgaccggcggcacgctgcgtgcgggtcttgacctagtgaagaaggcgggtggagacgtggtggaggcagcagctgtgattgatctgggtcttggcgggcggcaaaagctcccagaggaccttccactgtttgtgattgtggagaagcagctcgacgagtgaccctctgatcccacttcctgctcacttttgctgctatgcctactgcttacaattcttttactttgccatgcaagcatcagctgcctgggctcatgttgcgcgagtcagatgaactgccagctggccatgggataatccctgccctgctatatcctcatgtagcgcatacaggctgcagctgggtcacattttccgtgcta

SEQ ID NO: 1985 - DNA, 533 bp, Chlorella sorokiniana
  Clone ID: LIB3602-011-Q6-K1-C9
gtcgtgcaccgcctgcgtgtacacttgctaccacttcctggtcaagaacccggatgtgcactttgtcaaggagctgaagcaggacgagctggcggagagcgcgcggtggtcccagcaggccaaggccgtccagggcaacgtgttccgctggctggcgcagacgcgcgacaccgccgcgggcgagcagaaggacacccgcatcttccgcgtttgagcgcccgccaggctgctgcgctaaatcggcgcgcaataccagccgctcaccgccactcgccgccgctgcgcccccctgtgcttgctctcagggcctgaggccctctgccagtcagccacctggggccggcacccccttgccgctatgatatgcgtccccaaagctggagtgaggcattgcggaacccaatgctgtttttccaccgccctgcttttaatatatctgcctcgaagcacggctgacgggcgagcgctcgcccgccaacgatgataacctgttcttttatgcgtatgtgtagcatcccctctgcattcgctca

SEQ ID NO: 1986 - DNA, 536 bp, Chlorella sorokiniana
  Clone ID: LIB3602-011-Q6-K1-D1
atcagcaaccatggtgctggcgtgcgacatcgacctgctgcaccccccggcggagctggagaagcggaagcacaagctgaagcgcttggtagcctcccccaactcctacttcatggatgtgaagtgccagggctgcttcaccatcacgactgtgttcagccacagccagaccgtggtggtgtgccccagctgcaacaccgtgctgtgcgtgcccaccggtggcaaggcccgcctgaccgagggctgctccttccgccggaagggcgactgagcgcgcccccgctagcggcagtgttggcgctgggcagcggttattgtgatgtccacgggcagcccgtagcagcggcactcgcactcctctcttgttgggatggagcaacaccttgcacgggcgtcggaggagactgatcgcccacagtgaggagcacgcggccgggggcctccgcccctgcagccgcgtgtgaagagccacgagtatagcaccccgcgctgccaggcctcgcggccggcgcgcacaaatgactagcacccgcgcc

SEQ ID NO: 1987 - DNA, 245 bp, Chlorella sorokiniana
  Clone ID: LIB3602-011-Q6-K1-D10
gtttccctccgtctcccccttcccacttcatttctcctgcaagcgggcgtggctcatgccccctgcgctgccaccccatcgctgctggtctgtgaacctcgttttaattagcctgcgtccagtgcccgtttctgcggttttgtgaccctggtcttcctcccatgatcccagccctcgaatcgagagtgtgactaccgccagccatactatgccatcgtttgctcatatgtaatgatcagtttgcc

SEQ ID NO: 1988 - DNA, 542 bp, Chlorella sorokiniana
  Clone ID: LIB3602-011-Q6-K1-D11
gtggacggaaatggcgtgatcgattacgaggagttcctggcatccacggtcaacctgtcgctgctggagcgggaggaggtgtgcatgaaggcctttgccaagctggacaaggatggcagcggcacgctgaccgctgatgaggtggctgaagccatgggctgcacggggcgcatgtctgagcaggaggtgcgggatgtgatagcgcggtacgatgtcaacggtgatggcatcatcgattattcagagttcctcaagatgctgcgggagaacgactcgcagctacggcgtgcgagcgactctctgaagcgcggggagctggcgctggacccggtggtgcacaagtagcggcaatttgactgcagcaaagcggtgctcaagcagccgaagcaaggggagctggcgccgcacaagtagcagtgtaacaggcacatagatggcagttgagtggtgcacgtgcagcggcaaagcggcgcagacccgccggccctgcaaccgccccggctttttgcttctcgccatgaccatctgcttcgtactgactg

SEQ ID NO: 1989 - DNA, 378 bp, Chlorella sorokiniana
  Clone ID: LIB3602-011-Q6-K1-D12
acggcggcctgagctcagctatcgcggctcagctcagcctgggcttgacttgcaagtgccttagcgagcttgagctccgcatgatgggcttgaccgggaacgcaccgggcagcggctgccaattgcacatagcgagcgtcccgctcagtcgaccctcctttgccccacctagcccaccggcctagcgcaattttctttcatcatccaatcaaattgctattgaactgacgcttggtccctctctccccctaacgccgccaccgcctgcccgggcgctttgctctctaggcaggggcgcaccgataccgtatgaacgcatctaagttagttgcattgtagccttgacatgtcatccgcggctgtaacacacagaccaca

SEQ ID NO: 1990 - DNA, 532 bp, Chlorella sorokiniana
  Clone ID: LIB3602-011-Q6-K1-D2
ctcgtggagggcggcgcatcggaccgccccgcctggctcaacatggcggtgcacgtggtcaactcgctggttgcctggctcgacctgttgattgttgaggagcgcagctttgaaggcagcagccgccacctggcgctgctgtttgcggtcgcctactgcacctggctgctggtggtgcgccagcgctttggcaagttcccttaccccatcctcaacaacctgcccttcccgctgggctttgcctcctttgtgctgctcggctttgttgtcgtactcttcgcattccagctgggcaaggcggtcaagacactgctgggcggcggcagcagcagcggcagcggcaagagcagtgcgccgcgctggcggcgctccagcggcggtggcgagaaacctaaggaccagtgagggcagtgaaacaggcgcctgtgcctcgcccacccctgtatcagtttgctctgctcccgctgtagcgctgctgcgcatgctctgctctgctgtcatcaagtctcgctcacacttgcgcacactcgct

SEQ ID NO: 1991 - DNA, 537 bp, Chlorella sorokiniana
  Clone ID: LIB3602-011-Q6-K1-D3
gcaagccccaccagcccttgcttgccccagccggagctgtacttccgacaggcccgctcgcttggctagccgcctccactcgtgggtcactggatctagacacctagtagcggtcgtggaagcttgcagccatgatcatcccggtgcgctgcttcacctgtggtaaagtgattggcaacaagtgggagacgtacctggacctgctgcaagccgagtacagcgaaggcgatgccatggatgcgctgggcctcaaccgctactgctgccgccgcatggtcatgacgcacgtggacctgattgagaagctgctcaactacaacacgctggagcgcaacccggtgcagcagcgggagcagcgggagcagccaccgcagcagcagcagcagcagcaaggcgggcagtgagcgagtggtggccgagggccctgcacggccctgtctgcgccgcaactcatactagcagcagcatttgtaccataatcttctcgctttgagcgtaacttgtagatttacaggtatgactccccaatgaccggca

SEQ ID NO: 1992 - DNA, 544 bp, Chlorella sorokiniana
  Clone ID: LIB3602-011-Q6-K1-D4
gggcgtacccgctcaccggcaaagtgggcgaggtggggacgggcgcaggcgagggcgccaccatcaatgtgccgctgccaggcgactctgggcacaacgcagccctggatgtgttcgagacgatcgtggctccagcagcacagcgcttcaagccagacattatccttgtgtcagctggctttgatgcgcactggagagaccctttggcaggcttgcagttccgcacctccacctacaatgccttgagtgccagcctgaagcaactagcggaccagctgtgcggcggccgcatcgtgttcttgttggagggcgggtacgacctcaaggccctcggcgacagcgttgtcaacacgttcctgggtgagctgggtggctgcacatgtggggcaggcgcccctcatgcactgctggtaagcacggggaggtgctgtccttgagcatggcacgcgcagtgactggcacactggcggtgccgaggcggtatgtgcaagtgcgtctgtggaatctctggtcctaatcactcactgagtctcatatacggatg

SEQ ID NO: 1993 - DNA, 438 bp, Chlorella sorokiniana
  unsure (1)..(438): unsure at all n locations; Clone ID: LIB3602-011-Q6-K1-D5
gcagcggcaggtggcttaagatgcacctactggccaaaatcgtcagaatgtaccatgcccacgcacacctccaacgctcgaacttgagggtgcagtgcgaatgaggtgcctcctgcgcaatgcctctcttgatgcaagccagcggccgtgcttgctggcgcatgcgatgcctgggataccatgcacgcgaaaacaattgtacctcccccagtgctgcctgctacccttctgtaagctctgctgttgcctgtagcgattttcaacaaacgagcctcaatggcaaacgattctgtacaaacacctgctgctggtctgtcgtcctagcacagtcatcaaacggttcttatgcatgttcagttctctttcagctgtcgtgtgtcatgttgtgtaacctgctgccctcgnaaaaaaaaaaaaaaaagaaaatacaaaacttaa

SEQ ID NO: 1994 - DNA, 323 bp, Chlorella sorokiniana
  Clone ID: LIB3602-011-Q6-K1-D6
ggcgccgtggggtcctcagcagcggcgctcactgccgacctgcgtagcgagagctacccttagcgggctgaaacatgccgtgcagccgccatccctcctgcacccctgtacgctgccgcctgcagggcagctcctctacatcatccatcaccgcccccgtttgttgggatcacatttagagtcccgttcctccccatttcgctcctgcttgcttctgtttagttgctttctccctgccgcttctcctcctgctcgtctttccctgccctgcctgtccctcacccgtatcgctttgcacagctctgctgttacaaattggtgtc

SEQ ID NO: 1995 - DNA, 452 bp, Chlorella sorokiniana
  Clone ID: LIB3602-011-Q6-K1-D7
aagaagaaggccgccgccgccgcgcccgccgagggcgaggccgcctcccagagcaaccacgtgaagcggaagctcaagcagcgcaaccagggccgcaagctggaccagatgctggacgaccaattcgccaccggccgcctgtacgccgctctgtcctcccgccccggccagtgcggccgcgcggacggctacatcctggagggccgcgagctcgagttctatgtgaagaagatgcagaagaagaagggcaaggctgccgcgtaaagcgccgcctagcgaggccgcaacccccgggtgccacttgctggataggatcaagttgtaaggcaccaactcgcaaaaaaaaaaaaataaaaaaaaaaaaaaaaaaaaaaaacataaaaatacaataaaaaaaaaaaaatatactaaaaaagaaacaaaaaggaccagacggtcggggggtgcacctt

SEQ ID NO: 1996 - DNA, 528 bp, Chlorella sorokiniana
  Clone ID: LIB3602-011-Q6-K1-D8
cttctggttgcagctgtagcactcgcccgccgtcaacaacgcccctcagcagctccgagtcagccggtgcccagggagcccggagccatggacaagcgcattggattcatcggcgcaggccagatggctgaggcgctggcccgtgccttcattgcacagggcgtgtgccgcgccgaccagattttcgccaccgacgttgttggcgagcgcaaggaggtgttccgctccttcaacaccaagccggtggacagcaacgctgaggtggtcaagtcggcggatgtgatcttcatcgccgtcaagccgcagtacgtgtctgtggtgctgcgtgaggtgcggccccatctggaggaccgccacacggttgtgtccattgccgcgggcgtcacgctgcagtcacttaaggatgcggccggcgacggcgtgcgcttggtgcgtgtcatgccaaacacgccctgcctggtgggcgagaccgcagcagccatgtgcctgggcggcaaagcggacgacagcgatgcagacctcgtgcgg

SEQ ID NO: 1997 - DNA, 301 bp, Chlorella sorokiniana
  Clone ID: LIB3602-011-Q6-K1-D9
ataaaaaatacaaaaaaaaaaaaaaccaacaaaaaaaaaaaacttctattaaataaaaaaaaaaacaaaacgggggggccataaccggggcgggcggttgactcatcttgcaccccatacgctgccgcgctggcccctcccttcattgcacaggctctgccgtgcccaccagattttcgcctcctccttggtgcccccgcagtacctttccgtccttctcacaacccgtggcaacttccctgagtcgccagtctatgcctgtcatcttcattctttccaccctttgtcttgtttctgtgct

SEQ ID NO: 1998 - DNA, 190 bp, Chlorella sorokiniana
  unsure (1)..(190): unsure at all n locations; Clone ID: LIB3602-011-Q6-K1-E1
gggctgagcgctcgcctcgcgcgtgagctgacggctgcagccacggctatcttcaactggtgtgccagcaggcatgaccgcgaagcagccgcagctctccagctggctctgcctgcgtttgcagcccctggcttgatgtgctgctctcttgcatgcatgcgccaagcgcatgtgtaaagctgctgcngac

SEQ ID NO: 1999 - DNA, 524 bp, Chlorella sorokiniana
  Clone ID: LIB3602-011-Q6-K1-E10
gcaatggcggcggccagcggcgagtgagaggcggcggcggcgggcagccatgcggcagaggcggcgcgggtgcaggcggcggcagctgcagcgcgcggcacgcgcatccccaaccgctgcgacctccgcgtctatgctgtgaccgaccctgattgcaacgcgcagtttgggcggacaaacgcagaggcggtgcggctggccatcgacggcggcgccaccatcgtgcagctgcgggagaagcgggcagacggaggccccttcatgcagcaggcggccgaggtgctggaggtgtgccgctcacggggagtgccactgctcatcaacgaccgagtggatgtggcacttgcggtgggcgcagacggcgtgcacattgggcaggacgacctgccggcggcggctgtgcggcgcatgatcggcccagatgctatcctgggcgtgtcggtcaagactgttgagcaggccctgaaggctgaagcggatggagcaaactatgtgggcgctggggcggtgtaccccaccggcac

SEQ ID NO: 2000 - DNA, 542 bp, Chlorella sorokiniana
  Clone ID: LIB3602-011-Q6-K1-E11
gccaaggcggctgccgaggacgagtggctcaccaagagcggccggcggctgaccaaacggcagcagctcaaggcggacagcgaaacggcggtgtcggccctgttccggggcacctacgtcagcaccgtgacgtgcgcgggccacccgccctcggagacgcccgagccgtttgtgtcgcccacgctgcacatcctgagcgacggcgtgaagatggttgaggacgcgctggacgagctgacggggcccgagaccatttctggctaccggccgcaggaccacctgccgcccatggacgccaccaaggctctgcgcctgcagcgcctgccgccgctgctggtgctgtacctcatgcgcttcgaccccgccaaccgccaccagaagatcagcaagcacgtgggcttcccgccgcggctgaagatgaacagccgctggctggcggccgacagccgcgaccgtgccgccgagtacgagctgattgcgacagtgacgcaccacggcaagaccattgcagccgggcactacacagccgatgtcaagcagcc

SEQ ID NO: 2001 - DNA, 542 bp, Chlorella sorokiniana
  Clone ID: LIB3602-011-Q6-K1-E12
gcttggagcacaggggcaccatgaagttctccagcaccgtgaccagcagccgcaggaagtgcaggaaggcgcactgcacggcgccctccagcgcgcgccggaagctgatgagcgcgccgctgtccactgagctgcgcaacaaatacggagtgcgctcggtgcccatccgcaaggacgacgaggtgtctgtcgtgcgcggcacctacaagggccgcgagggcaaggtggtccaggtgtaccgcaagaagtgggtgatccacatcgagcgcatcacccgcgagaaggtcaacggcgccaccgtgaacgtgggcgtggacccctccaaggtggtggtcaccaagctgaagctggacaaggaccggcgccagctgctggagcgcaagcgcgcgggcaagggcctggccgacaagggcaagttcacggaggcggaggtggcggccatggagaacgtggactaagcgccacgcccaccccgcagcagccagcagcagcagcagtgttgaggccgcgggcgggccaccgacgccagtgcggctcgggtg

SEQ ID NO: 2002 - DNA, 536 bp, Chlorella sorokiniana
  Clone ID: LIB3602-011-Q6-K1-E2
gagctggagaagtttgagcgcggagagctactgcggctggcgctggccaccttccccaaggtcaagatgctggaggacggcgagagccacgcgcacgacaatgaggtcaactaccgctgcgccaacttcctggacatcaccgacggggtgtactccatccagtccctgagccgtttcaacggcatgaaggccacatcggaggagctggagaaggcgggcatcaccaaggtcaccgccgctcctgccttcctcaaggagatcgccatcatgggcacgcgctccccagtggcgccctacgcgccgcgcatccccagcgcggatgccgaggtggctgaggtgtgcgctagcggccagctggaagcctttgtggcggacgacgagtccgtgcgcaagctgaccagcctcaccaagcgcgtcgaggaggtcaaggaggccatgcgcgcttgcaaggagaacggggagaagattgtgctggacggcccgcgggccacctggcgcaagaagctggcgcacctcaccaaggcgcagatccacca

SEQ ID NO: 2003 - DNA, 425 bp, Chlorella sorokiniana
  unsure (1)..(425): unsure at all n locations; Clone ID: LIB3602-011-Q6-K1-E3
accacgcgtccgggggcggcgggagaggcagcanaggcggcttcagagggcgaggaggattctttancanaggagggcgaatttccggaggaaggatatgcggcggctgaggaggcaagagaggcatatgcancgggcggcttgctggatgaagcacaggatggggagcagccagcagagcagcagcagctggagcatcagcagcagcggaaggaagcatacgaaggagaagcgcctgctgcggcagcanaagagcggggcggcgatggaactgaaccaatggagagctagcctggcgcgcaacactgccgagcctgcaagttgttttagccggaatctgtccagcagtgctgtgctgcctgcttggcagcgctactgcactgttgccctgtgagagcgttacatggctgtaagctgcacacgtt

SEQ ID NO: 2004 - DNA, 545 bp, Chlorella sorokiniana
  Clone ID: LIB3602-011-Q6-K1-E4
cgctgcttttgctgctaccgctgccacggctgctgccactagctctgctgctgccctctgctgctgcttggcatgcgccagcgctgtcaaagccagcgccgccagctgagcaggtgccagcaggggcagggcttctgccgctggatgcatggtgtgcaagcagctgctgcaccagcggctctgcctctgctgctgcttcagccagccgctgcagaggcaggccaaacaggaagcgcgccgattgagtttggtcagcagaggaaacctagagcaggttgagccgcaccgcccacctgccctgcttgcagtgcaaaaaggcaggcaacgccgcccgcccaccaatcacctgcccatccgcacctgcaccaccccgggatcagcttcgaccgctgctgcttcattcttcagatgcaggcggcagctcaggccccgccgctggcacacagactgtatgctgcgctccagctcttgcagaactgttgagagaacggggcggcggcataaacctttgagcagacccgttgcactgctgcaacggttgcaac

SEQ ID NO: 2005 - DNA, 74 bp, Chlorella sorokiniana
  Clone ID: LIB3602-011-Q6-K1-E5
aaaaaaaaaaaaaaaaaaaaaaaaaaaaaaaaaaaaaaaaaaaaaaaaatataagtgcggccgctataaaaaga

SEQ ID NO: 2006 - DNA, 449 bp, Chlorella sorokiniana
  Clone ID: LIB3602-011-Q6-K1-E6
ccctggttccccacgctgcggctgctgcaccagtacccagacatggtgccgaagctgcgggcagacacgggagccatcaagtttgtgctcagcggcgccaacatcatgtgccccggcctcacctcaccaggcgccacgatacacgatgaggtggacgagggcacggcagtggcgatttatgcggagggcaaggagcacgccatggcgataggctacacaaccatgtctacggcgcagatgcgggagcagaacaagggcatcggcgtgaacaacctgcactacctcacagacggcctgtggaagacgccacagctggactgaactgtattgagcggccatcagcagcggcgctggctttacacatgggcgacgcaaaacctcatgatttagcatgttgcttatgaatcgtgccgcccggcatcccccaccagtgtaacgcaacctgctgc

SEQ ID NO: 2007 - DNA, 532 bp, Chlorella sorokiniana
  unsure (1)..(532): unsure at all n locations; Clone ID: LIB3602-011-Q6-K1-E7
ggggcaggtggaggtggaagaggaggcagctaaggcgctgcagtctctgtcggtgtcacttgtcagctctcagatgactggcagccaaggcaagcggggcggacaggagcctgcggtatcgagtggcggcaaaagccgccgccgggccgccagtgctggcgggcgcggcagcaaggagcgtccacgttcgcgcagtgggcggcggggggcggcgggcgcagcaggggggcggaagctgagccgcaccgacagccaggagaggcgggagggcgccctgatggctgcggtgcaggcggagtcgcgctagggttctacgtacgaacatgccgcatgtgaactgtgtgctttcattcgcaagccagctctgcctacttcattccgaagcctcccgtgcttaccgctctcacctactgccctcgcctactgccctcacccacccttaccgctgtccggtcacagcgatgctcaacctgcacgtnccagcgatctgaccaatcaaaacttgtgcacgtggccttgcctctggtccaca

SEQ ID NO: 2008 - DNA, 203 bp, Chlorella sorokiniana
  Clone ID: LIB3602-011-Q6-K1-E8
aaaaaaaaaaaaaaaaaaaaaaaaaaaaaaataaaaaaaaaaaattttttttaaaaaaaaaaaaaaaaaaaaggggggggctttctatgttccaagctggcgttccccttcatgccacttcataacttttctttttttttaccttaacccaatttcattgccctcgttttccaacttcacgactgggaaaaccttaacctttc

SEQ ID NO: 2009 - DNA, 534 bp, Chlorella sorokiniana
  unsure (1)..(534): unsure at all n locations; Clone ID: LIB3602-011-Q6-K1-E9
gcgccaggccccgctgatggacgaaggcgactttgagtgcctggactatgtgtatgtctggtctgcgcccgggtgcgaggtcaaggtgctgtctgcggaggtgcacggnctggagcctgctgcacacgacaagacgttgtatccctccgaccatgccgctgtgaaagcgaccctggaggtcagccgcaaggaagtgctggccgacttgcaggcggcgcaacaacgtgtgcagcagcagcagcaacaaaagggcaagcagcgaggcggctcgcccaagagcagcttgtaaataacaagctgctgactgcagctgggcaaatttgaggcagctgggcaaatttgaggatcaccggcactcgcttgggcagcagtcggcctggttgcacacgccagtcgaccagctgcattctcagttgccacccttgctgactgcacccatcgttaggaccctgcgcaagccttgtaccacaagtcccgttcagactctnctgtacatccctccttgtgcaacaaaatgaacccacatttgatgcg

SEQ ID NO: 2010 - DNA, 536 bp, Chlorella sorokiniana
  Clone ID: LIB3602-011-Q6-K1-F1
ggagacgctgaagagcgtgattgcgcagtacaacgcctcgcagctgctcacgatgcgtgaggtggtcagccgcgagatgcggcggatactgacgcagggggcgcgctacttcaacattgtgctggatgacgtgtccatcacgcagctcaccttcagccgcgagtacacgggcgcggttgaggccaagcaggtggcgcagcatgacgcggagcgtgccaagttcattgtggagaaggcggagcatgacaagcagagcgcgatcatccgcgcgcagggtgaggcgcagtcggccatgctcatcggccaggccatccagcagaaccccgccttcctgacgctgcgcaagatcgaggcggcgcgcgaaatcgcgtccaccgtgtccgcctccgccaaccgcatcttcctcaactccgactccctgctgctcaacctctccgactacgaggccgcccccggcaagaggaagtagagctgagcagcccgatgcagagcggcgaggaaggagctgcgagggcggctgggtcaggaggaggcag

SEQ ID NO: 2011 - DNA, 516 bp, Chlorella sorokiniana
  Clone ID: LIB3602-011-Q6-K1-F10
tgcaaaaaaaaaaaaaaaaaaaaaaaaaaaataaaaaaaaaaaatttttttaaaaaaaaaaaaaaaaaaaaaaggagaggaaaaaaaaaaaaaaaatagagagggaaaataaaaaaaataattaattaaaaaaaaaaaatattttatataatatatagggggttcctttttattggcctccttttttcaccctccttttttgccacttttttttttttttttttttaaatttaatttacttaacatgtcttttttttcaaatcttttaatttggaaaaccctttggcttacccccttttttcacttttttttcactctccttttttaattgttttcttcttttttaagtttttttatacttatcgctttttaaaatttttcttatatttactttttatttttgtcccccctttttcctcctttttttccggtttttttttttttttttttccctttttaccttttttttttgtctttttttttaattggcgttttttgtttgttttctatcttttt

SEQ ID NO: 2012 - DNA, 183 bp, Chlorella sorokiniana
  Clone ID: LIB3602-011-Q6-K1-F11
gcgaaaaaaaaaaaaaaaaaaaaaaaaaaaaaaaaaaaaaaaaaaaattattttaaaaaaaaaaaaaaaataaaaagagaaagagttaaaaaaaaaaaaatggggaggaaaaaaaatttttattttttatattattacatttttttttttctattttttaacatttattttttttttatatag

SEQ ID NO: 2013 - DNA, 540 bp, Chlorella sorokiniana
  Clone ID: LIB3602-011-Q6-K1-F12
cggacgcgtgggcggacgcgtgggccaagatccaggacaaggagggcatcccccctgaccagcagcgcctggtctgcgctggcaagcagctggaggacggccgcaccctggcagactacaacatccagaaggagtcaacgctgcacttggtgctgcgcctgcgcggcggcatgcagatctttgtcaagacgctgacgggcaagaccatcacgctcgaggtggaatcgtccgacaccatcgagaacgtgaaggccaagatccaggacaaggagggcatcccccctgaccagcagcgcctgatcttcgcgggcaagcagctggaggacggccgcaccctggccgactacaacatccagaaggagtcaacgctgcacttggtgctgcgcctgcgcggcggcatgcagatctttgtcaagacgctgacgggcaagaccatcaccctcgaggtggagtcaagcgataccattgagaacgtgaaggccaagatccaggacaaggagggcatcccccctgaccagcagcgcctgatcttcgcgggca

SEQ ID NO: 2014 - DNA, 402 bp, Chlorella sorokiniana
  Clone ID: LIB3602-011-Q6-K1-F2
gggggggcctgtgcattacatcagaggcacaacagcgggcggcgggttggtttttgtttggtaagggcctgttctttaaggcgttccatcatgaaatggcaacaacccggtgatgctaatgggcatcacaaaaataccgggggcgcgcggggcgccctctgcaataaaaacattgcacaaaaggagcacgggcggacaaagggcggcgggcccccgcgtttcatcaagcacaaaacaatgtcacagggagcctacctggccggacaccttcagaccggaccgcacttggcggggggcaaggggtggcggctccggcagtgagcaggacaaacaggccggacaattaatctgggttgtgaaagatttggaagatttttgcggtaggcttggcttgtggggcgg

SEQ ID NO: 2015 - DNA, 527 bp, Chlorella sorokiniana
  Clone ID: LIB3602-011-Q6-K1-F3
actggcagccaccaacaaggccaagcagcaggacaatgacgcatagccgcgcggcccggctgcccggctgctggtcgcgcccagccccctgtgcctgctcgtgtaatgtggcgggcgcccgttttgactttgtaccccatgcgggctcctttctggctgctgctgcttcttgacgcgccagccagtcagcgaggagcctgcggtctgcggccttgtacctggttccttcctgcccagctaatccctgcccgcttataacgagtcgctccagtttgctaatgagtttgcctccacgtggctgcactgtacccatctgtcctcactcctcctgtcatccccactcctcattcttcacccattgagcctcggagccctgccccttctgcagcctgccatcaacctgcgctgtgctcggaatctaatcgctctgcagctgagcccgcacccattcgcggcttgcgcctgccctgctgaacttcgatgataattgacagcaaacgaggcagcggcgccaagtcgcaagcttg

SEQ ID NO: 2016 - DNA, 148 bp, Chlorella sorokiniana
  Clone ID: LIB3602-011-Q6-K1-F4
ctgctctcttaccccgatttaccacagcggcacctgaagacgggggtaataacctttcttctaatttgttacattgcacggattccatgcatccaccactgccgtgttctgttgttgaagttgcggtgtgaaacagcttgggcgctgc

SEQ ID NO: 2017 - DNA, 120 bp, Chlorella sorokiniana
  Clone ID: LIB3602-011-Q6-K1-F5
aaaaaaaaaaaaaaaaaaaaaaaaaaaaaaaaaaaaaaaaaaaaaaaaaaaaaaaaaaaaaaaaaaaaaaaaaaaaagagagaggaaaaaaaaaaaaaaaaaaggggggggcccttttaa

SEQ ID NO: 2018 - DNA, 456 bp, Chlorella sorokiniana
  Clone ID: LIB3602-011-Q6-K1-F6
ggcctggggctcagtaccgtctcaggctcgaatcctgccttgcttacatggctgacagactttccgtccacggccgaggctatgcttaatcttggcagcggcctgggccaggcggcgtagcgccatgccatggcatggccgccgccgccgcgcgcagcgcgcagcgctgcaaaagcgtggggcgagcaaaacctcccggggatttgctgtgccggctggaaatgccgtgcgcgcccctccgcgccgcgcgctgctgtaactctgcattaatggccccccaccgggcccctgtcttctgccctctttatgtctggttgtggttgattcgcttctgactttgctcctcgctgcccgccattccttcctctccgcgctgctgctgctgtgcacaatgaacgacggtcgactcatgctttactagcgctctcggcaccctcacctgtaactgaacgccgc

SEQ ID NO: 2019 - DNA, 65 bp, Chlorella sorokiniana
  Clone ID: LIB3602-011-Q6-K1-F8
gggggggcgcaggccttcaaagccatgggctatccatcaaattaatagcaaaattgcaacttacc

SEQ ID NO: 2020 - DNA, 538 bp, Chlorella sorokiniana
  Clone ID: LIB3602-011-Q6-K1-F9
gtacctttctgtatcatcttgcagcaatggcagccggctgcatctttctaacatcgtcaccggcccactcgggtgggccatgcccacctgcctgcaacgtcacccttcatcaaccctcacccaacccatccacctgccacccatccactcaccttccctccgccacaacctctgccacccactcaccacccatcacccgctcaacgccctccatgcaccatcctccccatccaccaaatctgccaccccaaacgcacgtccgccgctgcaccacctgccgccccctcacccgcacccatcttccacccgccacctttcctgccgctcaccgccgcacatcctacctcccacacctcactccatgtccacccttcacccgcgcttcacacagcggctgctgccatgcaaagctgctgccaaacccatccatcatgctcgcacacccactcacccacacgtccaacgtatccagacccattttcaaggcccgactgtacagtgcctttttgcgtccttatgccgatctggtaccaggact

SEQ ID NO: 2021 - DNA, 208 bp, Chlorella sorokiniana
  Clone ID: LIB3602-011-Q6-K1-G1
gcaccggctagcacggggcggcagcgggcggcactgagtgcagctgtgcaggcctgggccggcaggcaactcaagcgggtagttacacaagtttgtcgatcctctgagcacttgcttactcatgattttgaggctgttgtgcagtcttgttgcgctgcagctgcagctgcaggctgccatgcaaggcacgctgtaacctgacatgaac

SEQ ID NO: 2022 - DNA, 542 bp, Chlorella sorokiniana
  Clone ID: LIB3602-011-Q6-K1-G10
gccctccctcccatggcaggtacatggagctggagaacacagaggtgctgcgcgcccacctgcgctccagcacctttgtcagtggcagcagcgagcccggctacaaggagcggcgcgggtacaagggcctgcgccgccgctgagccctggctggccacttgctgcacccccttgacgctgcacgcctggctgctgcatgctgcggcccgctccgccttcacggcagctcactggtgctggctggtaatgatgttcagttgggcccctcgatgctgcggccacaaggatgcagcctccgtccgtccctcttagctgtcgactttatcttcccccatccctagctgtcgtcataatcttctccatccctcacgctggttgtccatttgctgtcactagccgggcacctgtatcccttccgccgccaccaccgccctgcgttgtagattgctctgcttgtgcccggctgtctctttccacctccccacccaaaaaacccaacgagtacgcttgctctacccgtgttgctgtttggctccatctgg

SEQ ID NO: 2023 - DNA, 534 bp, Chlorella sorokiniana
  unsure (1)..(534): unsure at all n locations; Clone ID: LIB3602-011-Q6-K1-G11
gtgcggcggggcgggctatntacatggagctggataacacagattttctgcgcgcccacctgcgctccagggccggggttagttgcagcagcgagcccggctacaaagagcggcgcgggtacaacggcctgcgccgcctttgagccctggctggccacttgctgcacccccttgacgctgcacgcctggctgttgcatgctgtggcccgctccgtcttcacggcagctcactggtgctggctggtaatgatgttcagttgggcccctctatgctgcgttcacaaggatgcagcctccgttcgtacctcttagctgtctactttattcttccccatccctagcttgtttcataatcttctccatccctcacgctggttgttcattcgctgttactagccgtgcacctgtatccttttctgctgcaccacctacctgctttgtagattgctcttcttgtgcccgtctgtttcttttcacctccccacccaaaaaacccaacgagtactctttctctacccgtgttgctgtttggct

SEQ ID NO: 2024 - DNA, 399 bp, Chlorella sorokiniana
  unsure (1)..(399): unsure at all n locations; Clone ID: LIB3602-011-Q6-K1-G12
ctcacttctcttgtagcttcctttgccgccgcatgtgcgtgctcgctgtatgaacattcacgtttcattgcgccataccaacgaatgccgttgcttcccctcagccttcttgaaccctccccccctggccccctgcaccgatttcaaagcttctcctccacctgcccctctctgcgtgccctcaccggcgtgcaacccccctcccagctgcaccctccctgagggtgcgctgggcctctccagttttgctaagccccacgcgagtcgacactcccaacacgtcatgacacacaagtctttgccgtgctgcctgccaggcttttcgcaggcggtgcattgaccctgcttaccgccatgtgtaagtgcagcatcagcaaancaaagaccaagaagcaaggc

SEQ ID NO: 2025 - DNA, 327 bp, Chlorella sorokiniana
  unsure (1)..(327): unsure at all n locations; Clone ID: LIB3602-011-Q6-K1-G2
cagctgtgctcctttctttctttgcctttcgttgtttttccaaacccaccctccccaaggacccactctccccccgctgccccgctaggaaacgccccatatcacagccctaatggaaaccaccaccagaccgctttgtttccctcttccgcccctggccggccccttcctcgctcccatgccggcctcgtgatctccttccctgccattttacccttccttccccagccgtagccccgggccatccctgcctagcgttgattcaaccctgctgttccaacttgctctgctgttgagaggactgattgtcaatgattccgcagcnna

SEQ ID NO: 2026 - DNA, 250 bp, Chlorella sorokiniana
  Clone ID: LIB3602-011-Q6-K1-G3
aaaaaaaaaaaaaaaagggcggacaatataaaaaatataaaaaaaataaatatattaaaaaaaaggaaaatataaaaagagagagagatttttaaaaataaagaaggaaaataaaaaaaaaaaaaaaaaaaaaaaatggggggttttttttacttattaaaaatctttttattttctttatattttatattgccagtacggttttcatggtttttctggtggaacaatgctttattgtttatgtgctaga

SEQ ID NO: 2027 - DNA, 552 bp, Chlorella sorokiniana
  Clone ID: LIB3602-011-Q6-K1-G4
aaaaaaaaaaaaaaaaaaaaaaaaaaaaaaaaaaaaaaaaaaaaaaaaatttatataaaaaaaaaaaaaaaaaaaaaagggaggggaaaaaaaaaaaaaaaaaaggaagaaaaaaaaaaaaaaaaaaaaaaaaaaaaaaaaaaaaaaaaaaggggggggcctttttaaggaaccaaattttgctcccctgtttttgaaatttttttttttttttttggtgccccaaaattaaattaaggggcccgctttttaaaaccgtgggaaggggaaaacccttggtttccccaaattaattttttttaaaaaaattcctttttgtccagggggggtataaacaaaaaagcccccaccatttcttttttcaaaaaagtggcctcttttaattggaattgggcccccccctttttgggtcatttaacccgggggggttggggtgttttccccatggtaaccctttctttttgaagggcccttaggcccggttttttgggttttttccctttttttttcccccagtgtgcgggttttccccttaaagttttaaaagggggg

SEQ ID NO: 2028 - DNA, 444 bp, Chlorella sorokiniana
  unsure (1)..(444): unsure at all n locations; Clone ID: LIB3602-011-Q6-K1-G5
ttcacgcgtaaccccctccccttttttcataccctagttttcgctgcgcgcgcgccgcctcaataacggcggcggcgaggcgggcactgccgcctgcctgcccgccgctgccccacccggggccgcgccgcgccgcccgtgctttgctctgctgcaatttgctccctgcttgcttgttctcctcgtcggttgctgttaccctctcttctacaatttcgctccccgcgcccctcgattctttcgccccccagcattgagcatttgattgcgatgccacgggcgatgggcggtgcgcggtgggcgcccctcttctctccggctgctgcccacacctcggctgggcatgcaggccggccccaacagacgacgaatgtgttggagaggctagcgccgagcgccggcgggtggacgcaggcccacccagtgtaaggcaagagacgctna

SEQ ID NO: 2029 - DNA, 325 bp, Chlorella sorokiniana
  unsure (1)..(325): unsure at all n locations; Clone ID: LIB3602-011-Q6-K1-G6
ctgtgcgtgagcgcagcttgagagaaccgagcaggcgggcacgctgggggccctcccccctgcaagcctgcctgccgcgttgtaccggcgtgccccgcgccagccacgtcaccaccctcctcctcatcccctctatccgcccgccgctgatgggtgcacggagccccgggaccaactcccacgcccgcggcggcagcgccggcctgactgcggccgctgtgctctgagcgccgctgccttgcacccgagaagaaaaacttactgttcctccactaccaagtgatgtaaccgaaagcagagcanaaaaaaaaaaaataaaaataat

SEQ ID NO: 2030 - DNA, 535 bp, Chlorella sorokiniana
  Clone ID: LIB3602-011-Q6-K1-G7
gctacattgcttaccctgaggatggctctggagcgctggctgcgcagctgctcaaggtgcaggacacgatacccgtgtgccccacacagatcagccagcacgtggcgctggaggctgtgcggcaggggcggcagtgggtcacagaccaggtcaagggcctggtcagcaaccgtgaagccttggtggatgcgctgtcgccgctgggtgccgagaacgttgtgggcggcgagggcgccatctacttgttcgccaagctgccggaaggctgtgaggatgacaacgctgtggtgcagtggctggtcatgaagcacaaggtgtgcatcatccctggctcctcctgcggccgccccggccacgtgcgcgccgcctttgcaaacctcaagcccgacctgtgcgctgaggcagcgggccgcctcaaggccggcctgaccgagcttgttcgggacggcatgcctgctgtgcggcagtatctgcaggagcagggcgccgcgccctggccgtgagaggcagccgccgcagccctgctgcagcacgt

SEQ ID NO: 2031 - DNA, 535 bp, Chlorella sorokiniana
  Clone ID: LIB3602-011-Q6-K1-G8
ggcctgtcgacgcactcagcaactcgacgctcgctgcccagcccctgcgcgccctgccagctgcctggcatgctcgacagcgctccatcagcgccccagcccgcgcgcagcgccgacaggatggcgacggaggaggacaacacagtgcgggagccgctggacctgattcgcctctccctggacgagaaagtttacgtcaagctcaagggggagcgggagctgcgcggcaagctgcatgcctacgaccagcacttgaacatgattcttggggatgtggaggagactgtgacgacggtcgaaattgacgaggagacgtttgaggagatcatcaagaccaacaagcgcatggtcccctacctctttgttcgcggagacggcgtcatccttgttagcccgccgctgcggtcatgacagccgccctgtgcacaggcgtgcgctgcaactgatggtgcgctgctgatggcatgcagccggcgctgcggcgccgacttaattagcactttcttgctgtgagctgcggccggcgcagctccgc

SEQ ID NO: 2032 - DNA, 537 bp, Chlorella sorokiniana
  Clone ID: LIB3602-011-Q6-K1-G9
cctgtagctaggggaacaccagaggcgtacaggctgcccgaaccgcccgcagcgatgtccacttcgctgccgcagggcctgaaggagctgctgaacgaactggatgaatattcgcccgcagtgccggatgaagtgacgcagtatgccctgcgcaccagcggctacgagtgcaaggacgccaggacggtgcgcatggtttcgctggcggcacaacgcttcattgcgcaggtgctagaagaggcgcacaacacgcacaagctgcggcagatggcgcccgctgccaagctcaaagagcagggctttgaccccaaggacaagcgggacatgctgtcagtggaggacctggtcaaggccctgggcgagcacggcgtgaagctggggcgagcaccatactacacatcagccaagccgcaatgatgacatggctgcctgcgctgcggctggcagctgtagactggccacgtctaggtgccctggcaccagttttgccccatgcttccctaatgaagctctgtaactccctctgtgtacctttcc

SEQ ID NO: 2033 - DNA, 539 bp, Chlorella sorokiniana
  Clone ID: LIB3602-011-Q6-K1-H1
ggccacagacgcccgacaccgtcccgcagaagctcagtcgtcaagcccgttccccccacagccccccgcgacacccggcagcgcttccgagctgctgcaatcgtgaccaacgatcggctcagccgctcagcatccctttccgtctcgtaggcagccctgcccggagcttctcgcgtctgcccgcacgctcgtgccgccaattgggcgggttttcagttccgcacaaccgcagcaggcagcaggcagccatggctgccacggcagcgcagctgcggctcatggcagaccttaaggcaatcaaggttgagcctcctgagggctgctccgcctcgccgctcagcgacgacaacctgttcgtgtggggcgccagcatccttgggcccacggaaacgccatgggagggcggcgtgttccagctgcgcatcacgtttggagagcaatatccagacaagccgccgcgcgtgcgcttcaccagcgagatgttccaccccaatgtgtacagcgacggcacgctgtgcctggacatcatccaggaccac

SEQ ID NO: 2034 - DNA, 543 bp, Chlorella sorokiniana
  Clone ID: LIB3602-011-Q6-K1-H10
gcgatcagtctgggagcgccctccgccgcctcgacaccctcagagctctcccaagcagaaagccatggagcaggtgcacaagatcgaggaggcgatcaaggaggggttccaggctgcgccaggcagcattgccgccatcatgaacgaggcgaagcacgaggtgctgaatgaccagcccaccaagctgggcgagaacgacgagcctgtgcccggcggcgacaacgatgtgcccaccaaggtgcacgagaacgatatgaatgacatcaagtcctgagtgaagggtcgccgaaagggcagtgcacgagcgaagggtcagcgccgcccaaacacgaaatcgaatgcagcaggctgaacgccgcgcaatgaactggtgatggccgccggctcaagcggcctgacttgcaccaaacatgccagccgctgcccaattgagttgcaattttgctgaagtgccctccacctccttcaatgacgaatgcacctgcatccaacaaatgctgcccggagcgttcccatgcctaccacctcaaatgcaccctcttt

SEQ ID NO: 2035 - DNA, 537 bp, Chlorella sorokiniana
  Clone ID: LIB3602-011-Q6-K1-H11
ctggacgagagcacgctgggcctgctgttcggcatgatggtcattgtgggccgactgaaggacacgggtctgtttgaattgatggcggcgtgggcggtcaagtgctgccgcggccgcatgggcctcctcagcctgctgctcatgattgccaccgctttcctgtcggcctggcttgataacgtgacgaccatgctgctcatctgcccagtcaccatttctgtcatgcggcaaatgaacaaggaccctgtgccgctcatgctggcccaggcgctcatgtccaacattggaggtgccgccacaatggttggtgacccgcctgctctcatcatcggcactgccctctccaactacataggcttcatggacttcattgtcaacatggcgcccggagtgatcatggcaaccgtggtgtgcatcccgctgctgctgtggcagttccgccgcacgctgtgcgggaagattgccgactaccctggcattctggaggaagtcaaggccttccgcatcactgactggcccctgtttgccaagtgtgcc

SEQ ID NO: 2036 - DNA, 446 bp, Chlorella sorokiniana
  Clone ID: LIB3602-011-Q6-K1-H12
tgccgactgctttggctgctgcgtcgtcagctgtgctgacgaactggggcagccaagatccgcagttggctggcgccaccagtgcttggcagcagcagcatgagccgcagtcagcagggtcagcgggggagggcgccggcgctggctacggcgatggtttcgctgccggcatggcggctgcgctgcagggcttgcagcagaagcctggcgccgctggcgtggcagcaagtgcagaggcgcagccggcggtggctttgtcagcacaggaggcaggggaggatgcggcgcatggctgggcaggcgggggtgcctccgccgcaggagcgcccgccggccagcgatgctgaggtggactacctcctgtccttcatgatgtgatgcgccaatgtggtggactgagtagcatacatctggagcagcatgagcaccaaaatggcgcgctgagc

SEQ ID NO: 2037 - DNA, 444 bp, Chlorella sorokiniana
  Clone ID: LIB3602-011-Q6-K1-H2
ctctggagccttcaggctgagaaggagagcgtaaactcgtcaccatggtggccgccaagaagaccaagaaggctcgggagagcatcaactcccgcctggcgctggtgatgaagtcgggcaagtacacgctgggctacaagaccacgctcaagacgctgcgctccggcaaggccaagctggtgatcatctccaacaactgccccgccgtgcgcaagtcggagatcgagtactacgccatgctgtccaagaccggcgtgcaccactacaccggcaacaacgtggacctgggtaccgcgtgcggcaagctgcaccgcgtgtccgtgctgaccgtcaccgaccccggagactctgacattgtgtccggcatgtaagcggcgcagcatggcatgcgtacccgggcgctgtctgagctgggactgcccctgtataagaaacagaggacat

SEQ ID NO: 2038 - DNA, 490 bp, Chlorella sorokiniana
  Clone ID: LIB3602-011-Q6-K1-H4
cggcgtgggacgcagcggacagagcagccggtcaccatggtgcagcgcctcacctaccgccggcgtcacagctacgccaccaagtccaacaagcagcggatcctgcggacccctggcggcaagctggtgtaccagctggccaagaagaagacctcccaccccacctgccccatctccggccagcggctcaatgggctgcccgcggtgcgccccaacagcctgcaccgcgtgaacaagagcaagaagacggtgcaccgcgcgtacggcggccacctggcggcgggcgtggtcaaggagcgcatcgtgcgcgccttcctggtggaggagcagaagatcgtgaagaaggtgctgaagctgcaggctgccaaggaggctgcgcaggccaaggccgcggcggcaggcagcaagggcaagaagaagtccaagaagtgagcggcgcacgcgagcggacagttgcgccccatgctcccgctgtaatgcaccctcgatg

SEQ ID NO: 2039 - DNA, 561 bp, Chlorella sorokiniana
  unsure (1)..(561): unsure at all n locations; Clone ID: LIB3602-011-Q6-K1-H5
cggacctgaatttcgacccgacctacgcataagttcccagaacgcacactaggcgctcgccatgggtctcaaggaggatttcgacaaggctgctgaggaggccaagggcctgcccgacaacaccagcaacgacgacaagctggcgctgtacggcctgtttaaacaggtaaccgtgggcgacaacaccaccgaccgccccggcttctttgaccccaagggcaaggccaagtgggacgcatggaagaaggaggagggcaagagcaaggagcaggccatgcaggagtacattgagctggtggcgcagctgaaggccaagtacgccgcatagatgggctgacgagtgcggctatggtgtgcccagcagccagccaattgcaatttggccaaggtcagctgggccacgcagcggctgcgccttccgctagtctaatgtgttttcctatgccgcttctgctctgatattcttacagttgctgcgctgtatagcttcccgcgtttgtgagaccgagacngttnanaaaaaaaaaaataaaagaaaaaattatataaataccaaattaa

SEQ ID NO: 2040 - DNA, 538 bp, Chlorella sorokiniana
  Clone ID: LIB3602-011-Q6-K1-H6
gcggccgactgcttcaggatctaggaccgacagtgggcataaccatagctaggcgtgtgtagtgcacggccaccttctcccgcccggcggcccgcaccgatcgggtgagccgccgcggcgccgtggtggtgcgcgccgactatcttggctgcaccaccaaccagatcattgtgctgtccaccttcctgcccctggtggcgggccgcttcggcctggcccccacctccacccgccacaccaaccagtctggcatcaagctgctgccggctgagaagtccgccggcctgatgtccaacgaccccgctggcttcaacgcggtggatgtgctggccctgggagctcttggccacattttgggctgcggcattgtgctgggcctcaagagcaccggcaacctctgagcggctgccgcgcggacccacaagaaaccttgtttctagcctgtaactagaagcccccccgagaagactgccaccgatctgctgtatgttttatcacgccgtgtaacgcactgcacttgaaaaaaaaaaaattaaaa

SEQ ID NO: 2041 - DNA, 538 bp, Chlorella sorokiniana
  Clone ID: LIB3602-011-Q6-K1-H7
ggcttacgtactgaaaaaaaaaaaaaaaaaaaaaaaaaaaaaaattatattaaaaaaaaaggaaaaaaatttagggggggaaaaattaaataaaagtggatgagaaaaaaaaaatattgtgtggggtgtttttaaatttaaatgattgggcgcggttttttaaaatgttttatttttaaatagtggcatttaaaaaatttttattgttggaggttttacacctttttgattgtgaaatccttgggtttaggaatttaaatatcttggtttcaaatacttttttagcctgtttgggtaatgggaaaaaggctgtaacggttcatttttcccaacatttgtggagtttaattgcaaattgacacctccacttttcagggcttttaagcccggtgtttttggttttttcccttattttttcgccaatttttgcgagtttcttagggaaggtttatataggggggttcctttagtgtttcgacatattggttttttttccctttaaacctaaaaaattgagtttgcttttgggttacctttt

SEQ ID NO: 2042 - DNA, 536 bp, Chlorella sorokiniana
  Clone ID: LIB3602-011-Q6-K1-H8
gcgcgccgccatggaggccggctttgagctgactcctgaggagctggctctgctggagctggagactgctggccccgcccccgcccctgaggctgagcccatggccatgcgccgcctgctggaggaggaggccgcccctgctcccgcccctgccactgaggatgctctgattgagggtgccgctgtgatgcgcgccgccatggaggccggctttgagctgactcctgaggagctggctctgctggagctggagacggctgccgcccccgcccccgcccctgaggcgtaaatggccgctctcggccatcagccagcccctccacctcagagcaagtgcgagcgctgagcgagcgctgtgtagtggctggccgccgactgggcctgactgttgagcaccacggcaccatgcgtgcgcagcgatacatgttgagctgccacacatggttccgcgggccgccgcggccggccctgacttctctttgctgcttttgctgctccccctggattcttttccactatcggtccgcacttgatgc

SEQ ID NO: 2043 - DNA, 534 bp, Chlorella sorokiniana
  Clone ID: LIB3602-011-Q6-K1-H9
gccactttcggcggcaagaccaaggctggcaccaaggccggcaccaagaagggcacccagaagcaggccaccaccaagaaggctgcccccaagaagtcttcctctggcgccagccagtggtacggccccgaccgccccaagttcctgggcccctacagcacgaacttcgtgcccagctacctgaccggcgagttccccggtgactacggctgggatacctctggcctgtcggccgaccccgccaccttcgctcgctaccgcgagatcgaggtcatccatgcccgctgggccatgctcggcgccctgggctgcgtcgtgcccgagctgctggacggcaccaaccacattgcctggttcaaggccggcgccgagatcttcggcgacgacggcatccagtacctgggcatccccggcctgatcaacgccaagtccatcgtggcgaccctgatcgtgcaggtggtgctcatgtcgtatgttgagggctaccgcgtcaacggcggcccggccggcaccggcctggacgctgtctacccc

SEQ ID NO: 2044 - DNA, 448 bp, Chlorella sorokiniana
  Clone ID: LIB3602-015-Q6-K1-A1
ggcggcgattgacaagtacattgctgacaacccggtggtggtgttcagctggagcggctgccccttctgcaagcgcgccaaggcggtcctggatgccacgggcgccaagtacaccgcccttgagctggaccagatggccgacggcaaggcgctgcgggctgagctggccaagaagaccggtcggtccagcgtgcccaacatctggattgccggcaagaatgtgggcggctgcaacgacggccccggcgtggccacgctgcaggacaagggcgagctggtgccgatgctgaaggccgccggcgcgctctgatgcagcagcaggctgaaacgcaagctgttgcctggtgccctgccggctgctgtttgtcatgcacgagctatcagattgaacttgacgactgctggtccactggtcgttgtttgatgtgcactttgcaaccaagcggtc

SEQ ID NO: 2045 - DNA, 503 bp, Chlorella sorokiniana
  unsure (1)..(503): unsure at all n locations; Clone ID: LIB3602-015-Q6-K1-A10
ggcgacctcggcccatgtggacctccagctgctgctggctgaggccacaaagggcctgtgagaaggaagaggctaggcctggctcacgtgccactcgcaaggaccacattgcctttggctgttggtgtggttggctcccaatggaccgacacacaaaaaagccaagttggcgggccggcaccttcgccgtggctgatctccatcggccgacccacctgcctgtgcttgacagcctgatttggcctaggaatgcagcagcgctgtgtcgggagcaggtggctggccatatgacgccggcggcgcaacggcagctgccctgccgccggctgaaccccctgtgccagcgcctgatgcccgtgctgcgctgctgctgcccgcctttcatgaccttgccccgtccgtttctgaattcagctccaattatgagcattactgtgcgccttgtgcgtttgtaagccgaataagttnaaaaaaaaaaaaaaaaaaaaaaaaaataaaataaa

SEQ ID NO: 2046 - DNA, 586 bp, Chlorella sorokiniana
  Clone ID: LIB3602-015-Q6-K1-A2
acaggtcaccctagcgacacgatgcagtccgccgtcgtctcccagcgcgcggccttcggccgtgtggcctccgtgcagacccgccgctctgcggtggtggcccaggctacccgccccctgtggcagcccggagttgaggcccccaagcacctcgatggcaccatgcccggcgacttcggctttgaccccttgaacctgggcgtcaacaaggaggccctgaactggtaccgcaacgctgagctgcagaacggccgctgggcgatgcttggcgtggccggcatcctggtccccgcggagctgacccgcgtgggcgtgctgaacgtgcccgactgggccgaggccggcaaggtgtacgccgagagcgagaacgccatccccttctcctccctgctcatggtgcagctgttcctgttcaactttgttgagatcaagcgctgggaggacatcaagcgccccggcagccaggccgagcccggcagcttcctgggctttgagtcgtccttcaagggcaccggcatcagcggctaccccggcggccccttcaaccccttcggcctgggcaacagcagcaaggaggccatggatg

SEQ ID NO: 2047 - DNA, 150 bp, Chlorella sorokiniana
  Clone ID: LIB3602-015-Q6-K1-A3
gaaccccccttgtaccgtcccattaaccgcggcggttttggtggttacccccatggtgaccgttacatttgccagcgccttaacccccgttcctttggtttatttccctttctttttccccagttccccggttttccccgtaaattttta

SEQ ID NO: 2048 - DNA, 367 bp, Chlorella sorokiniana
  Clone ID: LIB3602-015-Q6-K1-A4
gctgatcgccaccctccggcctgccttccccctcttctctgggcttgctgcctccctggcaacagggctgcggctgcccgcctcagtttttcccaatgcgattgccccctcacagcctccgcagctccccacctgcctagcctcactatgtttcattgccacccgctctgccccccacacgagccgctccttcatctcaatgcatgtagctgtattgtatcctcccccacacatacccgctctcggacaagaagcccaacacacgccttgccccctcccgatctgtcccccaccggcgatccctttgccttttcatattcattgcgcgcagcgtgcgccttccgcagctcatgtaatgctggctgtt

SEQ ID NO: 2049 - DNA, 529 bp, Chlorella sorokiniana
  Clone ID: LIB3602-015-Q6-K1-A5
gcactatgcttgtatcccacacaagccgtgcaccttggccctcttattgctgacgcccgtcgcatgtcgtgcgccgacagcccgactcatggggagctccatgcagatcacatgcccgtggaacactggatgagcactaaggctagacagtagatgcccttgggactcattgcaccacgctgtgcgtactacttgcttccacaacccgctagcaggaacggtgctcgagcactgatcctaacacacggcagagctcaacagatgagcgtcacccggacactcgacctccggtgcagttgtttcattccaacgttgcatgcccacgctagcgtggatccagagccagtcagactgtggaccaggtgcactctatgtgacctatgcatcgccatgggcgtgccggccgccttggcagccaggcagcgcagagggcactggccgcccacctgcctgcccagcaggcggccctgtggggctcgcatgctgatggtcgaaacatcacgcgcagaaaggagaaagcccacgatta

SEQ ID NO: 2050 - DNA, 558 bp, Chlorella sorokiniana
  unsure (1)..(558): unsure at all n locations; Clone ID: LIB3602-015-Q6-K1-A6
cctttctgtatcatcttgcagcaatggcagccggctgcatctttctaacatcgtcaccggcccactcgtttgtgccatgcccacctgcctccaacgtcacccttcatcaaccctcacccaacccatccacctgccacccatccactcaccttccctccgccacaacctctgccacccactcaccacccatcacccgctcaacgccctccatgcaccatcctccccatccaccaaatctgccaccccaaacgcacgtccgccgctgcaccacctgccgccccctcacccgcacccatcttccacccgccacctttcctgccgctcaccgccgcacatcctacctcccacacctcactccatgtccacccttcacccgcgcttcacacagcggctgctgccatgcaaagctgctgccaaacccatccatcatgctcgcacacccactcacccacacgtncaacgtatccagacccattttcaaggcccgactgtacagtgcctttttgcgtccttatgccgatctggtaccaggacttaatgtgtaacaaatggtatgtt

SEQ ID NO: 2051 - DNA, 433 bp, Chlorella sorokiniana
  unsure (1)..(433): unsure at all n locations; Clone ID: LIB3602-015-Q6-K1-A7
cgacccaagcgacccgtacggagaggcgctgacgtgcaacgctggcccggctgggctgcctggctgggaaacgagcgcctgcaagcggcatgcggcccgccagccataaggcgccctgagcagccgcgcaggctgcgcagagcgccggtctgccaaccctgcggctgagcaacagcgccccttcccaccagcctctccatcggccgtgacctgttcagcaccagctccaatatgtacgaaactgcctgagaagatcagccaatccctttttcccggtgctttgcccgctcagtctctgccgcgctctctgtgcactcaactgcccccgcccagttttgtatctgcccctctgctgagttgattccgcggctgtacccctttcgngctctgctgctgctgtacgaacaaacgaactatgtgagacactggccct

SEQ ID NO: 2052 - DNA, 438 bp, Chlorella sorokiniana
  Clone ID: LIB3602-015-Q6-K1-A8
gtcgcggcgatccatggtggagacgcgtagcaggcgaaagtcggtagcggcaccagcagcgagcggcggcgacggcgacgcaacggcgccctcgtccagcgggcagccggcggcagcaaatggcggtgcagtcgactatgccgacttgtatcggcaggagcacttgcggcagcagcgtgaagtgcaggccagcttcctgcggcggtggaaagcgcgcatccacctgacgtaccaccagcaggcgatgacgtggggctggtacatgcttgagccgtgggaggtggcgctctggatgtccctgctggcgctcatcttctacgccgtggtggcagcctgcttcatcaacccaaagtccatctgcaacaccaccctggtggcgctgcgcaacagcctggcggcgcgcggagccaagctgctgtccttcacgcgatgacgcac

SEQ ID NO: 2053 - DNA, 463 bp, Chlorella sorokiniana
  Clone ID: LIB3602-015-Q6-K1-A9
aaacgtccggtgaggtgctggagtaccgcagctgttctgtttgtgcgcctcacgcgccccaggcggcgggtcaaggcgcgccgcatgggcttcaaggccaagcagggctacgttgtctatcgcgtgcgcgtgcgccgcggcggccgcaagaagcccgtgtccaagggtattgtgtacggcaagcctgtgcaccagggtgtgacgcagttgaagccgacccgcaacctgctcaacgttgctgaggagcgggtgggcctcaagtgcggctgcctgcgcgtactgaactcgtactgtgtgaaccaggacgctgtgtacaagtactttgaggtgatcctggttgaccccgcccacaaggacatccgcaaggacgcgcgcgtcaacttggatctgcaacctcgtgcacaagcaccgagagcttcgccgtctgaccttgaccggcaagaactatcgcgtactgcagggc

SEQ ID NO: 2054 - DNA, 349 bp, Chlorella sorokiniana
  Clone ID: LIB3602-015-Q6-K1-B10
tgcaagcctgatggcacactgtgctgccatactgtcacgagcgcactgagtttgaccagcgcatcgtggagttccagctgatccaacgcacgcttgctgacatgtatgctgccactcaagccacgcgtgcctttgtttaccatgccgtccgcgactcggatgcaagccacgacaaccgtaaggactgtgccgtcgtaattctgtacgctgtcaataccgacacgcagatggagctggatgccatgcaaatcctaggcggcaatgtatacgtgaacgagtactacggcagtcgctacgtctgagatgccaatctgtaccagatccacgctttcaccataaagattacgtg

SEQ ID NO: 2055 - DNA, 558 bp, Chlorella sorokiniana
  Clone ID: LIB3602-015-Q6-K1-B11
agagggcagtgcccagctgacccgccccaacagctcatccctagtcaaggtgaaggtgaagagcaacaactggtggaccttcaatgtcgggtgtgcccgcaccccctgaacccatgcaccgcccagctggccgctggtgcaatggctgcagcggctgcagcaagcttcccccgccgcattccccgcccccgccaaacctccagccaacagcagcaactacaatggctgcggcccctccccatcccatggccgcatccccaccctcaactaactgccgccacccgcccaccgcctcaccctcacccatcccccaaccatactccctccaccttttcaacggtcaaacacccatcacgccctcgctcatcacccatcaactgtatgttgtgcctgacttttgcgccatgtcgatcggtcgacatgacccacccctgccttttcatgcctgcctttgcacccttgtgttttcatgccgtgcccctttatgacatgcccctttgactggaccccttaggctcggagccagagctcttgcgcacctttgggcgttccatcact

SEQ ID NO: 2056 - DNA, 132 bp, Chlorella sorokiniana
  Clone ID: LIB3602-015-Q6-K1-B12
gcctgtgtcgagcgagacacctccctgacgaaccttcaaacttgataatcttaacttgaccctttgagggccgtgccgatcgtctgagcaagagatttcacgtccctgcagacactgtaactaatacgcttc

SEQ ID NO: 2057 - DNA, 89 bp, Chlorella sorokiniana
  Clone ID: LIB3602-015-Q6-K1-B2
cccatgtcgcggaagtggcagcattgccacataaacgatctcttgaagagtgtaaaggcagcctcaccaagtgtaacgattcgagttgg

SEQ ID NO: 2058 - DNA, 554 bp, Chlorella sorokiniana
  Clone ID: LIB3602-015-Q6-K1-B3
cggacgcgtgggcgcggccaccatgggggagctggagcggctgttcccgggcgagattgccgccgacggcagcaaggcgcgcatcctcaagtacaaggtggtcaagacgccgctcagcgtgtacaagacggtgcccgagtgcgagccctgcaggcccacgcagcgcacgcccatccgcaacttctacctggcgggagactacaccaagcagcgctacctggccagcatggagggcgccaccttcagcggcaagctctgtgcgcaggccatcgcggaggactggaacaccagcagcgtcaagcccagccaggcagcagccaaggagccggctctcgcatgaggcgctggtcgcccctgtgcctgacctgcccaaacccgctccgcttgtaccaacccacgacgcctgcctttcgttccccaatctgtgtgcctgtgctcccgtgtgtctcgtctccatttttgctgtgccagcatggagttctaacacccacctattctgctgctaagctcccctgctattccccgctcacatttcattgcacattcgtcccccc

SEQ ID NO: 2059 - DNA, 377 bp, Chlorella sorokiniana
  unsure (1)..(377): unsure at all n locations; Clone ID: LIB3602-015-Q6-K1-B4
agtacatcgactcagccactcgccatgtgctgctgcgtcagggtgtgcttggcatcaaggttcgcatcatgaaggagtgggatccgactggcaaggttggcccccgcacccctctgccggatgtcgtcaccgtgctggcacccaaggaggaggagtatgtcagcgactccaaggaaaagcttgccaaggcttgagagctggtcgcacattagatgtactgctgcatgttaaacacccaaagcaaacaattgtaatctttgcgatgggctgaaaaaaaaaaaaaaacaacaaaaaaaaaaaaaaaaaacaaaaaaaaaaacaaagaaacaaatttttnatgaaacaactggtnnnccctttncactacctgcccaaac

SEQ ID NO: 2060 - DNA, 420 bp, Chlorella sorokiniana
  Clone ID: LIB3602-015-Q6-K1-B5
caaggagtggaagggcctgcgcgtgacctgcaagctgacggtgcagaaccgccaggccaaggtcaccgtcatcccctccgcggcagccctggtcatcaaggcgctcaaggagccggcgcgcgaccgcaagaaggagaagaacatcaagcacaacggcaacctgacgctggaggatgtgtatgaggtggcgcgcgtgatgcgcgaccgcagctgcgccgccaccttctcgggcaccgtcaaggagatgctgggcacctgcgtgtccgttggctgcactgtggagcacgaggacccccgcgacatccagaccaagattgacgagggcgaaatcgtgtgccccgaggcgtgagcacgcccccggcacacagcagcagcggcctagcagcagcagtgtagctgtcatgtaacacactgctgctg

SEQ ID NO: 2061 - DNA, 549 bp, Chlorella sorokiniana
  Clone ID: LIB3602-015-Q6-K1-B6
gagaaggtgatgaccctggacgagtttgaggcgcgccaggcagctgagaaggcctgaggcccggcctgtggaaatggcggcggtgcgaggcatcatgccgtgccagcatggcgcactccagccgcttgccatgcgccagtggctcggctgcctggtgccagcacagcacgccccttgcagctctgtgcgctgctatggtgacggggcaggcggcgcggcaatgctgccgcacgccctgaattttgcacccgccctggggtcagcagcgctgccagcgccgggtggcagcagcaacgatagcacagccagttagatgaacgtccctgtattctttccttagacgcactgtactgaccggcaaggcacgcagcctttgatatgcttggccgcggcccgcagacgggcagcattttctctgccgcctctttgttatatcctccgcccttcactgctttgctcgactgcaagctgtgtagcagcactgttcatctcctctgttacctgtgttcccattgtgcatcaacacgcttcatcatatgtaacttcgct

SEQ ID NO: 2062 - DNA, 585 bp, Chlorella sorokiniana
  Clone ID: LIB3602-015-Q6-K1-B7
ggacaagatgcggcaaaagtgcgagaagatcgtggcgcacggcatcaactgcttcgtcaaccgccagctcatctacaacttcccggagcagctgtttgcggacgcgggcatcatggcgatcgagcacgccgactttgacggcatcgagcggctggcgctggtcactggcggcgagatcacgagcacatttgacgaccccggcagcgtgaagctgggtcactgcaaggtcattgaggagatgatgattggggaggaccgcatgatccacttcagcggctgcgcgctcaacgaggcctgcaccatcgtgctgcgcggcgcgagccaccacgtgctggacgaggcggagcgctcgctgcacgacgcgctgtgcgtgctgagccagaccgtgcgcgactcgcgcgtcctgctgggcggcggctgggcggagatgcagatggcgcgcgtggtggatgagctggcggcgcgcacccctggaaagaagtcgctggccatggccgcctttgcgcgcgcgctgcgccagatacccaccatcatctgcgacaacgctggcctggactctgccgagattgtgagccaaatgcgggc

SEQ ID NO: 2063 - DNA, 524 bp, Chlorella sorokiniana
  Clone ID: LIB3602-015-Q6-K1-B8
caaggcgctgctcaagtccgccatccgcagcgacaaccccatcatcttcttcgagcacgtgctgctgtacaacgtgaagggtgaggtgcaccccggcgactactgccagtgcctggagcgcgcggagatggtgcgggagggcaccgacgtcaccatcttctgctacagccgcatgcgctacgtggtcatgcaggcggtggctgagctggagaagcagggctacaaccccgaggtgattgacctcatctccctcaagcccttcgacatggagaccatctccaagtccatcaagaagacccgcaaggccatcattgttgaggagtgcatgaagacgggcggcatcggcgcctcgctgtccgccgtcatccacgagtcgctgttcaacgagctggaccacgaggtgttgcgcctgtcctcccaggatgtgcccaccagctacgcgtacgacctggaggcggccaccattgtgcagcccgagaaggtggttgaagctgtgcacaagatctgcggcgtgcgtgcgggtg

SEQ ID NO: 2064 - DNA, 76 bp, Chlorella sorokiniana
  unsure (1)..(76): unsure at all n locations; Clone ID: LIB3602-015-Q6-K1-B9
naaaaaaaaaaaaaaaaaaaaaaaaaaaaaaaaacttttatttaaaaaaaaaaaaaaacaaaaaacagaaggacag

SEQ ID NO: 2065 - DNA, 434 bp, Chlorella sorokiniana
  unsure (1)..(434): unsure at all n locations; Clone ID: LIB3602-015-Q6-K1-C1
gcaactatggcgccatgctgggcggcacagcagatcagcagattgcgcaggcagccgccacctccacggaggagcccagcggctgcggcgccagggctggcgctgagcagcagggcgtcgctgcgccgccgtccggcagcatcgccagcgtgacggaagccattgccaggggcagccgcgacgtcacagaggagcttctggagcacatgtcgccagaccagcggcgtcagctgatcaagctgcagcaggaggcactggcgcttggtgcggaaatgctgggcaaggcggcccccggccccggcgctcccacagacggagtggagcagcagccagggcggtgaacgcctgtggtgacgcagcagccagcccgctctgcgatgtgtagtttcaacaatcaacacaggaggaatggattgtaaacttgacgtgccnna

SEQ ID NO: 2066 - DNA, 385 bp, Chlorella sorokiniana
  unsure (1)..(385): unsure at all n locations; Clone ID: LIB3602-015-Q6-K1-C10
cgacgacatatcgtccattgtgctagtagagcgggagggcagctacatcaagtcggatgcaattttgcgaattgccagcggactaaacatgccgctcccactcgtggcggcggcgctgggcgtgctgccgcggcccgtgaaggacgggttttatgatttggtggcaggtaacagatacaacttcttcgggcgcacgtccgcctgccggctgtcggaccctcggtttgaggagcgcttcatctcatgaacccgcttgctcactcctgaaatggctgctgcatccatcctggcgatcccttgcgttcaaatgggccaaaccattgttctttgcggcccgcaatatacatgtaaactagattggcaaaaaanaaaaanaaaanaaaaa

SEQ ID NO: 2067 - DNA, 166 bp, Chlorella sorokiniana
  Clone ID: LIB3602-015-Q6-K1-C11
ctacgacatatcctccatcgtgctagtatagcgtttttttttctacatcaagtcggattcaaggtgggggaattgtcagcgggctggagatgccgctcccactcgtggcggcggagctaggcgtgcatgcctccgcccgtcaaggacggcttttatgatttggtgg

SEQ ID NO: 2068 - DNA, 430 bp, Chlorella sorokiniana
  unsure (1)..(430): unsure at all n locations; Clone ID: LIB3602-015-Q6-K1-C12
ggagccagcaagatggcccctaaggagcagaagtcgaaggaggcgaaggcgcttgccgccgccaactccagcaagggcaagaagaagaaatggtccaagggcaagctgaaggagaaggtgaacaacctggtcctcttcgacaaggccacctatgagaagctgctcactgaggtgcccaagtacaagatgatcactccctcggtgctgtccgaccgcctgcggatcaacggcagcctggcgcgcgccgccatcaaggagctgctgggcaaggggctgattaaggaggtggccaagagccgcgcgcagcagatttacacccgcgcgacggcagccgccagctaagcagccacccagcagtttggcagcatgctagtgcactcgttgtgcttgccaatctggtaacaggtccctcgcnnnanaaaaaannnna

SEQ ID NO: 2069 - DNA, 448 bp, Chlorella sorokiniana
  Clone ID: LIB3602-015-Q6-K1-C2
ggccttatctcactctccattgttgcgttcctgctgcaccccaagttttgcgagttgcaacatgtgcctgtgttgctctgctctcctcgcttcctttgctggcagcactgcggttttcgccaccgtaccccccttgtgttttcccaccgcccacccaagtgtggtttgtttgttcccccaccaccctcccccaaacccgacccaaccagaaccaagcatcagccgcaaacgatatgccacgcacaacacctcccctccaggctttgcaaagcgtcgtgcgcagcaggtcccaccctattttcgcatggatgatgatgatgtgtagcgttagccatatgtgtgcgtgtgggcgttttgtaagtgcaggacgctctgcaaagagaagtacaacaaatcaacacaggaggaatggataccaaacttgaatgtgccaaaaccggagggacac

SEQ ID NO: 2070 - DNA, 389 bp, Chlorella sorokiniana
  Clone ID: LIB3602-015-Q6-K1-C3
gcggagagcaacgccgagagcaagggcctggacgtggatgcgctgtacgtgagccacatccaggtcaacaaggcgcagaagggccgccgccggacttaccgcgcgcacggccgcatcaacgcctacatgtccagcccctgccacattgagctgatcctggcggagcgcgggcaggcggtgaaggccgaggcggaggacaagcgccgcaagctgagcaagaaggagctggccaagaagctgcgcagcggcaccaccagcaagagcagctaggcggccgcccacggagcggcagcctgcggcggcggttgggggcggcgcctgagcgctgcaacgccgccgccacgcggttgcatgaggaaccaacaacacatgtaacgccctagtccttc

SEQ ID NO: 2071 - DNA, 121 bp, Chlorella sorokiniana
  Clone ID: LIB3602-015-Q6-K1-C4
agcagaacccccctctgtcccggcagcattgaatctgttttgttctgagagcagcacttcccattcttccttgccatgccttttgccctggtgatgccgccggtgtgtaaggacgggcaac

SEQ ID NO: 2072 - DNA, 552 bp, Chlorella sorokiniana
  Clone ID: LIB3602-015-Q6-K1-C5
gggagtgccaatcttcactcggcggctgcttggggggaacacgcctgccctccctcacttcgcaacctcttgcttctcttggcctcagggagtggagcgaccccaaggccgatgtgggcctgaaggagctgcccgtcacctggtgaactcgcggctggagcagcgccaccgccatgctggctgtgcagccaccaccagacgtctcgcatgtgctgccctcccggacccgtggtgcaccggccgtgccccgggtgcatgccagctgagagcccctagcgcgcccaggcacgctgggggcagctactaaactaaacccaagccttggagcagcatagctgcccttagaccttgctggcccgctgcgttgaaactcacgggctcagtcacaatcgagcgtgttccttgcatgtcctgcaccctgcgtttgcacggtgcctggcctacgttttaactgcctctgcaccaccaaatgagcaccgcataccggctcaagaaaatcccagccctatcagtgcactgtctctgtggcccttttgatgcattgtgagcgcc

SEQ ID NO: 2073 - DNA, 578 bp, Chlorella sorokiniana
  Clone ID: LIB3602-015-Q6-K1-C6
cgcggcaagggcaagacctccggcaagaaggctgtgagcaagagctccaaggcgggcctgcagttccccgtgggccgcatcgcccgctacctgaagaagggccgctacgccgagcgcatcggtgccggcgcgcccgtgtacctggccgccgtgctggagtacctggctgctgaggtgctggagctggctggcaacgccgcccgcgacaacaagaagacgcgcatcatcccccgccacatccagctggcggtgcgcaacgacgaggagctgtccaagctgctggcgggtgtgaccatcgccgagggcggcgtgctgcccaacatccactccgtgctgctgcccaagaagagcaagggcgccaagggcggctccgtgtcccaggagttttagagagctggaggcggccagacagcaacggtccaggcatcgtcatccactccaaccgtccactccaaccaaaaaaaaaaacaaaccattggtgttattcaacaccacctaccatatcggttcatgtggcagctctcagtcgctaacatggcggccctttgcataccccccatcaattatatatgcccaac

SEQ ID NO: 2074 - DNA, 323 bp, Chlorella sorokiniana
  Clone ID: LIB3602-015-Q6-K1-C7
cacacggtcacggtgcccagcatgctcacggcagatgatatggcctatggcggcaagtgaggctgctggactgcgcaccctttgaacgagcggcacctaacgtgtgttagccgaacaattttgccgacgaaccgtcaacagaataagccaaccaaacagaacaacggcctgccatctggagagcgccagcgagtgagcgagcaaccgcctctgcctgctgccttttgcaaccccgtgcgcatcgttcattcattatctgcgtgtgtgactgcgtttgatccgcctctaaacctctgaaccagcgagtgtaagccagttggagc

SEQ ID NO: 2075 - DNA, 80 bp, Chlorella sorokiniana
  Clone ID: LIB3602-015-Q6-K1-C8
gattcttttcgccgcagagcaagtggcgatccacccgccctttcttttgtgccctgcttgttcccggcagcacatgcaag

SEQ ID NO: 2076 - DNA, 452 bp, Chlorella sorokiniana
  unsure (1)..(452): unsure at all n locations; Clone ID: LIB3602-015-Q6-K1-C9
ccgagagcggttacatgggtcaaacatcaatggcattgagcaatcaaagtacagtgaggggcagggggggctctccatctctcagcatgccgaggggcccttggacggtccgcccggccggcagcagcgagcgattgcaactgataaatgggtggatcactcnctaagggcaggggccgcaggcgccagctcagccgcaaacagctcgctgtacgccgtcagggacttgacaccctcaacgggggccaggtcgctgaggctggtggggctgccgctgttggccagcaggccgccgttcacagccgccgcggccgacaccgcctgaatgcccgccacaatcagcgtcccctggctgccctcgccggtcttgtcggcgctgctgcccgccacgtagctcttaggctccacagcaaaaatgttggtctggcccgcaaagtcgttctcggtgaaac

SEQ ID NO: 2077 - DNA, 575 bp, Chlorella sorokiniana
  Clone ID: LIB3602-015-Q6-K1-D1
ctcgtcatccccgatgaggtgtctatcgaggtcaaggcgcggcgggttcgcgtgaagggccctcgcggcacgctgcagcgcgacttcaagcacctggctgtggacatgttcctgactgaggaggagggcaagaaggtgctcaaggtggactgccactttggcaagcgcaagagcctggcgtccatccgcacctgcacctcgcacgtgcagaacatgatcaccggcgtgaccaagggctacgagtacaagatgcgcctggtgtacgcccatttccccatcaacatcaacatcgagaacaagggcggcaaggtggagatccgcaacttcctgggcgagaagattgtgcgcgtggtggacatgctgccgggcgtgacctgcgagcgcagcgccgccgtcaaggacgagctgatcctgaccggcaacgacatcgagctggtgtcccgcagcagcgcgctgatccaccagaagtgcctggtgaagaagaaggacatccgcaagttcctggacggcatctacctcagcgagcgcggcaccctggtgaagcccgagtaagcggagcccgcacgttgcagtag

SEQ ID NO: 2078 - DNA, 557 bp, Chlorella sorokiniana
  unsure (1)..(557): unsure at all n locations; Clone ID: LIB3602-015-Q6-K1-D10
gagcgagctgtcgggcgtggcgcagctcatgtccgagtccaaggacttttctaccttcatcaccgaccccagcgtgccgcgcaacaccaagctggacggactggacgccgtgctctccaagatgggcgccagcgagatcaccaagaactttgtgggcctgctgtcggccaacaaccgtctggtggagctgggcaagattgtgtccaagtttgaggagattgcggcggagcagcgcggcgaggtcaaggcgatggtcaccaccgccgagggcctgagcgcggaggagatcgaggagatcaagaatggcctgaagccgctgctgaagcccgggcagaagctgaccctggaggaggtggtggacccctccatcatcggcggcgtcatcctgtccctgggcgaccggtacgtggacatgagcatcctggcgcgcgtgaagaagctccagcagattgtgcgcgacgccgtctaagcgtcccccctgctgcccactgcgcgcctcgtgcgccgncgcatcggcggcgagcgcgctagcagctgccgctgtgtgaccacagctg

SEQ ID NO: 2079 - DNA, 555 bp, Chlorella sorokiniana
  Clone ID: LIB3602-015-Q6-K1-D11
ggcgaggctgtgtggttcaaggctggcgcccagatcttccaggagggcggcctcgactacctgggcaaccccaacctggtgcacgctcagtccatcgtggccatcctgctgacccaggttgtgctcatgggcctgattgagggctaccgcgtcaacggcggcccggccggcgaggtggtggaccccatctaccccggtgaggcctttgaccccctgggcctggctgacgaccccgacaccctggctgagctcaaggtgaaggagatcaagaacggccgcctcgccatggtgtccatgtttggcttcttcatccaggccattgtgaccggcaagggccccgtgcagaacctgtccgaccacctggcctccccctccaccgacaacttctactccctgtacgccaagaccctggcgtaagcggcctgcacttgctcctgcttgagcctcgactggcggcgggcgtgaccctgtggcagtgcgctcccgcttgcgcccgctgcctgacttgacttcagctccactgttgcaccgaggggatggtgtaacatgtatgct

SEQ ID NO: 2080 - DNA, 190 bp, Chlorella sorokiniana
  Clone ID: LIB3602-015-Q6-K1-D12
gcgagcggccgctcgcgatctagaactagtcccacgcgtccgcaagccccaagtttttgtgccccctgccccggatgccctgcccatctgtcgtggtgtcccgacattccggatgcaccccgcccctgatccccactccccatctgtccatcccccctccatcccctttgcgctgtaactaagtagtggt

SEQ ID NO: 2081 - DNA, 521 bp, Chlorella sorokiniana
  Clone ID: LIB3602-015-Q6-K1-D2
ggctaccacaacgcctacaaggagtaccgcaacaccaccctgaacggcgctgtggagcagatgtaccaggagatgggcagccgccaccgcgtgcgctccccctgcatccagatcatcaagaccgccacgctcacggcgtcccagtgcaagcgcgcggccacgcagcagctgcacgacagcaagatcagcttcccgctggcgcgcaaggtgctgcgcccctcgtcccgcaagttccgcaccaccttcaaggcggtgcgccccaacgtggccatctactgagcgcctcgccccaaggcggctcgcggccacactggcggcagcagcggcggcggcggcgacccagcttgtgctctggagcggcgccgctgaggaggagaaggctgcccggccggcgggcggccgccgcaggagtgcgcggcggcgccgcaagcggcagccggggagcggcggcagtgcgccccgcccccgccctgtagcccggttgggtgcaaggctgcaggcgcgtgtaaacacccgctagc

SEQ ID NO: 2082 - DNA, 559 bp, Chlorella sorokiniana
  Clone ID: LIB3602-015-Q6-K1-D4
cggacgcgtgggccccatcgtctatctcgtgcccggcggcaacgctgctcagaactccacgcttcccatgctgatgccgccccgctccggctccaacctggtgttctccggcacgttccgcccgagcgacgtgggcgctcccctgaacggcacgacgatgacggagctgatcgacgcgtttgtgaccagcggcgcctatgtgaacatccacaccaccacctacccggccggagaggtccgcggtcagatcgagtggcaggcgtgagcgaccaccctgcccggcgcatgcgtcatccaggcgcaagccttcagcgcgcctcgtccactggagccatcgtacggttagcccctgtgtgtgacagggtgccccatggccgggcaggccacgatggtcgcccatgcacaggctgctgtggctcctgatgtgtttcttttccacctgctcccaagccgcttttgattcgttcgctatctgtctgcaagataagtccggcctaatttgtgttgcgtccctcgcttccagcccggtcaatccagcccattgttgatttcaactacc

SEQ ID NO: 2083 - DNA, 499 bp, Chlorella sorokiniana
  unsure (1)..(499): unsure at all n locations; Clone ID: LIB3602-015-Q6-K1-D5
naaaaaaaaaaaaaaaaaaaaaaaaaaaaaaaaaaaaaaatttattttaaaaaaaaaaaaaaaataaagtgggcggagataaaactaaaataacgtgggggccctcgttttcaaattccagcctctcgtccccgtcatgggcccgcctttgctctaccctcgtttccccataactcaatcttatttgggccggtgtctttaataccctctggacaggcctatccctccctttgcctatcttaaaaaccttgcatcctaaccccttttcacccgttggcgataaacaaaagaggcctgtaccttttgccctttcaaacattttttaaacctgactttcaaatgggcccccccctttgccagcccattaacccccccctttttggggcttccccctaccgttactttttctttttccagctccttagccccccttcttttccattgcttcccttcctggttccccacattggccggttttccccgtgaccccataaaacgg

SEQ ID NO: 2084 - DNA, 112 bp, Chlorella sorokiniana
  Clone ID: LIB3602-015-Q6-K1-D6
tggggcttgcatgtcgccaaccgacccgtgcgcccccatgcctctggctgcgcacctgctttcattcgaatggttttgtctgcacaagcctgatttgtaacctggatcatgc

SEQ ID NO: 2085 - DNA, 468 bp, Chlorella sorokiniana
  Clone ID: LIB3602-015-Q6-K1-D7
tgttggacattggggggtgaacactgctagacgatgcctgatggatgcgtgattgagcggcgtattgaaagctgaaagcgtttggcaaacagctccccgtggcgcgcaggggtgtggtcgccgcggcacgtgcttgtgtcgcccaggcctaagctcaatcattggcctaagtggtccaatctcgcaacctactctgatcacagatctgtggctttctgttctcttctaactgcagcgggaaggtgcctgagacggtggaggggcgcgaggggtggcgcgactgagatttgagtggacttcgagcgagaggagcgcacccctgctgaagtaaagacacaggtcaaatgcgccacctgccctgtatcgtatgtttcttctttgtatgctgcttgatgcttgcatgagcactctagcaaacgccctgcttgattgtcccaggccagcccagcaagcccagtttgatgccac

SEQ ID NO: 2086 - DNA, 544 bp, Chlorella sorokiniana
  Clone ID: LIB3602-015-Q6-K1-D8
gcggcacgctgcagcgcgacttcaagcacctggctgtggacatgttcctgactgaggaggagggcaagaaggtgctcaaggtggactgccactttggcaagcgcaagagcctggcgtccatccgcacctgcacctcgcacgtgcagaacatgatcaccggcgtgaccaagggctacgagtacaagatgcgcctggtgtacgcccatttccccatcaacatcaacatcgagaacaagggcggcaaggtggagatccgcaacttcctgggcgagaagattgtgcgcgtggtggacatgctgccgggcgtgacctgcgagcgcagcgccgccgtcaaggacgagctgatcctgaccggcaacgacatcgagctggtgtcccgcagcagcgcgctgatccaccagaagtgcctggtgaagaagaaggacatccgcaagttcctggacggcatctacctcagcgagcgcggcaccctggtgaagcccgagtaagcggagcccgcacgttgcagtagaggtggcggcacgagcgcagcagtgcgcagcgc

SEQ ID NO: 2087 - DNA, 474 bp, Chlorella sorokiniana
  Clone ID: LIB3602-015-Q6-K1-D9
tctgcacccttcagcgctactcaatgctcctggcttttttcatgttcctgactgaagacgagggcaagaaggttctcaaggtggactgccgactttccaagcgcaagagcctgtcgttcatccgcacctgcaccttgcacgtgcaaaacatgatcaccgtcatgaccaagggctacgcatacaagatgcgcactgtgtacacccatctgcccatcaacatcaacatctaaaacaagggcgaaaaggcgtagatccgtaacttcctgcgcgagaagattgcgctcgatatgtacatgctctcggacctaacctgctagcgcactgccgacgtcaagaaccagctaatcctcgaccagctacgacatctagctggtgtccctcatcatcgctctgatccaccagaattacctctttaagaaaaacgacattcgaatgttccaggacagcatatacctcaccgagcgctgcaccctg

SEQ ID NO: 2088 - DNA, 547 bp, Chlorella sorokiniana
  unsure (1)..(547): unsure at all n locations; Clone ID: LIB3602-015-Q6-K1-E1
ccaacgcgtccgttttgaanaatctaaaggacctgaaatttgattttaaacaaaaaaaaaaaaaaaaaaggagaggaaaaaaaaaaaaaagggggcgggggctgtccactataaaagatcaaggcttcgtcccgccgacttacaacgtcatatatggtgaaacgtaaaaccaaaatacaggccattggccgacaacttaaaacctggaaaaaccaaaaacttacccaactcaaaccttaagcgcctcactccccatcccccatttgccatctgagcaaaaaggcaaaagcccatcgcccttcccaataccaaacaattataaatgctaaatgggaaaaggcatgcgccttataatgaagaattaagcgcggggggtttatgggtaacgcgaactttaacctttacaattccaaaccccccagaccccgaactttgtgctttttctctttcctcactggccacgtttttcccctttacccttaaaactctaaactgcgtgcacccttaaggtttactgtttaacggtacacggaccctaaaaaacaaa

SEQ ID NO: 2089 - DNA, 576 bp, Chlorella sorokiniana
  Clone ID: LIB3602-015-Q6-K1-E10
cccggccgccgggctgccaagcccgctcctgcggctgccccggctgccaaccagtttggttctgcctccgacggccctgctgccgacaacaagaccctgcttgtgggcggcgccgtggctgctgtggccatcgccgcggtggctgcttccgccaaccagggcggcgcagagggcgcaaccgcgggcgcacccgccgctgcagcgcctgctgcgcccgccgcacccgccgctgccggcggcagccagccggagctggacaacgtggccgaggcacgcgcctggatcgccgcctggcgcgccaagcaacagaagtgaggcggccggccctgctgcaggggcaacaacagccggaagcagtcgacagcgagcagcatctgagcagcagcagtctgctgttgctgctcacactcaaaggctgccagcttagctcctcactgtgttgaccccacttcggctttcgtggccccaacccgaaccccttgtctgaattgcgcctcccagcaggcgccctgcactgcattatgtatcgccctccccctgtttgtatgttgccctattctgcgattgctgatgact

SEQ ID NO: 2090 - DNA, 566 bp, Chlorella sorokiniana
  Clone ID: LIB3602-015-Q6-K1-E11
gcggtgggaggaggtgaaaggagagccgcagcaggcgcaggcggtgctgtcgtggggcggcccccctgtgcgggccaccttcacattcgaccgctggggtcgcgtggcgcgctgcagctcccacgacttcttgcggcgcctgccggacggcagctttgagcagggggaatggcaggtggcgtactcgggccacatgctgtttgggctcagcccgcagggccccgtcatgcaagaggagattgccacacacgccggcgtgtttgtgcccacaaatgtggaggcagcctgggtcatgccagacagcagccgctgggtgtatgcacagatgacggtcagcaaggtgactgccagcatttgatctgcatttcgaggcgctgtgcagcgggcgggctgctcgaccgccgtgtccacgcccttccagccacgcagcggcttgcagcacacagctgcttgcgtaagcgagggtttcaggtgccggctggccagctagggggcaggcgtgccccctgttcgcaatcgatgctattctgctttcatgcagctacattttcggtttgctccctttt

SEQ ID NO: 2091 - DNA, 258 bp, Chlorella sorokiniana
  Clone ID: LIB3602-015-Q6-K1-E12
cggacgcgtggggccgcgcccgccagtgctcccgcctgcctgccgcaaacggcagccctcccaaactccgctcaggagctgtttgccctccaccgtagccacgtggtggagctgccagcctccacgccctgatttcttctcgattcactgccagccgagactgattttggcttcgccctgcctcgctcgcgccgcgggctcccccctattgtcgccctgccccccttgtacagcctcccttgtaagcactgcctgttt

SEQ ID NO: 2092 - DNA, 161 bp, Chlorella sorokiniana
  Clone ID: LIB3602-015-Q6-K1-E2
gcctgctgttgctcggcacgccacagcaaccagcggctgtgcggcacacccagcaagaccagcgagcgtgtaagacgagcgaactgccaatcggcagcggcgggccccgcctcgccgcgcgtttttgtttgatgcgaactgccatgtattcaccaggatgt

SEQ ID NO: 2093 - DNA, 530 bp, Chlorella sorokiniana
  Clone ID: LIB3602-015-Q6-K1-E3
cggacgcgtgggaaaaaaaaaaaaaaaaaaaaaaaaaatataatttaaaaaaaaaaaaaaaaaaaaaaagggggaggcaatatttaactgtccgggggtggcaacggtccccggctccgcaatcgtttttttttggggtcccctgctttactttctcctgcctgccttaaagctccggttaaagagcaaaattgcttgctgcgccacaacctaatgcttaacaaaatcatcacgacttcctccacggacgcaatgccccttatgtccaaccttattcaccttggccaaccgtcgtccaccctgctgatagagggtctggcaaccttcatcttgccctaaagctcctgctggactgtggttcccctcctggcatctcatacagttggccggactcctagcatcccttttttaaacctcctttcctccctttctaactctcgggacgtaacccggtcgaccgggcctacaagaagcttctcacatgtgacatctcacacacccacacccatctcttctgaccttgcatactc

SEQ ID NO: 2094 - DNA, 437 bp, Chlorella sorokiniana
  unsure (1)..(437): unsure at all n locations; Clone ID: LIB3602-015-Q6-K1-E4
taaaaaaaaaaaaaaaaaaaaaaaaaaaaaaaaanntggttttttattggttgacaaaaaaaaaaaaaggggagggcaattctcaatacatgcgacgtcatagcttcttcttaggtgaaacttaaatttctgttcttggccgtggggcttcctttttagggactcggatttccactcccttgtcctgcattaatatcctttttttttatgtcacctaaattaaaattaaggggcggcgaattaaccccgcgctatatcgaataacccctgtttttccaaacttaattgcacttgggacactccctgtttttacacattgacgtcattngtaagtgggggctacccgcacccttttccaaacatttgccagcccaatagggcaattgctctcccccttttatcggtactttaggcggcgggggtggggtttttccccc

SEQ ID NO: 2095 - DNA, 268 bp, Chlorella sorokiniana
  Clone ID: LIB3602-015-Q6-K1-E5
gaccccgttagatgtccccctcacagactgacacaccaccaacagcgcgctggtgcacggcggcgtgcggcgccagcggcagcactcggtgctgcagcggcccgccgccaccaaccacactcccaccttcgccgggaggcgccaacgaggctgcttgggagcccctgtggcagcacacacggtgcaggcctctaccaggagcgcttgctctagtcaagcaagtcaagctgttgccctgtgaagagaaaaatggttgtaacagaccgcc

SEQ ID NO: 2096 - DNA, 573 bp, Chlorella sorokiniana
  Clone ID: LIB3602-015-Q6-K1-E6
gcgctggccaggagtacgaagaccctgtgaccagctgcatcaagaggtcgaagtgcgcgtccaagaagttcaagccggtctgcgctcgcaacgccgccactcaggacacctggggaggtttccccaacgattgctacaggaagtgcgccaatgccgcccatgactttggtgtggattgggtgaagggccactactaccgcgtgcccaagtactgcaagaccaagtggctggcctaccccgtggagtgctccacttgctccggctactactaggcaactagctgagcaaggcagggcagcctgaaacaggctcccatgtgccgacgctgctggcggcatgaggcacagcaccaagaaaggcagctttcaagggcggcgttgtgctggagcaggcatggccgccagtctggagcgccagctacagcacgttgccgcgctcgatggccctgccaaccagcctcgacgcacagctgaagcgctgcaacacacccgtgacaaaccgtgcaacagcagccacacactgcgttgcttgaaccccctttccgtgacccaagacccgatccattccgggatc

SEQ ID NO: 2097 - DNA, 442 bp, Chlorella sorokiniana
  unsure (1)..(442): unsure at all n locations; Clone ID: LIB3602-015-Q6-K1-E7
gtggacatcaaggtcaacgccgcggtgcacaagggcatgccccacaagttctaccacggcaagactggctgcgtgtggaatgtgaccaagcgcgccgtgggcgtggagctgctcaagcaggtcaacgggcggtacatcaagaagcgcatccacgtgcgcatcgagcacgtgacccccagccgctgccacgaggagttcctgcgccgctgcaaggagaacgacgcggcgcggcacgcggccaaggtggagggcaagccgctgccggtgctcaagcgccagcccaagggcccccgcaccgaggccatcatgctggagaacgtgaagatggagaccatcacggccatcccctacgatatcctcaaggagggcgtgctctgagcgtgatcggcggcgacgttccgttgattgcggctgcagcttagtgagatgtaaccccgcngna

SEQ ID NO: 2098 - DNA, 564 bp, Chlorella sorokiniana
  Clone ID: LIB3602-015-Q6-K1-E8
gcgccatgcagccgctggtgcagctgctgcgcacgcctggccgtgtagcgcaggcatgcgcagctgacactctggggaacttgtgcgttatgcagcctgaagcagcggcggccgcaatccagcaggctggcagcgttatggaagctcttgggcagatggcagcggccagcgatgatgagcagttgcgcagggcagccagccgagcaatgcgctgtgtcacccgtgctatggagacagctgcgcagcagcaggcggccagcagtggcagccagccttcagcctctgcagacggcacagccgccaacgacagccaggcagctgggtctgctgaccatggcgaggccgcagctaagccggcccgtgtgtgcgccgctcccagctgcggcgccacaagtggcctcaagcgctgcagcggctgccgtgcagcgcggtactgcagcgaggcctgcagccgtgcgcactggcgggcgcacagggccgagtgccgccgcctgcaggctgagcgggcagcctgccttctcggagaaggggcggcagaagggccgacagaggagcccagcgtgt

SEQ ID NO: 2099 - DNA, 598 bp, Chlorella sorokiniana
  Clone ID: LIB3602-015-Q6-K1-E9
gccggtgggtgtggaccccaacgtctggcgcggcattctgggcttggccgacaagttggatgctccgttggtgattcaggcgtgcgacctgtgcatctatcgccgcctcggcgtgccttatgtgtaggctcagtggctggactggctgctgctggccgacaagctgcggctggagagcaccgttgcttgctgcgccacacctgttgctaaacagctgctcacgactggctccacggacgcaaagcagctcatggcaaagctgagtcagctgggccagccggcgtccgccatgctgatggcggttctggcaaaagccatcatgtcgtcgggctactgcggcactgtggttggcaagctgccctccagtgtaggctgctgggctccggaaagcctgttttgaagcatgcatccgaattgcccgtcttgggggacgtaacccggtcgaccgggcctacaagaagcttctcacatctcacatctcacacacccacacccatctctcctgaccttgcatactcagccaacatcccaaccacaacaactgcctggctagcccaatggctctgctggttgtgcacgtcgcgctgttctgcacata

SEQ ID NO: 2100 - DNA, 546 bp, Chlorella sorokiniana
  Clone ID: LIB3602-015-Q6-K1-F1
agaaggcccgcgaggctgtgcgccaggcggagcaggaggagctcaacggcgagggggaggcgggcggccatgcgggcaggcgggaggagcgggtgccgcagtacctgcagccgcaggagcgggagcgctgggactgcgagtccatcctgagccttcggtccaacctggacaaccaccccggacgcatctcggaaccgcgcagcaaccggcggccgcgtgcagcatcatccgtcgccgccggcgccggcgctgcagcgcagggcatcattcgactggacccccgatcaggcattcccatgggcgtgctgccacggcgcggcgcgggcggcctgcctgaggcggcggctggtgcgcagggcggcgagggggaggaggaggaggcggcaggggcggcggcggcgcccgagctgccactggagcggcgcaagggcgagagtgcggaggagaagaaggctcgcaaggcagcggtgaagggggccaagcgggcagcgagggagcagaagaaggagctcaagtcgctgttcaaggaggccagcgtggcggcac

SEQ ID NO: 2101 - DNA, 232 bp, Chlorella sorokiniana
  Clone ID: LIB3602-015-Q6-K1-F10
gcacgttgacgccccacagccctgggcaggttgagggcattgggttggctgccgccccgggcgaggcgcgatgcgcagtttaccccttgacagttctctaattctgcagctcgggcagaccctcttgttctgcacgtctttcacatttacatccacttaatccctctgtgtatttcatggcgtgcatcaatcagccaagcggcaaccacgccgctgtcagtaagtcaacccc

SEQ ID NO: 2102 - DNA, 510 bp, Chlorella sorokiniana
  Clone ID: LIB3602-015-Q6-K1-F11
gcaggagatttggaggaaggagtccccacctttgtcgctccgccggccgccagggcggagcgctgcgttggtaccaccccgcccttgccgcccccgctgtgcgtggggggcagggcagcaagccttgtcgccgctcggcttgtgtaagcttggaaaacccaaaataaaaaaaaaaaaaaaaaaaaaaaaaaaaaaaaaaaaaaaaaaaaaaaaaaataaaaaaaaaaaaaaacaaaaaaaaaaaaaaaaaaaaaaaaaaaaaaaaaaaaaaaaaaaaaaaaaaaaaaaaaaaaggggggggcctttttaaagaatcaaaatttacttccccgtgtttgcaagataaaattttttttatggggcccccaaaataaaattccggggccggggtttaaaaacgtgtgaatgggaaaaaccctgggtttcccaaattaaatggcttggaagaaaatccccttttccccagtgggggtaaaacaaaaaaggccccccccaatcccctttccaaaa

SEQ ID NO: 2103 - DNA, 509 bp, Chlorella sorokiniana
  Clone ID: LIB3602-015-Q6-K1-F12
gacttggcttgttacatgccattgttctccacacattaaatgtttgccactctctgcagagctgccggtacacatagttgctacaaacacagtgttattatcagcatgaaataggaggaaggggggacgagaaggacacacctcttggaagggaagtaactatgatactagcgtagtacaaaagtgtgcaacaaaaacagattgcttattggagtttcttggtaggcagcaagactgtgccgcggacaggcaggtggttcgccgcctgctgcattgggccccgccggccaaaaccaacacgagtcggcaacattcgtgctgcttttggtggcaggggcaccagagctgcacactgcttgcttgtggagcctggcaggctgcctgcaagggcctgccttccgccccgctgctgaggctcagcggcgggacttgctgctggatgccccagagggcttgaggcccagcatcttctgcaccttgtgcatcgggttgcgcttcttcttcttggg

SEQ ID NO: 2104 - DNA, 487 bp, Chlorella sorokiniana
  Clone ID: LIB3602-015-Q6-K1-F2
gcccggaggcaggctggggctggggcacgtgcagcaaggacgggctgcggccgcgctgaagccgagcgcagctgcggctggtacctctgcggccgccccaccagcccagcctaccgccagaaacctccacaactctcaccaccccgattgattgtgctgcctgtctgtcctgctcactgccggagccgccacgccttgcccgccgcccagtgcggtgcggtctggaggcgtgcggccaggtaggctccctgtgacattgttttgtgcttgatgagacgccggcgcccgccgccctttgtccgcccgtgctccttttgtgccatgtctctgctgcaggcggcgcgccgcgcgcccgccgtatttctgtgctgcccattagcatcacccggttgctgccatttcatgatgcaacgccctgaagaacacgcccttaccaaaccaaaaccaacccgccgcccgctgttgtgcctctgatgtaatgcacacg

SEQ ID NO: 2105 - DNA, 282 bp, Chlorella sorokiniana
  unsure (1)..(282): unsure at all n locations; Clone ID: LIB3602-015-Q6-K1-F4
cggctcgaccgacgcgtcccgcagactcgtggggccacagccctcttcacngttgagctgtctgccgcaaacggcagccctnccgagcggcgctcatgagcgtgttcgcgcctgcagttctctaattctgcagctcgggcagaccctctcgttctgcacgtctttcacatatacatccactagactgattttggcttcgccctgcctcgctcgcgccgcgggctcccccctattgtcgccctgccccccttgtacagcctaccttgtaagcactgcctgttt

SEQ ID NO: 2106 - DNA, 319 bp, Chlorella sorokiniana
  Clone ID: LIB3602-015-Q6-K1-F5
gctgggcggccactgctcggctccaattcgagggccaatggtcagccggctttatgggtctaggattggcaggcagatgagtctgtgatggccccacgctgacggcgggtcggccggcacccctgagcagcctgtgatgggcagcctcgaaggccagcttggtccccgtgctgccggcttgctcgcccgcgcctcagcaccctggagagattttgccacgtgcacttgccccaccccgagaagaaacaattttgcttgcattgactgctgcgattcatcacgtctggctatggtatgcgtattgtaatgtgtcgaccca

SEQ ID NO: 2107 - DNA, 597 bp, Chlorella sorokiniana
  Clone ID: LIB3602-015-Q6-K1-F6
aggccatcctggcggaggaggaccgtgtggtggtgatccgcttcggccacgactacgatgagacgtgcatgcagatggacgagatcctggcgggcacggcggagcgcatgaagaactttgcggtcatctacttggtcgacatctccgaggtgcccgacttcaacgccatgtacgagctgtacgacccctgcaccgtcatgttcttcttccgcaacaagcacatcatgatcgatctgggcacgggcaacaacaacaagatcaactgggccatgaacgacaagcaggagttcatcgacattgtggagacggtgtatcgcggcgcacgcaaggggcgaggtctggtggtgtcgcccaaggattatagtacgaaatataggtactaaccttttcatcacccgcacctgcagcgctggccggcagtgcagcctcgcggccagctggcgggggctgcactgcagcaaacttctcgcactcacccaacgctggcgttgctcccgccttgtttcgacttgaccttcttcctcttgacctcctgaaccaaccccgcttgtacaaaactatttgattgcattctgccccgtgtacccttttcggcct

SEQ ID NO: 2108 - DNA, 484 bp, Chlorella sorokiniana
  unsure (1)..(484): unsure at all n locations; Clone ID: LIB3602-015-Q6-K1-F7
ctcgattcggtgaggagcaccaacgttatgccgaaaatgccatattaagccagcggcgcgcagaacgcgcatgccctgcgccccgcagcttgccagcacaaccagaaagcctgttttccctctttgtttctgctgtttcactacacgcacgctgtatctgcgctgtacactcctttgcgcccgttctctctgcatgcaattttcagttggaagcatgaggcacccctgttgttccacctttgtttgtttctgccgcccgggtgcgctgctgtacccctgagcatgccggccgcccttgctgcccgcctgccccttccctcggccctcagcccgcccattcacgcgacattcttcatctcaaagctcatcctcaccgctctgcaagcattataattgtaagctctggcatggcaaanaaaaaaaaaaaaaaaaaacaaataaaaaaagctgaactaaaaaaaaaataataaaaataacacaaaac

SEQ ID NO: 2109 - DNA, 209 bp, Chlorella sorokiniana
  Clone ID: LIB3602-015-Q6-K1-F8
atcgattccttgaggagcaccaactttttgccgtttttgtcttattaagccagcaccacgcagggcgcgcattctttgagccaggcaggtcgccaacacaaccagaaagcctagttttcctctctgtttctgctgtttcactacactcacgctgtatattcgcatgtacactccttagctcccgtcctctctgcatgcaattttcattt

SEQ ID NO: 2110 - DNA, 160 bp, Chlorella sorokiniana
  Clone ID: LIB3602-015-Q6-K1-F9
tatcagccgtcttctactaatactacgtgtttcactgcagttcagaccacctacagtacagtttacatggtgcaagaatgaatgtctgtgcagggcatgcacacaaatgaatcatagagcccagctgcagtgcaaggcctggcatgtaatactagatcag

SEQ ID NO: 2111 - DNA, 549 bp, Chlorella sorokiniana
  Clone ID: LIB3602-015-Q6-K1-G11
accagcgggcgggtgcttacggcgctccagaaggcgcgtgcggtgcgctgctgcatgagcgacgcaggcagcagcggccagcgcaccaccgtctatccagacctggttgccatcactagggagattctgtaccaccacagcctgctggagccagaggagtgacctgcacctgctgagtacggtacctgcacagcctgctggagactacgtagcgaaatgcttcaagtttagtaccaccgcaaatgctttccctgtagcaggagcagtgacgtgttttcacacgccggctgctgcactgtttgatgtttcacccaacttgctctttgccctggcttgagcagccaacgcatggttttactgcttttcctttttgcctggcttaagcagccaacacataaatgtactgctttccctttttgcctggctccaggagccaacacatgactatactgcttgttcagaatactgttaagctgtgccgttgctgtgcaggaaggttcacttgtgttttcatatcggccaaaccacggcagtgcgttttgcaatctc

SEQ ID NO: 2112 - DNA, 223 bp, Chlorella sorokiniana
  Clone ID: LIB3602-015-Q6-K1-G12
attcgattctgttgggcggcctgcccccgggcctgccccctcgcctcgcttgcgtctgtattgtttcctctctcccttgctccaccctgtgtgcgctcgccacctcatttggttggtcgtcacccccctgatttggtgcacccatgcattgcccagtcgctccaccactgccccgtacgttgcgagaagagaacccccctctcccgtccctccccccaccccc

SEQ ID NO: 2113 - DNA, 328 bp, Chlorella sorokiniana
  Clone ID: LIB3602-015-Q6-K1-G2
gaaatggtccaagggcaagctgaaggagaaggtgaacaacctggtcctcttcgacaaggccacctatgagaagctgctcactgaggtgcccaagtacaagatgatcactccctcggtgctgtccgaccgcctgcggatcaacggcagcctggcgcgcgccgccatcaaggagctgctgggcaaggggctgattaaggaggtggccaagagccgcgcgcagcagatttacacccgcgcgacggcagccgccagctaagcagccacccagcagtttggcagcatgctagtgcactcgttgtgcttgccaatctggtaacaggtccctcgc

SEQ ID NO: 2114 - DNA, 442 bp, Chlorella sorokiniana
  Clone ID: LIB3602-015-Q6-K1-G3
ggcagcccggcacggtccgccatgcgccgccatccagttgccactagttagccacagcaacgaatgtcgcccccaattacctgccagcccgccgcccaacaatgggcgcatggcctgccctttgctactcgctcttgctccactgcccccagttttgtgcaacccttccgtattgccaccaccctcactgccttcctctgtccctctgtcttttttgcgcctgacagacaatctggcacctggccctgctgccaagtgccccgcagcgcgacccctccagccctaccaagcccgactgccaaaccaatatctaacggtgctctctcactcctcgcccttgcttgcccaccactctcttgccctgcccgccgattgtttgcctgctgctgcgggtcaccttgacgcattgttgttggaggggcgcagtaatgatgccgacgtc

SEQ ID NO: 2115 - DNA, 276 bp, Chlorella sorokiniana
  unsure (1)..(276): unsure at all n locations; Clone ID: LIB3602-015-Q6-K1-G4
cttttggatgctccctccctcctgcactgtgcctgccgctgatgagcccgccccccaaggctcctgcccatttcgtttgcatgcaagcaatcacccgtgcctccctttgtaccatcccccgctgcgctttgttgtgcccccccttgaggcgttccatccagcccgcagcccatgctgttttcgtcccacctttctgcgtgccccgctttcccctgctgcctgcaatgcgacaccgcaattccccttttacaggtcctcgtgtaactgagcgctngt

SEQ ID NO: 2116 - DNA, 201 bp, Chlorella sorokiniana
  Clone ID: LIB3602-015-Q6-K1-G5
ccgcggtctccaacttcgactccatccgccgctaagctatgcggactggtgtaccgcaccccgagaagagaatcaaccccttgcttgctaggccctgcttagagtttttgctgctcagcgctggggcgccggcgggacgccctatgtcggacaacacctgtgtgcactaaagaggaattttatcctgtaacttcccggccc

SEQ ID NO: 2117 - DNA, 143 bp, Chlorella sorokiniana
  Clone ID: LIB3602-015-Q6-K1-G6
cagcaaggcggttgcacgttgatgtttctctggcaccctcggtttgatttctgcccatctgatcctctgcaagcctgcccgcgtgtgtgcttccgcaatcacatttgatctgaccaccgccgctgtgaacgtttgcaagcggg

SEQ ID NO: 2118 - DNA, 571 bp, Chlorella sorokiniana
  Clone ID: LIB3602-015-Q6-K1-G7
tgtgtccttcatgtttgagtcgccagaccaggggcgtgtgtctgagtttgagctgaagctgatggacataaccagcgagaacctgggtatcccagacactgagtacagcgccacggtcagcatgccctccagcgagttccagcggataatgaaggacctgggcagcatcggcgacacggtggagctgagcgtgaccaaggagggcatcaagttcagcaccagcggcgacatcggcagcgcaaacgtgatctgtcgccagaccaaccacgtggacaagaaggaggagcccacgcacatcgacatgaacgagccggtggccctcacctttgcgctgcgctacctgatcaacttcactaaggcaaccagcctgtcgcccagcgtggtcatcaagctgtccaaggagctgcccgtggttgtggagtacaagtgcgcagacatgggctacgtgcggtactacctcgcgccaaagatcgaggatgaggaggagatgggcgaatgagcagccgctatgccaaccaacagcggttcctgctggcagatcaaccattcacttcgtggtgcgccggcaagc

SEQ ID NO: 2119 - DNA, 581 bp, Chlorella sorokiniana
  Clone ID: LIB3602-015-Q6-K1-G8
ggtgcttctggaggtggggcgccagctgggcctgccagaggcggagctgcaggcggcgctgggcggtgatgagctggacggggagctgctcgcggaggtgcagcaggacgatgcggtggccaagtcgcaactgcgtgtgtcgggcgtgcccttcttcctcatccagagtggggacagcaaggcctacgcgctctcaggtgcacgcagcatgttggggggagcatggtctttgggcagagcagcagtacagctgtgtgtgctgtgcctttaagtttctgtctagtggccagatggtaagattgtgacagcatgcagcagcagcactctggcatgaaggcacccccttgtgcccaccgctctcactttgcaggcgcacagccgcccgaagtgttccaagaggcagtgcagcgggcgttgaaggaggcaggagcaggcagcgcgagcggcacagccggcagtgagggcgcagccaacggcggctcgtgcacacgcgagggctgcacctgagcggccccatctgttgagtgcacattgccaggcgtgcgcgtgcgagtgcgggcagttgagacgagccatgtaca

SEQ ID NO: 2120 - DNA, 565 bp, Chlorella sorokiniana
  Clone ID: LIB3602-015-Q6-K1-G9
ctgctgcagaacaacggcgccgctgacttcggcgaggcggccgtctggttcaaagccggcgcttcgatcttcaacgaggacggcctgaactacctgggcaacccctccctgatccacgcccagtccatcgtggctgtgctgctgacccagctggtgatcatgggcgccgccgaggcgtaccgctacagcggcgagggccccgtggagaccagcggcgactccctgtaccccggcggcttcttcgaccccctgggtctggctgacgaccccgacaccctggctgagctgaaggtgaaggagatcaagaacggccgcctcgccatgttctccatgttcggcttcttcgtgcagggcctggtgaccggcaagtcccccctggaaaacctggctgaccaccttgctgagccgtctgtgaacaacggcttcgcgtccgccaccaagttcctgcccctggcctgaacgccgtcgtcaacctggagcgacctgggcatcccatattaacggcggccagccggttttggacaagcacacacaacatatgagattcccaaccttcctgcgcact

SEQ ID NO: 2121 - DNA, 563 bp, Chlorella sorokiniana
  Clone ID: LIB3602-015-Q6-K1-H10
ggctgtgggcctggccactggccagatcaagaccggcgcgccctgccgctccgagcgcctgtccaagtacaaccagctgctgcgcattgaggaggagctgggcgatgccgccgtgtacgccggcgagaactaccgccacatcgccatcgcctaagcgcttcagcgatgagcatccgctgggccgaggcagtgcagcccaggcactgctgctgccactgtgcaagccgcggaactttgccgggcctgagtgcacttgcggtgggcaccgagcaaacccaaacatgaggcacggcggggatgaccagctcctgctagccgcagattgagcagcccgcagcagccgccccgtcgtgcggcggtgcctgatccgtggacagtgcggcgcgcattagcgctcgctgcccgcggcacatgtgccagccatgatctaattctagatttcccttgctgcccgcgtggcgcctgcgtgcaccacggggcctctccctcttgcgcctgcccctgttgactacccaggcgcttcgctttctcccatgccattgctgcgaagacccttttgacac

SEQ ID NO: 2122 - DNA, 249 bp, Chlorella sorokiniana
  Clone ID: LIB3602-015-Q6-K1-H11
gcgaaattgtgcgtgtgttgtgtctcaaaacagcaacctgcctttgcgggccagcccccaatgtgctcgtcgcatcctgagtgtttgtggctgtttcactgcatttcacgccctgctgctgtgattcattcgtccttttgtcctgcgtccctggcctgctgctccagaccggcttgggctccctacccatccttcctgccaacctgtttaataaactgcacccaagaaaaactataccaaaactgaaat

SEQ ID NO: 2123 - DNA, 58 bp, Chlorella sorokiniana
  Clone ID: LIB3602-015-Q6-K1-H12
gggaaccaggccagccagaggaagcagcgccgggtgacctaacctggaggaactcaac

SEQ ID NO: 2124 - DNA, 477 bp, Chlorella sorokiniana
  unsure (1)..(477): unsure at all n locations; Clone ID: LIB3602-015-Q6-K1-H2
ccgnaaaaaaaaaaaaaaaaaanaaaaaaaaaaaaaaaaaatttatttaaaaaaaaaaaaaaaaaaaaaagagggggaaaaaaaaaaaaagagggggggaaaaaaggggccgccccttttaaaggtcccagctttccttccccttccttccaccttaatagtttttttatagggcccccaaaattaatttaactgcccgtgttttaaaaactttcggaacgggaaaacccttggtttacccaaattaattccctttgaaccccttccccttttccccagttgggtaaaaacaaaaaagcccccaccaaatcccctttccaaacatttccccaccttaaatgccaaatggacccccccttttaccgccctttaaacccccggggttttgggggttccccccatgtaaccccttacatttgccagccccttaccccccgttcttttagtttttttcctttctttcctggcccctttccc

SEQ ID NO: 2125 - DNA, 403 bp, Chlorella sorokiniana
  Clone ID: LIB3602-015-Q6-K1-H3
gcgggcccagcgggcatggcggggcaggacatgcagctgctggtgggcgctgtgtgactcttcccattgggttgctataatcgtcattttcaccgctggattggatggcagcactgctcccatctcaaggcgcgctgcctcatgcagttgttacttcaggaccccagacagtcatgacactagttgagcgttttccttctctccctagcgagccgattttcccctactaccgacagccgtattccttctctagattgcttggatccccttgaatgctacgggcgcagctgatcaaccgcagggccaacacctgcgtgtgccgatatcctgcccggcacgcccctccgattaatgaacctcagcgtttgaactgatgacttatcgatgtaaagcacgaccccat

SEQ ID NO: 2126 - DNA, 554 bp, Chlorella sorokiniana
  Clone ID: LIB3602-015-Q6-K1-H4
gtgaccgaggacttggcggtgcgatttggggacaccattggcggcctgctcaacgccacctttggcaacgtggtggagctcatcctgagcattgcggcgctgcagcgggggttgtacacagtggtggccacctccctcatcggttccatcctgtccaacctgctgctggtgctgggcatgtgcttcttctttgggggcctcaaatacaaggagcagcggtttagcacgctggccaacaaggtcagctcctcgctcctcttcctggcctgtatcgcaataatgatcccttccaccgccaaggtggtttacggcccagcaattatcacaaaggacacgctgttccacctcagccacgcaatcgccatcatcttggttggcatttacctggggtacctgctcttccagctgaagacccacgccgactgtttcgagggcgaggaaagcacagagacgccggcgctcagcctcagcggcgcagtggcctgcctgctgtccatcacagttattgtggcagtgtgctcagagtacctgaccggcgcaattgaagcggtgag

SEQ ID NO: 2127 - DNA, 582 bp, Chlorella sorokiniana
  Clone ID: LIB3602-015-Q6-K1-H5
cgtcagcaccgcgcagccctctgaggccgcctacggtgatgccgcccgcgtgttcgccggcaacatcaccaacaagtccggcttcatcccctacgccggcgagggcttcgcgctgctgatccccagcaagtggaacccctccaaggagcaggacttccccggcgtggtgctgcgctatgaggacaacggcgacgccgtgaacaacctggtggtgctggtgcagaaggtgggcaagaacaacatcgacgagctgggcagccccgacaagttcctgcaggacaacgcctacctgttcggcgagtccgcggccttcaccggcgagaccctgtctgagggcggcttcctgcccaacaaggtggccgccgccagtgtgctggacgtgcaggaggcgaccgacaagaagggcaagaagtactacaagtacgaggtgctgacccggtccgccgacggcgatgagggcggccgccaccagctgattgccgccaccgtgtccaacggcaacctgtacctgatcaaggtgcagtgcggcgacaagcgctggttcaagggcgccaagcgggaggccattggcgcctgggactt

SEQ ID NO: 2128 - DNA, 276 bp, Chlorella sorokiniana
  Clone ID: LIB3602-015-Q6-K1-H6
acgagcagcggcaccaggccagccagcggcagcagcgccgggtggcccaggcggcggcgctccggcgggagacgacccgaatgcagcggcttgggcggcagcggcgtttgagaagggcaagatccccgagtcggccccgccggctgtgtactgccgctgaggggtctggctgccagcaatggatgtaagcttgacagttgatactatcctcggaagcctgtcctttgagcttgtgcttgcggctcgggaccgcaactcgtgcaacacgcctggggc

SEQ ID NO: 2129 - DNA, 491 bp, Chlorella sorokiniana
  Clone ID: LIB3602-015-Q6-K1-H7
gccttctgcaagggcaaggagtgccgcaagcacaccatgcacaaggtcactcagtacaagaccggcaaggcgtcgctctacgcgcagggcaagcggcgttacgaccgcaagcagtccggctatggtggccagaccaagcccgtgttccacaagaaggccaagaccaccaagaagattgtgctgcgtctggcctgcaccgtgtgcaaggcccagcacatgcacgccatcaagcgctgcaagcacttcgagatcggcggcgacaagaaagtcaaaggggctatactagtaaaaaaaaggagagcggcaggcggagagcatgaccgagaaatggaggcagcggcgcccgctcaccctgggcggcctgctccccgcccggcgcctcgctttggccgcctctggccactcgtacgcctccttgtccatgcccttgtgcttcctgagctgcccaacctggcatgcaagcagcctggccgtctgtaatgccattggcg

SEQ ID NO: 2130 - DNA, 398 bp, Chlorella sorokiniana
  unsure (1)..(398): unsure at all n locations; Clone ID: LIB3602-015-Q6-K1-H8
gtgcgagggagcgctcgacatgcagcggctcaacgagtggctgtcgacgctgctgcaggagaagggcgccgacatctaccgcagcaagggcatcctgaacatcgcgggcacggatgacaagtttgtgttccacggcgtgcacatgatgctccaattcggcagcagcagggaggggctgggcaagccgtggcagccgggagaaaagcggtacaaccgggtggtcttcattggcaaggacctgaaccgcaaggagctgaacgagggcttccgcagctgcatggcagacgaggcggcagccaatggtggcgagacatgagcgcctggctgctgtgcaatgacctgnggcagcaggcgcggcagcagccgcggcagcaggccaatagtgacggcatgtgata

SEQ ID NO: 2131 - DNA, 571 bp, Chlorella sorokiniana
  Clone ID: LIB3602-015-Q6-K1-H9
cagcggtcggctccctgagcaaggaggagcgcgatcagttggccaaggagtttggcttccggtccattggtgcggagctgccagatgacgtgacgctgcaggacatcatcaagtccatgccggctgaggtgtttgagctgaacatgtggaaggcgtggggtgctgtggcgatcgctgtggcctccttctccctgtcgctctacatcatctccatctgccccgcgccgctgctgcccttcgcgtgggccttctccggcaccgccctgaccgggtggtttgtggtgggccacgactgcggccaccgctcgttctccaagaacaagctggtggaggacattgtgggcaccatcatgttcatgccgctgatctaccccttcgagccctggcggatcaagcacaacgtgcaccacgcacacaccaacaagctggtggaggacacagcctggcaccctgtggagcgcgagaagatggagaagtggagccccgcggagtctgccatctacaagctgttcctgggcaccccgctgaagctgtttgccttcatcggccactgggggatctggcactttga

SEQ ID NO: 2132 - DNA, 416 bp, Chlorella sorokiniana
  unsure (1)..(416): unsure at all n locations; Clone ID: LIB3602-020-Q6-K1-A1
gntgtggtggcncctnncttcatctatttcgntctggtcttgatttcactnnctggtcgcnttgngggttctgctcacaatgtgtggattggaaaaggaggaacctacaccggagagatcagtgcagaacaattggtggacattggtgttcagtgggttattcttggacactctgagcgtaggcatattattggtgaagatgatgagtttattgggaagaaggctgcatatgcattgagccaaaatgttaagcttattgcctgcataggagagctcctggaagagagggaagcanggaaaacttttgatgtatgttttacgcagatgaaagcttttgcagatagtatttcaaactgggccgatgttgtaattgcatatgagcctgtttgggctattggaactggaaaagttgctac

SEQ ID NO: 2133 - DNA, 245 bp, Chlorella sorokiniana
  Clone ID: LIB3602-020-Q6-K1-A10
gtgaccgagcgctacgcctggcgccacttctactggttcctgaccgactctggcattgagtgcctgcgcgagttcctgaacctgccctccgagatcgtgcccgccaccctcaagaagagcacgcgccccctggagcgcgagggcgcgcgcccgccccgccgcgacggccccccccgccggttcggcgaccgcgaaggctaccgctccgagaaagcgggcgccccccgcgagtaccgccccgagtt

SEQ ID NO: 2134 - DNA, 359 bp, Chlorella sorokiniana
  unsure (1)..(359): unsure at all n locations; Clone ID: LIB3602-020-Q6-K1-A11
gcggcaggcctggcgcaatggctcgtaatgggcagaaccgggtgtggactgtcaagagctgcctgcaacctccctgaccccttcatgctttggatgcatcccacccgccttcctcattctgcgtctgccctccctgctgtgcatccagtcgccgcatttctgctgcaccagtgtgcacccaacacgtgcagtctccttcgcctgcctcgcctcatcgattgtgctgccctcagccacctggctcctgctgccgccgtgccaaagtgaatgacaactggtagtcctgccaggccttttgtgattcaggcggaggactttactgtaactaaagcaatctcnnnnnanaaaaannnnnnnna

SEQ ID NO: 2135 - DNA, 394 bp, Chlorella sorokiniana
  Clone ID: LIB3602-020-Q6-K1-A2
cggcttcaggcagaagggcttcatcccgctgtccacctacctgaccaactacaagttgggtgactatgtggacatcaaggtcaacgccgcggtgcacaagggcatgccccacaagttctaccacggcaagactggctgcgtgtggaatgtgaccaagcgcgccgtgggcgtggagctgctcaagcaggtcaacgggcggtacatcaagaagcgcatccacgtgcgcatcgagcacgtgacccccagccgctgccacgaggagttcctgcgccgctgcaaggagaacgacgcggcgcggcacgcggccaaggtggagggcaagccgctgccggtgctcaagcgccagcccaagggcccccgcaccgaggccatcatgctggagaacgtgaagatg

SEQ ID NO: 2136 - DNA, 362 bp, Chlorella sorokiniana
  Clone ID: LIB3602-020-Q6-K1-A3
cacccaccccttcgcattgcaggtcgtggtgctcctgctgcagcacggcccgcagggcagcctggggctcatcctgaaccggcccaccagcctgaagatggggcggggccgcggcggcctgcccatgtccctggacggcatgccgcagctgcgggatgcgtttgcttccagcgtcctctactgcggcggctacaaggcacagcacattgtcacgctgctgcacggccagcggcggctggaaggcgctgttgaggtcacccccggcattttcctgggtgcccacgaggcggcggtggctgaggtcatgaccggcggcctgcagcagaccgatttccgcttctttgcaggctgcctggcctggg

SEQ ID NO: 2137 - DNA, 393 bp, Chlorella sorokiniana
  Clone ID: LIB3602-020-Q6-K1-A4
tgcaagctgacggtgcagaaccgccaggccaaggtcaccgtcatcccctccgcggcagccctggtcatcaaggcgctcaaggagccggcgcgcgaccgcaagaaggagaagaacatcaagcacaacggcaacctgacgctggaggatgtgtatgaggtggcgcgcgtgatgcgcgaccgcagctgcgccgccaccttctcgggcaccgtcaaggagatgctgggcacctgcgtgtccgttggctgcactgtggagcacgaggacccccgcgacatccagaccaagattgacgagggcgaaatcgtgtgccccgaggcgtgagcacgcccgctgcacacaacagcaacggcctaacagcagcagtgtagctgtcatgtaacacactgctgcttg

SEQ ID NO: 2138 - DNA, 77 bp, Chlorella sorokiniana
  unsure (1)..(77): unsure at all n locations; Clone ID: LIB3602-020-Q6-K1-A5
naaaaaaaaaaaaaaaaaaaaaaaaaaaaaaaaaaaaaaaaaaaaaaaaaaaaaaaaaaaaaaaaaaggagggaagg

SEQ ID NO: 2139 - DNA, 422 bp, Chlorella sorokiniana
  Clone ID: LIB3602-020-Q6-K1-A6
cccacgcgtccgcgcatcacagagcagctgttggcagagggcctgctgccgtacatgttcacctgtcactcgtacatcagcgaagggatgggcagcgaggaggaggcggttgcagcagcccgggccctgggagcggaggcggcggcgcgggcggcgcggcaggctcgcattgatgagctgctggctgcggaaggcctgcagcgctttgcgtttttgtgcgagccgtacatcaggcgcggcgagggcagcgaggaggaggctttgggtgctgccagggaggcgggccaggcggaagcagcggcggcggcgcgccgcgaagctgtggcagcggctctgcaggcggaaggtattgccttggatgacgacgtggagcttgcagtggcggtgtaccgctacattgacctggctgccggcacgcttga

SEQ ID NO: 2140 - DNA, 460 bp, Chlorella sorokiniana
  Clone ID: LIB3602-020-Q6-K1-A7
ggagcttgccaagcgcgagtcggccgcaatgagcgcagtgcttacggctcaagatcaagacgagcgcattgctgcgctgcagaagctgcagcaagcacggctggtgaggaggcaggcccaggccaagcagcaggcggagcaggacttcccactgtggccaggcatgcgcagcgtggtgacaacacgcattcttttgaagctgcacattgctgctgcgctggcgcccgggcagagcggggcgcagtaggcggcagcgagtgcccgcagcaccaaggggggcccggcatgcgaggcagcctcagggcccacctgcgtggctttccatctcagcagcgcagtgatgcgcggcactgtttactgattgttagtggcagcaattcttcacatgcgtgattgtttgtttgcttgccatgcgctggccccaggacgcttgactgccagcgcttgttacacctgactg

SEQ ID NO: 2141 - DNA, 199 bp, Chlorella sorokiniana
  unsure (1)..(199): unsure at all n locations; Clone ID: LIB3602-020-Q6-K1-A8
ccggtcgcccacgcgtccgcgcatactgacactaagcagtggagcagcgtcagcccaatgcagccaccagcacaagtggctcatctactggagcgtgtacggcctgctgaccgcngcggaaaagccgctggacaaggtgctggcctgggtgccctactaccagctggccaagctggtgctgctgctgtggctgcagtcg

SEQ ID NO: 2142 - DNA, 102 bp, Chlorella sorokiniana
  unsure (1)..(102): unsure at all n locations; Clone ID: LIB3602-020-Q6-K1-A9
aacgcatgcagcccctgctatgtgtagaaagacagaactcaaannaaaaaaaaaaaaaaaaagaaaagggtaaaaaaaaaaagaggagaaaggaaaacaaag

SEQ ID NO: 2143 - DNA, 381 bp, Chlorella sorokiniana
  Clone ID: LIB3602-020-Q6-K1-B1
cacactttgtgagccactgtatgctgaagctgtggaagagcaggctggcgctgctgtgcatctggcccctgcgtcatccattgaaatttagccatgcactgcactgctgagcaccactgtgccctgcgggccgcccgtacctgacttctctcagccgcactttctgttcacatgcaggcaatgggcctggagggcggcactgacggcgtggtgtccgcggccgacatcaacgcagcctcctttgagcaagcgctgacggcctcgccgccactatttgtggacacataccgacagcgcggcaagcagctgtcttttgcatctgacaaggatgtgagcagcgaagtcaaaacacccgttgactggatgcccatgcccttcatt

SEQ ID NO: 2144 - DNA, 478 bp, Chlorella sorokiniana
  Clone ID: LIB3602-020-Q6-K1-B10
gtcggatgcagccggaggcagcggtggcagccatccagcaggctgggggcgtgcaggacgcgcttgcgaacatggcagcgggcagaggcgatgagaaggtgcgtgaggcggctgtcatggcaatccagcacgtcgattacgctgctgccatagccgccgaacgtcaggctagcggtgccagccaggcttcagctagccctgcagacactgcaaccaccatgcagggcgaggctgtcggttccactgcacagcctgcagcctcaccggcccgcgtgtgcgccgcccccggctgtggtgccacgcgcggcctgaagcgctgcggcggctgcggcacagtgcgctactgcagcgaggcctgcagccgtgcgcactggcgggcgcacaaggtggagtgccgccgcctgcaggcggagcgggcagcggcggcagtggcagcaagggaggcaatggtgccaaacgcatgaattgcgcacatgtt

SEQ ID NO: 2145 - DNA, 519 bp, Chlorella sorokiniana
  Clone ID: LIB3602-020-Q6-K1-B11
cgacgggtaaacgtgtttagcatgccatcttcgccccagctcgtgccccttccaatgctgtaccatcagaccagccatgactgaatgaaatgactgacaccccctttgctgccccagtttgggtccagctggccccagggaagcccaccgttccttgctcctgacgccccatacttctctgtatcatactgtcccttccctttggtagattgatctcctggccttgcctgactcgatagctgttccacgcccttttgaaaaaaaaaaactcaaccatctgtgactccctgccacgcagctgctctttgcccccatgcccttgatgccaatgcgatacgaccgctcctctgcctctcttctgcctgctttggtccaccctggctgcctgcttttctaatcgtgcccacgaagaatgacctgcccacatacgtgcatgcctgagcgatttttttggcaactgtccttccggttttccgtctacaagcatgctgtctgtaccaacaccggcaatgccttaac

SEQ ID NO: 2146 - DNA, 119 bp, Chlorella sorokiniana
  Clone ID: LIB3602-020-Q6-K1-B12
aaaaaaaaaaaaaaaaaaaaaaaaaaaaaaaaaattaaaattaaaaaaaaaaaaaaaaaaaagagggaaggggaaaaattaagaatgagtgaataaaaaaataggggcggttgttttaa

SEQ ID NO: 2147 - DNA, 463 bp, Chlorella sorokiniana
  unsure (1)..(463): unsure at all n locations; Clone ID: LIB3602-020-Q6-K1-B2
ggcgggccgaacgctgtacccgccagacctgttcagggccatgcgcagctaccactacctgcggcccggctgagcagggctttctgctcctacccctgcctagctcactgctcttgctactttgctgctcttttcgcccttggcaatacgctcttggttgtgttggttgtcttcctgcacccctgtccttgctcattgctcttccaaattgctgctcatcctgccctggatgtcgacctgttgccttcccccatgcgcccgacagctgcgcccctcattccttgatcctctagctnttattgcacaacaagccttgcactgcttcttcctacccctgttgattcgtgcatccccttgcatctgtccttccacgccgcttaacctgaccctagccgagccaggctgctgcagccgncgcacgcctggccggccggccccagaggccaaaatttgtcaagtgcat

SEQ ID NO: 2148 - DNA, 94 bp, Chlorella sorokiniana
  unsure (1)..(94): unsure at all n locations; Clone ID: LIB3602-020-Q6-K1-B3
cccccctcctttntttttttttttttttttttttttttttttttttttttttnttttttttttttggggnggggtttttttggggggggggggg

SEQ ID NO: 2149 - DNA, 429 bp, Chlorella sorokiniana
  Clone ID: LIB3602-020-Q6-K1-B4
ggcgtcagcaacgaggtgttggcatccgccaccttctggctggtcatcctggtctgctacatcatcacctttggcatgcgctttgcggagcgcactggtgactgggcattccgcccacaggactcattcatcctgtctgagaaggagcgcaaggacgggctgatgcaaaacctgagcgcgcccacccgcaagcggctggctgcgctgggggcggtgcgtgcgcgcagcagcagccggtcggcctatggcgacctggagcgcggcgatgagctgtcctctggggaggtgcccccgctgcgcgcgcagtacagcggctcaccgcaggccagcggggaggtggcgctggacgagggcggcgacacctttgatagcggcgcgctggagcttgcgcgcggcagccagctgcagcaacgcagcgtgggcggcgtg

SEQ ID NO: 2150 - DNA, 243 bp, Chlorella sorokiniana
  Clone ID: LIB3602-020-Q6-K1-B5
gcgtccgagcagggctacgttgtctatcgcgtgcgcgtgcgccgctttggccgcaagaagcccgtgtccaagggtgttgtgtacggcaagcctgtgcaccagggtgtgacgcagttgaagccgacccgcaacctgcgcaacgttgctgaggagcgggtgggccgcaagtgcggcggcctgcgcgtcctgaactcgtactgggtgaaccaggacgctgtgtacaagtactttgaggtgatcctg

SEQ ID NO: 2151 - DNA, 355 bp, Chlorella sorokiniana
  Clone ID: LIB3602-020-Q6-K1-B6
ttctgcatctggaccaagtctgctgtggagaagctggacaagatcttcggcaccaccgagaccgcgtgcgagcagaagaagggctacaagctgccgcgccacatcatggccaacggcgacctggcccgcctcatcaactctgatgaggatccagtcggtggtcaagccgcagaagaccggcaccgcccgcgccgggctgaagaagaacccgctgagcaacctgggcgcgctgctcaagctcaacccctacgccaaggtggcgcgccgcgccgagctgctggccgcgcagaagggcgccaagtcggccaaggtggaggcggatggcatggccaaggacgccgctcgccccgtggtg

SEQ ID NO: 2152 - DNA, 471 bp, Chlorella sorokiniana
  Clone ID: LIB3602-020-Q6-K1-B7
gcgccacatgttcagccgcggcttcaggcagaagggcttcatcccgctgtccacctacctgaccaactacaagctgggtgactatgtggacatcaaggtcaacgccgcggtgcacaagggcatgccccacaagttctaccacggcaagactggctgcgtgtggaatgtgaccaagcgcgccgtgggcgtggagctgctcaagcaggtcaacgggcggtacatcaagaagcgcatccacgtgcgcatcgagcacgtgacccccagccgctgccacgaggagttcctgcgccgctgcaaggagaacgacgcggcgcggcacgcggccaaggtggagggcaagccgctgccggtgctcaagcgccagcccaagggcccccgcaccgaggccatcatgctggagaacgtgaagatggagaccatcacggccatcccctacgatatcctcaaggagggcgtgctctgagcgtgatc

SEQ ID NO: 2153 - DNA, 302 bp, Chlorella sorokiniana
  Clone ID: LIB3602-020-Q6-K1-B8
gcacgggacatgttacacgtcggttcgtttgagcctatgattggtggtaacggtttgaatgaaaggtctgggggacacaagtagtaggaggggaggcaaaattgtagagcgccctgcgcaatacaacctctgggggacaagggcacagggagagacgctgggcacgggacgctgacaggcgcgggctgggctgcccctcctaagcaaaggcacagtggctgggtgggtccgaggaagaggaatggaagaaggaacatcaaatatcgtcagcattttttgtgggcttgcatggctgaggggca

SEQ ID NO: 2154 - DNA, 449 bp, Chlorella sorokiniana
  unsure (1)..(449): unsure at all n locations; Clone ID: LIB3602-020-Q6-K1-B9
cagctttgactggggactggccgcagagattgacaagctggtggcgctgcggcagcgggcgggcatccaggccaactccaagctggagatcctggccgccgagaaggacatgtacgtggcccgcatcaacggcaacgtgacagtgaagcttggtccccgctatgacatgggcaacctggtgccccgcaaggaggacggctgggcgatggccgcctctggaaaggactntgcagtgtgggagaagaagtgaggtgggcagccgctcaaggctgctgcggtgcggcatgcacgcattgggtgcatgtgctgctgccattttcgctgccgtcagccacagctgtgtgttggaccttcgtgcccctcccttcttgctgctgcctctgctgctgcatgacgcatctncttggctgctacccgtcttcgatgcaaccttcctagctactggtttt

SEQ ID NO: 2155 - DNA, 428 bp, Chlorella sorokiniana
  Clone ID: LIB3602-020-Q6-K1-C10
gctgtccatgcacagtcccctacgatactaccgctttctttcgttcgcctactacgctccgggttccccgtctgcttgcgctcctgttcccccgaacagcatccagctcaaacgaacgaatccccatggcactgccatatctccccccatctcacctggttgcaagcagccgcggcgcgcggcgcggctggctccccacccccgcctgccgcccgcccccagcccctacccatgctactacggctgctgcacgcactactggggcgccacccctgtcaccccttcacttggcgccccgccccccccatttgtcctcgcccttcaatcctcaagaccctagcccaccctgtcttgctgcactgcttacttactaatcgatctttaagggggccagggccttaggccggagcgctcaaacctccccagct

SEQ ID NO: 2156 - DNA, 491 bp, Chlorella sorokiniana
  unsure (1)..(491): unsure at all n locations; Clone ID: LIB3602-020-Q6-K1-C11
ggttgagctggtgatgctcgacccctatgtgcgcaccacgctcacacatgacggcgccggccgcttcagcacgcaggtcaaggtgcccgacacgtatggcgtgttcaagtgggtgctcgactaccggcgcctggggtactcgtacatcgagctgacggagacggtgcccatccggcccttcaagcacaacgagtacgagcgcttcattgtgcaggcctacccctactacgcctccatcgcatccatgatggctggcttcctggcagtgggcgccttcttcctctggacaaaatgaggaggccgcccgggcgagtggcatggcatgaatngagctagcaaggcggcgaggcagcgcgcccgctgtgctgattgtggctgcattcctgcctgccctgtccctgcattgctttttcagtccctttctgttngcttcctctatttgnctcttttgttacactggcagctcactgcanacatgcncgaaganaaaa

SEQ ID NO: 2157 - DNA, 254 bp, Chlorella sorokiniana
  unsure (1)..(254): unsure at all n locations; Clone ID: LIB3602-020-Q6-K1-C4
naaaaaaaaaaaaaaaaaaaaaaaataaaaaaaaaaatttaaattaaaaaaaaaaaaaggggcgggggttgtggagaatcaaagctaacgtccgcgtgcatgcaaagtaatggctgttctatagtgtgacctaaattaaattaactggccgtggaataaaaacgttttgattgggaaaacctaagttaaaccaaatttaatcgctttgaaaaaaatccccttgtaaaaacctggcgtaatccaaaaaaggcccg

SEQ ID NO: 2158 - DNA, 306 bp, Chlorella sorokiniana
  Clone ID: LIB3602-020-Q6-K1-C7
gccagcccctgaggcgaccctggttcccagctgtcgtattgatgcgccagagccgatgagtcatagccttccagcagcctcctgttgtgcccgcccattttgtactccccaattctgggcccctcatttttctgccattttttcagccgtggctgccccttctggtctgtaccaacaccccaccgggcctctgtgtacccccatggcctgtccaccctctttcatttcagcatgctctgcatctgtctgctgcattgcgctgcactgcatgtgcacatgcgattgatctgcttcactgcaacacag

SEQ ID NO: 2159 - DNA, 95 bp, Chlorella sorokiniana
  unsure (1)..(95): unsure at all n locations; Clone ID: LIB3602-020-Q6-K1-C8
gagaagacanancanannanaaaaaaaaaaaaaaaaaaataaaaaaaaaaaaaaaaaaaaaaagaaaaaaaaaaaaaaaaaaagngggggaaggg

SEQ ID NO: 2160 - DNA, 178 bp, Chlorella sorokiniana
  Clone ID: LIB3602-020-Q6-K1-C9
gtcaagtcggtggctgagctgtgcagcctgtgcttggagcgcctgctagccctgggccgcagcatcaactacttttaccgcaggggccgcccagccaacgacggcatcacatggccagccgcccccgaggtcaaaggcctgctgctgcggggccaagcgctgcgcatgctggaagagc

SEQ ID NO: 2161 - DNA, 298 bp, Chlorella sorokiniana
  unsure (1)..(298): unsure at all n locations; Clone ID: LIB3602-020-Q6-K1-D1
gccgtctgtgaacaacggcttcacgtccgccaccaagttcctgcccctggcctgaacgccgtcgtcaacctggagcgacctgtgcatcccatattaacggcggccagccggttttggacaagcacacacaacatatgagattcccaacctccctgcgcactgcttgtaacaatcctggctccctcttgtaccctngacccgcactcgggcgtggatatgtaacgttccgcgggagatagaaatctcgtcataagtgttcatgctatgatcatgttttgcattttccatttcaaggaaa

SEQ ID NO: 2162 - DNA, 425 bp, Chlorella sorokiniana
  unsure (1)..(425): unsure at all n locations; Clone ID: LIB3602-020-Q6-K1-D10
agcaggcggcgcaggcgcgcggcggcgtggtggtgcgcacctcgcccgctcccgccgcccgcgccgccgcccccgccgccaccactggcagcagcagcggcgccgcggcaggcggcaagaagaagcgtcgcagcaagaaggcggccggcggttttgagatgggggtgggccccgcggcagcgcccgtcgcggcgtaagctgtgcggcgctctggcggagtggcggtgtgccatgcagcgcttgccgcccccgccggccctccctgctctnttgcccccttgcgctcacttctcttgtagcttcctttgccgccgcatgtgcgtgctcgctgtatgaacattcacgtttcattgcccataccaacgaatgccgttgcttcccctcagccttcttgaaccctccccccctggccccctgcaccgatt

SEQ ID NO: 2163 - DNA, 117 bp, Chlorella sorokiniana
  Clone ID: LIB3602-020-Q6-K1-D11
cactatttgcacagctgttataagacggggtagtcttcaaagtgtcaaacctcactgcagagggaagagggaaaaaaaaaaagaggggggaaaaaaaaaaaaagggagaaaaaagga

SEQ ID NO: 2164 - DNA, 428 bp, Chlorella sorokiniana
  unsure (1)..(428): unsure at all n locations; Clone ID: LIB3602-020-Q6-K1-D12
caagaaggtgctgcagatggctggcattgaggactgctacacctgctcccgcggctccacccgcaccctgngcaactttgtgaaggccaccttctacgccctggccaacacctacggcttcctcacccccgacctctggcgcgagaccgtgttcaccaagagcccgctgcaggagtactccgacttcctggccaagccggtggttggcaaggcctactgagcggcctccccatgcccgccgccccgcgcgccgcggcggcaggagcagcagcgtaacagcagcgccctgacgcgaggatagatgagagttgggaccccagtggccgctggggcgctgcgctggcagggcaagccggcgccccggcacacacctcacaccctggtgttgcattgggagacccgtgtaacaccgaccgggggacccanna

SEQ ID NO: 2165 - DNA, 412 bp, Chlorella sorokiniana
  Clone ID: LIB3602-020-Q6-K1-D2
cgccaacattgcaacagtggatgagctgctgcggttcatcagcctgcctggccagcccgccagcaagcagcgcctgctgcgtgagctggggcccagcagccaggcgtttgccgacttgttccgcgtggtagagggcatgatgcggagcaatgcggccagcttgggcgtgcaactgcctgccacccccaccaacctgcacgaccccgctgctgtggagcagtggcttttcgagtcccgcgcactcctgctggcggcgcggggcaagggggctggcaaggcagcctggctgccagcctgcaaggcactggaggcttacgcccaccaggctgctggcggcagcaccagcccgctggacttccttggagggaggagcaggagcaactggtgatcatgctgctgggcgcctgggcca

SEQ ID NO: 2166 - DNA, 340 bp, Chlorella sorokiniana
  Clone ID: LIB3602-020-Q6-K1-D3
acataccatttgttacacattaagtcctggtaccagatcggcataaggactcaaaaaggcactgttcagtcgggccttgaaaatgggtctggataccttggacgtgtgggtgagtgggtgtgccagcattatggatgggtttggcagcatcttttcttggcagcacccgttttgtgaaacgcgggtgaagggtggacattgagtgaggtgtgggaggtaggatgttccgcggttagcggcaataaaggttttagacggatgatcggtgccggtgagggggcggcatgtggttcaacggcggacgttcgtttggggtggcatatttggtggatggggagga

SEQ ID NO: 2167 - DNA, 210 bp, Chlorella sorokiniana
  Clone ID: LIB3602-020-Q6-K1-D5
ggggttggtttttggacggggtgggggtcacaatttgttgctttgccccgtgctcagtttgggccggcacattgcccaaaatatccacctgtagcaaaagcactgctactgccttttgcaagaaaaccgaaactgaaagacggaccaaaactccacgctttggggaggccggatggcaaagttttgggtgttcttattggcatgttgacc

SEQ ID NO: 2168 - DNA, 469 bp, Chlorella sorokiniana
  Clone ID: LIB3602-020-Q6-K1-D6
ggaagcacaagctgaagcgcttggtagcctcccccaactcctacttcatggatgtgaagtgccagggctgcttcaccatcacgactgtgttcagccacagccagaccgtggtggtgtgccccagctgcaacaccgtgctgtgcgtgcccaccggtggcaaggcccgcctgaccgagggctgctccttccgccggaagggcgactgagcgcgcccccgctagcggcagtgttggcgctgggcagcggttattgtgatgtccacgggcagcccgtagcagcggcactcgcactcctctcttgttgggatggagcaacaccttgcacgggcgtcggaggagactgatcgcccacagtgaggagcacgcggccgggggccttcggccctgcagccgcgtgtgaagagccacgagtatagcaccccgcgctggcaggcctcgcggccggcgcgcacaaatgactagcacccgcg

SEQ ID NO: 2169 - DNA, 280 bp, Chlorella sorokiniana
  Clone ID: LIB3602-020-Q6-K1-D7
gctgcggcggcacaaaacggtacctcggcaggcggcggtttctcttttggcttcaagctgtgaactgcgcatttcgtaacgtacagcacccagcacttgtatttgttttccaatcaattggtgcagagcagcagcagagctgcctggtgatgagcagtttacacacagcgcccaccagcgcaggccctagcagagctggcattggcagctgctgtgccacctgagccttgcttctgtgacattcgcttgtcgttgcaattacatgtgctgtagcagagcg

SEQ ID NO: 2170 - DNA, 344 bp, Chlorella sorokiniana
  Clone ID: LIB3602-020-Q6-K1-D8
ccagcataagactgtcctcatgtccctccaccttgcatgctgctgcccctgctcgttgccctgtgcagcttcacctcgctgtggttcctgtccaccaccacaccctcgatctactcgcttgtcggctccctcaataaggtgccgctggccctgattggcctgctggcgtttaacgtggcctggagcctgcccaacctgctgtccatccttgtcggcacgctggcgggagtcgtgtttgcggtggccaaaagcaagaactagccgaccgcatgcatggtggcactttggaccaccgcacccagacttgctcaactcctttccaatacagcatttaaacgcatgac

SEQ ID NO: 2171 - DNA, 356 bp, Chlorella sorokiniana
  unsure (1)..(356): unsure at all n locations; Clone ID: LIB3602-020-Q6-K1-D9
cccgcgccatcaaggagatccagaagtttgcggtcaagcagatgggcaccaaggtggtgcgcgtggacgtcaagctgaacaaggcggtgtggagccagggcatcaagaacgtgcccaaccggctgcgcattgtggtgcagcggaagcgcaacgaggacgacgaggactctgaggagatgttctccctggtgaccctggctgangaccagaacaccaagaagggcgtggttgtgctggaggcgtaagcgcctgccgcacgccgcagcaccaaattgacgtcaccttccaccgcagcagccgcactctcccgacttccctgcacgcgttgcagcagcatgtaacgcgcgcgctagcaa

SEQ ID NO: 2172 - DNA, 439 bp, Chlorella sorokiniana
  unsure (1)..(439): unsure at all n locations; Clone ID: LIB3602-020-Q6-K1-E1
ggtggctaccactcccgccgcctctctggctactgaatgaagtgccagcaaccatgcgcccgcccgatggcgtggcgtatctgaatgaccctcctagtcactctttgcaattcattcagaccagaccaggcccactctgccttgcaacccccaagaaccacccccgatttgtcctcgattcctaaaattcccccctcactggtgcacgcctgtacatctgcaccctccttccacacttatctgcttgccgttgtcccacacttatctgttcgatgcctacagatctcctgttgacagcgccggtgcccataacggcaggcggatgctcccacacatatacccgggttcgtgtaagaagtattagctctgatgaaaataannaatgtncttgccaccaaacttggtgcaaaacttaatgtagtcctcaagaatggaacct

SEQ ID NO: 2173 - DNA, 507 bp, Chlorella sorokiniana
  Clone ID: LIB3602-020-Q6-K1-E10
gcacctccttgtttcttgccctgcaccagatctccaagcaacgatgcaggctgcccagctccaggctcgcgccacccggcccgccgtggctcgccgcaccaccgtgcgcgtgcaggctcagcaggccgcgccccgcgctcaggcccccaagccccagcagtttgctgctggcctggctgccgccttcgctgccgtgaccctggtgctggcgcccgccgccaacgctgctgaggcccgcgcggaagtgaagagcgtggtgtgcgccagcaaccccacctccaagatctgcctcaaggacagcgccaagaactgaagcgtgccagctggactgagcgagcgctgagcccttgctggccgcacctgaggcaagcagccattgctgactgccggggggcaccgggccgccacccgctgcccggcagcatgggcgaagcggcgtgagaaagagaagacttgtgcactgccacacagttttttggacacctgtgctgtaacatatacttgagg

SEQ ID NO: 2174 - DNA, 418 bp, Chlorella sorokiniana
  Clone ID: LIB3602-020-Q6-K1-E11
gcgttcgaaaaaaaaataaaaaaataaatataaaaaaaattttaaattaaaaaaaaaaattaaaaaaaagggggagggaaaaaaaaaaaaaggggaaaaaaaaaaaaaaaaaaaaaaaaaaaaaaaaaaaaaaaaaggggggggccgtttttaaggattaaaattttttttcggtttttttgaaaattttttttttttttttttggaaaaaaaattaaattaaatggggggggttttaaaaatgggggattggaaaaacctttggttttccaaatttaattgttttggaaaaaaatcttttttttcaaggtggggttaaaaaaaaaaggcccgcaatgttttctttttcaaaaatttttccaattttaattggaaaagggaacccccttttttcggtattttaaagggggggggtttt

SEQ ID NO: 2175 - DNA, 408 bp, Chlorella sorokiniana
  Clone ID: LIB3602-020-Q6-K1-E12
ctgctctcctggtcctttgccgaccacacaatcccacccgccttccgcacccaggccgagcaggccggggagtgggagccgctgcagcggtactgcgagacgcactcgtacgaagtgtaccgcgaattcgagctgatgccggtgtggcaggcctggttcgtacgggctgccaacgtcatgctgagcgcgctgggcccccccagcctgctgcgcctgcgccccaccggcagcccctaccagttcggcggcctggcgccggctccggcggcgcgcacagctgatgctgccgatgcagagaagaaggcggctggtacggcagaggaggcagccgatgtgggtgctggtgccgaagcgccccccactttcagcgtgcaaatggaggagtagggcagcgatgcccctcgatat

SEQ ID NO: 2176 - DNA, 353 bp, Chlorella sorokiniana
  Clone ID: LIB3602-020-Q6-K1-E2
ggggttggttttttttcctttcccacatttacaacaagcaagcagcctcaactggctgcgcatgggattgtcactcagccgaagggagaacgaaaggggggatcaaaggttttgaggggcgcgattgagaaaagctggcacttatttgagcgaggcgtggactgacgtaagaagcggggaggcacagcgcacgcaaaagggcaatgggtggcaaacgcatgtgtgcggggcagggtatcagggcagggcagggtacgaatgcaggtagaaacagtggtggaagggcaacagggggcatggcaacaggggttgggatttcggagggtgtggtgggatggatttgattcgattgg

SEQ ID NO: 2177 - DNA, 454 bp, Chlorella sorokiniana
  Clone ID: LIB3602-020-Q6-K1-E3
gaccacgcgtccgcctggtgatcgtgaagaagggcgagcaggagctgccgggcctgaccgacgaggagaagccccgccagcgcggccccaagcgcgcgtccaagatccgcaagatgttcaacctgaccaaggatgacgacgtgcgccactacgtgaagatctacggcaagaaggtggagaagaacggcaagaccaccatcaagtgccccaagatccagcgcctggtgacgccccaggtgctgcagcgcaagcgccggcgggccgccatcaagaaggagcgcatctcgcgcaagaagaccgaggccgccgagtaccacaagctgctggtgcagcgcctgaaggagcagcgcgagcgccgctccgagtccctggccaagaagcgggccatccgcatggcctctgttgcctccaaggaggcgtaagccgtccctatgccgcctgcatagtggcgcct

SEQ ID NO: 2178 - DNA, 455 bp, Chlorella sorokiniana
  Clone ID: LIB3602-020-Q6-K1-E5
gctgcaccgggagcagcagcggcggcagcagcaccaccagcaccagcaggcaggtgcggcagaggcggctctgcggcaggtcgtgctgagcgcagcagcagtgcaggctgcggcagctgcggcagcgcctgagtcgcaccaggcagcggcggcgccagccgctgctgcgccgcccgagcagccgcgcaagtggtgcgccaactgcggcgccaccagcggcggcggcgtcaagctgaagaagtgtgctggctgccgccgtgtgcgccattgctcgcaggaatgccaggcccagcattgggcccagcacaagctggtgtgcgctccagcagagtgaacgatttgccgggcgcgcgggggctcaaacagcaggcggccgcccttgccgccatcaaaaagtgaattggggatattcttaatgaaaagctttgatgcaatgttagcccacaaaatcaggc

SEQ ID NO: 2179 - DNA, 496 bp, Chlorella sorokiniana
  unsure (1)..(496): unsure at all n locations; Clone ID: LIB3602-020-Q6-K1-E6
cggcaagcagctggaggacggcctgtccctggaggcttgcggcatcagcgatgactcccagatgtacatcctgatgcgcctgctgggtggtgccaagaagcgcaagaagaagacctacaccaagccgaagaagcagaagcacaagcacaagaaggtgaagctgcgggtgctcaagttctacaaggtggacgacagcggcaaggtgcagcgcctgcgcaaggtgtgcccccagtgcggccccggcatcttcatggccacccacttcaaccgcgtgtactgcggcaagtgccacctgacgtacgtgtacgacaaggagggccagaccgnctaagcgccccgctcccccctgcggatgcacgcttagcagcagcacacgcggcgggtgcgcccggcatgccggcacaccagccacggagcggcggggcgtcccttgcagcggcccagcgcctgcaagcccttctgttgtgttctgtgccgctgtaatacccctgctgcc

SEQ ID NO: 2180 - DNA, 399 bp, Chlorella sorokiniana
  Clone ID: LIB3602-020-Q6-K1-E7
cggcgcgtgggcgcgcactttgaccccctggagggcgagctcaccaacacccgctgggaacacaagggcgggcaccaccccgcgatgtggcacggcgccaccccaatccatgagattcgcagccagctggcggccctgctggaggggcgcattctggtggggcaccacttgaagaaggatttgggtgcgctgggcttgagccacccggaaagcgcaacacgcgacacgctgcaatacaggggcggcggggtgcgggccgcaagctgcgcgacctgtctgctgagaagctgggcaggcgcatacagctcagcggccggcggcacagccccagggaggacgcccaggcagccctggacttgtacatccagcacatccatttcgaacggcggaactggagct

SEQ ID NO: 2181 - DNA, 426 bp, Chlorella sorokiniana
  unsure (1)..(426): unsure at all n locations; Clone ID: LIB3602-020-Q6-K1-E8
cgccagcatgctgcactgtgatcagactggagggcggcacgcccgattgcaacttggggtagacggtggacgagcgggagggctccgccctgatggaccctgctgcggcgcccagccatcaatgattgccgttgcatcgatctcaggatgttgtgcgcaggccgtttacacgctgccgcttctctgcgccacaccgtgcaccgccgccactcacgcgcatgtttcaaccctcctgctgcttacccatttgggcggaccaatgctggcacatactgctggagtatccgcgaggcacagccgtccggcgagcttgatagcctgtacacggactgngaattggttggacacaccctgttcaggttgccggcatggtatgcactctacaattttgccgcacacatctgcggcagccttggcatctggatc

SEQ ID NO: 2182 - DNA, 215 bp, Chlorella sorokiniana
  Clone ID: LIB3602-020-Q6-K1-F10
gggcgggcggggtcatagctagggtgtggagaaacgcccgtcctttttaaaggggcgcggttttctaacggttccacgtcgtaaaaacccttcttttaccgagcttactttttttattgcacagcccactttaaacaaccggcctgattggtaaaacgttggtattgccaaactttttcgcctttcccacattctccctttcgaatgataccctc

SEQ ID NO: 2183 - DNA, 353 bp, Chlorella sorokiniana
  unsure (1)..(353): unsure at all n locations; Clone ID: LIB3602-020-Q6-K1-F12
gcttgcgctgctgccttgcccacagctttttgctgtggccttgaactcaacaagggcaagccatgctggctggctcaggatggcatggccaatgcccaagcggcagcttgtcaggatgacaatttttgtgccagcggccaacgccagtccagagagcctcctgccaagctggcctgcatggatttcgcgtgctgcatgcagttgcatcgactcccccacaacagctcacccnctccctatgggtgtatgaaaacatgcatcccaatcaccggccctttgcttgccagcctaccactccactgaattctagcttgacttgttatccagcctcggccatgtaattgcgcaacagg

SEQ ID NO: 2184 - DNA, 351 bp, Chlorella sorokiniana
  Clone ID: LIB3602-020-Q6-K1-F3
caagaagtcccaggtgttcaccacctaccaggaccagcagaccaccgtgtccatccaggtgtacgagggcgagcgcgccatgaccaaggacaaccacaagctgggccagttcgacctcacgggcattccgcccgcgccgcgcggcacgcctcagatcgaggtgtcgttcgagatcgacgccaacggcatcctgaacgtggctgctgtggacaagggctccggcaagtcggagaagatcaccatcaccaacgacaagggccgcctgtcccaagaggagattgaccgcatggtgaacgaggctgaggagtttgctgagcaggacaagaaggtcaaggcgcggatcgatgcgcg

SEQ ID NO: 2185 - DNA, 416 bp, Chlorella sorokiniana
  Clone ID: LIB3602-020-Q6-K1-F4
ggcaccataatcaactgcggagtgatgctgttcaacgtcaaggcgtatgctgccacgctgccagccatgctcgagtttgccgacagccgcaaatgggtgctgtggcacgaccaggagttggtggagttatttatgctgtccaaagaagctggtggtttccgcaagccctggcaccgcctgaccgcccttcccgacgcatacaactacaaggcatactggggcgagcccgaggctgggtggatgtccatgttcacccaccaggtgggagacgtggccatcgtgcacacccacggccccaagcccgagctcagcctgtgcgtcatcgagtatctgcagcgcaatgtgaagaagccgctgttttgggagcccaagcacgtgctgcaccccaaaaaggagattgtgcaagagtgcaacat

SEQ ID NO: 2186 - DNA, 428 bp, Chlorella sorokiniana
  unsure (1)..(428): unsure at all n locations; Clone ID: LIB3602-020-Q6-K1-F5
cttcgcggagctcaagcgctggcaggacttcaaggagcccggcagccagagcaagcagtacttcctgggcctcgaggccgtgttcggcggctccggcaaccctgcctaccccggcggccagtggttcaacatgctgaacctgggcaagacccccgaggagatgaagaagctgcagacaaacgagatccgcaacggccgcctggccatgattgcgtgcctgggctgcgcggcgcagggcgtcatgacgcagaagggccccttcgccaacctgctggagcacctggccgaccccgtgtccaacaacctgctgggcaacctggccaccatcctgaagcagtaagcgtgctgccccaagccccggcctgngtgtgagggctgccagggcggcggccagccacatctagagcctntgcattccttggctcggg

SEQ ID NO: 2187 - DNA, 414 bp, Chlorella sorokiniana
  Clone ID: LIB3602-020-Q6-K1-F8
gaccagaacgcggctgtgaacaaggcgggcggcgtggtcggcgccttcacccccgtggccgaccaggtgtccaccgactccctggcgccctacagcgaggtgttcggcctgcagcgcttccgcgagtgcgagctgatccacggccgctgggccatgctggcgtgcctgggcgcgctggtgcaggagggcgtgactggcgactcctgggtggcggcgcagaccctggtgtacaaccagccgcagtatgcgggcattgacctgcccttcgatatctacaccctggccgtcctcaactccgtgctcatgggcggcgtggagctgttccgcaacagcgagctcgaccccgagcgccgctgctaccccggcggcgccttcgaccccctgaacctggcgtctgacgacagcgagcgcacg

SEQ ID NO: 2188 - DNA, 342 bp, Chlorella sorokiniana
  unsure (1)..(342): unsure at all n locations; Clone ID: LIB3602-020-Q6-K1-F9
gcggtgagggctgacagagcgccaccatgcggcagctcatttcttctcggaccctcgtcatccccgatgaggtgtctatcgaggtcaaggcgcggcgggttcgcgtgaagggccctcgcggcacgctgcagcgcgacttcaagcacctggctgtggacatgttcctgactgaggaggagggcaagaaggtgctcaaggtggactgccactttggcaagcgcaagagcctggcgtncatccgcacctgcacctcgcacgtgcagaacatgatcaccggcgtgaccaagggctacgagtacaagatgcgcctggtgtacgcccatttccccatcaacatcaaca

SEQ ID NO: 2189 - DNA, 392 bp, Chlorella sorokiniana
  unsure (1)..(392): unsure at all n locations; Clone ID: LIB3602-020-Q6-K1-G1
gccgggcggctggaagctgccacctggcaccaccaaggcggagctgggacaagcgcaggccaagctcaatctgcatcgcgacgatgtgtcgcctgaggcgcancgcctggtgctgcccgacggtcatgatgcggcgccgctgaagggcaaagccctgctgcccgcagaccagtgcaagcacatggacaaggaggtggccaagatgaggacggagggcacaacggcggtgaacaacgtgatcaacgccatgtggaccaagttcggcaccgncgcgcgggcactgacaatgaaacagtggcccccccaagtgcccaacgcggggcggcgcttcatggcgcaacaaaagaagaaagcaaccgatggggaagcgcacattgcgccgcgggcagtgc

SEQ ID NO: 2190 - DNA, 227 bp, Chlorella sorokiniana
  unsure (1)..(227): unsure at all n locations; Clone ID: LIB3602-020-Q6-K1-G10
ggtgcgcgcctttttacacttgcagagtggcnggtcanggtgcatggcactgtgccagcaacagaaagactggaaatgaataggtcgtagggagagggggtagtgcgatagggagtgctgaaaagtgcctaacgacaacaggcgcagcgcactgcanttggttttgggtgttgactagtcgcccctcaatctgcatgattgcatgattgggcctgccccggcgtttt

SEQ ID NO: 2191 - DNA, 529 bp, Chlorella sorokiniana
  unsure (1)..(529): unsure at all n locations; Clone ID: LIB3602-020-Q6-K1-G11
ccctgatccacgctcagtccatcgtggccatcctgctgacccagctggtgctcatgggcctgattgagggctaccgcgtcaacggcggcccggccggcgagggcctggatgccctgtaccccggtgaggccttcgaccccctgggcctggctgacgaccccgacaccttcgctgagctgaaggttaaggagctgaagaacggccgcctggccatggtgtccatgctcggcttcggcgtgcagggcctgatcacccgcaagggccccattgagaacctggctgaccacctggcggcccccgacgccaccaacttctgggtggactacgcccccaagtccgccggcatcggctactaagctgtttccgtcgcttgactggcgccgcccgctcgcccgcccgctgagtttacggccactcgcggcaacaggcagcagcggcgtctgtactttctgactcctccggcgattgctggtggcgcaccttgcttgctttgatgcttgcttcggnggcctaggcaccctcccatgca

SEQ ID NO: 2192 - DNA, 294 bp, Chlorella sorokiniana
  unsure (1)..(294): unsure at all n locations; Clone ID: LIB3602-020-Q6-K1-G12
ggagaagaagaggagaagttgaggaggaggaggacgaggacatgggcttctccctgttcgactgagcgcacagccggccgcggccagccaccctccagtgcctggtccgctccagttgcagcggcagctcgatccctcgcctgcggcacgtacggcgtagcgtggcggcagcggcggcggcagcctagcggcgtgtttgtctcgctgccgtcgcagctgcggcgcatgtaacgcactccttccacanaaaaaaaaaaaaaaaacaaaaaaaaaaaaaaaaaaatataaagaaaa

SEQ ID NO: 2193 - DNA, 416 bp, Chlorella sorokiniana
  Clone ID: LIB3602-020-Q6-K1-G2
cttccacctgcccaagcagctggcggctgacaagggcgtgaccctgaaggagtgggccgcggcggtgctggcacccgtggagggccaccaggtggttgaggagagcgaggagttcctgaaggtcgtctcgccactggaccaggagaagggccgcttccccctcaagcagcgcgacgatgccatcaacgctggcttcgcctggttccgcgagaagggcctgatccccgcaggcggcgactcgtccgatgacgacgtcaactacgctgaagctgccggtgtggagtggtaaacaactggcgcccgcggcggcaacacagctgcccggcagcttgaggcggaacggatcaaaaagcagcgacgctttgccttttgccatattttgtcgtctggccttcctgtaacgcctcaccgctttt

SEQ ID NO: 2194 - DNA, 167 bp, Chlorella sorokiniana
  unsure (1)..(167): unsure at all n locations; Clone ID: LIB3602-020-Q6-K1-G3
cgcgtncgccaattttatggcttagcagggcaccccgnaccaaacgaacggtcttgatttattacgaagctcatgagtacgtgtaagcatgcacaagtggggagaannaaaaaaaaanaaannaanaaaaaaaaaaaaattggtttaaaaattngaggagcgaggga

SEQ ID NO: 2195 - DNA, 235 bp, Chlorella sorokiniana
  unsure (1)..(235): unsure at all n locations; Clone ID: LIB3602-020-Q6-K1-G4
acccacgcgtnnncgggctgttctnntagttggtgggtnntgccttgtcaggttgattctcggtaaccgaacgagaacctcagncctgcgtaaataggtgcacggttggggccattggcgcnnccgtcctggcnnnccggccctggcttgatnngcttgatgctgcnncttctcttagatctnnngctgtctggctttggaagtggtcgcctannagaatctgtgtgaaagtaga

SEQ ID NO: 2196 - DNA, 219 bp, Chlorella sorokiniana
  Clone ID: LIB3602-020-Q6-K1-G5
caaggtccgctgcagccgctacctgtacacgctgtgcgtggcggatgctgacaaggccgacaagctgaagcagtcgctgccccccggcctgcacgtccaggagatctgagcggctgccggccggctcagcgcgctggcgggagcagccgcggcgtccccggcagcatcagtgtgatatgccgtgcagcgccgccacccccagtgtaacttgaggcttcg

SEQ ID NO: 2197 - DNA, 416 bp, Chlorella sorokiniana
  unsure (1)..(416): unsure at all n locations; Clone ID: LIB3602-020-Q6-K1-G6
gcggccgcccttttttttttttttttgtttttttttttttttnttttttntnnttttttttttttggggtttgtttttttttttgggttgttttttttttttttttttttttnccccggggggcggggttgcccccccctccgggttgctngggcntttggtttttcccccttttgtttttttttttttccccccggttttcccgggtttttcntttttttccccnccctcccttggggtnnnnncctttttgttcccctttttttttntnttttcccgggtgttttttgttngggtttcttttgcccctcccctctttttgtttctttttngggccnggggttttgtggtttttttttttttctggcccccttttgtgtgttntttgggctcttttcgcttcctctttttttttt

SEQ ID NO: 2198 - DNA, 406 bp, Chlorella sorokiniana
  unsure (1)..(406): unsure at all n locations; Clone ID: LIB3602-020-Q6-K1-G7
gngcagcgcccctttccagtgtcccgacccacccccctggtcaccctcgcctgcttgcctggcctgaggtccccatgcatgcagacgtgcacgcgtcacaccactactcggttcacccgttcaccccagcatcaccgtgctgctcaagacgcccacctaaaccccgtctgcacactgccgctgcgccggacgcagcccgcacagcacactttttcttctcctgggcccctttcctttcttgcatgcacatgtgctgtgcgtttctttctgcctccttattagtcgacgactttgaagtcttcacctgtctcacacagtggcggatgccaccattctaaggtggcttgaccccattctggccgcctgcaatttggcggacccgccctcaaccccatgtacttgcatt

SEQ ID NO: 2199 - DNA, 462 bp, Chlorella sorokiniana
  Clone ID: LIB3602-020-Q6-K1-G9
ggcacagcacctgctgcccgacgtgcgcgctgtgctgcgccagctggcgggcgctcccttggtggagctccaggagcggtgcgcaagccagggcctggagcaggagggagctgcggagcagctgcgcctccggctggcactgcgcaaactgcaggagcgtttcgacctcgtgtgacgggacagcagcgcacccagtttgagagcagtgtcagcgccagcgacagacagggacgcatcacagcagctacagcaccgcagcagcagcagcagcagcagcgcaatcacagcaccaggccggtggcgtgcttggtgcaagttgacatggggtgccgcacccccggaggcggccgccggccaacagccgctgtggcacactgcaactctggtgcgtgttcatcacagtcataggttcaaactggcatcatttggcattgccgagctggctgttgcactcaactcggc

SEQ ID NO: 2200 - DNA, 468 bp, Chlorella sorokiniana
  Clone ID: LIB3602-020-Q6-K1-H1
gtttgtgtgaggcagggggcaagctgagagcagtgatgcatgcagtcccgtgtcagctgttcccctggctgggggctgcggcttgaggctcccaagaggggcagctcaacgcagcatggcccacgcgagcggctcactatcaactggctctaagcactgccttgctgccatgcccctgcccccccctccctgcaggatgttcaactgattcgccaagaaaacctcttctcataactgtcgggagctgtcggcggccgccagaacggccgccccttcacaacagctcgcataccagtttggccccctgggcatgcattcaatgtccctgagcgaccgaaacctgtacccttgcaaccctgtcttgcttgtgcttgctttgttagctgcgtgctttcgaactttgctttgcttgtcttgccagctgccccttccggccacaccactgcttgctcttacactgtgtgcatg

SEQ ID NO: 2201 - DNA, 442 bp, Chlorella sorokiniana
  Clone ID: LIB3602-020-Q6-K1-H10
gtttcgcggcgcagagcacgatgcaaaacgtggtgtcagcgctgcagatttactcctcgcggcccttcatcatcggcgatcgcatccagctgaagacgctgagcggcagcaccattgttgcgggcgtggtggagtcgattgcgcccatgcgcacgctgatccgcagcgaccagaagctgccggtctacatcaacaacaaggatgtgatgagcctgatcgtagtgaatgagagcaagctgcggcgcgccccggttgcgcccaagctgccgctcatcgaggcctcgctggtgctgcggtaccaagatgcagacatgctgcccgcggcgcagcaagcgattgaagactacttatccaaccacccgctggtggacaaggccatcagcccccgctgcgtgctcgctgagtttacgaatgcgggtcccaggctggcgctgcgggcgct

SEQ ID NO: 2202 - DNA, 406 bp, Chlorella sorokiniana
  Clone ID: LIB3602-020-Q6-K1-H11
cagcacagcagcagcaccaacaacaccggcagcagcaacaacaccagcagcagcagcagcgattgatgtggcggcagccggtgctgcgacgactgcggcagcagcctctagtgcagcttcgcaagcagtgcaacaagcagcggcgggtgcagcagaggcgccagcggctgcggcaacaacagcaggacaaccagcagttgcagcagcgttgaatggcagccaggcagccaggcctagaccgcagcttcgctacttgctggcatggctgagtgtggtgggccaagctctaggcataccaatgccggcagagctggtgaagcaatgcttttgagtggtatttgttgcgagctcaatctctgatcatcagctgtgtacttgcacccaattttggtactgttcgactact

SEQ ID NO: 2203 - DNA, 396 bp, Chlorella sorokiniana
  Clone ID: LIB3602-020-Q6-K1-H2
gacagagcccctttcattgcgccgcatgcccacttgcatcagccctctatttcaagcaccccgcaattcttgcaccctttcattgcctgtgattttgcccatgggggcaagcgctgttgctgccctgtcttgatgccaattttcccttccctctgccctgacgccggcgggccccctgtcctctcccccccggcccctactttttcccttcgcaccaccggcctgctgtaccgtgcacgcccctgttgtccatcccccttgcctgccccacctctgctgtacccaccccggcctgcattcaacctgtttctgtacctcgcatttttttcgcatctcgcacactgcggaatgcacaggctcctctggtcgctcccgcaccattcacagactggtcgt

SEQ ID NO: 2204 - DNA, 368 bp, Chlorella sorokiniana
  Clone ID: LIB3602-020-Q6-K1-H3
cccacgcgtccggccagtggcgcgtgcagggggcaaaacaggcaccatgcccaagaagattgaggagattaagaagttcctcctcaccgcccggcggaaggatgcccgctccgtgaagatcaagaagagcggcgacgtgaccaagttcaaggtccgctgcagccgctacctgtacacgctgtgcgtggcggatgctgacaaggccgacaagctgaagcagtcgctgccccccggcctgcacgtccaggagatctgagcggctgccggccggctcagcgcgctggcgggagcagccgcggcgtccccggcagcatcagtgtgatatgccgtgcagcgccgccacccccagtgtaacttgaggcttcgaa

SEQ ID NO: 2205 - DNA, 377 bp, Chlorella sorokiniana
  Clone ID: LIB3602-020-Q6-K1-H4
gcgcgccgccgcctcccaaggtgatggagctggacctgtgcaagacgtgtgtggggcgcctgctggcctggcgcgagcagatgctgaccgcagggctggccgccgacatggcggccgctgcggccaagggcggccctaacgcggccatggcggcctttgacgacaacctggaccgcgtgacgcagctgggctgggcatggaccgaccgccacacctttgccgcgtttcaagctgaagcggccgctgcgcccgctgcgctgcagcccgcgctgaacctgctggcgctgctctacgggctgacgcgcatcgaggcgggagtcgagtgctacctcagcaccggcgcgctgtccggcgacgccatgaaggcgctgcacgcc

SEQ ID NO: 2206 - DNA, 144 bp, Chlorella sorokiniana
  Clone ID: LIB3602-020-Q6-K1-H5
cagcgctgcggcgcctgggcgcagccgcccgctcgcacgcgtgcaacggcgctgcagcggccagccggcgtcacggagtccgggcgcccggcagccgccgatgaaatgtgacggccgagtgtgtaatgctcacgaccgtgaaaa

SEQ ID NO: 2207 - DNA, 223 bp, Chlorella sorokiniana
  unsure (1)..(223): unsure at all n locations; Clone ID: LIB3602-020-Q6-K1-H6
attgctgcgtaaatgcgtcgtgcacgctccaagaaaccagccagtcccaccctttgtaggcgcggcgggcgggtgcagctgatggcgctgcccatgcccgactccgactactacaacgcagagaagggcgacgcgctctatgcctntgagctggcgctggctctgcagaagctgaacatggacaagctcaaagcctgccactcgctggccgacaagtcggatg

SEQ ID NO: 2208 - DNA, 390 bp, Chlorella sorokiniana
  Clone ID: LIB3602-020-Q6-K1-H7
gtgggcggcaacccagacctctacggccccttctgggtcgcctccacgctcatctttgtgaccgcggccaccggcaactacgcgtcgtacatcgactggaagcggcacgcgccggcgggcgaggagcacgcggcctggtactacgacgtggacaaggtgggcggctcctttggcatcttctacggctacgtgggcgtcatcgggctggccatctacttggtgctgcgctggttcaaggcaggcatctcattcgcatccgtctggtgcatctacggctacgcgctggcggccttcatccccatctcctttgtgtgcatcttccccatcgagctgatgcgctggatcgtggtgggcgtggccaccctcacctcgggcactttcatcatgctc

SEQ ID NO: 2209 - DNA, 524 bp, Chlorella sorokiniana
  Clone ID: LIB3602-020-Q6-K1-H8
atcgaccttgccagcgagggcatcacgcctgatctgaagggcacccctctaccgattggcaagatgcgtctgcggcgcagtggcagtgatgttgccctcatcggctacggcaatcccgtgaacgactgcctggctgcggccgaactgctgcagcaggcaggagtgtcggcgaccgtggtggacgcacgtttctgcaagccgctggacactgacatgctgcggcggctggccaaggagcacgctgtgatgatgactgtcgaagaggggtccattggcggctttgcggcacatgtcatgcagttcctgtgcctggagggcctgttggacggcaacctgaagttccgccctctcaccctgccggaccgctacattgagcatggcacacaggctgagcagctggcggatgccggaataacagcatctcacattgcaaagatggcgctgggcctgggtttgggcaaggcaacaactttggtgcagtaggtagccaacatgctaaaattgagctggaaaatttgtaacgc

SEQ ID NO: 2210 - DNA, 448 bp, Chlorella sorokiniana
  Clone ID: LIB3602-020-Q6-K1-H9
gtcgagctgcgcaacggcgtgttgtctagcggcgatgaggaggggcgctggcatgacgccatgcagcgtgcactgatggactcgctgcagccgccgcgcgctgagcacccgtcgtggtggggcaagcgataccacaacctgcagcgccgcatggccgaggtgctggagagccgcgaggcgcactacatggtcatcggcctggtgctgctggacctggccatcgtgctggctgagctagtgctgtctagcttctaccccacgcccgaactggcgccgcacctggtgcatgtggctgaagaggcgctgtcatacacgtcaattggcatcctggccatcttcacggctgagctggtggccaagctgctggtgtttggcatcacatacttcacgcacagcagatggcacctgtttgatgccgcagtcgtcatctcctcgtttgcgcttgaac

SEQ ID NO: 2211 - DNA, 383 bp, Chlorella sorokiniana
  unsure (1)..(383): unsure at all n locations; Clone ID: LIB3602-016-Q6-K1-A1
cggacgcgtgggccatcacccgctcaacgccctccatgcaccatcctccccatccaccaaatctgccaccccaaacgcacgtccgccgctgcaccacctgccgccccctcacccgcacccatcttccacccgccacctttcctgccgctcaccgccgcacatcctacctcccacacctcactccatgtccacccttcacccgcgcttcacacagcggctgctgccatgcaaagctgctgccaaacccatccatcatgctcgcacacccactcacccacacgtncaacgtatccagacccattttcaaggcccgactgtacagtgcctttttgcgtccttatgccgatctggtaccaggacttaatgtgtaacaaatggtatgt

SEQ ID NO: 2212 - DNA, 341 bp, Chlorella sorokiniana
  Clone ID: LIB3602-016-Q6-K1-A10
gcagcggcacctaacaccgcatgccatgcaccctgtacctcgctctcttatcctgtttctatttcgtacactatcaatccccatctgcatgcttcaggccctctctgttcagttgctctttttcccgtttgcttccggccaaacaaatcgatggcctcgccctgttgtcttctggtgccctgctctcttctggtgtgctctccctctccccccctcagctcaggtttgcttacatgctgaaattcggcttcataccatgtcatccattgcttgctgaaaaaaaaaaaaaaaaaaaaaaaaaaaaaaaaaaaataaaattaataaaaaaaaaaaataaattt

SEQ ID NO: 2213 - DNA, 476 bp, Chlorella sorokiniana
  Clone ID: LIB3602-016-Q6-K1-A11
ggcgggagcacagtcggtcgtgaaacacgcgcctccccacaatggccggcgagcgtgtgcggctctacgtcacgggccagttcctgggctacaagaggagcaaggccaaccagtacaaccacaccgcgctggtgaaggttgagggcgtgaacagcaaggaggagaccgagttctacctcggcaagcgcctggcgtacgtgtacaaggcgaagaccgagaagaagggcagcaagtaccgcgtgatctggggcaaggtgacccgcgcccacggcagcgtcggcaccatccgggccaagttccagaagaacctgccccctgcggccatcggcagcaagatccgcgtgatgctgtacccctcccgcgtgtgagggtcggttgcttcccggagcagcagcggtgcggcacggcgcggcggtgacgagtcgtggcagtgcgaccccgctcggcacggccgcccgggtggcgccgccgtcgcc

SEQ ID NO: 2214 - DNA, 335 bp, Chlorella sorokiniana
  Clone ID: LIB3602-016-Q6-K1-A12
ttttttttttttttttttttttttattttttttttttttttttttttttgggtggttttttttttttttttgtgggttttttttttttttttttttttttttttttttttttttttttttttttttttttttttttttttgaaggggctttaatttcaaaaaaaaaaaaaaaaaattttcgaaaaaaatgggagggcattatattacaataaaaagtggggtaaatataaaaaaaaaaaaaaaaaaagggtgtccattcggttaattttaaaaaaaactataagtaaaaagggttttttttaaatttttaaaaaaaaaaaaatgggggtgtggtg

SEQ ID NO: 2215 - DNA, 506 bp, Chlorella sorokiniana
  Clone ID: LIB3602-016-Q6-K1-A2
ccggaccggaagttccgacccaaccgacccgtctactacagcaacaacatgtgaggccgcaggtgcctcaaagcctgaacctcaagcataagaggccaagccagcaaccatggatgccccattcgcatggcaacccaccagacaaacatgccgccggcgaatgccacggtgacacaacgccaagcctgtggcttcctgccacaccctttttcgcatgtcacatgtcccgagacaatgggagtttttagaagcactcgccacaccatacccaagctgatccgtaacagcctgcctgcctacctgtttcattcgtaatgcacattcattgctttgccgtgcatgttatatcgcgcttgtcctgccaagccgtggtgaatgcatcacgcctccaactcccctcagccccgtttcagtgtatccgcaaactgcctgccgtcgctttcattcctgcgcctgcgtctggctttcatccctgcaactgccccgccctgtgcatgcccagctgc

SEQ ID NO: 2216 - DNA, 96 bp, Chlorella sorokiniana
  unsure (1)..(96): unsure at all n locations; Clone ID: LIB3602-016-Q6-K1-A3
tccgacccacgcgtaccgcgcagatgccgtccagcactcctgagccgacaggcagtgnncagtcctaccagcnccgtaacatcaactnnngcctcg

SEQ ID NO: 2217 - DNA, 479 bp, Chlorella sorokiniana
  Clone ID: LIB3602-016-Q6-K1-A4
cggacgcgtgggcggacgcgtgggcggacgcgtgggggcgccgcagctgcccgcagacatctcctggcacttcatcggccacctgcagtccaacaaagtcaaggcgctgctggaggcggtgcccaacctgtcgctgctggaaaccgtggacagcgagaagctggccaacaagctggacagcacagttgcggcgctggggcggccgccgctggctgtgtttgtgcaggtcaacacgagcggggaggaaagcaagtatggcgtggagccgcaggactgcgtggcgctagcccggcacatccagcagggctgcagcaacctgcggctggcgggactcatgacgataggcatgccggactactcatcgcggccggagaacttccagtgcttgtctgagtgccgcaaagctgtctgcgaggcgctggggcttgcagaggctgatgtggagctcagcatgggcatgagcggcgactttgagcaag

SEQ ID NO: 2218 - DNA, 412 bp, Chlorella sorokiniana
  Clone ID: LIB3602-016-Q6-K1-A5
gcgaagcgcagcagggcaagtacgaccccagcaacgaggacgctgcggttaaggagggcatgttccaggcagggtacacttactgatcaatcaaccccacagctgagcggcgccgccacggtcgcccgcgggtggagcgctgcccacagccgtgcgccgactccgccgccagcagcgcccgattctttccgctcccctcggtcccctgtctcaccccagcccctcccccctcgtgtgcggtctgtgtacccccgccggcagcacagcgtgtcggtcaatttgatttttgaaaacagttttcaggcaattgcctcctgctcctgttatgaatgaagccggaaaaaaaaatatcgcactacttattgcgctcagagaactatctatgcttgactgaattgcacaaagcagtcaa

SEQ ID NO: 2219 - DNA, 478 bp, Chlorella sorokiniana
  Clone ID: LIB3602-016-Q6-K1-A6
agcaggttctggacctcgtgcacatcacgctgaacaagaacagcgtgccgggcgaccagagcgcggtggtgccgggcggcatccgcatcggcacccccgccctcaccacccgcggcttccgggaggccgactttgtcaaggtggccgacttcctgcaccgcggcatccagatcgcgcaggactgcaaggccaagacgcccgcccccggcaagctgaaggagtttggcgcgtacctggcggcggagggcgcggcgcgtgaggacgtgcagcagctggcccgcgaggtgcacgagtttgccagcagctttgacatgccgggcggcgactggtaaagcagcggactgcacattcttttggctgaccatccctacaccttgcggctgcacctggttgtccgccctgccccgcccttttcagccgccccggggcggcctcgtttcatgatactttggttccgtttcctcgtcccagctgctat

SEQ ID NO: 2220 - DNA, 493 bp, Chlorella sorokiniana
  Clone ID: LIB3602-016-Q6-K1-A7
cgacccaacccacgcgtccgcttgagcaagcgcccaacatgcgccacacgccacgggtcatgcgcctccagactgcaagcagcttggcagccgctgatgcctcctccttgcctcctgctcctgcctgcaggctagcggcggcaagtaagctgctggccagctgccgccctgtgcggcggcaggagggcccaactgcccctgcacctgcacctcttgaccaatgcggcaagtgcggcggcagatgcggcagtgcggcgcccgttctcctgccagcatgcagcactgcagccctcccagcggcggtggtcgggacctgggctggcagcggctgacgccctgcctcacgtccccgggagcctgatgtggcaccccggccgccgcccctgaggggctgcttgtacccccaccccccaacttgctcacttgtgcttgtgctttcgaccctctctatacataccgtagagcagctgtcccgctccccaacccaatgatg

SEQ ID NO: 2221 - DNA, 126 bp, Chlorella sorokiniana
  Clone ID: LIB3602-016-Q6-K1-A8
gggggcgtgtgttacactactgggcttccaggggaaaacgtcccgcgggtgggccaacccgggaaaattcccccttcaaccgccggggccagccgccgggccctttcgcgcgcgggcgttttaaaa

SEQ ID NO: 2222 - DNA, 467 bp, Chlorella sorokiniana
  Clone ID: LIB3602-016-Q6-K1-A9
ctactacgagatcctcaactcgccagagcgcgcgtgccacctggccaagcaggcgtttgacgaggcgattgctgagctggacacgctgggcgaggagagctacaaggacagcacgctcatcatgcagctgctgcgcgacaacctcacgctctggacctccgacatgcaggacgccgagcagggccgggaggcgggcggcgagggcgagatgaaggaccaggagtaagggcggcccccgcacggtgcgccctcatgggctcaccgccgctgtcggccgcagctgcacagccccgcaccgccggcgcggcccgccatcccgctgcgcgggcgcgcggagggaatgccttcccacaccacgacaacacttgagtcacgcaatgtacagcggcggccggtctggcggcgaggcagctccagctgacatgccgctccgctcgttgcatgcttgctcccctctctcagcagct

SEQ ID NO: 2223 - DNA, 263 bp, Chlorella sorokiniana
  Clone ID: LIB3602-016-Q6-K1-B1
aaaaaaaaaaaaaaaaaaaaaaaaaaaaaaaaaaaaaaaaaaaaaaaattttaataagggcggccgaaaaaaaagggtccacgcgttctggacgcttccatgcttacgtcctgggggcttccatcgttgatacctacttctatatgtgactcctaattttattacacctggccggacttttaaaactttggggctgcgaaaaccaatggtttaccaagataaatccctttgcaccgcttccgtatttcctcagatggcgtaat

SEQ ID NO: 2224 - DNA, 474 bp, Chlorella sorokiniana
  Clone ID: LIB3602-016-Q6-K1-B10
gcggcgagatggcgtgctagccgcaatcaaggccaaggcagctgcaatcgcagagcggcggaaggttcgcttgcagattgagaccatcaaccaggacccgcctgcagcctgtggcaccgaggtggtggcggcggtcgagggggcagtcagggagctgggcttgagcagcaagcgcatggtcagccgagcatatcatgatgcgctcttcatggcgcagatcgcccccaccggcatggtcttcattccttgccgcaatggctggagccaccggcccgacgaattcgcttcccccagcgacatcgcacgcggcattgaagtgctggcgctggcactggcacagctagcgggcggcagtgagggtggtagtggcagcagcggcagcggcggagggcatgccgagctgtgacgggctggtgtgtagcagggcggtgcagcgggccccacgggtgggcgtttatagcacttgcaagctgg

SEQ ID NO: 2225 - DNA, 472 bp, Chlorella sorokiniana
  Clone ID: LIB3602-016-Q6-K1-B11
gcacgcggggcaccgcctgctgctggccgccacagcgctcgtctcccgccagcacatctttgtgggcatcactgccgacaagctgctggccagcaagaagaaccgcgagctgctggagtcgtatgaggagcgagaggcggcggcggtgggctacatgaaaatgatcaacccgggcgtaaccgtggtggcgggcccgctgactgacccccaggagccgccgctgtgcgctgtggaccccgagtttgatgccattgtggtgtcggaggagacgattccgggcgcgcacgccatcaacaaggtgcgtgcggagctcggcttcccgccgctcgtgatcgtggtgatcggcctgatctactcgcgccgccgcgccgccaagctgtcatccacagacctgcgggaggaggatgcggctgggcccggcggcagcccgcggcagcctgcgcggtagccgtgcgctgcagggccgcgacca

SEQ ID NO: 2226 - DNA, 463 bp, Chlorella sorokiniana
  unsure (1)..(463): unsure at all n locations; Clone ID: LIB3602-016-Q6-K1-B12
gtttggcggcatgggccccgcctgccgcctgccctttgagccgccgccgttcctgcagaaggtcacgcaccgtgggctggagggtgcggacgtgcgcgaggggtctgtgctcttcatcttcatcctgtgccagtcctcgctgcggctcatcatccaaaaggcgctcaacctgggcatgggccgcgagttccaggacattttgccggcgatgcccaagggcgcaccctttgccagctttttcaacggagacgactcctcctcgaagaagaagaagtgatgcccctctgtcctgcttgcggttgggggccggctttgccgccgtttttgttgccatactgtgattgccccagctcttgttttgcatactgccttctcccgctccactgccttttgcaacatctgtgacaccctgttgtgcttanaaaaaaaataaaaaaaataaataaattaaataataggggcg

SEQ ID NO: 2227 - DNA, 249 bp, Chlorella sorokiniana
  Clone ID: LIB3602-016-Q6-K1-B2
atcacatccatgtacggagctgtgcactgctcctcccaggtcgtcaagcgtgtgccccgccgcttctgagcgcccccaagtcgggcagccagcggacggcacgtcagcgatgctgcatgtgcacagttggatctagagcttggcgtggcggcttgctctctccctgctctatttgatgctgctccttctctaaacgctgccccattcttttgcaatcacataaatcgaggtgtaaattcaaccgccgca

SEQ ID NO: 2228 - DNA, 324 bp, Chlorella sorokiniana
  Clone ID: LIB3602-016-Q6-K1-B3
gccgcactgcggcgcaccctgctccttccccgcaccgacttgcactttggccctcttgctttggccgcccattgcctgccgtgccccgcccgcccgcctcatggggcgctccatgcagctcacatccccctggcaggctggctgagcgcttaggctggtcggctgctgcccgttggcctctttgctctcggttttgctccctttgcttccacaacccgcttgcagcaacgttgctcgtgcactgctcccagcagttggtggtgctcaacgatggggtcacccggacacccgacctccgctgttgttgtttcattccagcattgc

SEQ ID NO: 2229 - DNA, 56 bp, Chlorella sorokiniana
  Clone ID: LIB3602-016-Q6-K1-B4
aaaaaaaaaaaaaaaaaaaaaaaaaaaaaaaaaaaaaaaaaaaaaaaatttttttt

SEQ ID NO: 2230 - DNA, 477 bp, Chlorella sorokiniana
  unsure (1)..(477): unsure at all n locations; Clone ID: LIB3602-016-Q6-K1-B5
gcgtgaagcgtttgccgtcgacttgtttggcacaaccgcacccaaatgcgcgctgcagcagccatacaacgtgtccacgctcactcccgctcagctgctgcctcctgagggcgacggcgcggggccgcagggcgctgagcccgctgaggtccagcccgactggcggcgcagccccagtgccctgcccacccccgcctacgacccgtgcgccaactggcgcgcctgggcgtacctcaaccgcgatgatgtccaggaggccatcaatgccatcaagccgggtggagccgccaaagagtggcaggcgtgcggcgctgctgcggccgagttctccctccaatccgtcctcacctccgccgcgccgctgtacaaggagctcgccaactcaaccgtgcggatcctagtgtacagcggcagcgcggacgccgtgttcaccacgggcggcactcgttcgtgggtcggcaccctgngcctggccca

SEQ ID NO: 2231 - DNA, 56 bp, Chlorella sorokiniana
  Clone ID: LIB3602-016-Q6-K1-B6
gatccgcagaaaaaaaaaaaaaaaaaaaaaataaaaaaaaaaaaggtttttttatt

SEQ ID NO: 2232 - DNA, 432 bp, Chlorella sorokiniana
  Clone ID: LIB3602-016-Q6-K1-B7
cacctggagcggtgggtgcgggaggagtatgcctccagccccgctcacgatgtgccgccgccgccctcccccatggcctggctggtcaaggggctggaggccaaggcagccagcgtgaagcatgccctggagaagcaggacgtgcgtgctctggcgctcgagctgctgccggtgctgtgcgtgtgcctgatggggctggcgctcatgctggcctcggcggtgcggcgcaagcccaagcgggattgatcagcacaaagaagaagctgaaggggctggcgcatgggcagctgttgcagcgcccactcagcatcgactgctgtgtcaattgccaatcctcgggatgtcagggcagctgcaggtgctgtaaacactgctgtcaaaaaaaaaaaaaaccttggaattacccaacttaataatcttaagggcggtccc

SEQ ID NO: 2233 - DNA, 327 bp, Chlorella sorokiniana
  Clone ID: LIB3602-016-Q6-K1-B8
ggcgcagggagtggagttgccgcgcaaccgaccgtggccagcgaggcgactgagctgtgcaccgtccagcacgccgtggcggcagcagccgcgcggtcgggcggtggcaggcagggatcaatggcatcggtggcctcctagcaggtggtcgtgccaagcagagccgggcccctctcgggcggcaaggaggcacacgtgacgggagggtccaagcatcgtgcggagcggcagcagcagcggggcggcagggctggatgtgcgcttgcaatgtccagaacagggatgtgctttgcacagtcttagtgtaacagccaccacgcaaaagaa

SEQ ID NO: 2234 - DNA, 470 bp, Chlorella sorokiniana
  Clone ID: LIB3602-016-Q6-K1-B9
gccaggcgcctcgccgctgatgcacggcctcacgcacgcacttatcggcggcctcgtcggctcgaaggggcagtttggagacatggctgacatcatcaccagcccgaacgatgtggccttcttcatgccgatgcacgccaacctggaccgctccaatatgatgttccaagctaacagccagtaccgcaacagcagcgtggcccgcaatgacgtgatgtggaactaccccaagtctcaagccgagtacgcaaagtgccccatcggctgccgcctgcacgacgtcatcaattccaatgccaagttcaccgacattttcaacccgcccaagtcaactggcttcacgcactttgatgttctggaccgcacgcgccctgagacagcagattacacctatgacgagatctggggcgctttgccactgtacgtgcgtgggttcaccaaccggcccggcgcaccccagggcaacgggc

SEQ ID NO: 2235 - DNA, 416 bp, Chlorella sorokiniana
  Clone ID: LIB3602-016-Q6-K1-C1
gcggcagcggcgtgttcggcgccaaggactacgcggcggccatcaagggcatcaaggagagcaagcgccctgccgctgtgcacgcttaagcggccagccatgtaagccgtctgcgtgcggatgacgtgcgccggtgcctgcctgtccggcagcattagacccgccctccgcctgcccgcatgtcatggcccgtcccctgtgttatgggccgccagcggggctgctgcgctgccttgcagccccgccgcgaggcccctggatctgcttgcgatttgatttcccgctttcgtgtccgttttgctgcgctcagaaacgcctgccccatccccgcatcccgccgtattctttccgtgccttattccgccggtgccctgctcggagctgcctgtgcgccgtagccaggttttgtaagtgcc

SEQ ID NO: 2236 - DNA, 468 bp, Chlorella sorokiniana
  Clone ID: LIB3602-016-Q6-K1-C10
cggacgcgtgggtgggcgggcgggcgcgggggccgcagggcgagctgcccaacgagcgcatcttccaggtcgacttcccggagcgccctggcgcgctgcgcaagttcctgggcccgctgtcgccgcgctggaatgtcactctgttccactaccgccgcacaggcaaccaggcctcgggcgtgctgctgggcgtgcaggtgccgccgcaggacgaggccgagttccaggcagcagtggcgggcctgtcgggcgacttcactttcaccgagatgggcgaccgcgcgcgcgaggtcttcaagatgttctgcagctgagctcagccacgcaggtctcaaagcgcacggatgtgacagtagcagcagcagcagcggcggcggcagcagcagcagcagcagcagcagtcttttgcgtgctgaggcggcagcgccctgtgtgcggccttacagtaccagcaacgaactgcacacc

SEQ ID NO: 2237 - DNA, 472 bp, Chlorella sorokiniana
  Clone ID: LIB3602-016-Q6-K1-C12
aaacaggcgctcggccgcgtcttcaagacagtgctggctgtgtgcccacagcctgtcctgccttgctgccaccagtggtagacacggcgccgctgctccaccatcttatcctctctcctgaccttccagtgcgcccatgtttgccatgcaatccctgcgttgctgctcgactgcagctggccccgccgctggccgccgccctgcgcccgctggcggttggttcctgtgtcccgccgtcgggcgccccagcaccatttccagccgcgcggcccagccccagcccaagcgcgcccaggcgctgcctgcagacgcggccaccagcaccacagagacggcggaagcgggatgcgggcgcaagaagctgtttgatgacctgggcggcgcagaaggcatgaagctggcggttgacaccttctacgataaggtgctggctgacccggagctgctgcccttcttcgagtccctggacatg

SEQ ID NO: 2238 - DNA, 458 bp, Chlorella sorokiniana
  unsure (1)..(458): unsure at all n locations; Clone ID: LIB3602-016-Q6-K1-C2
tgaaaaaaaaaaaatataaaaaaaaaaaaaaaaaaaaaaaaaaaaaatttatttaaaaaaaaaaaaaaaaaaaaagaaagggtgggggatataaaaaattaagggggggggggttaaaatttatnttttttttttagttacagttaaataaaatttggtgggggtggttttaaagggtttaattttggaaaattttttgtttctatgatttatattttttaagaggagattctttttaccctttgggggtttatagaaaaggggttggggatgttgtgcttttttaatttttagcattttttggaattgaaaatgggttgttctgttttgttgtaatataatatataatagtttggtggttgtgtttttcgtaattttacattttattttttttttaccttggggtttttgttttttttttttttttttttttgtaatttttttgttttttcgttttt

SEQ ID NO: 2239 - DNA, 89 bp, Chlorella sorokiniana
  Clone ID: LIB3602-016-Q6-K1-C4
aaaaaaaaaaaaaaaaaaaaaaaaaaaaaaaaaaaaaaaaaaaaaaaaaaaaaaaaaaaaaaaaaaaaaaaaaaaaaaaaaaaaaaaaa

SEQ ID NO: 2240 - DNA, 475 bp, Chlorella sorokiniana
  unsure (1)..(475): unsure at all n locations; Clone ID: LIB3602-016-Q6-K1-C5
gagctgcaccaggatgccaacgtgtttgccagcgagaatgatgcgggcgtgggccacgatatcacgctggcagcaggccgccaggcgtacctggtgtgcattgagggcagcatgaccgtgagcaccaatgacacagaggtggcgctggcccagcgggacgcagcagaactggtggcggaccgaaagccgctgtacctgcagctcacggcgggcgacaagggttcccacttcctgctgattgagatgaagaagtccgactgaacggcataagcagcaacgggggagcgcctggcatttaacacggccatgaacagcctaagcagatgcggtccttctgcaatcgatgcataagggcaagctctcctgcccgcaacactgcatgtaccatcaccgccgttcactgtggcacatacagctggcctcggatcagcctgngcccagcaggcagcgcagcatgacacagcgacacattatg

SEQ ID NO: 2241 - DNA, 475 bp, Chlorella sorokiniana
  Clone ID: LIB3602-016-Q6-K1-C6
gggacatcaacattgacaaccacaaagcgggcgtgcacaacaacctgttcaccaacatcaacaccggggcgggtacgcgcccctgggacagcggaggtgccaaggaccgtggagccgactctggcgccaactccacgtggtggaacgtctactcgccctcccgccagctgggcctgccgctggccagcggggcggtggactgcggcgtggggcccctgctcaactggattggccccttttccagcagcgtggtggacggcatgtgtgccgccactcgctggacagtggacaacattggggcgggccgaacgctgtacccgccagacctgttcagggccatgcgcagctaccactacctgcggcccggctgagcagggctttctgctcctacccctgcctagctcactgctcttgctactttgctgctcttttcgcccttggcaatacgctcttggttgtgttggttgtcttcctg

SEQ ID NO: 2242 - DNA, 469 bp, Chlorella sorokiniana
  Clone ID: LIB3602-016-Q6-K1-C7
gcgacctggatctgccccagggcgtgcgcgacggcctggcccaggcccgcgagaacctggacgtggccaaggcccgcatcaaggaggctgagaagcgcatcgacgccgacctggacgcctacatcgccaaggcgtactggactgagggccgcaacgagctgcgccgccaggtgggcaccctgcgcttcgacctgaacgcggtggccgacaccctgcccaaggccgccaagaaggaggcgcaggccgccaagaacgagttcctggccgccgtggaggcgctggacctacagctgcgcaagaagaacggggacaaggccgccgctgccctggctgacaccaaggccaagctggacgccgtgatcgccaagctggcgtaagcacccgccagccaggcggctggccggtaccacccggacggtcgccgcggcaccccgcagcagcccccttgccagctggcgccccacgcgcc

SEQ ID NO: 2243 - DNA, 461 bp, Chlorella sorokiniana
  Clone ID: LIB3602-016-Q6-K1-C8
gggtgcctacttcttgcagctgctgggcaagccctactatgcagcagagatgaaccaacggtttgagcttgtcacagctgcattggactaacggctttgactcctgagtcggccggcagctctgccgtgggcctgctgttttgagatgccagcaagtggaaccaaccgatgggggcagcacttcacgctacctggatggctcgctgcgtgtgcctgtgcccggcagcgcaggttaacaccctatcctcaagagcgccgctttctggatgcgtcgcaatcgtgatggaggcatttgcgcgaccttggggacgattgccgccaccttgccaccgccctgcacatgcgcctgccaaacaccaccgtcctcaaacttagtgtacagcattccgttgtgaccataatttgggaggtggcggtgggtgcaccagaggacgccttctgagcgtcttcagtggcagcag

SEQ ID NO: 2244 - DNA, 355 bp, Chlorella sorokiniana
  Clone ID: LIB3602-016-Q6-K1-C9
aaaaaaaaaaaaaaaaaaaaaaaaaaaataaaaaaaaaaaaattttttttataaaaaaaaacaaaaaaaaaaaaaaaaagggggggggggcggacatttgggggggccttttcttaccctctttccgtcggcttctgcttttttagtgcccctttctgccttccttggccgttttcttcacctacttctgggataccctgtggaacccccttgagtgcctagcttaattccctttttaacagggtggtttattcgatggggggccctccccgtaggcccttcccatctttttttctgactgttttggtcattggtgcctcgcctttttcccctctccttttttctcggccctttt

SEQ ID NO: 2245 - DNA, 471 bp, Chlorella sorokiniana
  Clone ID: LIB3602-016-Q6-K1-D1
gtggcggcggcggctgacccggcggcagctgacgtggcgggtgctgcagcgccgctggccaagtcctcctcgtctgccgctgaggctgaggcggtgagcgctgcggcggaggcgggcgtgctggcctcggcgattgctgaggctctggccagcgtgcctgcacccaagggcaagggcgcagccaagccagctgaggcagaggagggtgccgctggcgaggcggcagaggcccagccggcggcggcggcaccggcagcagaggaggcagcgaaggcggaggaggggcagccggcacagcctgagccgaaggcagaggcagaggcaggcggcgcagccgatggcgccaatccctttgaggtcagctttgaggacgggcccgcgagcggtgcggcgggcgctgcaccggtggcaggcgctgacgcctttgcggcattcgacgcgcctaccgacgccgcggcagcaggcgacgcc

SEQ ID NO: 2246 - DNA, 470 bp, Chlorella sorokiniana
  Clone ID: LIB3602-016-Q6-K1-D10
ctttggcctaacggctggcccaccagcagcgtgctgggcgggcgcgcgccggcggacgaggcggagcagacgcagctgattgatgcgctgcaggactggaagaccgagaagtacaaggacatcattggcagcggcgaggtgtcggcgcggcccggagtggtgcggctgatgagcgaggcgcaggcggcgggcgtgcctgttgccgtctgctccgcggccaccaagagcgcggttgagtttgtgctgggcagcctgctggggcaggagcggtttggtggcctggacctgttcatggcgggggacgatgtgaaggagaagaagcccgaccccacaatctacaaggtggcggcacagcggctgggcgttgatcctgcggcctgcctcgtggtggaggacagcaccatcggtctggctgcggccctgggcgccggcatgcgctgcgtggtgacttacaccaactccacccggtc

SEQ ID NO: 2247 - DNA, 456 bp, Chlorella sorokiniana
  Clone ID: LIB3602-016-Q6-K1-D11
ccgccccgtgctgcgctgggcaccagtggtggaggctcgcaagacggtgggggagcgccgcggcaccaggcgcctacagcgcgacatccgtgtggctgccagtggcggcgagaactgccctgagagcgacgaatgagcacccgagggtagcccgcttccagctgcaagccatcccgcagttgcacccaagttttgcccccgaccggcactgcatatatagctccccttgcctctgtaccatgctgcccaagcttgcaacgagcctgccttgccaccttactgtttgcgaagatgccccccgtgtgcctgtgccccgtgctgcacttgaacccgccttgccaaattcatgacccgcgccgcatccaactcctctctcttgccgcctgcctcccttgtctcccaagcatttgctaactgttgcacactgactgtagagcatgtaaagtgaacatggcg

SEQ ID NO: 2248 - DNA, 471 bp, Chlorella sorokiniana
  Clone ID: LIB3602-016-Q6-K1-D12
gcctcgcttatgccccgcatgttgatgttgcagccgtccttccagcctgcccgaccagcttgtgagagcagttcggtcgttgtagcaccttacctttgcatgactctgccccctgacactggaaagcatgcccccgcgctatgcattgctcataccgcaatgcatcctgccgttccccgccctcacctgtcttcctctgtcgtcccctcgacttttcttcccacccccggccgctcgctcttttcctgtttgcctcctttccccgtcgtgctcaccgcaacgcatgacgccccaccaacgcctgaactgaccatcgcactgcatcccccactgctagagtggcctggtttgttggtatgttcaatactgtcccctcgcctgcttaccttcctctcatccgagcgactgcttctatcacagctactcagactgacatgcttgccataactgagggctggcgccccacctctg

SEQ ID NO: 2249 - DNA, 362 bp, Chlorella sorokiniana
  Clone ID: LIB3602-016-Q6-K1-D2
aggaaaaaaaaaaaaaaaaaaaaaaaaaaaaaaaaaaaaaaaaaaatattttatttaaaaaaaaaaaaaaaaaaaaacggccggtggggctaaagaatccagggctgcggctgcgtgcatcccactttatctctctcttttatgcggccctaaacttatttcatgggcccacgtaaaacaacttaaggagtgggaattccccagcgtttcccaacgtaaacccctgggattacctacccttttcgcctggtggcatattcccctataagcccctgccgttataccttaaaaacccttaccgatcccctttggcaaaagggacccaccctgaatgggcaatttaaccccccctgttttggggg

SEQ ID NO: 2250 - DNA, 308 bp, Chlorella sorokiniana
  unsure (1)..(308): unsure at all n locations; Clone ID: LIB3602-016-Q6-K1-D3
cttcaactggcgcatgctcaagtacattttcacccactgccacgtgtacgataaggaccggaactacgtgcccttcgacgccaacaagcccgagatgctgttcgaggtgcagcgcaaggtgctgcccgagacgatgtgattttgcccccgctcgtttgctcatcaagagtgctaagtggtcactgcaatctgagctgtatgtaattcaagtaagagaaccctggtnaaaaaaaaaaaaaaaaaaaaaaaaaaaaaaaaaaaaaaaaaaaaaaaaaaaaaaaaaaaaaaaataggggcggacgctctaa

SEQ ID NO: 2251 - DNA, 132 bp, Chlorella sorokiniana
  Clone ID: LIB3602-016-Q6-K1-D4
aaaaatatggcctaaacaaaaagaaccaacaaaaaaaataaaaaaagaacaatcaaaaacagaaaatacaaaaaaaaaaaaaaaagggggccccccttttagggtcgccgtgcttacctccccgttcctcca

SEQ ID NO: 2252 - DNA, 117 bp, Chlorella sorokiniana
  Clone ID: LIB3602-016-Q6-K1-D5
ggcgggcgctccggcgcgccgccgccagccacgcagtgcaagctgtaacgcgcctccttgcaaaaaaaaaaaaaaaaaaaagggggaaaaaaaaaaaaaaaaaaaaagaggggcggc

SEQ ID NO: 2253 - DNA, 473 bp, Chlorella sorokiniana
  Clone ID: LIB3602-016-Q6-K1-D6
acctgctccctgccaggctcgttgctttgcacccccgcctgcctcggtatgcaccctcccttcctgggccctggcccagtcgcacaaccccccacctgggcccttggccctgtttgctttgaccccgctcgctgccgcactgcggcgcaccatgctccttccccacaccgaccctgcaccttggccctcgtattgctgccgtccgtcgcctgccgtgccccgccagcccgcctcatggggcgctccatgcagctcacatccccctggcaggctggctgagcacttaggctagacagcagctgcccgttggcctccctgcacccggttttgctcccttcttgcttccacaacccgcttgcagcaacgttgctcgtgcactgctcccagcagccggtggtgctcaacgatggggtcacccggacacccgacctccgctgttgttgtttcattccagcattgcatgcccacgttgt

SEQ ID NO: 2254 - DNA, 184 bp, Chlorella sorokiniana
  Clone ID: LIB3602-016-Q6-K1-D7
aaaaaaaataaaaaaaaaaaaaaaaaaaaccataaacaaaaatatttttttaacacaaaacgaaacaaagaacaaaaaaaacaaaggcaaaacgaatgggactgagcgtggggggacgtcattgtgccctccgtcttgtgcgatgctcgcttcctctggcgcgacatggtgcactctttggcca

SEQ ID NO: 2255 - DNA, 464 bp, Chlorella sorokiniana
  unsure (1)..(464): unsure at all n locations; Clone ID: LIB3602-016-Q6-K1-D8
gtggcgggtcgcgggcaacggcacctccgagtcgtcngctgtgatcggcgccccccagcagcagcacgtgatccggatggtcaacctggtcaccgctactttgacacgctgctgacgcaaggcgacagctccatcataaagacatcctggagcccaccatagccacaaggacatggtccgaacatcggccgcgtgggcatgaaggagtatgagacctatctgagcgagctgcaccggacctacccggaatactgggtcaagcccatccactttggctttgctgacaacaagtccatgtttgtgagctttgagggccaggtcaacgccaagacctccaagttcagcggcgtggacttctttgtgttcaacaacgatgcaaccaagatccaggaggtgcaggtgttccgctcctcctggctgggcgctcagggccacgacgagcggaagaagctggcagaggcagc

SEQ ID NO: 2256 - DNA, 471 bp, Chlorella sorokiniana
  Clone ID: LIB3602-016-Q6-K1-D9
agctgctcctgcggatctcctccggggagcaggccgcggcggccaacgaggctgcgctcctcaccctggcgcagcagcagcagcagcagaatgggcacggccatgggctggccgtgagcggcgggcagaaggacgcctcagcggccaacatggcggatgccgtggcgctcctacgtgcggccgagaagctggggaacaacggctaccacctggcgttcaacatcccggccgatgggtcgtcccgcggcgagcgggagccgctgatggcgcaggcgcggccagtgctggtgcagggcgcgccctccttcagccgcggctactcgacgttcttcgatgcctgagcggcccggcctgcaatgttggcaaacctagccctctgcttttgctcgcgtttgttgctgtgacctgtgtgcaccccctcaccgtgcctgcccgtggggcgcacctcctcctagccttgctgtcctgagg

SEQ ID NO: 2257 - DNA, 547 bp, Chlorella sorokiniana
  unsure (1)..(547): unsure at all n locations; Clone ID: LIB3602-016-Q6-K1-E1
nnccggctganntccgcttcgcgcccaaagcttgcagcttctgggtcccgcacctcttagggccccgccagaagnncgaaaccatgctggccctgcagacgttctcgcattcgcggcgcctgccaaggggtgcaggtgacccggcggcagcagggtnggtcgtgtggcgnnngaccgcgcagcagcaggaggcggcggaggggcggtgccccggcgtgccggcgaattgggcctgctggccnngctgccgtgctgggcnnctgagcgcggacgcttgcccaggnnctgtgggcgttgccaagaaccggnnatcccgcgccggcttccgagggctttacgtgctggaggnngcaccaagaagcagggcattcagccccaaagcgcccaagcgggccgtgcctggaacaaggtnngcgcaaggcnncgccggcaangnncagtgagccttcgcttcgcaacttcaacgaaagcgctgaagcttcnncgtcccggcttgnncgccactgtnntccggcgaggcaacgcnngcagcggcaccctcccttgc

SEQ ID NO: 2258 - DNA, 230 bp, Chlorella sorokiniana
  Clone ID: LIB3602-016-Q6-K1-E10
actgaaataaacccctgcattgtttgcatagcttgtgactgtttgtctgctgtagcgcctgcacttttgtacagctaggacgcttcccgctagcattggccactccgcctttcaaccaagctagcaaaaacgtccgtgcttgcgctctgtgcatgcccgcccaccgctcacccgccccctcatgtcgttctgtacattttgttagcttgcaatgctgtaaacgtgagtgc

SEQ ID NO: 2259 - DNA, 472 bp, Chlorella sorokiniana
  Clone ID: LIB3602-016-Q6-K1-E11
cccacgcgtccgtggtgacgccgaggccggcccccaagtgctggcacgtccgtcacccagccacgtatggcgatgcctgttacaaaaccctccgcccgcacgtggcagccaatacagttcaaacccttcttcctccctctgcttgctgattcatgcgcagcggcagcacagcgtaccgtgccactactcagctggccaggccgttctgccctctgttctgttctgccccggatatgaactctaccgtcgtgcactcttgattcaccatcctatcaacttcgtgcgtcacgtagtgcccccctgtccactcgcgctcctctgtccatttgcgctcctctgtccatttgtgcttaccgcttgctcttgccgcactcgccaccccttggcgacattcatctcctcacccacacagcatgcgccttttgctccacgtcgtgccgcgctgcgttcagaacgttgaaaacagcatgac

SEQ ID NO: 2260 - DNA, 476 bp, Chlorella sorokiniana
  Clone ID: LIB3602-016-Q6-K1-E12
aaaaaaaaaaaaaaaaaaaaaaaaaaaaaaaaaaaaaaaaaaaaattaaaaaaaaaaaaaaaaaaaaaaaaaaaaaaaaaggaaaaaaaaaaaaaaaaaaaaaaaaaaaaaaaaaaaaaaggggggggcctttttaaaggatcaaagttttcttccccttgcttgcaacgtattagtttttttttggggtcccctaatttaatttaattggccgcgtttttaaaacgttggaattggaaaaaccttgggtttcccaaatttaatcgctttgaagaaaatccccttttccccagttgggttaataccaaaaaggcccgcaccaatcgcctttccaaaaatttgcccaccttaattggaaattgggaccccccttttagcggccctttaagcccgggggttttggtgtttacccccagggtgacctttaaatttgcaagcgccttagcccccgttcttttcgtttttttccttttttt

SEQ ID NO: 2261 - DNA, 472 bp, Chlorella sorokiniana
  Clone ID: LIB3602-016-Q6-K1-E2
ggggaacgacagcaccgccggcctggtgcgccagaacgctgtggtggtcaagtcgcccaaggcgggcgtgtccttctggagctatggcgattacgaggcgcagtttgaggcggcgcggcagcgcgcgctgcccgtgctgcggcagctgctggagagccagggtgtggagtccgacagcggcgagggcagcctgggcagcagcagcaatggcgcggtgccagcgcctcctgggcttgtgcagcagcatggcggcgtggcggcggcccgccagccgtaggcggctgtagcttgcccagcccgcgaatgctatgtgcgaaaattgaatacacgtgtatcatacctctcagctagtgtgcgtatctcttcccggaggcggcaaattcgtatgattgatcacgcaaacctgcattttctcgccccgcactcaaccctgcagctcctgccattcctgcactgctttctcgtcccgctg

SEQ ID NO: 2262 - DNA, 408 bp, Chlorella sorokiniana
  Clone ID: LIB3602-016-Q6-K1-E3
ccggggcgaaccaacccgtccgggagcagaccctcaagtacaagtggaacgagatccgcaacggccgcctcgccatgatggccttcctgggctttgctgcgcagtacgccgccaccggcaagggccccattgacaacctggttgaccacgtggccgaccccttccacaccacctttgtgcacaatggcgtgagcgtgcccttcatccagtaagcgcctgacggcatggcgcggttggcttgcggcggcgattgctgcctgggctggctctccgccgcccccaccccctgagaagaactccctcctgttccacttacgtgtattgctggcctgtacccatggctttcgtttgctgctgctccctccgcatgggcaccacggtgccaccccttgcaaaaaccgataattg

SEQ ID NO: 2263 - DNA, 368 bp, Chlorella sorokiniana
  Clone ID: LIB3602-016-Q6-K1-E4
ctgcctcctgtgtgtgatgcgccggacactattgtatgctcccctgttccgggctgcccgctgtacgctgctcgcccaccctgttccctaccccccctcgctccatctgtatccgtcgaccgctccgctgctctgatcccgattccactccagcaggcatttcctgccctcggctgctgcagttagtctctcgccacgattctcccctgcttccgttgtcgcagcagctcgctgtaaccagcgatgctaaaaaaaaaaaaaaaaaaaaaaaaaaaaaaaaaaaaaaaaagggaggccgatctagaagagaacaaaaaatacaaacacgtgcatgcgacgtaaaagctcctaattaaggggggcgtgag

SEQ ID NO: 2264 - DNA, 483 bp, Chlorella sorokiniana
  Clone ID: LIB3602-016-Q6-K1-E5
agccttccgcgccacgccgaagttccggcactgtctgcgatctgtcccaccccctgccgcacggtttacactgcaacgtgctgcaggagggctcttgtgtacaatgcatcatttcaaaggctggcagggatcgccgactctcttcccgcactgccacgtgccccacacacccccgaatgttttccctcatgccaatgtgcctgtcagcctcttcacttgtttctagaagcccgcttgctgacccgcccgcctttcccctcgttgtttgttgccaaaacccagccattgggctgttgctttgttgcctctccaaatgcacgcacgataccaactctgtcaaaggctttccgtaggacgattctgcgccccctctttcttcctcaacccttattggtccctcatctctccttccctcagcccgctgaccctgtatggcccgattttccagctcttgcctttgcgccgctgcagctgcgagctctt

SEQ ID NO: 2265 - DNA, 475 bp, Chlorella sorokiniana
  Clone ID: LIB3602-016-Q6-K1-E6
agcctccacactacacacgcacagctctcgcccagcgccagaaggtcggcaggcagcagtcccgcttcgcaacacccgcagctcgcagccccggccgccgccatgtcgctcaacggcatccagtacagcgagcgctactatgacgacgtgtatgagtaccggcacgtggtgctgccgcaggacattgccaagcggctgcccaaggacaagctgctgagcgagcccgaatggcgcgcgctgggcgtgcagcagtcgcgcggctgggttcactacgcccgccaccgacctgagccccacatcatgctgttccgccgtcccaagggctacggcacggcgcagcaggtggcggtccccatgcagcagtgatcctccctcggcaagcgttgcctgctgcactcaaacccgcagcaatgcggctgcggcagccagccagtagtaacgggccgcagcccttaggagcaggaggacgctagtg

SEQ ID NO: 2266 - DNA, 471 bp, Chlorella sorokiniana
  Clone ID: LIB3602-016-Q6-K1-E7
cggacgcgtggggcctggatgggcgtgcagcagcagccggaggcagcagggctggacggtttcaacctggcagcggcgtacgccttcctctgttatgcgctgtttgtcagcctgaccggcaagaaagtgtgaggcggcagttgcggcgcctgggcggcaacagtcggctttgtcagccgcatcacagctgcagccgctgagcacgccgagccacagttgagtgttggcgtgctgtttggtggctgcggccatgctgcgcacatggctggcaggccctgccgagaccggttgcctccatatcgagagccgcacaccatcgctgcttaccatttgcacactttccatcttgcttgctcttactgctgctgcgttcttccatgccctgcccctgcacacactccctgttcactgccgcacgctgcacatgcggaccagaagccattcatgccattctaccccgagcgctgccgc

SEQ ID NO: 2267 - DNA, 473 bp, Chlorella sorokiniana
  Clone ID: LIB3602-016-Q6-K1-E8
attccacgcaccaaggatctgggatcggcggcccgctagcccctatgctgtgcacagccctctccctctcccgcagcgccctgccaggccgccagctcctcaactcgcgcctcaggcacaccgcagctcccaggccggccgtcggcaggccagtgccagtgcggccgtcgcggccaggcgcacgcgccatgggtgccgccgcatccagcgaggcggacttcaccgccatggtgcagcagaagaatgccgagaacccggtgatggtctacagcaagacgtactgcccctactgctcggaggtgaagagcctgtttgagcggctgggagtgaacgccaaggtggtggagctggatgagctggcggacggcagcaaggtgcaggaggcgctggccaccgtgaccggccgccgcaccgtgccgcaggtgttcgtgggcggcaaccacgtgggcggatgcgacgacactgtggcagcc

SEQ ID NO: 2268 - DNA, 417 bp, Chlorella sorokiniana
  unsure (1)..(417): unsure at all n locations; Clone ID: LIB3602-016-Q6-K1-F1
gcttgatgcagtgcatgaccttcgcagccggccttgggtaagccgtgttgttccccgcccgtgcgatgctttgcgctcgctcctcgctgttgcattggattcattcgatgtcgcagtgggcagcacaggattgtgctgaatggctgtaacccacacaaagtcaaaaaaaaaaaaaaaaaaaaaaaaaaaaaaaaaaaaaaaaaaaaaaaaaaaaaaaaaaaaaaaaaaaaaaaaaaaaaaaaaaaaaaaaaaaaaaaaaaaaaaaaaaaaaaaaaaaaaaaaaaaaaaaataataaaaaaaaaaaaaaataaaaaaaannaaaanngggggggnttttaaaaggaaaaaaattaaaatttgggggggggggaggtttttttttttttattgggggaaaaaaaaaaaataaatggggg

SEQ ID NO: 2269 - DNA, 470 bp, Chlorella sorokiniana
  Clone ID: LIB3602-016-Q6-K1-F11
cattggcaaggacatcctgcgcttccacgccgtgtactggccagccatgctgatgagcgcgggactgccggtaccgcgccgcgtgtacggccacggattcctcaccaaggacggcctgaagatgggcaagagcctgggcaacgtgctggagcccacggcgctggtgggcgcctacggcccggacgctgtgcgctactacttcctgcgcgagatcgtgtttggccaggacggcgacttcagcgaggagcgcttccgcaacattgtgaacgccaacctggccaacgatgtgggcaacctgctcaaccgcacgctcaacctgctgaagaagaactgcggcggcgcgctgcccatcgacgcggcagcagtgcccgccgaccacccgctgcgtgtgctggtggcggaaaaggcgccggcggtggcggccgcatacgagcgcctgcgctttgaccaggcgtgtgccgaggcgctgg

SEQ ID NO: 2270 - DNA, 232 bp, Chlorella sorokiniana
  Clone ID: LIB3602-016-Q6-K1-F12
aacaccgctttcatgagaagattaacaacatgccatcgttcccttgctacgcctgccccgcccgtgcgctatctgcatcggacgctctgtttgcctgcgggcgcgctagctcctgggcgcaccgtacattgtgcatatgctcgctagtgtgctgctaggagtcagctggagtgtaattggctgttgcaattggcgacgttctgcacaaaataaaaagaagaaaactgagaac

SEQ ID NO: 2271 - DNA, 483 bp, Chlorella sorokiniana
  Clone ID: LIB3602-016-Q6-K1-F2
agccttccggttccttcctgtttgtgacggacgacgtatgggctgccagcacgcctcgagtggacctgtacaagtggctggtcgaggcgggcgcctttcagctcgacaggccgctgcgcctgctgtgggatcgctgcactgcgctggaccctcaggtggggtaccacccccgggggccatgcaccaaccagagcgccggcgtcttgagcgtgggcggcgttgactatggcagcttcgacattccatgactggaacctgcaaaatccccctgaccactccaccgccgcgtgaattgccagccaggcgctcggcagcgcgagctgccggcggccgttgctggctgcccctcgccccgtgctgggtgtcttccggcgcctcccgggccgatgtatttgcttgttgatgttcttcccaatttcattttgcccatcgcttagtgtcccaacctgctctgagtttccctctcgcccattcctccttaat

SEQ ID NO: 2272 - DNA, 455 bp, Chlorella sorokiniana
  Clone ID: LIB3602-016-Q6-K1-F3
gagacttgatacctactaggattccaacttctgatgctatcagtactgcatcgagcagttgatgcactttgcaaaggacggcgggcacgacatgtcatggacggagccgttcagcaccaagcagacggaggcggggtgcagggagcagtggggcgtggagcctcgcacgctctgggccagtgaggattgcggccgcaggcgcctgaaggcctacttcaacattgtgttcagcaacaggctgttgaacccctggagcggtacaaggtgtgctacacaacatatctgaagcgaacgacattgaaggctgttatcattacatacggttcacaccatttggatctaatgttaagaaacccgctggatccgccctttcgacacgaggcacatgcactataagagctgtacatcgcaaagtgggtggccctaacgcgcgagcgcagtcgagccaacgcaca

SEQ ID NO: 2273 - DNA, 262 bp, Chlorella sorokiniana
  Clone ID: LIB3602-016-Q6-K1-F5
agccttccgagcaggaaaacggtgcaccgcgcgtacggcggccacctggcggcgggcgtggtcaaggagcgcatcgtgcgcgccttcctggtggaggagcagaagatcgtgaagaaggtgctgaagctgcaggctgccaaggaggctgcgcaggccaaggccgcggcggcaggcagcaagggcaagaagaagtccaagaagtgagcggcgcacgcgagcggacagttgcgccccatgctcccgctgtaatgcaccctcgatg

SEQ ID NO: 2274 - DNA, 273 bp, Chlorella sorokiniana
  Clone ID: LIB3602-016-Q6-K1-F6
agccttccgggaaaaaaaaaaaaaaaaaaaaaaaaaaaaaaaaaaaaaaaaaaaaaaaaatttcaaaaaattaaaaaaaatccaaatttacgggcggggtctttcttcatggtcgcttttttttagcctcacctaaattcattttactctccttaatcttacaccctcttaccttgcaaacccctgttttacccaacttaatctgctttaaccatttccctctttaaccagctggcctaataacagaagacgccccttaccaaatcggccttc

SEQ ID NO: 2275 - DNA, 465 bp, Chlorella sorokiniana
  unsure (1)..(465): unsure at all n locations; Clone ID: LIB3602-016-Q6-K1-F7
cttgccagcacagccaactgcatcttgcacaaaggctttgtttaacgaaataagtgaaataagtcaatgatttcattcaagcaacctcaatgttggcaaatgtttgcaaaccaaactgnaaaaaaaaaaaaaaaaaaaaaaaaaaaaaaaaaaaaaaaaaaaaaaaaaaaaaaaaaatgggaggaagaaaaaaaaatacaaaaaataaaaaaagctggaaatcaaaaaaaaaaaaatttaaagggggggggcccggtttaattaaaaaactttcggcccaagggggggcccttttttaaccttttcccttttttaccccccgtggccgttattttttaaggcccatcaaattaagaactttttttttttaacccaaaaaaaatcgggttttttaaaggggggtctaaaaaaaagacaagcgcccttcaaaaattaaattttaaactgggccgggggggggtgggt

SEQ ID NO: 2276 - DNA, 473 bp, Chlorella sorokiniana
  Clone ID: LIB3602-016-Q6-K1-F8
cacgaaggggccccagagcgccgaaacgcttcgtggacggcgtgggcacctcccgtcccgtcgcccgcccaactccccggccaccagcgcactccagctgccatggaggtggaggccgtgcaggcggcagcacaggatgtggcgacaaaccaggtggcggcagctgaggagcttttcgcagacgtggacacactgtgccagcaggcggcggccgtcctggcagagctggtcaagcagggagacgaggcggaccgccacaagctgcgcactgcagcgctgaagctgcgccttgcgcagctcgccaaggagcggcgggcgagggaagcggcggaggcagccgccttccaggcgcggcagcgggagctggaccggctgctgcaggaggagcgtgcgctgcagcagcagggtggcggggcgctggaggggcccctgcccagcgccgtcctggcctcgccagtcagcaggactggctg

SEQ ID NO: 2277 - DNA, 463 bp, Chlorella sorokiniana
  unsure (1)..(463): unsure at all n locations; Clone ID: LIB3602-016-Q6-K1-F9
gcaatggcggtgggtgggtgcatcagagccctgcagctgggaggcgcaaagaggcggcgctgctaccacctgaccttggccgtgctgcgctagcgagcggctgctgtgccgtgcanctgctgcctgccacgctggcccaacacccagtcgcagtgctcgcccggcctcgacacctttgccctgcccacttcgccgcgtcccatcaaccccttgctactactaccttccgcacctgtccattcacacctccccatgcgtcgtcccgtgctgctgcagtaccccgtcaccgtgctcaacctgctggttcgttgtgtgctgcaatctgccttgccggcctgcccatccatctcttgctgcagtaccccgtcaccgtgctcaacctgccctcggtggtggagagctacaagacgctggacgatgtgaacctggtcaaaaccaccgacattgggcaagtgctggtggt

SEQ ID NO: 2278 - DNA, 217 bp, Chlorella sorokiniana
  Clone ID: LIB3602-016-Q6-K1-G1
cgcccacagtgaggagcacgcggccgggggcctccgcccctgcagccgcgtgtgaagagccacgagtatagcaccccgcgctgccaggcctcgcggccggcgcgcacaaatgactagcacccgcgcctgcggccggcgctgctggccggtcgcggccgggctggctgtcccaggaagtgacatgcactgatggttttgcccatgcatgcggcactgt

SEQ ID NO: 2279 - DNA, 475 bp, Chlorella sorokiniana
  Clone ID: LIB3602-016-Q6-K1-G10
gcgcgcaggcgcagcaggaggagcaggaacggcagcaggatggcgcagcggcgcccgcacagaacggccagctgaatggcggggtgcacagcgcggatagcagcgatggcagcagcgatgatgaggcaatggccgatgcagaaacgccagcagcagaggcgccgccggcgacacggcagcagcggcggcggaggcaggtggaggaggcaccagccgaggcggcagcgcagcaggaggcagacgagcaggaggaagaggagcagccagccaagacgcccaagacgcgcaagaaggcggctgcaggcgcagctggcacggcggccaaggccaccgctcgcaaaaagccgccagcaacggcaggcaaggccacggcggcggcagcggcggcaaagcagaggaagaagcggcgtgtatcggcttgagccctagtgccgtttcatgtcttgttgtaggcatgccaacacctgtaaacagc

SEQ ID NO: 2280 - DNA, 301 bp, Chlorella sorokiniana
  unsure (1)..(301): unsure at all n locations; Clone ID: LIB3602-016-Q6-K1-G12
gaggtggacaaggacaccatggacatgctgcgcggcatgaacatggcgggcctgccgggcgtgtccgtccagcaggggggccgcggcgacttccagaagcccggcggcttccagcagcgccctccccgccagtgagcgtaccccaggaggagcggcgtggcgcggcggcggcagcccacccgcggcagcagcngnncnccagcggcagcccaccacagcggcgatgcgcggccgggcggacccgtagcaccatgacgcccggccagctgcagccgccgccgcgcctgctgtaactaacctt

SEQ ID NO: 2281 - DNA, 225 bp, Chlorella sorokiniana
  unsure (1)..(225): unsure at all n locations; Clone ID: LIB3602-016-Q6-K1-G2
ttgcccgaccacacggcgggcagcctccgcgttttccaacacaggagttaacggtccgctcctacgcagtgtacaggcgcctcggatgagcaggctggctccctaccgtgcgctcgcccatgccatgagccgccagtgctgctgacgtacacgggcgctcgggacacgatatatgctgcgcacctgcggcccctctgatgggcaaagctgcaacagatccgcngg

SEQ ID NO: 2282 - DNA, 131 bp, Chlorella sorokiniana
  unsure (1)..(131): unsure at all n locations; Clone ID: LIB3602-016-Q6-K1-G3
ccgggncgaaccaacccttccggggactggttgaattgttcgcctccagccgcccatctgctttgcctgccctgctttccttggctcaaatcgagtgttttgactgtgcaactgtaacatctgcgcggaag

SEQ ID NO: 2283 - DNA, 104 bp, Chlorella sorokiniana
  Clone ID: LIB3602-016-Q6-K1-G4
tggaataaaaaaataaaaaaaaaaaaaaacaagtttttgatctggatcgtctgctttaaatgatccaaatttactttctcgtgtgtgcaactttatcattttcg

SEQ ID NO: 2284 - DNA, 425 bp, Chlorella sorokiniana
  Clone ID: LIB3602-016-Q6-K1-G6
gtgcggtacgcgcccgacctgtcagccgaggaagtgaaggcagggatggagatgctggatgccaacaacgacaagctcatttcgctgagcgagtttgtggactggtgggtcaagaaggcggcgtgaggcagcgaggggcaggcaagcggcgcgagcgaacgagccgcaggtgatattgcaccagccagcacgcctagtttggcttggaagcttgccgcatgcttcactagtcgcccctcagtctgcatgattgcatgattgggcctgccccggcgttttgtatttaatgcgcactctgctgcctctgcccctgcctccttactgcatgctgtagttgccgccttaacactgaccatctattccgcttgctcgattcactgtaagcacctcacctcaaaaaaaaaaaaaaaaaaaaaaatagattt

SEQ ID NO: 2285 - DNA, 289 bp, Chlorella sorokiniana
  unsure (1)..(289): unsure at all n locations; Clone ID: LIB3602-016-Q6-K1-G7
atgcccgagcaaaatgctgctgccgctggcaaggcgtgctttgcgcctgccacggccgccgccgtctctctgcccaggctgcatccccctacctgcttacaccgcttgcctgcctgatgtctgctgcctctcgctgctcacccctccctgcttccctctgttccgctccccgtactgttgccctctctctgaccgtgctttgcaagtttgacgtccgaccctcttgacatccagggggcactgcagtcttagcctgacacacagcatcacgtgtaatgcactttngtgg

SEQ ID NO: 2286 - DNA, 287 bp, Chlorella sorokiniana
  Clone ID: LIB3602-016-Q6-K1-G8
gcgacgggcacagcagcgcccgctgaccgccgctgccgtgagcacggccacccctgcacaaccatgaaccatctgcttcatgatcacagcccacttttttcatgtcattctgcatgcccgtgtggggtgcctgggcagtcgcaccttttgagaagaaccatacttcaccccgtgctgaattgagccaccatcacccgaagccgctgtggcagcgtgcagcgtttttccttcatcaacaccacgactcgctgagtgggcatcgtagtttcgtgtaacaaacacctcct

SEQ ID NO: 2287 - DNA, 478 bp, Chlorella sorokiniana
  Clone ID: LIB3602-016-Q6-K1-G9
gatcgccacccgcgccaccagcgaggattctgtcgtcgagaaggccaagggagccctcaactctgccaaggaagccgtgggcgacatgactcagaaggttaaggagagcctgtcccctgctgccgaccatgtcaaggaggctgcccgcgaggtgggcactgccgtgaaggaggacgccaccaccgccaaggacaaggtggctgatgccgccaccgccgccggcgattccgcaaaggccaaggcagaggccgccaagcagcgcatgtcggaggctgcggagggagctaaggacggcgccgccgacatgatggagcgcgccaaagagaagggcaaggacatggccaacaccgccgccgacaaggcggaggacatgattgaaaagatccggccctaaaccaagggctataccttgctggctgtggcggcaacaaaaccgagcccaccaaacagccagcggcctatgccggcagccctcgtg

SEQ ID NO: 2288 - DNA, 210 bp, Chlorella sorokiniana
  Clone ID: LIB3602-016-Q6-K1-H1
cacgccgctgcatagctggatcaaccaagttgctgctccatgtctcgtctgcgccgggctggctagcctgagcatttgatgcgccttgcacgctgagctggccccttgcgcatttgactggtggcatttgatcgccgttgtccctgattctttcctgtacaaccaactgtgtagattgcaagcatgagatgcctgtaacaatgcaagccc

SEQ ID NO: 2289 - DNA, 109 bp, Chlorella sorokiniana
  Clone ID: LIB3602-016-Q6-K1-H10
gcgaacaagaaacaccaaaaaaaacaacccctaactctaacagaagattgtctaggctgatgcaacacgaacactaacacactgccgggcctaagggccggcctgcgtg

SEQ ID NO: 2290 - DNA, 472 bp, Chlorella sorokiniana
  Clone ID: LIB3602-016-Q6-K1-H11
gcgcgcccatctggtcaagggccacggcctggaccaccgccactttgacaagatcaagcagtaccttggagagacgctgcaggagatgggcgtcaagcaggatgtgatccagcacgccgccggagtggtggagtccacccgcgacgaatttgacttccccaacaactgcgcacccaactgattttcatcaacccaaccccagcctgagcgctcattccatcgattttgagcggggagcgccagttgccgagcgcgcccagggggcccaggagcctgcaaatcgtttgccagcccttgctgcattgaagagccatcagccattttcgcaccaagcccgccgagttgcctggcacttgcatttcattaccgcctgcccgacattacgcttgcccgagttgattgtacctgcatttcaatccagagacacaccgcgcctgccaatcctcgcactgccggtttagtaccctgcaag

SEQ ID NO: 2291 - DNA, 331 bp, Chlorella sorokiniana
  Clone ID: LIB3602-016-Q6-K1-H2
gaagcaacggccagacctgccatcaacgagcctgtgagcgcaccccaccacccgaagaactacggagctggggcgctaccagctcgaccggctaccacacgcctacaggagaccgaacaccaccctgacggcgctgggagcgatgaccaggagatgggcagcgcaccgcgtgcgccccctgcaccagatcatcaagaccgcacgctacggcgcccagtcaagcgcgcggcccgcagcaactgcacgacagcaagacagctttccctggcggcaagtgctcccccctcgcccccaagttccgaccaccttaagggcgggcccccaacgggcc

SEQ ID NO: 2292 - DNA, 123 bp, Chlorella sorokiniana
  Clone ID: LIB3602-016-Q6-K1-H3
aaaaaaaaaaaaaaaaaaaaaaaaaaaaaaaaattgggcggaaagatattttataaaaaaaataaaataagaataaataaaaaggggggggtttttatatagtgggaggtgagttaaataaat

SEQ ID NO: 2293 - DNA, 497 bp, Chlorella sorokiniana
  unsure (1)..(497): unsure at all n locations; Clone ID: LIB3602-016-Q6-K1-H4
tccggcggcaagatggaggncggagggcaccttctgccgtgcctggacggagtgggtatcctgtgtaccgcgtccatggnnagcgtaccggcgggcggcggcggcaagcgagattgtgcgctgttggctgnagagccaggtcaacctacaactaccctcgcagttcttacctcgtcntttgcgcctggcctccatgtacaaattgcgatgctgatgaaccggctggggctttcgcaggcgggagaggccaagtacctgatcaacgtgggctggacgagcgtgtgggtcaaagtcgcctcgcagtgggtcaccgtcgcgctctactgctggacgctggtcgcacccgtcctcttccctgaccgcgacttcagctagggcgtggccagctgatcgctcctgcgtaccgtgcctccgtactgcgcgcgagctgtaatatcagcctgacgacttgtaccaaccgacctgcacgctgccttctttgtgtttcattgcgggct

SEQ ID NO: 2294 - DNA, 392 bp, Chlorella sorokiniana
  unsure (1)..(392): unsure at all n locations; Clone ID: LIB3602-016-Q6-K1-H5
gtccgatcccccgcaagtgctcgtggaccaacaagctgatcacggccaaggaccacggcagcgtgcagatcaacattggccacctggacgagagcggcgtgtacaccaactcgttctccaccttcgcgctctgcggccaggtccgcgtcaagggcgaggctgacagcgctctggaccatctgtgggccaagaagcgggctgagatcggccagtgaagcgctgctgagttctagccgccagccggctgggctacacagctgccagccggcggtgggccagccagccttgggtcggccagtgatgcgctgcgaagcaaagtgctgagcgggcgggcgctccggcgcgccgccgccagccacgcagtgcaagctgtaacgcgcctccttgcnnaa

SEQ ID NO: 2295 - DNA, 474 bp, Chlorella sorokiniana
  Clone ID: LIB3602-016-Q6-K1-H7
gctgcggatgcgctggcctggacgcatgttcgcgccatctttgttgatcgcctcaccagcggcgatgtgacgctgccgagcggcgagacccggcacctgcgcgccattgaccccgtctatgtcttccctggcctggccctgggtgtcactatgtcgcgctgcacccgcgtgcgcgaagacatgtttattgatgcggccaaggcgctggcgcgctgggtgcccgaggaggagcgggcggccggcacgctcatgccgcccgtggccgcgctgcgggaagtgtcagcccacgtggcggcggctgtggccaacagggcatacagcgtaggggtggccacagagcttccccgcccgcatgacctggtggcacaggcgcactcctggatgtacaattccaagtaccgccggtaccggtgagcatggcaggcatggatcatcgcagcaggaacatgcatgctcacggctcgatgcgtcctg

SEQ ID NO: 2296 - DNA, 237 bp, Chlorella sorokiniana
  Clone ID: LIB3602-016-Q6-K1-H8
ccggaaaacccacgcgtggcggagaagaagctgttggatgcgctgcccttttatgagcgcgctattgctctccccattgacatcaacggcaccctgatggacggcttcttatgcactacctggcggttaacaacctctataagctgcccaccaagctccagcttattgccaccattgccctcctcatcaaccacgtacccaccaatttggcacccgtcatcaaccatgtccccacca

SEQ ID NO: 2297 - DNA, 490 bp, Chlorella sorokiniana
  Clone ID: LIB3602-016-Q6-K1-H9
gcgaaaaaaaaaaaaaaaaaaaaaaaaaaaaaaaaaaaaaaaaaaaaattatataaaaaaaaaaaaaaaaaaaaaaaaaaaaaaggggggaaaaaaaaaaaaaaaaaaggggagaaaaaaaaaaaaaaaaaaaaaaaaggggggggggggttttagaggataaaagtttatttccggttgtttggaaggtaatattttttttttgggggaactaaaattaatttaatgggggggggtttaaaaagttgggaatgggaaaaactttgggtttaccaaattaaatggtttggaaaaaaatcccttttttgaaagtggggttaataaaaaaagggcccgcacatttgggtttttaaaaaatttgcaaaatttggattggaaattggagaccccctttttacgggtttatataaggggggggggtggggggttttatggaagggggacggtttaatttggaagggcttttagggccggtttttttttttttttt

SEQ ID NO: 2298 - DNA, 331 bp, Chlorella sorokiniana
  Clone ID: LIB3602-017-Q6-K1-A1
cccacgcgtccggcacctgcccgacgccaagacaggcgagaagcgcgacctgcccgtgcgcggcctgttctacggcatcggccacaagcccaactcggacttgctggccggccagattgcgctggacaaggaggggtacgtggtggtgcaccacggcgggcgcaccagcgtggagggcgtgtttgcggcgggagacctgcacgacgtggagtggcgccaggccatcaccgcggcaggcagcggctgccatgcggcgctggctgttgagcggtacctcagcgccaacgggctggcgcaagagttcagccaagctgtgaccgaggagaagtac

SEQ ID NO: 2299 - DNA, 371 bp, Chlorella sorokiniana
  unsure (1)..(371): unsure at all n locations; Clone ID: LIB3602-017-Q6-K1-A10
taccccggtgaggcctttgaccccttgggcctggctgacaaccccaacaccctggctgagctcaaggtgaaggagatcaagaacggccgcctcgccatggtgtccatgtttggcttcttcatccaggccattgtgaccggcaagggccccgtgcagaacctgtccgaccacctggcctccccctccaccgacaacttctactccctgtacgccaagaccctggcgtaagcggcctgcacttgctcctgcttgagcctcgactggcggcgggcgtgaccctgtggcagtgcgctcccgcttgcgcccgctgcctgacttgacttcagctccactgttgcaccgaggggatggtgtaacatgtatgctgggng

SEQ ID NO: 2300 - DNA, 534 bp, Chlorella sorokiniana
  Clone ID: LIB3602-017-Q6-K1-A11
gcggcctggatgaggacgtgttcctgcaccccaactccaccctgcactctaccgtccccgagtttgtggtgtacgccgagctgagccggaccgccaagcggccatacatggggggtgtcacggccattgagccgcagtggctgcccgatgtggcgcccccgctgtgcaccttctcgcagccgctggccgagcctgcgcccttctacaagcccgcggcagacaaggtgctctgctggcgcgacgtcacctttgggcggcacgactgggcgctgccgcgctgcacagcgtcgcacccagatgccacagagcgctgcgccgtgttcgccgctgcgctgctggagggccgcgtgctgcccagctttgcaggcctgcgtgccgggctggcggtgccgccgtccatgctgctgcggccagagatgcgggtgcacaagcgggcctccgacctgctggctgcgctgaccgccgcccgcgtcgacagccgctccgcactcgcggtcaagtgggcgcagtcgcccggctttctgcgccacgagc

SEQ ID NO: 2301 - DNA, 216 bp, Chlorella sorokiniana
  Clone ID: LIB3602-017-Q6-K1-A12
ccgggaaaaaaaaaaacactaaaaaacaacaaaaccatactacaaaccatttttttttcaacaaaaaccaaaaaaaaaaaatcttgggaggggaaacaaaacctttcccccggctttgttttccccccacctttttttgggataccacctccttccccccccccccagacccctcccccctttttttccttgccccccttgtaaatcccccccccc

SEQ ID NO: 2302 - DNA, 426 bp, Chlorella sorokiniana
  Clone ID: LIB3602-017-Q6-K1-A2
attccaggccacgcgtacgcatccgcaaggatgacgaggtgtctgtcttgcgcggcacctacaagggccgcgagggcaaggtggtccaggtgtaccgcaagaagtgggtgatccacatcgagcgcatcacccgcgagaaggtcaacggcgccaccgtgaacgtgggcgtggacccctccaaggtggtggtcaccaagctgaagctggacaaggaccggcgccagctgctggagcgcaagcgcgcgggcaagggcctggccgacaagggcaagttcacggaggcggaggtggcggccatggagaacgtggactaagcgccacgcccaccccgcagcagccagcagcagcagcagtgttgaggccgcgggcgggccaccgacgccagtgcggctcgggtggcggcggcccgacggccccggtgggggc

SEQ ID NO: 2303 - DNA, 367 bp, Chlorella sorokiniana
  Clone ID: LIB3602-017-Q6-K1-A4
ggcgcgagcaggatctaggagcccatgctgcgcctgtgcatgcgcataacttacaatatctgtccacacgccagaagcgatggggggcactgcgcgaagctcgtgggcttaaatgcttccacatctcaacagctgcaacaacaaggaatactccaagctggtgactgcacccaacaaaagcgcaccacgctggactaaatttaccgtgacactttcgctcgacacggccttaaggttaagaacacatacctcggtgggtgtccaatcggcaacgccgggcctgagaccaacaattttcacgtgctacattgcacctcagccacccgctctgtggaccgcaagcatgtggcttttttcaacccaccgg

SEQ ID NO: 2304 - DNA, 199 bp, Chlorella sorokiniana
  Clone ID: LIB3602-017-Q6-K1-A5
gccatctggggggggtttcaatttaccaaccaggggggaaaacaacaacattaaaagttcaaacaaaacataaatcaattttaaaaatggatcaaacaaaacccccgcaactaatgccatcccaaacaatctcccccttaccccaccttaattaactacatgcacttcaccaccctttcacccccgctccatggtctcc

SEQ ID NO: 2305 - DNA, 200 bp, Chlorella sorokiniana
  Clone ID: LIB3602-017-Q6-K1-A6
gctgtttatgccactctcgataggttctctcccacgatgtgtaatgtttcctcgggcaaaaaaaaaaaaaaaaaaaaggggagaaaaaaaaaaaaaaaaaagggggggcgaacaataatgggcgaccaaacttacgtacccttgcttccgaccgccttccttcgtcgtcctccctcttatatccagtctactggcccttt

SEQ ID NO: 2306 - DNA, 488 bp, Chlorella sorokiniana
  unsure (1)..(488): unsure at all n locations; Clone ID: LIB3602-017-Q6-K1-A7
cgggtacgacgccaacgcagtccgccacgccgcactgggctgccgcttcccttttccttggggtggcnnaccttcaacttccatccttacaatgtnnngcagcagcnncggtggttcaagcttgtgcngacnanncctcgcnncgcctgggaagcngcngccnnngtcattacncangtnngtcantnncacgnggcncatnnnggtttcngnnatccctttttggcttgggtggagaagtnntctgcacncnnacctcanncactggttntnngcggtgaatggggcaagcnntaagcacgcgcctcgcnntgggcccccgcnncccggcagcaacctatgnnngctgcgccgacgctttgtgctggagggggcgggatgcccaatganncaagggagcctgganntgctgggccgcgcctggcttggtnngcaacggccgcgaaacgtcaagcccttggggtgattgacgtcanncgcaccagctg

SEQ ID NO: 2307 - DNA, 349 bp, Chlorella sorokiniana
  unsure (1)..(349): unsure at all n locations; Clone ID: LIB3602-017-Q6-K1-A8
aaaaaaaaataaaaaataaaaaaaaacttntttttaacacatttattttttaaaaaaaaaaaaaaaaaaaaaaaaaaggaagaggaataaatttaaaaagggggcgggggctctaaaacatccaactttccttccccttccttgccccctcctactttttctatagtttcacctaaatccaattcattgcccttctttttccaccgtcattactcgaaaacccctgccgttacccaatttaatctcctttctccacatcccccttttcccacctttagtaaatccaaaaagtcccccccctctctcccttcccaacattttcccaccctaaatccctattgaaaccccc

SEQ ID NO: 2308 - DNA, 518 bp, Chlorella sorokiniana
  Clone ID: LIB3602-017-Q6-K1-A9
aggagcaggcgctgggcccgcacgtgcgagtagtgcgtgtcatgcccaacactccagccctggtgcagtgcggcgcgactgcgtacgcgttggggcggatgccactgagcgggatgccgagctggtggacctcctgtttagcagcgtgggcttctgcattcaagtgcaagagaagcagctggatgcagtgacagggctgagcggctcgggtcctgcttttgtctacctaatgatcgaggcgctggcggatggcggcgtggcggcgggtctgccgcgcgagactgccctggcgttggccgccaagacagtgaagggtgctgcacagatggtgttctctgatgacgccacctcagaaagcggcatggtgcacccgggtgtgctcaaagaccgggtggccagccccgcgggcaccaccattgcagggctgacggagctggagagcagcggtgtgcgtggcgccttcatccgggcggtcacgcgggcagctgcacgcagcaaggagctggctggttgattct

SEQ ID NO: 2309 - DNA, 484 bp, Chlorella sorokiniana
  Clone ID: LIB3602-017-Q6-K1-B1
gaagagcaccaagatgaaccgcacgattgtggtgcgccgcgactacctgcactacatcaagaagtaccagcggtacgagaagcgccacaccaacatctcggcgcacatctcgccctgcttccgctgccacgagggcgacaccgtggtcatcggccagtgccggcccctgtccaagacggtgcgcttcaacgtgctgcgcgtcatccccgcgggctctggcgccaagaagggcttcggctccttctaagcaggctggactaagggcctcttgccttgctggctgaagccctcgacagcagcagcagcagccccagcacggcatgcaagcgctgcagacgccctgctgccctgagtaagcgccgccatgtgccggcggtggcagcagcaccgcccgccttgcatacacctggcccctaggatgccggccacggggcgcccagtagtcgccagacggcggggcgcagcgcatgtaaccgtgtgcatg

SEQ ID NO: 2310 - DNA, 459 bp, Chlorella sorokiniana
  Clone ID: LIB3602-017-Q6-K1-B10
caagggctacgagtacaagatgcgcctggtgtacgcccatttccccatcaacatcaacatcgagaacaagggcggcaaggtggagatccgcaacttcctgggcgagaagattgtgcgcgtggtggacatgctgccgggcgtgacctgcgagcgcagcgccgccgtcaaggacgagctgatcctgaccggcaacgacatcgagctggtgtcccgcagcagcgcgctgatccaccagaagtgcctggtgaagaagaaggacatccgcaagttcctggacggcatctacctcagcgagcgcggcaccctggtgaagcccgagtaagcggagcccgcacgttgcagtagaggtggcggcacgagcgcagcagtgcgcagcgctcacgcccgcgccggcggagcatcggcggcggcagccggccccagctgcggcgctgcacgccatgtaacgcacacgttagc

SEQ ID NO: 2311 - DNA, 230 bp, Chlorella sorokiniana
  unsure (1)..(230): unsure at all n locations; Clone ID: LIB3602-017-Q6-K1-B11
gtcgctctttcattggtggcggctgcgccacctgactctgtcgttttttgcctgctgctgttcattcagcaccccacctccggaaacacaagccctcggtgcgcctctgctgccagcgccctccgaaccgccatctctgctttttccacccttttgcaccacccctcgcctcatggccgttactacggtgtagcgcaagtcgacgcagccttgtaaagcctatgcanggg

SEQ ID NO: 2312 - DNA, 508 bp, Chlorella sorokiniana
  Clone ID: LIB3602-017-Q6-K1-B12
acccatccgaacaaaaaaaacaccaaactaaaaacaaaaaaaaaaaaaaaaaaaaaataaataaaaaaaaaaaaaaaaaaaaaaaaaaaaaggaaggaaaaaaaaaaaaaagggggggggggaaaaaaaaaggggggcccccctttaaaaattccgggcttccttcctggggtcccaaattttttccttttttttggggcccctaaattttttttgtggcccccattttaaaaacccggggcggggaaaaccccggggttccccaaaaaaaaccccttgggacccaaccctttttcccccggggggataatccctaaaaggcccggcccatatcccctttcaaaccattgcccaccctttttggaaaatgggcccccccctttttgggaaatttaaccccccttggttgggtttttaacccccggggtgtcggttttttttccaagggcctaaccccccttttttttggttttttcccctttttttttcccattttgccctttttttc

SEQ ID NO: 2313 - DNA, 321 bp, Chlorella sorokiniana
  unsure (1)..(321): unsure at all n locations; Clone ID: LIB3602-017-Q6-K1-B2
acccacgcgtggcagactagggtgcactcggcagacgagcccagatgnccttggctggtggcagtctacgactcaaatggatgccacgcagcagctttgagtggctttgacancgggccacanggggccgcaacagcaaggggccgcccctaattgtcaatgtgtgggtgggatcggcttgtgtcatgacatgtgcacagtccacagttgctgccccgcctttgttgatcccgtgatctgcttcatgtttaaaactgccttagttgcatgccatcagcatctgatctgagcaagcacttgtgtaaagggttacagngcnna

SEQ ID NO: 2314 - DNA, 385 bp, Chlorella sorokiniana
  Clone ID: LIB3602-017-Q6-K1-B3
atcaacaccacgacagcagggctggcgtgggagtggatggaggactggctcaaggtgcaggagggcaagagcggcgggcagatgcccaagcagtaccgcctcggccagttcaagggcggcggctaggcggcgggcaccgggcggcgggcttgcacgttgcaaacgctattgcactgcgcgcgtgcccccagccggcgccacctgtgactgaccttttccctccacctccttgacgcatacattgtcaacactgcctgcttgttgcttgctctcgctctgtgctgctgcttctgccgcttaattgcctgggccccggcgcattgaccctgacgctgcggcggcccggccgttataaaccagccgctatcctgtgtaatttgaaaca

SEQ ID NO: 2315 - DNA, 464 bp, Chlorella sorokiniana
  unsure (1)..(464): unsure at all n locations; Clone ID: LIB3602-017-Q6-K1-B4
tgaggactcgcgcatcggactggcagcagccaaggcggcaggcatgcggtgtgttgtcaccgagagccactacaccaagggggaggactttaaggttgcagatgccgtgtttgactgcatcggcgaggcgggcgacgagcggttcagcctcaacgacctgaccacgccaggtctgttggctctttctggctgaacccgccgctgccgatggacgaggacggcaactgggtcaacccgccggcacggccggccgagttcgtggatgtggacccgctgtgaagataatgctgcagccacgccaattcattttctgcacctgtgtgtgcagccaatggctgccatccgtcattggtttcagagcacttgcctgggatttgttttgcgttgacccactcccaagccaattcatgacgcaccgctcagtcatccagcttgctgtgcatttttaagccacctgccncnna

SEQ ID NO: 2316 - DNA, 525 bp, Chlorella sorokiniana
  Clone ID: LIB3602-017-Q6-K1-B5
cccacgcgtccggtaccccaccggcactaaggagtcagaggtgattggcctggagcggctggccgccatctgcaaggcagtcagcatccccgtggtgtccattggaggcgtgaagaccagcaatgcggcagacacggtcgccgcgggctgcgccggcgcagcggttgtgtcgggcctgttcgcagttgagagccccacggaagcagctcgccagctgctgtcggtggtggatggcgcactggcggcgcggcagtaagatgcaaggctggctgctggctgcggcttaggagctaccgagtggagctttgcggcgcgagaggcagcggcagccgcgccagcccggcgctcagcccgcttgctggggcccaagcataaccaacaataaccaaccaggagagagcggcagcaccctgcctgcttgccaaacgtgctttcacccatgcgtcaatatacacgagttgccttttgttgcccacccatccttccgtcagggtccacccacctgttgtgttttccatcgtgccc

SEQ ID NO: 2317 - DNA, 397 bp, Chlorella sorokiniana
  unsure (1)..(397): unsure at all n locations; Clone ID: LIB3602-017-Q6-K1-B6
gcggcgcaccatgctccttccccacaccgaccctgcaccttggccctcgtattgctgccgtccgtcgcctgccgtgccccgccagcccgcctcatggggcgctccatgcagctcacatccccctggcaggctggctgagcacttaggctagacagcagctgcccgttggcctccctgcacccggttttgctcccttcttgcttccacaacccgcttgcagcaacgttgctcgtgcactgctcccagcagccggtggtgctcaacgatggggtcacccggacacccgacctccgctgttgttgtttcattccagcattgcatgcccacgttgtgttgtttccagagccagtcagcctgtggaccaggcccagcctctgtaacccaagcaagcnnnnna

SEQ ID NO: 2318 - DNA, 520 bp, Chlorella sorokiniana
  unsure (1)..(520): unsure at all n locations; Clone ID: LIB3602-017-Q6-K1-B7
cggcaaggtgcacaccgtgcccaccaaggtcaccggcgagtgcggcagcgtgaccgtgcggctgatccccgccccccgcggtgccggcattgtggcggcccgcacccccaagaaggtgctgcagatggctggcattgaggactgctacacctgctcccgcggctccacccgcaccctgggcaactttgtgaaggccaccttctacgccctggccaacacctacggcttcctcacccccgacctctggcgcgagaccgtgttcaccaagagcccgctgcaggagtactccgacttcctggccaagccggtggttggcaaggcctactgagcggcctccccaatgcccgccgcccgcgcgccgnggnggcaggagcagcagcgtaacagcagcgccctgacgcgaggatagatgagagttgggaccccagtggccgctggggcgctgcgctggcaaggcaagccggcgccccggcacacacctaacaccctggtgttgcattgggagacccgtgtaacaccg

SEQ ID NO: 2319 - DNA, 493 bp, Chlorella sorokiniana
  unsure (1)..(493): unsure at all n locations; Clone ID: LIB3602-017-Q6-K1-B8
ggggagcaagtgaaatccctcacgcagcagctggccacctgccgcgctgagctggccaagctgcaggaggccgagaagcgccgcagctcgggcggctcccatgcggcagggaaacagacgccccagcagctgcaggtgcaggcgccgcctgaggcggggggcccacctgcggggggcgctgcagaggcaggcgccgccccggccacggagtttgctgcggccgagcaggagccagacaatgctgcaccggcagatacaagcggcccgggcgccggcggggcagcgctttcatcgctaggcaccacggatgctgctggcgtgctggaacagcttcaggctggtggggcagtcgcacctccgcctgtgcagcagaggcgtcaggccgcctcgtccgacccttcggctggccagacgcagnctccgcagggtgaggattgacgtgctgcagaaacgccagcgggctatgatgccctttatcatcctggaaaacctg

SEQ ID NO: 2320 - DNA, 352 bp, Chlorella sorokiniana
  Clone ID: LIB3602-017-Q6-K1-B9
ggggagcaagtgaaatccctcacgcatcatctggccacctgtttcgcttagctggccaagctgcatgaggccgaggggcgcggcatctcgtgcggctccggtgcggcacaaaaacagactccccatcagctgcaggtgcaggcgccgcctgaggcggggggcccacctgcggggggcgctgcataggcaggcgccgccccggtcacggagtttgctgccgccgagcaggatccagacaatgctgtaccggcagatacaagcggtccgggcgccggcggagcagcgctttcatcgctaggcaccaccgatgctgctggcgttctagaacaccttcatgctggtggggcagtcg

SEQ ID NO: 2321 - DNA, 529 bp, Chlorella sorokiniana
  Clone ID: LIB3602-017-Q6-K1-C1
cgctgatagccaagccccactgccacggctgccaggcggcccttggctgcagagcctgcagtggcttagcacgagcatcgacaccctgctcgaaagcaccaccgtgctgcgggcagcaacacagttagagcatttgggcctctggggctctcctgcggatgtcattgactgggatgacccggccgccgctgccctgtttgagtggctggcgtgccacccacccctgcgccgcctgacagtggatgattcaaccaacacaaaggatttcgcggccagtggattcttcaatcattgcatgcagctgtgccgccgccgccccgccctgctggtgcaatggcccaggcgggagagccaggggcagacggtgaatcagcgcctggacatccagcaacccttttgaggcagactgctgtgctaattggcttgtctaacagtttcccgcacacccccagtttctgtgctcgattttgctcttgcttgctgtcgcggcggtgctccctctcgtcctgcccacgcctctttgttgtat

SEQ ID NO: 2322 - DNA, 267 bp, Chlorella sorokiniana
  unsure (1)..(267): unsure at all n locations; Clone ID: LIB3602-017-Q6-K1-C10
tggaagctaaaaaggatatgaaggaaaacaacgtgtccctgatagattttttttaagttaaggggcggtttcttccctttttaaagctattccctggcgtccgctagaagcaataaatttggcagggcttcttcccgctggccgttgtgaatgaccaaaggttacaaaangaagggtcctagcacctggttcttttttatggagcccaaaattgaataaaatgcgcctgacattacaaccctgctaacggaaaaacactcggtttac

SEQ ID NO: 2323 - DNA, 235 bp, Chlorella sorokiniana
  Clone ID: LIB3602-017-Q6-K1-C11
cggacgcgtgggcgttcatatggcaccagaaacctttcatttgcatgttctgcacccgacctcccgccggaggggagcagcccacggccattgctgaccctgcatgacccgaccctgcgagccaccttcccctgcatcctgcttgcttgagagaccctcagtcacctattcccccatgtaacactctcagctggttaaaaaaaaaaaaaaaaaaaaaaaagcataaaaaataaaa

SEQ ID NO: 2324 - DNA, 413 bp, Chlorella sorokiniana
  unsure (1)..(413): unsure at all n locations; Clone ID: LIB3602-017-Q6-K1-C12
gcaagatggcccctaaggagcagaagtcgaaggaggcgaaggcgcttgccgccgccaactccagcaagggcaagaagaagaaatggtccaagggcaagctgaaggagaaggtgaacaacctggtcctcttcgacaaggccacctatgagaagctgctcactgaggtgcccaagtacaagatgatcactccctcggtgctgtccgaccgcctgcggatcaacggcagcctggcgcgcgccgccatcaaggagctgctgggcaaggggctgattaaggaggtggccaagagccgcgcgcagcagatttacacccgcgcgacggcagccgccagctaagcagccacccagcagtttggcagcatgctagtgcactcgttgtgcttgccaatctggtaacaggtccctcgcnnnana

SEQ ID NO: 2325 - DNA, 512 bp, Chlorella sorokiniana
  Clone ID: LIB3602-017-Q6-K1-C2
ggcgggcacaaggccaactggggcatccaggccgcctactactccctctgctgggtgctggacgtggtgtacgccaaccgccccatcgagcgcttctggttcctggagaccgtggcccgcatgccctacttcgtctacatctccatgctgcacctgtacgagagcctgggctggtggcgcgccggcgctgagctgcgcaaggtgcactttgcggaggagtggaacgagctgcaccacctgcagatcatggaggcgctgggcggcgacctgcgctggggcgaccgcttcctggcggagcatgcggccgtgttctactactgggtgctggtggccatctacctgatctccccctcggcctcctaccagttcatggagatggtggaggagcacgcggctgatacatatgctgagtttgcggagcagaaccgggaggcgctgcagagcatcccgccgcccctggtggccctcaactactacaagtcgggagacctgtacctgtttgacgagttcca

SEQ ID NO: 2326 - DNA, 525 bp, Chlorella sorokiniana
  Clone ID: LIB3602-017-Q6-K1-C3
gtggagcttcgaggatgtggaggtgaacgacatctccctggaggactacattgcggtcaagcccaagtatgcgcgcttcaccaatcacagtgcgggccgcttccagaagcgccgcttccgcaaggcgcagtgccccatcgtggagaggctgaccaacagcctgatgatgcacggccgcaacaacggcaagaagctgatggcggccagcattgtcaagcacgcgtttgacattgtcaacctgctgaccgaccagaacccggtccaggtgctcgtggacgccatcatcaacggcggcccgcgtgaggatgccacccgcattggcagcgccggtgtggtgcgccgccaggctgtggatgtgtcgccgctgcgccgcgtgaaccaggccatctggctgatcaccaccggcgcgcgcgagagcgcgttccgcaacatcaagaccattgcggagtgcctggcggacgagctgatcaacgcggccaagggcagctccaacagctacgccatcaagaagaaggacgagatcga

SEQ ID NO: 2327 - DNA, 525 bp, Chlorella sorokiniana
  Clone ID: LIB3602-017-Q6-K1-C4
gcggcggtgaagagcgacacgctgtccaaggtggagagcgagctgtcgggcgtggcgcagctcatgtccgagtccaaggacttttctaccttcatcaccgaccccagcgtgccgcgcaacaccaagctggacggactggacgccgtgctctccaagatgggcgccagcgagatcaccaagaactttgtgggcctgctgtcggccaacaaccgtctggtggagctgggcaagattgtgtccaagtttgaggagattgcggcggagcagcgcggcgaggtcaaggcgatggtcaccaccgccgagggcctgagcgcggaggagatcgaggagatcaagaatggcctgaagccgctgctgaagcccgggcagaagctgaccctggaggaggtggtggacccctccatcatcggcggcgtcatcctgtccctgggcgaccggtacgtggacatgagcatcctggcgcgcgtgaagaagctccagcagattgtgcgcgacgccgtctaagcgtcccccctgctgcccact

SEQ ID NO: 2328 - DNA, 363 bp, Chlorella sorokiniana
  Clone ID: LIB3602-017-Q6-K1-C5
cccgcccgctttgtgttccagggcgtgcacatgctgtttgagggcatgccggaccgggagtggaaggagggggagaagcgggtgtccaagatggtgttcatcggcaaggagctggaccgccagctgattgaggagggcttccgggagtgcctggtcaagtgaccgggctgttttgggctgttttaaaagccgcgcagttgagacttggcaaggctgaaggcgcagcgtgctgaggcccgtagtacggcgcaggggcctgcaccggcgttttggagattgccccagctgacggcgcgcaccgaacgctgttgacgcgcactcacccatatcgactttatgcacactgtaaaaacatgattcccc

SEQ ID NO: 2329 - DNA, 528 bp, Chlorella sorokiniana
  Clone ID: LIB3602-017-Q6-K1-C6
tattgatacactgcgccggtcagtctgtattactatgcccctgccctcccatgcaccgcatgggagcgggtggcttgctcagcgggcagcgcctgcctcccttggaggtcccttcaaagaaggtccaggcctgccgcctcagtccgtactaaacaaatcagcacctttcgttcgtcgcctttcattccgctctcgtcctccctgcctacctggtctgcctgccctagtgtgctggactggtagcaccctttgctgccccagcgtctgtctgcctctgcctccttgtgctttcatgcagctttcatgcagcttatgcagcatcgttgcggctgtcccgctgttcacccctttgcctcacctccctgcccctgctagctccttcccctccccacaaatgaacccaacagctggcctcgctcggctgtgaaccagcccctaaccttgccagaacaattcgttcgcttcgcgcgcttgcaccctccatactgcaccgctgccgaccctccttcccttccctcctgcacacca

SEQ ID NO: 2330 - DNA, 517 bp, Chlorella sorokiniana
  Clone ID: LIB3602-017-Q6-K1-C7
gcgagcggcatctgggactaccacctgcagtctgagaaggctgagcgggaggcgagccacgacgtggcgcgcgccgccttcaagtccatgggcgcctccaccactccccaaggcgatgtgctggatgcctctgccctgcgcaagatgtttgcctcggaccgcgtggaccagctgatggccatggccgacaagaacaaggacggcaagatcgacttcaaggagttctgcgacctgatccgcaagtacccctgcgactgagcgatacataaggcagatgcacggaccaatccctgcaataaatgcaccgtttcacaccgggccacgggcgcggcgctgattgacgcgtccccaagtaaactcctctcccaagccagtggcgccacggcacagcaccacgtgcggctgaagctgctgctgccctcagccacttcctctgttttccccgtcctcagttttccagttcttctggctttcagactttcagatgattgtgctttcatcctgtccctacgccaca

SEQ ID NO: 2331 - DNA, 241 bp, Chlorella sorokiniana
  Clone ID: LIB3602-017-Q6-K1-C8
aaaaaaaaaataaaaaaaataccaactaaaaaatgaaaaaattttttattataaacaaacaaaaccaacacatacacgggcggggattacatttccatcgtggcgcctcattcattcgacgtgctctctgcttttttccctgctcctgtggtttacctctggccgcgcggtccttattttggttgcggcccactcgattttggtcgcctggctttttcttccaggaggcctggaaccttct

SEQ ID NO: 2332 - DNA, 520 bp, Chlorella sorokiniana
  unsure (1)..(520): unsure at all n locations; Clone ID: LIB3602-017-Q6-K1-C9
cggacgcgtgggcggcgagaccctgtctgagggcggcttcctgcccaacaaggtggccgccgccagtgtgctggacgtgcaggaggcgaccgacaagaagggcaagaagtactacaagtacgaggtgctgacccggtccgccgacggcgatgagggcggccgccaccagctgattgccgccaccgtgtccaacggcaacctgtacctgatcaaggtgcagtgcggcgacaagcgctggttcaagggcgccaagcgggaggccattggcgcctgggactccttcaccgtggtgtaagcacttgcaccgtggtgaccccgccgcagtagccgccgcagcagcagcacagcacacgagaagaaacaccccccccccacactttcccttgcttgtacgttcctccgctcttgttggccgttccgcgggcgccagccacaatctgatttttcgcttagcgtgtgtgccacaccatgtgtaacgaccttgcccgaaannaaaaaaatacttaaaatatgtcaaatc

SEQ ID NO: 2333 - DNA, 501 bp, Chlorella sorokiniana
  unsure (1)..(501): unsure at all n locations; Clone ID: LIB3602-017-Q6-K1-D1
gcggcccactcgtttgtgccatgcccacctgcctccaacgtcacccttcatcaaccctcacccaacccatccacctgccacgcatgcgctcaccttccctccgccacaacctctgccacccactcaccacccatcacccgctcaacgccctccatgcaccatcctccccatccaccaaatctgccaccccaaacgcacgtccgccgctgcaccacctgccgtcccctcacccgcacccatcttccacccgccacctttcctgccgctcaccgccgcacatcctacctnccacacctcactccatgtccacccttcacccgcgcttcacacagcggctgctgccatgcaaagctgctgccaaacccatccatcatgctcgcacacccactcacccacacgtncaacgtatccagacccattttcaaggcccgactgtacagtgcctttttgcgtccttatgccgatctggtaccaggacttaatgtgtaacaaatggtatgt

SEQ ID NO: 2334 - DNA, 442 bp, Chlorella sorokiniana
  Clone ID: LIB3602-017-Q6-K1-D10
tggaccccttccgccccgaccagcgcacccccgtccccaacttcttcctggccggctcgtacaccaagcaggactacatcgacagcatggagggcgccaccctcagcgggcggcagtgcgcctacaagattctggaggacgccgacaagctggcggcagcggcggccgccaagcagcagcagcaggcggtggcggcgtgagcggccaactgacgcgctcccagcccctcttgccctgtctgtctggtcactcgtgtcgtcgcaccagtgcgcagcccattggccgcgctgcccagtttgtgtgccttgtgtcgtctccttattgtgctgctgtccctcccatttcattcccgctgcttccgctccccgctgccgccgattttgcgcgagaaccaacccatgaaaacacattcgttctgtgactggtaatatacaccaactgc

SEQ ID NO: 2335 - DNA, 442 bp, Chlorella sorokiniana
  unsure (1)..(442): unsure at all n locations; Clone ID: LIB3602-017-Q6-K1-D11
cgccaccgctctcaaacaccggcagcagagacccagggttggcaccagaatgggcgacagagcggagggctgccaaaggcctcgtnggcgggcctgctacagcaaggggtggccgcggtattttcggtctattctgaggcattcggcgagcttcggccccttgcagtctctcccttgtacaccagtnncgatggcggcgaagccgcgccggtnctatgtatgaaaccgtattnncagggtgnnngctggaggaaagccgattggcgaaagggcatgcccacgtgcgcnnatcccctggttccaagtcgcccaacaaatcatggacatccgcacgcggccacgctccatctnctccatcaccggtaccaaggatctgcagatggtgaacatcacgctgcgtgtgctgtccaagccggatgtggagcagctgcccaagatcttc

SEQ ID NO: 2336 - DNA, 521 bp, Chlorella sorokiniana
  unsure (1)..(521): unsure at all n locations; Clone ID: LIB3602-017-Q6-K1-D12
acagggagcacaggggcaaccatgaccaaaaagcggaggaacggagggcgcaacaggcacggccgcggccacgtaaagcgcgtgcgctgcgagtcgtccgccgccatggtgcccaaggacaaggccatcaagcgcttaatcgtgcgcaacatggtggacgcctcggccatccgcgatctgcaggacgcctgcgccatcgacggctatgcgctgcccaagatctaccgcaaggtctactactgcgtgtctgccgccatccactccaagattgtgcgcgtgcgctccgtcaaggaccgccgnaaccgcgagccgccccgccgccccggctttggcgcccgccccgagcgcaagtgagcgtcggcatggccgcagcagcagcagccgctgaggagcagtgagggcggcgctctgcagccgcgcctcgtcctgcgatgagtcagcaccgcggggccgcccggcgcacggnacgccacccggcaggcagcttatttatgtgcgctgggccgcgcgccggcgccccg

SEQ ID NO: 2337 - DNA, 537 bp, Chlorella sorokiniana
  Clone ID: LIB3602-017-Q6-K1-D2
cgtccgcgcccagcacctgtatcagcgctgtgcctggccgctgcgcacctgccgccaatggcccacctgccctctgcgtttgaaactgcaaattgaacccaccgatgcgccgcatgtgtgtactgctttcttcaacgccaccatcacccaccccctcattcgcaccatccctgcactacccacctcctcgccggctgcatgcgctgcactcagcaccatttcatcaaccaatcgcctccctttcatgcgagacttgctctccctgcactctccctttgccctgcccccccaagccaaactcaagcacctgctcaagccaacccacatccgccctttaccaagcaaacccaaacttctcatgcaacagttttctcccccttttcattccagtaccagtgtttgactaccaatcgtcctcccaagcggggctgccaagcctttttgtccagctgccggctgtcatgagctgttgccgctgctttcccccatccggcttgcgctgcaccgccgatcctctctactcccttctctgtacag

SEQ ID NO: 2338 - DNA, 525 bp, Chlorella sorokiniana
  Clone ID: LIB3602-017-Q6-K1-D4
cccacgcgtccggaccgaggtgcggcaccggctgtcagtgcggcctagcctggcgcctccccagaagattggtgacatcaccaagaaggtgttcaagaagcaggtggagggcattttggaggacttggctattgagctcgaacggtgaccgcatttgtgatgccaagcgcttgcttggactcctagtcggccgaggcacagcttgcagcggcaacccgtgcattgcagccgggtcgcctgaacagcttcttctgcacccaggcccatgccagcctgttgctgagcccctcaacacacccctgtcccctgtatgctgcgctacccgttgcaccattcccgccgccgcacctgcctgcattgtgcagcggcaggcattgctttgggcgctgctcacttggcagcgcgccccccaattttgtgtgccaacatgcactcgtcttttccatatgatcccagcactgcttgatcaatattaaagctgtgtaccctgtcccttcggccgccctctgctgcgcccactgtaat

SEQ ID NO: 2339 - DNA, 495 bp, Chlorella sorokiniana
  Clone ID: LIB3602-017-Q6-K1-D5
tgtttgccaacgtgggcctggctgtgggcggcgcagcagccgttgccttcctgcccgccaccgcaaccatggtgctgggcggagccacggcgggcgcggcggcaggcgtggcagcctttgtgctgagcaccccgaagaaggaagtgaagcttccggcggtggccgatatgtgaacagccggatggagatggcggcttggcaactgagagctggctggtgattcgtgacgagccagctgttctgtgcagatacgagctggctgctcgcacgctggcaagcgcccaatgctatgaatgaacaaacaagccccacaaatgccctgggcgatgcatggcaacgacagttcatgtctcatgttatactctcaaccccagcatatttcacaagccgcgctccttgctaagcatggtgttgtccccactttgatgctgcactgtttcctgctggtgctcattgctgtgcaatgttattactagcagacttgttcatgtcaac

SEQ ID NO: 2340 - DNA, 476 bp, Chlorella sorokiniana
  unsure (1)..(476): unsure at all n locations; Clone ID: LIB3602-017-Q6-K1-D6
cgccaacgctgacgcccccgcccatttgcatgagcacttagagcagcaaaccaatcgataaactgcccttatgcaccataatcgacctatttcaccgatagatcttgatgcttgcgagcctgatggcctgcaagtgtgatatttcgatgtaggaagactgcatcatgtgtaacttaacgccgccgaaaaaaaaaataaaaaactgaaaaaataaataaaaaaaaaagacaagccaaatgntctgtgcagatacgagctggctgctcgcacgctggcaagcgcccaatgctatgaatgaacaaacaagccccacaaatgccctgggcgatgcatgtgaaccacagttcatgtgtgatgtgatactctcaaccccagcatatttcacaagccgcgctccttgctaaacatggtgttgtccgcactttgatgctgcactgtttcctgttggtgctcattgatgagcaatggtattacta

SEQ ID NO: 2341 - DNA, 475 bp, Chlorella sorokiniana
  unsure (1)..(475): unsure at all n locations; Clone ID: LIB3602-017-Q6-K1-D7
cnntttgacctccctgaacccatgcgcagcganncgagacccgctctgaagggagtctgaagaacggccgcctcgnccatgctggcgttcgcgtgggcttcagcagccaggcggcggtgccagggcanagggccccatcgaggtgcctgcaggcgcacctggccgaccccggccataacaacatcttcacctcgtctgtgggcaacgaggccctggctgccgtgctggtgctgtccatcaccccctgcctgatcgaggccaagaaccgcctgcagggcaccgacgaggaggagttccgccccctgccctggtaagcgtctggcactgcggccccggctcggctagccgctgaccggtgacgcggcggcgcgcggcagcggcgacggggcgctgggggcgcccgctccctgccgctgtatgctgcctgtactcccgagcgagaaaatttccaccaccgtcattgttgtaatctatg

SEQ ID NO: 2342 - DNA, 384 bp, Chlorella sorokiniana
  Clone ID: LIB3602-017-Q6-K1-D9
gcagcggcgaggccggcagcagcggcagcgcgcccaagggcgacgacgtgatcgacgcggagttcagcgagtctgacaagaagccctgaagcggcggttctcagacggcctcctgaggcgttttttgcgctccggaggcgattcgtccttcccccaaagaatggccccaccctggcgctttacccatccttctcaaccccaaaccattttcttcagccggcgccccgtggcacgcctgccccaaaactgctgattgtgctcccaaatcagacgcttctcagtgcttgccctgccctgacccccgcatttcctctatttcgttagaaaaggcagcatgatagatggctcggccttgactcctccctcggaaccatgtgtaacctc

SEQ ID NO: 2343 - DNA, 471 bp, Chlorella sorokiniana
  Clone ID: LIB3602-017-Q6-K1-E1
cgtgaccgtgcgcggcgagaaggcgatgcagctgctggaggcgggcctgaaggtgaaggagtacgagctcatccgccgcaacttctgcgactcgggcaactttggctttggcatcaacgagcacatcgacctgggcatcaagtacgacccctccaccggcatctacggcatggacttctacgtggtgctggagcgccccggctaccgcgtggcgcgccgccgcaagcagctggccaaggtgggcgtgcagcaccgcgtgacgaaggaggacgcaattaagtggttccagcagaagttcgagggtgtggtgctcaacaaggcccacgccgcctaagcggcaggacggccaccgcctcggcgcgccggcacctctcagacgacaggcagacagcacaccccctgcaccacggcgctgcgctgcactgccccgctggcttgttgctgcccatcggatgtaatagcggacaagtg

SEQ ID NO: 2344 - DNA, 389 bp, Chlorella sorokiniana
  Clone ID: LIB3602-017-Q6-K1-E10
ccggcggaggcacatcgaggacgcggtgaacgaggaacttgatccggaaccgcatgccgccgaagaagcctaacccccacccccggagggccttcaaccacaaaaaggcggacttccgccgcttgaagaaccaccccccccaaccggaggcgggggccaaccaccgccagaaggttaagaaccagccgaagccccaccaccccttccagaacctgcagcccaaaatccggaagccgaagaaccgccccaagcagaagccgccgccaaaaaagaaccgccgcttgcaaaaaaccaatgccgccggcaaccgcccaaaattttccttaaagctgggggcctaagttaacttgcttgcttggctctgcccgggtggaaaacaatccggcccc

SEQ ID NO: 2345 - DNA, 514 bp, Chlorella sorokiniana
  Clone ID: LIB3602-017-Q6-K1-E11
cgtggccaccccaggttgacacagcagcgcggcagccatggcgtccaagcgtaagggtggcgtgggcggcaacaagttccgcatgaccctgggtctgcccgtggccgcggtgatgaactgcgccgacaacagcggcgccaagaacctgtacatcatctcggtgcacggctggggcgcgcgcctgaaccgcctgcccgccgccgcccccggcgacatggtcatggcgaccgtgaagaagggcaagcccgacctgcgcaagaaggtcatgcccgcgattgtggtgcggcagcgcaaggcgttccggcggaaggacggcacctacatctactttgaggacaacgcgggcgtgattgtcaacaccaagggcgagatgaagggctccgcgatcaccggccccgtggccaaggagtgcgccgacctctggccccgtgtggcggcagcagccaacaccattgtgtagagcggcggccgtccggctgggcgtcgcggcagcgcggaccacactgcagtaccc

SEQ ID NO: 2346 - DNA, 383 bp, Chlorella sorokiniana
  unsure (1)..(383): unsure at all n locations; Clone ID: LIB3602-017-Q6-K1-E12
agccttccgggggtggacaatcgcacccacgggcagcgcgctggccgcccctaacagaccagaaccctaaacgcgccgaagcccgccctgttggccttggaagcattaagcgcctttaacatgccctgccnaaaaaaaaaaaaaaaaaaaaaaaaaaaaaaaaaaaaaaaaaaaaaaaaaaaaaaaaaaaaaaaaaaaaaaaaaaaaaaaaaaaaaaagggggggccgttttaaaggaccaaagtttacgtccccgtgcatgcaacgtaatagtttttttatggggccaccaaaattaaattaactggccggcgtttaacaacgtgggaactggaaaaaccttggcgtaaccaaactaaatggctttgaagaaaatccccttt

SEQ ID NO: 2347 - DNA, 508 bp, Chlorella sorokiniana
  Clone ID: LIB3602-017-Q6-K1-E2
gctgcattcatctgctgagctgtgcatcaatcacaccccgaaccggcaggcttcatgaatgctaatgcataatagctgtcaaacatggggcatgggtgattcatcaggtgcagccgacaatgcatgcgcacaaacatactgctggatgggcctggggcgcacaaaggccaactgcttcttgcgcaatgagcgtacttatatgcactgtatgaacatgagcgtgacaaacggatctatattggcggcgcatttaatcgtagctgggcacactcacattgactggcgctgcgaattgactgtgcaagcagatggcgtgcgggtgctggcgctggtcatgatggccatctccatcggcatggccatctacgcggcaatcaacttcaagcggcgcggcgacatgctggtccagaagctggatggcccttatgacgatcgcgtgctgcccgtggtgctgacctgcgtgatgatgaccttcctcaccgtcgtgtggataggctcgatcgtcagc

SEQ ID NO: 2348 - DNA, 523 bp, Chlorella sorokiniana
  Clone ID: LIB3602-017-Q6-K1-E3
ggcagctggggccaggtggtgaacgttgcgtgcgcagaggagggcagcggcatgcacgctgtgagcaagcaggcggcgtgcgccatggcgcaggagctcaggcttgaggctgcagtgcgaggcgtgccgctgcgagtgagcacgatatcgccggcagcgctacaaacctggtcctttcggaccggagctgcgggaaacaagactcccgccagctctcccgccgcagctccgccggcagcagctgctgcagcgccagcaggcgcgcgcgccgctgccgcaggcggcggccagcagcagccggcagccgcggcgctacatgcgcaagacgtcgttgcagcagtcctcttctgcctctctgcacctgacagtgtggatgtgagcgatgtgacggtgcgtgccgtgcgcgcctgacggctcactgatgtgacactgggtgctgctgcctgcggccctttcgaccagctgtgcatgccctcggttccggagccccattgcaggctcccctctgtgccatttcattcga

SEQ ID NO: 2349 - DNA, 518 bp, Chlorella sorokiniana
  Clone ID: LIB3602-017-Q6-K1-E5
cccaagccttgcaggagcccacgctggatgatgccccgcgctttccttatgtggaggcggtgatgcacgaggcgctgcgcctgtacccacccgcccacaccaccaaccgagagtgcacggcgcccggcggcgccacgctggtgggtggcgacggcacgcagtaccacatcccgcagggcgtgtgggtgcacttcaacatttgggggctgcaccacagcgaggcgcactggaaggagccgcacgccttcaggccggagcggttcctggatgaggaggaggtggccggccgccaccccaacgccttcatcccattcggcctgggcccccgcaactgcatcggctacaagtttgcgctgcaggagatgctgatctcgctggtcaggatctaccagcgctggaccttccagctggcgccgcggcaggcccggccgctgccgctgcgcatgggcatcacgctggctcccaaggatgggctgtgggtaaccgcgcacccgcggtctgccaacagcatgacagct

SEQ ID NO: 2350 - DNA, 472 bp, Chlorella sorokiniana
  Clone ID: LIB3602-017-Q6-K1-E6
ggcatgtgcgtaggagaggcagctctagagcattagatgctaagaggctgatgccttttccgaggctatgagctgatgccccactctctcggctacctgccgccgcactccgccctgccgcttgcctgcctgctcgtctctctcagccttcgctggccataggccccgccgaccgccccacccatccgattcattttggccgcccgctgcgtgccgcatgcggcggctagcgatgctgctaaatccacgccatgcttatatcaacccaccctaccataccctgtgctctcctcagcacaccacaccctgtcgtgcctgcccgactgccctctgccgcagcccatggccagccctcttctgccacctgccatcctccaggcattcagcgtaccctctgttgccctagcttgtgcccttttcgccaacacatgatcctgcggcgcgcctgcagccgatgtaagagacctttgtg

SEQ ID NO: 2351 - DNA, 52 bp, Chlorella sorokiniana; identical to SEQ ID NO: 124
  Clone ID: LIB3602-017-Q6-K1-E7

SEQ ID NO: 2352 - DNA, 455 bp, Chlorella sorokiniana
  unsure (1)..(455): unsure at all n locations; Clone ID: LIB3602-017-Q6-K1-E8
cggacgcgtggggccgcggcaccggccggcgcgcttcctggctgccacttgccccctgatggggcgcctgagcggtgtcacctgtatagttggcgtccagcgcccgtactgtacattgcctgtacctgattaactgtgtttccatgtcagcaagccctgcagcagcggcgggggctcagcaccacccatcccatctgatgcacttcgcagcgccgtgctcgtgtcgccctactctgaacccatacccgaccaccattccctgcccatccatccatctgcccggcgctgccaattttgcttttgcccccatgcgcatgctgcaaccaagctgtggccgctgcacgtgatacccagtacattgccccactcggggcctgtttcacaatcccccgttccaatcaatctgaatctcatactacttgtcgagtcgagacagtaacgtcacccacagtnna

SEQ ID NO: 2353 - DNA, 258 bp, Chlorella sorokiniana
  Clone ID: LIB3602-017-Q6-K1-F1
tcgaattcggcacccacgcgtcgcgatcgcgagtcgacccgttggcgctcgtggaagcaatcagaatcggttgcacctcaagctttgagttgggaagtccatgaacgccggggtggttggaggcggctgaagaccagctgggcctctgctcaacactggggcgactggcgcactcgcgtggagcaccggaagtacagcggcatggtgaacgcggcgcgctcaaccctgacggcggggcgtgttatagtaccaaaaacg

SEQ ID NO: 2354 - DNA, 530 bp, Chlorella sorokiniana
  Clone ID: LIB3602-017-Q6-K1-F10
gacgctgtacctgctggaccagagcggcgaaaccgccaaagcggtggcccgcgagctgaccaagcgcggctttagcaaggtgtttgtggtgtctggcggctgcaacgcctggaccaacgccaagctgcgcaccaagccgtggcagggggaggggctcaacaccctgcgcgccccctccgcgcttgacgagatcatccaggtcactgagaagctggagcccctggccgagaagctggaggtgcccgagaaggtgaaggtcaacgcctgagctgcaagcctgtgagccttcaccgccactggcagcatggtaccagccgcccagagcagccattgctgtccatcgcggccccatctgatcgaacccaaggaatgtatcctcgcccccgtcccccgccctctgcctctcccagtggggccgccccccaacccagtctgatccgatttgcttgcgtgccgccatttcaggcactcccccttgtcgtccgcctgtacattacccgcttgacccaattgcatcggtgccaacagtg

SEQ ID NO: 2355 - DNA, 361 bp, Chlorella sorokiniana
  Clone ID: LIB3602-017-Q6-K1-F11
aagaaggtcgggatcgtcggcaagtacggcacccgctatggcgcttcgctgaggaagcagatcaagaagatcgaagttagccagcactccaagtacttctgcagcttctgcggcaagttcgccatgaagcgccaggtggttggcatctggaagtgcaaggcctgcaagaagacccaggctggcggcgcgtacgtgctcaacactgcggcgtccgtgactgtgcggtccaccatccgccgcctgcgggagcagaccgagaagtaagcgagcggccattgaggagtgaagcgggcggcggcggcggcgctgcagcagcgcgctgcagcgtgccgggtggccgctgcttcatgatgtaacgcag

SEQ ID NO: 2356 - DNA, 94 bp, Chlorella sorokiniana
  Clone ID: LIB3602-017-Q6-K1-F12
gaaaaagaaaaaaaaaaaaaaaaaaaaaaaaaaccatttaaaaacaggagcttttaaaaaaccaaaagggggtttaaaaaaggggggggggttt

SEQ ID NO: 2357 - DNA, 429 bp, Chlorella sorokiniana
  Clone ID: LIB3602-017-Q6-K1-F3
gtccgccatgaagaagattgaggacaacaacaccctggtcttcatcgtggacgtgcgcgccgacaagaaggcgatcaagaaggctgtggcccgcctgtacgacatccagaccaagaagatcaacaccctcatccggcccgacggccagaagaaggcgtacgtgcggctgaccgccgactacgatgcgctggatgtggccaacaagattggcgtgatctaaagcgtgcggctggagcggggcggctcccgcccctcccaacccacccttggcctggtgccaaggcgccggcagcctgcacggccaccccacgcggccggcggcgccggcgcagcagcggcagcggcgcgtctggcgcagtgcgcagcccggcgcgccaccccggttgcaacaccacgtgctgtaaccaatcctttggcaaaaaaaatata

SEQ ID NO: 2358 - DNA, 520 bp, Chlorella sorokiniana
  Clone ID: LIB3602-017-Q6-K1-F4
ctggccgcccccgtgtctcgggaggctgctgcaaaccactgctagctgctgcacagcaaattcagcactgcaagtgtcggtcgcgcgcgcaaggcgccccctccaggccgaccagcgcggcagagccgcctgctgggcatgaggcgcgctaggggcgccctgctagtgctggcgctcgcagcggcagcagccgtgctgccagccgccgccaagcacccgccgccccagctacaaggcccgccagagtcgtgtgggccgccggagccaggcgcctggcacaatttggagcgcggcgagggtgatgccgtcgtccgggagatcctggtgcaatggatgaccatctacggctccaacatgacgaatgtgatggggctgcaaggcctgccgccgctgtctgacgtggaagtggagctggctgggtgtgcgcagcacgtggagaccggtgtcaacttgcatctggggatcaacatcacagccatgctgggagagacggatttccaagttggcttcacggccgatg

SEQ ID NO: 2359 - DNA, 591 bp, Chlorella sorokiniana
  unsure (1)..(591): unsure at all n locations; Clone ID: LIB3602-017-Q6-K1-F5
cgtgccgtnngtggatggcccgcnntccgccgaccgaccttcnntacaacatcnnatgaagctagtatactttgacccgcggcccctacagnncggcaacnncgggcgtcgctagnttcccaaattttcatgccacagctgccgttggctttgcaagaaacaaggagaggcctcaangggggcctgaagcgcnntttgtggacctacgcnntctggagcagcctgacanncctacctggtgtccaatccgnnncagctgctggcctggatnngcagaacccggtgcccgccgacnncagctgactgctgagcggctgnnggctgcggcaaccccggcgggcgccgcccggcnnagcgcggatggcagctcctcgagcagctcaaccaccgctgctgctgctgccccggcgcctgcgcccaccccctcccgctccggcagcggcaagaacaaggctctctgagccacggtttagctgccacaatgccatgccaagagctccaccacgtacccacgctggcaagccattgaaggcacccccagtttgacgggcgcagcttgcacgctccgcagcctgtctagtacggcaagag

SEQ ID NO: 2360 - DNA, 278 bp, Chlorella sorokiniana
  Clone ID: LIB3602-017-Q6-K1-F6
gcgagtgaagcggtatggctcagagctggactatcacgacctggagctagacgtgtacaacgagctgatcaaattttgaacgaacgcaatccacacgaacctgtcctggagtaaacgcacgcgagcggctgctcgtgattgtgccacgtgcaagcctggcgcatgcatgcacggctgcccctgcgtccggcagctgcccgtcccaactgttgacccttgagtgatgcactgcacttttcaccctgcatttgattgcttgctgccggtaacctgatcag

SEQ ID NO: 2361 - DNA, 528 bp, Chlorella sorokiniana
  Clone ID: LIB3602-017-Q6-K1-F7
actggaagcagtttggccgcaacttctactcgcggtacgactacgagggggtggagagcgacaaggcggacgccatgatccagcacctggagggcgtgatcgcggccgccaagaagggcgacaagtttggcgactacgtgctggagacggccgacaacttcacctacaccgaccccatcgacggcagcgtggccaagaaccagggcatccgctttgtgttccaggacggctcccgcatcatcttccggctgagcggcaccggctccgcgggcgccaccatccgcatgtacatcgaggcgtacaccgccgacccctcgctgtttgagaaggacgcgcaggacgtgctcaagtccatcatcggcaccgcgctggaggtgtccaagctgcagcacttcaccggccgcgacaagcccaccgtcatcacctaagcgggtggccagcggcgcaagccacccctgcagtgtgcctgggggcatcccaactgctgcgcgcttggcatgcccgcctccctgttcatttgccacacat

SEQ ID NO: 2362 - DNA, 400 bp, Chlorella sorokiniana
  Clone ID: LIB3602-017-Q6-K1-F8
ggcccctaaggagcagaagtcgaaggaggcgaaggcgcttgccgccgccaactccagcaagggcaagaagaagaaatggtccaagggcaagctgaaggagaaggtgaacaacctggtcctcttcgacaaggccacctatgagaagctgctcactgaggtgcccaagtacaagatgatcactccctcggtgctgtccgaccgcctgcggatcaacggcagcctggcgcgcgccgccatcaaggagctgctgggcaaggggctgattaaggaggtggccaagagccgcgcgcagcagatttacacccgcgcgacggcagccgccagctaagcagccacccagcagtttggcagcatgctagtgcactcgttgtgcttgccaatctggtaacaggtccctcgc

SEQ ID NO: 2363 - DNA, 101 bp, Chlorella sorokiniana
  Clone ID: LIB3602-017-Q6-K1-F9
aaaaaaaaaaaaaaaaaaaaaaaagtagtaaaagaactaatttaatttaaaaaaaaaaaaaaaaaaaaaaaaaaaggggtggaaaacaaaaaggggggggg

SEQ ID NO: 2364 - DNA, 535 bp, Chlorella sorokiniana
  Clone ID: LIB3602-017-Q6-K1-G1
gcggccacgcgtccgactgctcctaccgagccctggcacacaaccccgacgtgcacctgagcaagatccacaagcacgacgagctgagcgagagcgcggagcacatggagcgcgccgaaaagtactggcacagcatcttccgcaaggcgtggcttagccgcgtgcacgacggggacgtggtggacgcccgcatgatgcgcgtctaggcagtcgagacgcgtctaggcctggaggcagccccccgcctctgtgccacaccatgccaatgttaattgaaccccgccaacatacagcaacttcgagcgagccactcacaacaagacggcagcagctggagcgcgccctgttaggaagccgccgtgcccagctgcatccaactactggcgagatgatgccacaaacgcatcagccgtgtgcttcatgtgaagtgctcccttaatgaatgacacgcacccagtgccccccccctgccacctatgcatggcctttctatgcttcacgtgagcacgttacattgagtagtctatcaacaaag

SEQ ID NO: 2365 - DNA, 328 bp, Chlorella sorokiniana
  unsure (1)..(328): unsure at all n locations; Clone ID: LIB3602-017-Q6-K1-G10
gaaatggnccaagggcaagctgaaggagaaggtgaacaacctggtcctcttcgacaaggccacctatgagaagctgctcactgaggtgcccaagtacaagatgatcactccctcggtgctgtccgaccgcctgcggatcaacggcagcctggcgcgcgccgccatcaaggagctgctgggcaaggggctgattaaggaggtggccaagagccgcgcgcagcagatttacacccgcgcgacggcagccgccagctaagcagccacccagcagtttggcagcatgctagtgcactcgttgtgcttgccaatctggtaacaggtccctcgc

SEQ ID NO: 2366 - DNA, 507 bp, Chlorella sorokiniana
  Clone ID: LIB3602-017-Q6-K1-G11
cccacgcgtccgagcacctacgcagacatctcgcaaaagctggccaagctggcggcggacccggagcccatcaactgggcggcctggagcaaggagatcgaccccaagctggtgcaggagttcaagcaggcgtacgagaccatgaagctgcccaagtttgagggcaaccacattgctgaggccaacacccagtttgcggcgctgctcaaggaggcggaggcgctggaggcggccagccgcacgcgcattgtggagatccagaaagagctggccaacatccagaaggagaaggagcggatctccaccaccaccattgacgatgagctggcggcagaccccaagctggcagaggagattgacacagagatccagaagaactacttcatggtgtcctgagctgcgcgcctagctggcgcctgattgtcgctggagcgcggggcggggcggcaggacgccgccaccagcagcccttgatagacggcacgctggagttgcagcatgcaccac

SEQ ID NO: 2367 - DNA, 268 bp, Chlorella sorokiniana
  Clone ID: LIB3602-017-Q6-K1-G12
ccccggccgggggttacaagctagtgtacaaaagcgcaacatcctaaggtaagcagtccgaggcagcacggggggcggcagcgtaccagcagagcaggcagcttgggggcagaatggcatgttgccaccgtgaaagaatcatgccgcttgggcggccaatgaagtaccccctgccggttccgttgcgctgcagcagacgtgcaaagaaccaggtagcaaacagaggagctgcaccggagcagcggctaccgccggtctgtggtgcccc

SEQ ID NO: 2368 - DNA, 521 bp, Chlorella sorokiniana
  Clone ID: LIB3602-017-Q6-K1-G3
gcgatgtacgaccgcatcgagaacctgatcgaggcgggcgtgctggaccccgccaaggtgacccgcagcggcctgaccaacgcctgctccatcgccggcatcatgctcaccacccaggcggtgatgactgagcagaagcggaagaaggaggcgctgccgggcatgtcccccggcggcatgcccgctggcctgaccatgtaaatggtcgccgggctgctgatggctccatcaacacggagcagcttagtccgccatgccggccgcgctgctgggccattccttacagcgcggccgcgccctcctcccatgctcgaactgaaaacatgcccttgcacacagaagacccctcaacgctagtaggctaggatgccggcgggcgcatgccggacgtattgtcgcatgcccatgccttggcttttctgcacccctccacaccccatttcatacgacttttcgcctcccatctgctggcattgacatcgccgctgcagcttcggaacacagctttaaaacaacacacc

SEQ ID NO: 2369 - DNA, 420 bp, Chlorella sorokiniana
  unsure (1)..(420): unsure at all n locations; Clone ID: LIB3602-017-Q6-K1-G4
ccgcgggcagtactaccttcgcacacgtgctgttgcggatgcaatcaagttcacggcggaccagcaggcgcttcagcggcgcgagagcgagcggctgtcaaaagcgggtagcaatgtcnagctgaaggagaacaaacccaaactgacggcggctcagcttgacgaggagatggcgcgtgagcgtcaaatggcagccatggtgtgctccttggaaaacaaggatgcctgcctcatgtgctctggttaggggagtcaggtcaactttggcttacgatctgcagcaaccattccgttatgcaatgcagattgtactttcgctgtgaactgcaaacagtaggtcccctttattctctcatactatcttaagcccaaccctgggtttgctctgcttgatgtgcaactcgtgcccttgcaaaatga

SEQ ID NO: 2370 - DNA, 294 bp, Chlorella sorokiniana
  unsure (1)..(294): unsure at all n locations; Clone ID: LIB3602-017-Q6-K1-G6
ggcgggcgaaccggccgcacctcatgaagttctgaggtgccagcctggcatgctcgctcgcccagcaagcggcccggcggccggggttgcttggcggcagcccgcgcggcacgcaacagntccgtagtgcacggcccgacgagcgctgtgcggcggcggcatggcggacaatgcatttttggggcaaaaatggatgttgccaccctgaaaaaaacatgccgcttgggcggccaatgaagtaccccctgccgggtccgtttcgctgcagcaaacgttcaaaaaaccaggtagcaa

SEQ ID NO: 2371 - DNA, 527 bp, Chlorella sorokiniana
  Clone ID: LIB3602-017-Q6-K1-G8
ggcagcatcaatttggagccagatgggagcttccccaaccacatgcccaaccctgaagacaagcaggcggtggcggccacgcgtgcggctgtgctggacagcaatgcagacctggggatcatgctggatacagatgtggaccgcagcggtgtggtggaccggaatggcaatggcatcaaccgcaaccgctacatcgcgctgatgagcgccatcacgctgcgggagaacccgggggagacgatcgtcaccgactcgtgcaccagcaacgggctggcggccttcattcggggcctgggcggcaagcacttcaggtacaagaagggctacaagaacatcaccaacaagggccaggagctgaacgcggcgggcgtgccctgccccctgatgatggagaccagcgggcacggcgccatgcgggaaaactacttcctcgacgacggcgcgtacggcgcgctgaaaatcgtgattgagatggtgcggcggcggctggagggccagggagacatcgccgacctgctgcaggagct

SEQ ID NO: 2372 - DNA, 533 bp, Chlorella sorokiniana
  Clone ID: LIB3602-017-Q6-K1-G9
gctgtgagcggatgcatgcccacagccaaagcgagcatacctttgtggctgccaggctgagcgagcggagctgcgctgccgcccgcgagcggcggctgctacccgagggaggtctgggcaggtgcacacggctagagcaagcaagcaagctgtgcgcagtgtgctttatactgctagtgcaccaacctgttaacaggggcgcggcgtgtttgttagagtgacaccgatgatttggggcggagtggatgagtagggcaagctctagggagggtggtggccaggccgaaagaggagggtgcacgccgcactgaggggcaacgcaaaagcatgaaaaaacaacaagcgaacagggtgctgccaggtggctgagctgctggcgactgcttgctgtgccggtgagcacacctgggcagaggcataactgctgggtgcgctttgtggtgtcaggtgagtctggtgtacattatgaattattttaggctttccatcctttttgcgatcacaccgccgggtgtcagccaacctggtgcacc

SEQ ID NO: 2373 - DNA, 386 bp, Chlorella sorokiniana
  unsure (1)..(386): unsure at all n locations; Clone ID: LIB3602-017-Q6-K1-H10
gtccgaagaaaggcagctttcaagggcggcgttgtgctggagcaggcatggccgccagtctggagcgccagctacagcacgttgccgcgcgcgatggccctgccaaccaggctcgacgcacagctgaagcgctgcaacacacccgtgacaaaccgtgcaacagcagccacacactgcgttgcttgaaccccctttccgtgacccaagacccgatccattccgtgatctctcccatctgcaacccagcacactcccccattccctggaccccatgcatgaccctcccccctccctgaccccgaaccattccgatgaatgaaaccacccccccgccgctgtgcttgccccacacatgtgtacagatgtaagcacacagtccanantat

SEQ ID NO: 2374 - DNA, 284 bp, Chlorella sorokiniana
  unsure (1)..(284): unsure at all n locations; Clone ID: LIB3602-017-Q6-K1-H11
caacactttctgnnnctgatttcaaccagatgtcgcattcctttgcttccccaattgacctggcacccanntttgatccgaatggcctgnnnccacgcctggcnnctttgcctnngctgtattttccccttcctggggcatctgttgagtccccaaactgaacncannagccctgcnnttgctatnntcgatttcaatgttacaagcnnatgcaagcnngcagcatgcnnnaannaaaannaaaaaaaaaaaaaaaannaaaaaaaaaaaagagagggaggaga

SEQ ID NO: 2375 - DNA, 501 bp, Chlorella sorokiniana
  Clone ID: LIB3602-017-Q6-K1-H12
tgtctaaacctattcaccgcaccggctcattggccgcctgctgttcgtgcagcaggagggccggctgcccttgctggtggcagacaagcaggcaccgctgcaccaggtgcggcggcagcgccgcctgcaagccgggcagccagcagatcagccgctgttcatcagcctgagtgacgtaggtaaactgccgaatgccaacttcttctctgttttggcggctgctggagcagcgcagcctgagcagccggctggcagaggcagcagcagcagcggcagcagcagcgtagcagagcggtaccgcgccttcatggagcagctgccgcagctgccggcctaccagcgcctgttggcggcaggcgaggcggagagccggcggctggcggcgctgctgccgcccgagctggctgcaactgagcgcaagggcatcagggggaagcagcaggacacggctgatgacgagacatgagagctctccacggcagtctatgaggtatacatact

SEQ ID NO: 2376 - DNA, 526 bp, Chlorella sorokiniana
  Clone ID: LIB3602-017-Q6-K1-H2
cccacgcgtccggcctgaggtatagctgcggcggctgctagcactagtgatcgttctcattaacccgtctctgctagtgctgatttcaagagcgtcacattgagagcgtagcggtgtgctccctgcttgctgtgacacttgttctttcctactaggttgctgtgtttatatttcagctgcattgctggttccggtgggcttgaaaccagcttgaagcaagttctcaagcccaccatggccgtttgttgtgtattatgtcgcttgctttgccccaacctgcgcgattgttttggtaccgacccaccctgctgcccaagtttcccttccaatcttgcaattatgcaccccagccacgtacagcaacacacgttttgtggcccaatcttccacctttcaaccgtccacccacttctccattcacctcaccccgacccacgcatgtctgccctctctttttatgcgggcagtgacctagcctgcctgcaccccgttactgtacgtttacccttacctcgtgaagattttg

SEQ ID NO: 2377 - DNA, 379 bp, Chlorella sorokiniana
  Clone ID: LIB3602-017-Q6-K1-H5
gcgatcgacgactctgtgcgcaaccactgagctgcctggctggccttagcagcctgtacttgccgcaattgttgcctcgtgctgcacatgtcaggcttaagctactatgcagcctctttggcttttggctggctcataccactgcatgcacagcggcttggccagcaagttgcagaccgagagtgaaagctcagggctccgcttggggcggcaccatttgttgctccctgcgtgcccctgcgtgtgtgcgagtgagggcaacgcatcccctgacgccctgcaaatacagacgtccactgcttttcattatgcactgcccaaaggatctgtcttgtatctgctaccagttcatgttctggctatgtaacattttgtcagt

SEQ ID NO: 2378 - DNA, 192 bp, Chlorella sorokiniana
  Clone ID: LIB3602-017-Q6-K1-H6
ggaagcggcaggactgcctgtctgtgtttggcctggatgcggagcatgtggaccgctactacagcgccgtgatgtcgctggagcagtcgctgacgcacgacacggaccctgaagaggaggcttcccaccgcggccaggagcgctgctgagcaccctgcccttgtggtgctgctgccgggcagcctgccctgt

SEQ ID NO: 2379 - DNA, 302 bp, Chlorella sorokiniana
  unsure (1)..(302): unsure at all n locations; Clone ID: LIB3602-017-Q6-K1-H9
caagttcgacctgatgtacgccaagcgcgcctttgtgcactggtacgtcggcgagggcatggaggagggcgagttctccgaggcgcgcgaggacctggcggccctggagaaggactacnaggaggtgggcgccgagtccgccgagggcgacgaggacggcgaggacgagtactgagcggcggcgtgatgtggcggcggtgtgggcggcggctgctcagtacggcagccccgagccctgcctttgcagtgcctgcgccgtgtgactggatgaggcggcggaatgaaatgtaacatgaatgaac

SEQ ID NO: 2380 - DNA, 432 bp, Chlorella sorokiniana
  Clone ID: LIB3602-019-Q6-K1-A1
cgctgactgagccgtccaacggaagcgacgcctcggcgctgcagaccaccgcgcgccgcgtggagggcggctgggtgctcaacggccgcaagcgctggatcggcaacgcgccctggtgtgacatcgccatcatctgggcgcgcaacagcgagagcggccaggtcaacgccttcatcgtgcgcaagggcaacccggggtacagcgccaagaagatggagaacaagattgcgctgcgctgcgtgcagaacggcgacatcacactcaccgactgctttgtgcctgactcggaccgcatccccggcgtgttctccttcaacgacaccaacaaggtgctggccatctcgcgcatcatggtggcctggcagccggtgggcctggccctgggcgcctatgacatgtgcgcgcgctacctgcagcagcgcccccagtttg

SEQ ID NO: 2381 - DNA, 549 bp, Chlorella sorokiniana
  Clone ID: LIB3602-019-Q6-K1-A11
cccacgcgtccgggcgtggcaggcacagcaggcgcggcggcacgctgaggacatgtcacgcctcgggtcggaggccaacgtgctgcgcagccagcaacgggacattgccgcgggtcatgcggcgcggcaggcagccaaggatgcgtacaagctgtctctggagcggactgccggcttccgcgccctgtgctcagacacgctcacatttggccttgtggtcatggtggcagccggcacctaccagatgctgtctcgtggcctgctggccaccatcgccgcgcactgccccacagtggcactgggcagcggcagctggggcctgtggtccgcctggcgcacaactgaggcactggcatgctatgttctgagcctcggagacgcgctactaggcttggcggtgctgctggccgtccctgctcgttaccgctcggcctgtcaagtgcatggcaggcagttgcacggtgtcggacagcgtggcctcacctctgcaatgacactgagtgagcagtgctctgtgtcatataagtcagtatgtgtgtgatgtgacta

SEQ ID NO: 2382 - DNA, 359 bp, Chlorella sorokiniana
  Clone ID: LIB3602-019-Q6-K1-A12
ctaagaaggtcgggatcgtcagcaagtacagcacccgctatggcgcttcgctgaggaagcagatcaagaagatcgaagttagccagcactccaagtacttctgcagcttctgcggcaagttcgccatgaagcgccaggtggttggcatctggaagtgcaaggcctgcatgaagacccaggctggcggcgcgtacgtgcttaacactgcggcgtccgtgactgtgcggtccaccatccgtcgcctgcggtagcagaccgagaagtaagcgagctgccattgaagagtgaaacaggcggaggcggcagcgctgcatcagcgcgctgcaccgtgccgggtggccgctgcttcatgatgtaac

SEQ ID NO: 2383 - DNA, 386 bp, Chlorella sorokiniana
  Clone ID: LIB3602-019-Q6-K1-A2
ttttgaaggcggatgcctgctgaaccgcgcgcctcaagctcatcggctcgggtgcacctgcttattggcccctctcaaccgtgttgcatgttcttcagccctgttgctgctgtccgattcagcctgtgccttggataaacaccgggcgacgcgatgaatggggtgctttcaatgttctgcccaaccacctgcaatttgcatacagagggctaccaccccgcgctctttaccgaggtggcccagaactacctggtgccgcaccggccgggcgccattgacacaaacgtggccaagtaccttgtttgcattctacggcgaccgaactgcggagatcacttccattgcggatgaaacgcaagcttggcaaagcgcatttgtgcggggta

SEQ ID NO: 2384 - DNA, 376 bp, Chlorella sorokiniana
  Clone ID: LIB3602-019-Q6-K1-A5
ctcagaccgcctagaaacagcagcagccatggcctccgccctgtgcgccgcccccgctctgcgggtgaactccctgcgcgtgcagggtgcccgaccccgcgccgtgcgcgctgccttggtggtgcgcgccgctcacgacaaggtgcagatggtccagcccgtgaacggcgaccccttcatcggcatgctggagacccccgtgacctcctcccccgccatcgcttggtacctgtccaacctccccgcctaccgcaccggcgtgtcccccctgctgcgcggcgtggagattggcctggcgcacggcttcctgctggtgggccccttcatcaagctgggccccctgcgcaacgtggagaacgtcgctgagattgtgggc

SEQ ID NO: 2385 - DNA, 359 bp, Chlorella sorokiniana
  Clone ID: LIB3602-019-Q6-K1-A6
accacgcgtccgggctgaccaccccgacaccctggctgacctgaacgtgaacgagatcaagaacggccgtctccccatgtgcttcatgtggcgggttcttcgtgcagggcctggcgacccgcacgtcccccctggaaaacctggctgaccaccttgctgagccgtctgagaacaacagctgcgcgttcgtcaccaagttcctgcccctggcctgaacgccgtcgtcaacctggatcgacctgtgcataccatattaacggaggccagccggttgtgcacaatcacacacaacatatgaaattgccaacctcactgctcactgcttggaacaatcctggctacctctgtgtcccttgacc

SEQ ID NO: 2386 - DNA, 439 bp, Chlorella sorokiniana
  Clone ID: LIB3602-019-Q6-K1-A7
cgctgactgagccgtccaacggaagcgacgcctcggcgctgcagaccaccgcgcgccgcgtggagggcggctgggtgctcaacggccgcaagcgctggatcggcaacgcgccctggtgtgacatcgccatcatctgggcgcgcaacagcgagagcggccaggtcaacgccttcatcgtgcgcaagggcaacccggggtacagcgccaagaagatggagaacaagattgcgctgcgctgcgtgcagaacggcgacatcacactcaccgactgctttgtgcctgactcggaccgcatccccggcgtgtcctccttcaacgacaccaacaaggtgctggccatctcgcgcatcatggtggcctggcagccggtgggcctggccctgggcgcctatgacatgtgcgcgcgctacctgcagcagcgcccgcagtttggcgcccc

SEQ ID NO: 2387 - DNA, 241 bp, Chlorella sorokiniana
  Clone ID: LIB3602-019-Q6-K1-B1
gacgccgcctgccgccaatcgccgccttggcgctccagaaccaaccccggaatccgcccctgaacccttgcaccctgctcttattttgtttgcacaccgctctgttgctcccccccccccctcccccttcccgtaatagtgttgtttatctggttcaaatgtacccgccacgtgtatttcatgccgtcccgctgttctgttttggcggcgcgtaagcgtaacgtgtaagcgatccccgggc

SEQ ID NO: 2388 - DNA, 432 bp, Chlorella sorokiniana
  Clone ID: LIB3602-019-Q6-K1-B10
cctggacgcaatggtgcagggcggctacaagtaccaccagtaccaggtggtgggccgccatgtgcccaccgagaaggagccggagcccaccatctaccgcatgaagctgtgggccaccgacgccgtgcgcgccaagtgcaagttctggtacttcctgcgcaagctgcgcaaggtgaagaaagccaacggccagatcctggccatcaacgagatctttgagcgcaaccccaccaccgtgaagaactaccgcatctgggtgcgctaccagtctcgtaccggctaccacaacgcctacaaggagtaccgcaacaccaccctgaacggcgctgtggagcagatgttccaagagatgggcagccgccaccgcgtgcgctccctctgcatccatatcatcaagaccgccacgcttacggtgtgccagtgcaagcgcgc

SEQ ID NO: 2389 - DNA, 175 bp, Chlorella sorokiniana
  Clone ID: LIB3602-019-Q6-K1-B11
cgagaagacaaaccctcaccctaccctagctggcggcgtcaccatgcgccgctcccttgctgtgcgtttcactgtccctttcgttcctgcgttcgtttagtggaggaggcccgcctgtgtacctgacctggtggacgcgtttttggttgagcggtttgtagccgcacatctgtgt

SEQ ID NO: 2390 - DNA, 180 bp, Chlorella sorokiniana
  Clone ID: LIB3602-019-Q6-K1-B12
ctgcatatacttacacatatcagatcttgtaaacactggtcatcaaaaaaaaaaaaaaaaatgaaaaaaagagagaaaaaaaaagaaggtagagagagaaaagaggaagaaggaccgactgtgtaccatgacctggtggccgagtttttggttgagcggcttgtagccgtacatctgttt

SEQ ID NO: 2391 - DNA, 318 bp, Chlorella sorokiniana
  unsure (1)..(318): unsure at all n locations; Clone ID: LIB3602-019-Q6-K1-B2
gacggttgggtttgagaccgagggcaccgncatctacgacaccatgtgctttgtcaagaacgaggtgcacaccgtgggcgtgggcgtggccatcggccagtcctgcatgctgctgtcggcgggcgagaagggcaagcgcttcatgctggagcacgccaccgtcatgctgcaccagccgcgcgtgccgcccaccggccagcggcaggccattgagatccagatcaagtggcgcgaggtgctggcccagaagcagaacctgctcaacatcctgtcccgcaccaccggccactcgcccgagaagctggacaaggacatgca

SEQ ID NO: 2392 - DNA, 261 bp, Chlorella sorokiniana
  Clone ID: LIB3602-019-Q6-K1-B3
gacggtagggtttgagaccaagggcaccgacatctacgacaccatgtgctttgtcaagaactaagtgcacgccgtgggcgtgggcgtggccggtggccagtcctgcgtgctgccgttttaaagcaaccaaggttaagcgcttgatgctggaacacactacctttatgctggtgcagccgaacttgacttcacacggcccaggtttaacaacattgagatccagaaaaactggggcgaggcgctggtaaataagctgaacct

SEQ ID NO: 2393 - DNA, 413 bp, Chlorella sorokiniana
  Clone ID: LIB3602-019-Q6-K1-B4
gctgtcggtgcccgcgccggcagcgactccgacaagtgcgccctcgagttcagcgatccgtgcgagcagacctggaacgtcgaaagcggccagatcgttggacctgatggcctagacctggaagtcgcctccgcctgggcggccgacctcgccgccgcggtctccgagcgcgtgcacaaggacaaggagtgcaagatcgcctcctggaccgtgctcaaggcctgccgcatggccgacaatgccgtccacatgttcttccagcacaacatcgagtgcccggacaacaacggcttcaaggtcaagtacgagaccaagggcacgatcacctctgaggagtctgacaagctggaggacccgaacacacgctttgtctgcgtcttcgaagcacctttgtctaggcgaacagccccccc

SEQ ID NO: 2394 - DNA, 414 bp, Chlorella sorokiniana
  Clone ID: LIB3602-019-Q6-K1-B5
gctaagtgcggagcccccatcatggcacccaagggcaagaaggtcgcggcggcgcccgccgccgagaagaaggcggcggcccccgccaagcctgtcaacccgctctatgagaagcggcccaagacgttcgtcattggcggcgacctgccggccaagcgcgacatgcgccgctttgtgaagtggcccaagtacgtgcgcatccagcggcagcggcgtgtgctgaaccagcgcctgaaggtgccccttgccctcaaccgtttcacccgcacgctggacaagaacatggccgagagcctgttcaagctgctgatgaagtaccggcccgaggacaaagcaggcaaaaaggagcgggtgctgaaagacgcggatgcgcgcgatgctggccaggacgttgagaagaaaaaagcctgtggt

SEQ ID NO: 2395 - DNA, 393 bp, Chlorella sorokiniana
  Clone ID: LIB3602-019-Q6-K1-B6
cgggcagcagccagcagcgcaacaaggacagctcccaaggcagcaggatgaccagcagcaccactcgctgcagcagcatgcgccgcaagctgccggcaggcagcatcagctcgaggagcagccggcgccacagcctgcacgagcgcacgagcaggcagcagccagtgggcagaaagcagagcggcatctgcacccaccggctgtgccggcccggcaacaggcatataggtcgcagcagcagctgcagcagcaggagcagcagcagcagcagcagcagcagcagcagctgccacctcagcagcagttagcccagggcctgacactggcggctcccccttcagcgccatggcagcaagcgcctgctgggtggccagcagcagcgccagcgccccg

SEQ ID NO: 2396 - DNA, 370 bp, Chlorella sorokiniana
  Clone ID: LIB3602-019-Q6-K1-B7
ttctagatcgcgagcggccgacacggacagttttcaaggtagcaggatgaccagcatcaccactctttggagcaaaaggcgccggatgctgcatgaaggcagctgcagttcaaggagcacccagcgccacagcctgcacaagcgcacgagcagacagcagccagtgggcagaaagcagaacggcatctgaacccaccggctgtgccagcccggcaacaggcatataggtcgcagcagcagctgcagcagcacgagcagcatcagcagcagcagcagcagcagcaactgccacctcagcagcagttagcccagagcctgacactggcggcttccccttcagcgccatggcagcatgcgcctgctgtgtggt

SEQ ID NO: 2397 - DNA, 442 bp, Chlorella sorokiniana
  Clone ID: LIB3602-019-Q6-K1-B8
cggcgtgggacgcagcggacagagcagccggtcaccatggtgcagcgcctcacctaccgccggcgtcacagctacgccaccaagtccaacaagcagcggatcctgcggacccctggcggcaagctggtgtaccagctggccaagaagaagacctcccaccccacctgccccatctccggccagcggctcaatgggctgcccgcggtgcgccccaacagcctgcaccgcgtgaacaagagcaagaagacggtgcaccgcgcgtacggcggccacctggcggcgggcgtggtcaaggagcgcatcgtgcgcgccttcctggtggaggagcagaagatcgtgaagaaggtgctgaagctgcaggctgccaaggaggctgcgcaggccaaggccgcggcggcaggcagcaagggcaagaagaaagtcaaagaagtgagcgggcgca

SEQ ID NO: 2398 - DNA, 453 bp, Chlorella sorokiniana
  Clone ID: LIB3602-019-Q6-K1-B9
gagcgagaagatggctctggagatgctggcgggcctgcctgaaactgagttcctgctggcctgcgccacccggtaatcctccgggtttctgcttgatgcacgacaactgccctggcgcgtgcagcagcacagcacggcgcggcgcagtgcagcatgctgtgagcagtgaggcgcagcaaacagcgaacggcagcctagcgctgccgcgcccagccctgctggtctggcacattgcggtgaccagtgcggggtgtacctccaacactatctgatatggtccagtcaatcagccccttctgcgcactacaattcttgcaaaccaaaccaaatgagcgacgattttgaactcaatgctcggccgtgcgcccagtgcgcctgtaccaccctccccctcctgctgctacccagtcgatttgattgaatgccagccgtcaggccctgtaaacaagccgc

SEQ ID NO: 2399 - DNA, 409 bp, Chlorella sorokiniana
  Clone ID: LIB3602-019-Q6-K1-C1
cggtcgaccacgcgtccgccccggcggcagccgctggctgccccgccgccacccaccaccggtggtgcgccggccggcctggcggctgccctagctcagcaggaggcggcggcgcaccgctatggcgagtttgtgctggccatgccgctggcggagcgctccagctttgtggtcgtcaccaccaagcgcgtgctgttcatccatgcgcgggagcccatgttggtgcccgaggcgcgctggagcgcctcggtggcatacctggaactggtggccgcccgggggccccgcctcaacctgctggcgctgcaaccggagcggcgcaacatcgtgcgcagtgcaagcatgctgccccgcttggtggcggatgctctggcgcacaccttggcccaacttctggttcactgcggtc

SEQ ID NO: 2400 - DNA, 401 bp, Chlorella sorokiniana
  unsure (1)..(401): unsure at all n locations; Clone ID: LIB3602-019-Q6-K1-C10
agaaaatcngtgggaggaggtgccttgcccagatgggaagggcagccgcaagatgctgggctacgctcagtaagctgcaggggctgccgctcccctggccccctttcctctgcattagcttagcaagccagccccaagctgcgcccgcaataaagcgcccgtccgtgccgcgatctgtgcgcgcccccagtcagcgccaacccctttcagttcctttttcctttcatttgcccccgccccaatgcatgcctgtctcctcctcgctacccgcccaccctgccacagagtgctgctctgactagcttgctgctgcatacggagtaagccccgagccgccctctgctagctttgcatcgatccggccccgcatcactgattccctagctgcactgctatcaaac

SEQ ID NO: 2401 - DNA, 414 bp, Chlorella sorokiniana
  Clone ID: LIB3602-019-Q6-K1-C11
gctgcccatgctgcaccccgagaagtttgtgaccctgggcatcgacccgcccaagggcgtgctgctctacggcccgcccggcacaggcaagacgctgctggcgcgtgcggtggccaaccgcaccgacgcctgcttcatccgcgtgattggcagcgagctggtgcagaagtacgttggagagggcgcgcgcatggtgcgcgagctgttccagatggcgcgggccaagaaggcgtgcatcatcttcttcgatgaggtggatgccattggcggcgcgcggcacgacgacgcaagcggcgacagcgaggtgcagcgcacaatgctcgagattgtgaaccagctggacggctttgatgcccgcggcaacatcaaggtgctcatggccaccaaccgggcagacacgctagaacccgcgct

SEQ ID NO: 2402 - DNA, 342 bp, Chlorella sorokiniana
  Clone ID: LIB3602-019-Q6-K1-C12
ccctttcattgtctatttgcccacgtttacgaattttcgaatacctggccctaccggcaatctgcttgcgcccagtgctgcgtcgcctaccgcacccaagacccccaccgtaccaacctgcctcgatcactgatgcataccatcccgcgtctgcctggcacccatgaaccgcttccatccggactaccctattgccaggaaactgcctgttgcgcttaccctgtctgctgttccacccaccaccgtctttgtgtgcgagcaataaagtagtgctcgcagcaaagagcccataactgagcgggcgaaatgtgaccgcgatcaatgtaagcgaagcaatcttgc

SEQ ID NO: 2403 - DNA, 469 bp, Chlorella sorokiniana
  unsure (1)..(469): unsure at all n locations; Clone ID: LIB3602-019-Q6-K1-C2
actagttctagatcgcgagcggccgcccgcgatctagaacgcaccctgctctgccctcagtgctgcgccggttggcggcccgccagctcagtcgctggcgccgccacatgtgcacgcgcaggacgctgcacagcaggcgggcccatccgcagctcctgttgctgcggcagcttccccttgcggcagctctggcgatgcagtggtgtcggaggtgcagcatccggatggccgctgggagcggctgttcgtctctggcgctcgggagcagcgctttgccaacggctccgtcaagcacactctgccgagcggcgccagcctgacgcgctttgccaacggggacgtgaaaaaggtgctcccaggcggcaccgtggagtacttttttgcagaggtggccagctggcacgtgacgcacacctcgggcgtggacgtcttcttcttccactcangccaggtggaggcccaccaccct

SEQ ID NO: 2404 - DNA, 456 bp, Chlorella sorokiniana
  Clone ID: LIB3602-019-Q6-K1-C3
cccacgcgtacgcggacacgtggggttctagatcgcgggcgcaccctcctctgccctcagtgctgcgccggttggcggcccgccagctcaggcgctggcgcctccacatgtgcacgcgcaggacgctgcacagcaggcgggcccatccgcagctcctgttgctgcggcagcttacccttgcggcagctctggcgatgcagtggtgtcggaggtgcagcattcggatggccgctgggagcggctgttcgcctttggcgctcgggagcagcgctttgccaacggctcccacaagcacactctgacgagcgtcgccagcctgacgcgcttttgcaacggggacgtgaaaaatgtgcttccaagcggcaccgtggagtacttttttgcagaagtggccagctggcaagtgacgcacacctcgggcggtggacggtctcttcttccactcaggccaagtgg

SEQ ID NO: 2405 - DNA, 471 bp, Chlorella sorokiniana
  unsure (1)..(471): unsure at all n locations; Clone ID: LIB3602-019-Q6-K1-C4
agcgctggcctgcctgggctgcgcactgctctacagcctcgtgctgccgcagctggccagcgtgcagcgcaagcgggaggcagcacttgcggcggcgatgctcanctacggccaactccctgaggcgccgtcggcagcggacggtgagggagaggaaggtagcacagcattgcagaaggtgccaggacatcaggcctcactagccagttcagaccagcagcaggcagggctggacttggagcgtccagcagaggaccaccgcagccctgcaccccagcagcagcgtcggcggcaggcaggagaggcggctcccttgctgggtgacgcgcagcgcagcacgcacagtggtggcagcagcagccgtagcagcagtagcatcagcagcatggcactgctgcggcacatgtggcgcctggcattggccaacggccttgtgttcgtagtgaccctggccaatcttcccggagtgct

SEQ ID NO: 2406 - DNA, 351 bp, Chlorella sorokiniana
  Clone ID: LIB3602-019-Q6-K1-C5
cggcctcatggcgcgcaagatgaaggacaccgacagcgaggcggagctgctggaggccttcaaggtgtttgacaaggacggcaacggctacattagcgcggaggagctgcggcatgtgatgaccaacctgggcgagaagctgacggacgaggaggtgaacgagatgatccgggaggcggaccaggatggcgatggccaggtggactacagcgagttcgtcaagatgatgctctccaagtgagaccgctggtgcggcgggcagcgctgcagcacgcgttttgcccgccagaacccggcccctgcagcagccatcagcgccactcacttgctggcgcagcagcccctactctc

SEQ ID NO: 2407 - DNA, 258 bp, Chlorella sorokiniana
  unsure (1)..(258): unsure at all n locations; Clone ID: LIB3602-019-Q6-K1-C6
accgaggcgtccgcggcctcatggctcgcaagatgaaagacaccnacagcgatgtggagcttctggaggccttcaaggtgttgtgacatggagggcaactgttacatgagcgcggatgacctgcggtatgtgatgaccaacctgggcgaaaagctgactgacgatgaggtgaacgagatgatccgtgaggcggaccatgatggctgatggccaggtggtctacaactagttcgtcaagatgattctcttcaagtgaga

SEQ ID NO: 2408 - DNA, 528 bp, Chlorella sorokiniana
  Clone ID: LIB3602-019-Q6-K1-C7
gctggtagaagccacgtggagggtcaaggtggcagacttcaacctgtccaagattctggggaccgacagcagtgggcccgaggtgcccctgaagcgccgccggggctgctgctggccatcgagcgccggccagcagaaggaggccgcctcagtttcatccgccggcagcgggtgtgcaacgccttcaccaattgtcagcggcacaatgtccaacttgaacccgcgctggctggcacctgaggtgatgaatggccaggccgccacccccgcctcggatgtgttctcatggggcgtagtgatgtgggagctcctgaccctgaaggtgccctgggagggcatagacagatggcctctgctcaccaagcgcatgggtggcatgcggctggaggtgccgccccgggagcagctgcctgggcctgacacacccagctttggcggcctggatgattacattgctctcatgcaacggtgcttggcggagcaccctgagcagcggccaaggtttgaggaggtgattcacgagctgcg

SEQ ID NO: 2409 - DNA, 415 bp, Chlorella sorokiniana
  unsure (1)..(415): unsure at all n locations; Clone ID: LIB3602-019-Q6-K1-C8
cttgccgactgcagcagacatctgagcaaccatgggtaaggtgcacggctcccttgctcgtgccggtaaggtgcgcggccagacgcccaaggtgcccaagcaggacaaggcgaagacccccaagggccgcgcccgcaagcgggtgcagtacaaccgacgcttcgtgaacgtggtggtgggcttcggcaagaagcgcggccccaacaggcagtaagctgactgcggcgccagcagcagctgcaggcatgtgctgaacgcacggagcgcaagcgcgtgccgcgcacagacggcaccgaagcagcctgccagtgttgaccgtagagaggcagcaaggcgcggtttggcatgctagcagtgcgtactgcgcgccacggngctagcagnctgaccctggaacagcatcagcagttattta

SEQ ID NO: 2410 - DNA, 213 bp, Chlorella sorokiniana
  Clone ID: LIB3602-019-Q6-K1-C9
gatccagaagggcctgcggctggagctctaggcgcccttgcttgtgaagcggggcagtgcgcgtggcagcgggatgctgcccgccgcctgccctgccctcctgaccgtgcttgttcccctgtgtgctctgtgtgcctagtttctgtctgcctgccgctctccccctcctgctcgccagtttgattgctccttcctaatgactcgttgcaagct

SEQ ID NO: 2411 - DNA, 80 bp, Chlorella sorokiniana
  unsure (1)..(80): unsure at all n locations; Clone ID: LIB3602-019-Q6-K1-D1
naaaaaaaaaaaaaaaaaaaaaaaaaaaataaaaaaaaaaattaaaaaaaaaaaaaaaaaaaaaaaaaaaaaaaaaaagg

SEQ ID NO: 2412 - DNA, 480 bp, Chlorella sorokiniana
  Clone ID: LIB3602-019-Q6-K1-D10
caaccaattctggtccatgatgcgcgcgctgtttggctacacggaccagcccacgggcctcaacctgatgtactacctgctgtactgggctattgtgctgagcatcacgatctggaagtggtacaccggcaccctcaccgaccgccgccaggcccagattgacgacctcaagtcgtttgcagtccacctgggagagcgcatggacgccgacgccggcctggacaagggcaagcagctcaccagcagcagcagcagcggcggccggctcagcagcgacgtggacctcgagcttggcaagggggaagcagcttctgactccgcggaggcgcaggagggtgcttaccaggcaccagacagcgcccctgctgcacctgctgagcagcagcaggcggcgccggccaccacggtcgtgtgagccaggctgcgaaaaccgcaagtggcggtgcattggccgcgtgcttgacataacaacccacccca

SEQ ID NO: 2413 - DNA, 389 bp, Chlorella sorokiniana
  unsure (1)..(389): unsure at all n locations; Clone ID: LIB3602-019-Q6-K1-D11
gctcacgaccgtgaaaaaaaaacacacactaattggatacacaaaccaaaacgacggacctgagagctagtgtactacctgatgagcggggctattgtactgggcgtcacnatctggaagtggtacaccggcaccctcaccgaccgccgtcaggcccagattgacgacctcaagtcgtttgcagtccacctgggagagcgcatggacgccgactccggcctggacaagggcaagcagctcaccatcagcagcagcagcggatgacggctcagcagcgacgtggaccttgagcttggcaagggggaagcagtttttgactccgcggaagcgcatgagggtgcttaccaggcaccagacagcgcccctgctgcacctgctgagcaagcatc

SEQ ID NO: 2414 - DNA, 492 bp, Chlorella sorokiniana
  Clone ID: LIB3602-019-Q6-K1-D12
cggacgcgtgggtggcgcaccgcaacatcccgccgcaccacccggaggccgcaactgcagaggaagcatatcgtgccgatgagctggtgccgctgtcgattcgggacggcctggaaatcaccaagctgttccccgccgagaacaagactgactaccgggagcagctgcggtccagcggcatgtttggcgacggctacgtgctgtcgcggctgggcgtgctgcgcagcgcgggcagcacggagcagcgagaggagcggtgccgcatgctggcgctgctggggcacctgctgaagctgcaggctccgcggtggggcgtgctgaagagcggcgcgggtgggctggaggagcttgcagaaaaggtcaaggttgcgcccagtgtgctggagggcctactggacctctttacagcgaagagtgcgggcatgagggagccaagtacctggtcagcaaggagaagcggtcgctcatgctgggctggatcctggtgctggc

SEQ ID NO: 2415 - DNA, 152 bp, Chlorella sorokiniana
  Clone ID: LIB3602-019-Q6-K1-D2
aaaaaaaaaaaaaaaaaaaaaaaaaaatattacaaaaaaatttataaatttaaaaaaaacactgtctccaaatgtaaaggggccaaccttaataaggggtggagggaaacgtaattattcttctatcgtgtcacctatatttaattgcatgt

SEQ ID NO: 2416 - DNA, 379 bp, Chlorella sorokiniana
  unsure (1)..(379): unsure at all n locations; Clone ID: LIB3602-019-Q6-K1-D3
gcgaccgcatcaagtccgagttccccgagatcctgtccatcaaggagtcgctcatcaagtacgtgtttgagcccgcggcagccaacagggaggagacgctcaaggcggtgaaggagatgcgcggccgctgaacgcagcaccttccctagcagcagcagcagcagcagcagcagcagccagccagatgccagctagcagtggttgaaaagcaaccagctttgataggcaggcgcgccggcggcccccaccgccacttgagagctagcttttttgaccgctcgcgcctcttatgcttgctcccccgctatttaaggggccgccggcggtgtgttctcttctgttcccagtccatttctgtaatgtatcgagccgcnnnana

SEQ ID NO: 2417 - DNA, 173 bp, Chlorella sorokiniana
  unsure (1)..(173): unsure at all n locations; Clone ID: LIB3602-019-Q6-K1-D4
taaaaaaaaaaaaataaaaaaaaaaaataaataaaaaaaaattaaaaaattaaaaaaaaaaaaaataaaaagggagatggggtaaaaatggggggggtggggtggaattntgtnttttaatttggggtttttgtttttgggggggttttttttgaagtttatgtttttttttt

SEQ ID NO: 2418 - DNA, 478 bp, Chlorella sorokiniana
  Clone ID: LIB3602-019-Q6-K1-D5
ggttgaggagtacgccgacgaggtgttcgacctgctgaacaacggcgcccacatctacttctgcggcctgaagggcatgatgcccggcatcttggagatgctcgagcgcgtggccaagagcaagggtctctcttacgaggagtggttcgagaacctgaagcacaagaaccaggtgcacgttgaggtgtactgagcggcttaaaccaaaccctggaaccgccagggctgaaaccctggatagccagggcggccgcccccgtggcacctatcaactcacttgctgacggccgtccgggcggcgcgccgcagcgcagcatgcacagcacagcgtgtgcggcagccacccggcggcagtatgccccatcatttgcttgttgcgtttcatttgcacccctctctccttctccagcccccctccgccccccgcaacgcctgagcgctcccattcggaaacaacactgatccatcggtaacattg

SEQ ID NO: 2419 - DNA, 515 bp, Chlorella sorokiniana
  Clone ID: LIB3602-019-Q6-K1-D6
ctcggcagaggtgcaagccgagaagccaaacccagtcattttccaggcagcctgctccgcgctgggcgtgccgccggagcagtgcgtgcacgtgggcgacgaccgcaggaacgacctgtatggcgcgcgcgacagcggctgctttgcgtggctgtggggccaggacgtgtgcagcttccgggacgtggagcagcgcctggccaccggcaacgtctgggactcgctagaaggagtatgagcgccaggattgcggcggcacatcgcgcctgcccgaatgcctcccattttcccttgctgctgtacaccgatatgactatgagccccacacatactgttccgcctgcttagcttgtcgctgcgcttattgctccgcgcagctgtgctgtaggcaaacgcctggcactcccaacccaatatcccccttttccttgccctcgaacttctcacccgccctccggcgggccactgctgttcgactgctgcgcttttgcgcgcccaattttgccagtggcact

SEQ ID NO: 2420 - DNA, 352 bp, Chlorella sorokiniana
  unsure (1)..(352): unsure at all n locations; Clone ID: LIB3602-019-Q6-K1-D7
ggcgaagacccccaaggccgcgcccgcaagcggctgcagtacaaccgccgcttcgtgaacgtggtggtgggcttcggcaagaagcgcggccccaacagccagtaagctgactgcggcgccagcagcagcggcaggcatgtgctgaacgcacggagcgcaagcgcgtcccgcgcacagccgccaccgaagcggcctgccagcgtcgacggcagcgaggcagcaaggcgcggcctggcatgctagcagcgcgtactgcgcgccacggcgctagcagccgcaccctggaacagcatcagcagtaattcagcagcccacctgcatgccgaacgctccgctgtaacaggttctcngg

SEQ ID NO: 2421 - DNA, 348 bp, Chlorella sorokiniana
  Clone ID: LIB3602-019-Q6-K1-D8
cggacgcatgggaaaagaccttacccgcaagctgttgcattacaaccgccgcttcttcaacgtggtggtgggcttcggcaagaagcgcggccccaacatccattaagctgactgcggcgccagcagcatcggcaggcatgtgctgaacgcacagagcgcaagcgcgttctgcgcacagccgtcaccgaatcggtctgccagcgactacagtagctaggcagcaaggcgcagcctgtcatgctagcagagcgtactgcgcgccacggctctagcagccgcaccctaaaacggcatgagcagtgattcattaatccacctgcatgccgaacgctccgttgtaacatgttt

SEQ ID NO: 2422 - DNA, 109 bp, Chlorella sorokiniana
  unsure (1)..(109): unsure at all n locations; Clone ID: LIB3602-019-Q6-K1-D9
aaaaaaaaaaaaaaaaaaaaaaaaaaaaaaattttaaaaaattaaaaaaaaaaaaaaaaaaaaaaggaaaaaggggaaatgttngaggggggggggtgataaaaggata

SEQ ID NO: 2423 - DNA, 446 bp, Chlorella sorokiniana
  Clone ID: LIB3602-019-Q6-K1-E1
cggccctgtctgctacccacctgctccctgccaggctcgttgctttgcacccccgcctgcctcggtatgcaccctcccttcctgggccctggcccagtcgcacaaccccccacctgggcccttggccctgtttgctttgaccccgctcgctgccgcactgcggcgcaccatgctccttccccacaccgaccctgcaccttggccctcgtattgctgccgtccgtcgcctgccgtgccccgccagcccgcctcatggggcgctccatgcagctcacatccccctggcaggctggcggagcacttaggctagacagcagctgcccgtgggccttcctgcacccggttttgctcccttcttgcttccacaacccgcttgcagcaaccgttgctcgtgcactgctcccagcagccggtggtgcttaacgatggggtcacccggacacccc

SEQ ID NO: 2424 - DNA, 417 bp, Chlorella sorokiniana
  Clone ID: LIB3602-019-Q6-K1-E10
gcgagggcgagcccgtggagtacaagcagcccgtggtcgtaatctcccccttcttcggtggcgtctctggctatgtgtaaatttgcacaacccgcttcccgctggcgagcaataccaaccgggggtcacatcattggcgacagcaagcacgtttgagcgagccgcggcatgctgccagccgcacggcagcgtgcgagccaaccctaagcagcgcggcggcgcgccgcacgtgcctgttttccccttggtctggattgcccaacccccgaaccccattctttctgtcccattctcctcgcactgcactgctcgctttgtgtgcacaggcaccccctcgctggccctaggattgagcgagtgcgtaagacgctcgtgtggacctcctaccccgtttttggttcattgccttacacccat

SEQ ID NO: 2425 - DNA, 267 bp, Chlorella sorokiniana
  Clone ID: LIB3602-019-Q6-K1-E11
tttgtttttattttttttttgagttgcgcactgaacactttgttttggacacaaatgcaaccatcctttgcaacaaggcatttgcaatgtgccgcactgcagactgcaaaccaaacagcggcggtgaggctagtgcattcagacacgcggggagggatgtcaaggtgctttgtccataagcaccaggtcaggggggcatcatcgtgaaagaggtgacctgagggaggggatgaggaggaggggtcttgaaggtgggtggtagaggga

SEQ ID NO: 2426 - DNA, 320 bp, Chlorella sorokiniana
  Clone ID: LIB3602-019-Q6-K1-E12
tatgggctttctatataaaagagaacaacgcactaggggcgtctgttttagagacaaatgcttccatcctgtgccataaggcattttcaatgtgccgtactgtaaactagaaacaaaacagtggccgtgaggttagagcatttagacacgcagaaagggatgtcaaggtgctttgatcatgagcaccacgaaaggggggcatcatcgtgaaataggtaacatgagggacgggatgaagaggactggtcttcaatgtggatggctgaatgaagatttggaaaagccctggaagcgggcattaagggcgctggatttgcaag

SEQ ID NO: 2427 - DNA, 105 bp, Chlorella sorokiniana
  Clone ID: LIB3602-019-Q6-K1-E2
aaaaaaataataatattaaatgatatttgccaggcttgttaatatgtaccacaaaatgactaatatggggcatgggtactggaaaaggggggggcggtttaaaga

SEQ ID NO: 2428 - DNA, 445 bp, Chlorella sorokiniana
  Clone ID: LIB3602-019-Q6-K1-E4
ctggccgcctacccgcccgagcagctctacctgttccagtatgagaacctgactgccacggagaacacgatgggcgcactgcgtgacctcaagcgcttcctgggtgtggccaaagcgctgcccaacgaccagctgccggtccgcaacgcgcgccaccagaccaagcagactgaaggctggcccatgctgcgctggcagtactggaaacttgttgagaaggctcggcgcaacatgatggaggtggttgaaattgtggagaaatatggctacgccgacccgaagggcttgatcaaaaactgggaggcctgtgtggagatgaatttggacgagcggtgcggcgcagcttctgaaagcgagtgcatgatcctgctttcgtgagcccgccagagcgggcctaatgggcgaggggcttgaatacagagcgcacaacagcggtgcccaaaat

SEQ ID NO: 2429 - DNA, 270 bp, Chlorella sorokiniana
  Clone ID: LIB3602-019-Q6-K1-E5
gcgctggatgtaggccaacaagattggcgtgatctaaagcgtgcagatggagcggggcggctcccacacgtcccaacccacccttggcctggagccaaggctccgtcagcctaaaccgccacccaacgaggacgtgggcgcccgcacagcacccgaacaggccaatcagactcaatgctcacccatgctcgccatccaggtcgtaacaccacgtgctgaaacctaatcttccgtgatgaaagtggttgaaattgtggataaatatgggta

SEQ ID NO: 2430 - DNA, 405 bp, Chlorella sorokiniana
  Clone ID: LIB3602-019-Q6-K1-E6
ctcggtagcagcaagacaaggcaggccgctggcggcgggtgacttatcaagcccgccgcagcaacccctgcacaggacagaatggttttgcagcacctgctgtttgcggcccacgccgctgcccatattctctccccctgccagttctctctctcgcgcccccctgcatgcacaaacctggctggccgctcgcgcaccgtgcctacgtcccccgcgcttttctggtgccgcccggcgagtgcgctttttgacagtggtgtggtggagctccggcccccaccgggtctgcgctttgattaacctaacgtgcccgcccctcggcactctgataccaagatccccatgcacgctcccaagctccctacacaatcttttccggacctacccacccccttgcattctttc

SEQ ID NO: 2431 - DNA, 486 bp, Chlorella sorokiniana
  Clone ID: LIB3602-019-Q6-K1-E7
agcgtggcgtgaaggatgtgggcatggcctgggagggcgtgctgtgcgagtggtacgagacgcgcaacgaaaactgggcctacggcttcttgagcaacctgaagggcgacttcaagtggaatggcaaccaggctaacaacccgattgccgtgacctgcgacccgttcaatttcgcacatgagttgggccacaactttggcagcagccacacgcacgatttctgcggcgacaaggcatggggtgaccccaacccgatagactactgcattgagaccgacaacaattgcgtgcaaccctgggtgggcgtgctgcccaggtgcactgcgccggttactgcctttggcggcggcgcaggcaccatcatgggctactgcgacgaaattggaccaggatttatcaagaacatcgccatgacgctcggccttaaccacccttgcggcaacaaaccggagcgtgtggtgacgggtatgaaagcagttgtgcagc

SEQ ID NO: 2432 - DNA, 183 bp, Chlorella sorokiniana
  Clone ID: LIB3602-019-Q6-K1-E8
ccgctaaggctggcccaaaggctctagcgggagccacgcgcacagacgccgcctgccgccggcggggcggagctgtgagcccgcccagctagattgcggcgcaggcgtaggccgttgggccgatgcacacgcacgatgagtgccctgacacagcttgggcatgccatgcctggcgaggagcat

SEQ ID NO: 2433 - DNA, 473 bp, Chlorella sorokiniana
  Clone ID: LIB3602-019-Q6-K1-E9
gggcgacggccccaactcctaccagatctggctgggaggcagcctgaacgccacgcggctggccgagccgtttgcggagcgcgtcaaggccaaggactttgagacgttcctggagccgctgtttgcggcgtttaaggcgcagcggcgcgacgccgagacctttggcgacttctgcgcacgcgtgggctttgacgcgctgcgggccgcccaggcgtcctacatcgcccccgctgccgtcgccaccctgcccaagactgtgcaggtgggcattgctgaggacgtgtaccaggcgctgactgccgcggcagccaagcagggcaccaccccagaggctctggccaccgaggcaatcaagaagcacctgagcctctgaatgggatctctcagctaggtgctgcctgcaccgctgaagcgggcggtagcaagggtcacgtgagctggctttccagcggcaggagctagcggcttctggg

SEQ ID NO: 2434 - DNA, 503 bp, Chlorella sorokiniana
  unsure (1)..(503): unsure at all n locations; Clone ID: LIB3602-019-Q6-K1-F1
gatttttgcacccgcggcggcgctgggccgcttgccttgcgcccctgccaaccaagcacgcctgtgcagcacccgcccgtgacgcgagcaggggcctctgagaggcccctttctgtctcgccgctccgctctccagctgtgttcaatctgtcgcaagttctgccgtcccgcctcacccctgccgaccgtcctgttgtggcctaacgctgtaccaagtctctgctgaccgccgtcccctccggccgtgccccagcgcccctgctcaccttccctcttgagactgctcctccgtgcttgcggcgaatgggctcctgtagattagacagcccccatgcgtacccaccactgtgcccttttttcctgtactctcgccggccgcggggcgcacacacatgctctgtcgaaaacccaaacaaggccgccggccggcatacacacgcactgntgtatcactgatgcacccaccgtgtgagcccttttttccatgccctggctaaccccat

SEQ ID NO: 2435 - DNA, 211 bp, Chlorella sorokiniana
  Clone ID: LIB3602-019-Q6-K1-F10
ctagttctagatcgcgagcggccagcccttatttcgtttattgccctccattgcaccattctgggtatcgggcaaatttgtcagcggagacgcaggttcctcgctgcaccacctgccgtgcgcacacccgacccatgggtgagtcccaagtgtcctgcaaaaaagggccccccatggtccataaacaccttactacatgtacacggtgcaa

SEQ ID NO: 2436 - DNA, 467 bp, Chlorella sorokiniana
  Clone ID: LIB3602-019-Q6-K1-F11
cggacgcgtgggcggacacgtgggcggacgcgtgggcagccgcagtatgcgggcattgacctgcccttggatatctacaccctggccgtgctgaactccgtgctcatgggcggcgtggagctgttccgcaacagcgagctcgaccccgagcgccgctgctaccccggcggcgccttcgaccccctgaacctggcgtctgacgacagcgagcgcacgcagaagctgcgcgaggcggagatcaagcacgcccgcctggccatggtctccttcctgggctacaccgtgcaggcctggtacaccggcgagggcgccctgggctccctcaacaagttcgccaacggcttctaagcagcccggcatgacgacggcctgtgcctagcgcccggccgctttgcaaccacttgcaaccggcccctttgcggggccacccccacccaacacccctttcatgagaagattaacaccct

SEQ ID NO: 2437 - DNA, 232 bp, Chlorella sorokiniana
  Clone ID: LIB3602-019-Q6-K1-F4
cccagaggggggtccttagccctcttggacgagacaacataaaagaatacactgctgacctcctctcactctccctctgtctctctcgctttggccgactgtgagcggacgcatgccctgtcaccttcggaagatgccggagctgcggcagccgccatggcgcccagcagacggcttagtgcactgaagtggcaaaaaattcatcaattcgaggcatgtaacaacacgcacc

SEQ ID NO: 2438 - DNA, 375 bp, Chlorella sorokiniana
  Clone ID: LIB3602-019-Q6-K1-F5
gcatcaccctgacctccaagaacgtcaagagcctggagaaggtgtgcgcggacctggtgcgcggcgccaaggagaagcagctcaaggtcaagggccccgtgcgcatgcccacccgcgtgctgaagatcaccacccgcaagtccccttgcggtaacggtaccaacacctgggaccgcttcgagatgcgcctgcacaagcgcctgatcgacctgcactcccccgccgaggtggtgaagcagatcacctccatcagcatcgagccgggagtcgaggttgaggtcaccatcgccgacgtgtaagcagccatttcagctgtggaagctggtcgcacggtgcgcccctgaccgccgctggcgggcgggtcaaaccttggag

SEQ ID NO: 2439 - DNA, 523 bp, Chlorella sorokiniana
  Clone ID: LIB3602-019-Q6-K1-F6
cgccagccatggcggaggcagcagctgcgatcggcctgccagagtatgctgtgcgcccacactattcagcagagctggacccgcagctgacacagcggcggccgctgcagccggcggcagcggcggcagcagcgccggagcagcagcagcagcaggcggcagccacagtgatcagccggcaagctgccacgcggctggtgcagcagtggctgagcatcaagacagaggccatggggccctaccactcggttgagcggctgcaggaggtcctggcggagcccatgctgagtgcagtcagcaaggaggcaggggaggcagcggatgcgggctggttctggcgcatacgaccgctgcgctgcaaggtggacagcattgacacgggcagcgtggcagcggacggcagcgggcacatcacagtgcttggcaccgtgagcgagagcgcggggctgtgggccctcaacgggaagcaagcccacaggtaccacaccacctaccaggtggaatatgcggtgatttgggacgc

SEQ ID NO: 2440 - DNA, 172 bp, Chlorella sorokiniana
  unsure (1)..(172): unsure at all n locations; Clone ID: LIB3602-019-Q6-K1-F7
gnaaaaaaaagaaaagagaaaaaagcaacgaacaggacagacagaggaagcagagcaacccacacgggccagcggaacaggaccacgagggagacagggcggccgcccaaaaagaacgcaggacgcggcggcagcagcgccagagcacaagcgggggaaggcgggagccaca

SEQ ID NO: 2441 - DNA, 419 bp, Chlorella sorokiniana
  unsure (1)..(419): unsure at all n locations; Clone ID: LIB3602-019-Q6-K1-F8
gcggccgctgggccgctgtgattcatttgcatcggcccatgagcggctgccttgcacgcatggtgcggcacggcctgctctgcggcccttcatacctttgtacctttctgtatcatcttgcagcaatggcagccggctgcatctttctaacatcgtcaccggcccactcgtttgtgccatgcccacctgcctccaacgtcacccttcatcaaccctcacccaacccatccacctgccacccatccactcaccttccctccgccacaacctctgtcacccactcaccacccatcacccgctcaacgccctccatgcaccatcctccccatccaccaaatctgccaccccaaacgcacgtccgccgctgcaccactctgccgcccctcacccgcacccattttncacccgccaccttttct

SEQ ID NO: 2442 - DNA, 398 bp, Chlorella sorokiniana
  Clone ID: LIB3602-019-Q6-K1-F9
cacaacctctgccacccactcaccacccatcacccgctcaacgccctccatgcaccatcctgcgcatccagcaaatctgccacccgaaacgcacgtccgccgctgcaccacctgccgccccctcacccgcacccatcttccacccgccacctttcctgccgctcaccgccgcacatcctacctcccacacctcactccatgtccacccttcacccgcgcttcacacagcggctgctgccatgcaaagctgctgccaaacccatccatcatgctcgcacacccactcacccacacgtccaacgtatccagacccattttcaaggcccgactgtacagagcctttttgcgtccttatgccgatctggtaccaggacttaatgtgtaacaaatggtatgtt

SEQ ID NO: 2443 - DNA, 446 bp, Chlorella sorokiniana
  unsure (1)..(446): unsure at all n locations; Clone ID: LIB3602-019-Q6-K1-G1
ctgccggctctcacttcccacttgtgaccatgctggcagccacccgtgcagcaagcagcctggctgcgagcaccagcggcctggcgcaggagctggcccgggcgtcgtccgtgctggctcgccattaccacaagaacgtggtggaccactatgagaagccacgcaacgttggcagcttcgacaaggccgaccccaatgtgggcaccggcctggtgggcgcgcccgcctgcggcgacgtgatgaagctgcagatcaaggtggacgacaacggcaacattgtggacagctgcttcaagacgtttggctgcggctccgccatcgcatccagcagcgtggccaccgagtgggtcaagggcaaggccgtggacgaggtgctgactatcaagaacagcgacatngccaagcacctcagcctgcccgccgtcaagctgcactgctccatgctg

SEQ ID NO: 2444 - DNA, 498 bp, Chlorella sorokiniana
  Clone ID: LIB3602-019-Q6-K1-G10
cttgtttcttgccctgcaccagatctccaagcaacgatgcaggctgcccagctccaggctcgcgccacccggcccgccgtggctcgccgcaccaccgtgcgcgtgcaggctcagcaggccgcgccccgcgctcaggcccccaagccccagcagtttgctgctggcctggctgccgccttcgctgccgtgaccctggtgctggcgcccgccgccaacgctgctgaggcccgcgcggaagtgaagagcgtggtgtgcgccagcaaccccacctccaagatctgcctcaaggacagcgccaagaactgaggcgtgccagctggactgagcgagcgctgagcccttgctggccgcacctgaggcaggcagccattgctgactgccggggggcaccgggccgccacccgctgcccagcagcatgggcgaggcggcgtgagaaaaaaaggacttgtgcactggcacacagctttttggacacctgtgctggtacatatacttga

SEQ ID NO: 2445 - DNA, 237 bp, Chlorella sorokiniana
  unsure (1)..(237): unsure at all n locations; Clone ID: LIB3602-019-Q6-K1-G11
aaaaaaaaaaaaaaaaaaaaaaaaaaaaaaaaaaaaagaagaaagaaaaaaaaaaaaaaaaaaagaaaaaagagaaaaaaaaaaaaaaaaaaaaaagggccgggcgcnccaaagaaaaaaagcaaaggnacccgggcaggcgacgcaaaagcccagcaataggagaaccaaaagaaaanaaacggcgccgcgcggaacaacagaacgacgggaaaaacaaaacccggcccaaaccaa

SEQ ID NO: 2446 - DNA, 319 bp, Chlorella sorokiniana
  unsure (1)..(319): unsure at all n locations; Clone ID: LIB3602-019-Q6-K1-G12
naaaaaaaaaaaaaaaaaaaaaaaaaaaaaaaaaaaaaaaaaaaaaaaaaaaaacccannncaagagcgcgagcggccgcccaagaggagccaagcaaacnnacgcgggcaggcgacgncaaagccccccaatagggacaccaaaancaaanccacgggccgncgngnaacaacgccgggacggggaaaacccgggcgnaacccaacnaaaacgccnggcagcacaacccccnnccgccagcgggcgaaaaagcgaaaaggcccgcaccgaccgcccnccccaacaagagcgcagccggaaaggcaaaggggacgcccc

SEQ ID NO: 2447 - DNA, 451 bp, Chlorella sorokiniana
  unsure (1)..(451): unsure at all n locations; Clone ID: LIB3602-019-Q6-K1-G2
cgagtagggcttgggccagatggtgctcaagacccagacctgccgcttcagcggcctcaggatctaccctggcaagggtgtgctgttcatccgcgtggatggccancaattcctgttcctgaagcagaagtgccgctcgctgttcaaccagcgcaagcggcccgccaagcttgcctggaccaccctgtaccgcaagcagcaccgcaaggacctggaggcgcaggttgcccgcaagaagcggcgcaacgtgaacaaggcggccacccgctccgtggcgggcgccagcctggaggtgatccagaagaagaagagcgagaagcccgaggcgcgcaaggcctcccgcgaggcggcgctgcgtgagatcaaagagcgcgccaagaaagccaaggccgacaaggcggtgcaaaaggcgcatgccaaagccttgggcgcccggcaagctttaaaaaca

SEQ ID NO: 2448 - DNA, 254 bp, Chlorella sorokiniana
  Clone ID: LIB3602-019-Q6-K1-G3
gagtagatctcgagccacagccctctcaagacccagacttgccgctttagcggcactacgatctaccggggccagggtgctctgtccatacgtgtggatagccatgaattcctgttgctcaagcagaattgcccctcgctgttcaaacagcgcaagcggtcctgcaagcttgcctagactacgctgttcactaagcagaaccggaaggacctggaggcgcaagtcgcccgtaagaatcggtgcaactgtgaaca

SEQ ID NO: 2449 - DNA, 407 bp, Chlorella sorokiniana
  Clone ID: LIB3602-019-Q6-K1-G4
acccgctgccgcactgcggcgcaccctgctccttccccgcaccgacttgcactttggccctcttgctttggccgcccattgcctgccgtgccccgcccgcccgcctcatggggcgctccatgcagctcacatccccctggcaggctggctgagcgcttaggctggtcggctgctgcccgttggcctctttgctctcggttttgctccctttgcttccacaacccgcttgcagcaacgttgctcgtgcactgctcccagcagttggtggtgctcaacgatggggtcacccggacacccgacctccgctgttgttgtttcattccagcattgcatgcccacgttgtgttgtttccagagccagtcagcctgtggaccaggcccagcctctgtaacccaagcaagcaagc

SEQ ID NO: 2450 - DNA, 399 bp, Chlorella sorokiniana
  Clone ID: LIB3602-019-Q6-K1-G5
gcggcgcaccagcgcgaccggcgatgccgaggcagctgcagaggcggcggcgctggcggctgccgctgcgccgcaggcgccccgcgtgctgccctggctgtggtgcccccgctaccactgcaatctgaacgcggcgggccgcatgccggaggacaagcggtggcatgccggcagcgagggcgccctgctgctggtgtgcctcaccgaggctggcgagcttcctgctggtgtggcagaggcgcaggcagaagcggccgccgctcgggcagctgcaaagctgctggcgtcgcagcaggcagcggccaacagcctgcggtcgcacccgctggacgtcctggctcgggacagcaactgcgctgtgccccaagcgggcggtgcggcctcagaagctgctcggag

SEQ ID NO: 2451 - DNA, 555 bp, Chlorella sorokiniana
  Clone ID: LIB3602-019-Q6-K1-G6
cggacgcgtgggcgtgtgcccagaggagcttgaaaagattgcagcagcaaccgacctcacagagaagctgacgggggtgcaggtggtgcctgtgttcctgtcggtggacccgcagcgagacggcgtggagcaggttcgtgactacgtcaaggagttccatccccgcatgatcggcctgaccggatcgtacgagcaggtgggggcggcggccaaggcctaccgcgtctacttctccaagacgcaggacagcgaggacgactacctggtggaccactccatcatcacatacctcgtcaacccagacggcaagtttgtgacgttctacggcaagaacttcaccaaggaggagatggcgcgcaacatctcggaccacatcaagcgctggcagcaggcgcaccccgactggcagcagaagcagaagtagccgaatacgcgagtgaacccccagggcccagcaactgcagcatgggtgctgtggccgcttgcctgccatctaatttacatcttgcgccttctgtattccttcatgtgcattagtggaacatgtgtgaggct

SEQ ID NO: 2452 - DNA, 124 bp, Chlorella sorokiniana
  unsure (1)..(124): unsure at all n locations; Clone ID: LIB3602-019-Q6-K1-G7
aaaaaacaaaaacaaaaaacccagaagaacaagaaaaaaaaaaaagcaacaaccagaccacacagggaagcgggcgcaagagcaagaggcgccggagcnccngccagcggacccccaccgagac

SEQ ID NO: 2453 - DNA, 462 bp, Chlorella sorokiniana
  unsure (1)..(462): unsure at all n locations; Clone ID: LIB3602-019-Q6-K1-G8
cgctacgtgacccccggcgcgttcttcgagtctgcacgcgccgccggtctcagcgaggccgacattgctgccggcgaccagcgccggatcctgcangcgcggtggtacctgtaccagccgggcggcgccatggctcgcgagctggccaagaaccccacggtgctggtggtgaacgacattgtgtttgcgcacggcggcctgctgccccaccacctcaagtacggcctgcagcgcatcaatgacgaggtgactgactggatgagcggcacggtgcgccccgacggcagccaggcgtcgccgcccttccccgccatgggcgactccaacagcgtgcagtggaaccgcacgtttggcaaggagcgcgtgtccgactacgagcgcatgcacatgaacatgcagctgcgtgccacactggaggcgctcaacgcgcgcgccatggtggtgggccacaccccgcagatg

SEQ ID NO: 2454 - DNA, 407 bp, Chlorella sorokiniana
  Clone ID: LIB3602-019-Q6-K1-G9
actcgaccctttctcatgcgtgcccgtcggatatccacctcgcacacactcactctctgttgtcatttggccaggcagcccccaatgcctgcctccctccggctgtttaatcttagccccgtgtacactaagccctcgcttgttgtattgcttccctgatgctactagcaggcttcgccacgttagcgccacgttagcgcgcccttcctccctgcagccgctctcctgccagctctcatagctaggcctgcccacccaggtttttgacgccctgccacatggctgcgccttgacactctgccccacttgcctgcattaatgtcgacccttcgacccacccgccacttccctgctgccttctgccccgggtcatctgatcgcctgcctttgatcccttccccttctgc

SEQ ID NO: 2455 - DNA, 355 bp, Chlorella sorokiniana
  unsure (1)..(355): unsure at all n locations; Clone ID: LIB3602-019-Q6-K1-H1
gccggcgagcgtgtgcggctctacgtcacgggccagttcctgggctacaagaggagcaaggccaaccagtacaaccacaccgcgctggtgaaggttgagggcgtgaacagcaaggaggagaccgagttctacctcggcaagcgcctggcgtacgtgtacaaggcgaagaccgagaagaagggcagcaagtaccgcgtgatctggggcaaggtgacccgcgcccacggcagcgtcggcaccatccgggccaagttccagaagaacctgcccnctgcggccatcggcagcaagatccgcgtgatgctgtacccctcccgcgtgtgagggtcggttgctttccggagcagcagcggtg

SEQ ID NO: 2456 - DNA, 523 bp, Chlorella sorokiniana
  unsure (1)..(523): unsure at all n locations; Clone ID: LIB3602-019-Q6-K1-H10
ntccgcnnagccagcagcnnagctgtttgttggcaccgccacctttatgcagccanntggcagcggcccctgcacgagcggcagcgggcgagcagtggcagcagcgaggcagagttagcatctgtcagcaggccaagcccactagggctgcagtaggcgcccacgccagcccatcggcaagcggcggcaagggagcagtcagcggcagcatgcccggagcaggccagccaagcctgctgcctggttgaagcagctgtgatgcccatcaagacgggcattgcagcagagggcgcggcagtgtgcttcattgctggcggcgagggcgagcggcaccgcacgcccgttgatgtgctcacggctcggcagctgcggcggcggcagcgcgaagcggaggagcagcgggcagctttggaagaggcaggaggggacccaaacgaagccggtgccctggcaaccgcagcaggcacagcaagcggcggcagggcggaagttggggacagcgaggtgcgcgtgattggctatg

SEQ ID NO: 2457 - DNA, 534 bp, Chlorella sorokiniana
  Clone ID: LIB3602-019-Q6-K1-H12
gggggcgaggagcaggagcccgcaagcatggccgctcagctgggcttccgcgcgagtggcttcatcggcagtggccgggcgattcagccgcggcggcaggtggcggcgccatgccgagcaatgccggtgcaggcggccgtgattggccctggcaagaagtgggagcacactgagacgaaccagaacggcaagccggtgcgcgtgtccatgcacgtgcggaagggcgacaccgtgaaggtgattgccggcggcgacaagggcaaggtgggcacggtgctggacatcaacaccaagcgcggcgaggtggtggtcgagggtgtgaacatcaagaccaagcacgtgaagccggcggcgcagggcgaggagggccagattctgaagaaggagttccctgtgcaccactccaacgtggcggtctactccacggcgcagcagacgcactcccgcgtgggcttcaaggtggtggacggcaagaaggttcgctacctgaagaagacgggcgaggtccttcctgagcggctgcctgagaagaag

SEQ ID NO: 2458 - DNA, 444 bp, Chlorella sorokiniana
  Clone ID: LIB3602-019-Q6-K1-H2
aaacagcttacatcatgtacacagcggctccgcaatgggaccccgatctcatggccagctcgatgtttgtgccggtgccctttgttataatcactgtgggcatcgccttccccatgctgtgcacgctgctgatcttcaaggcgattgcagagtggcggctgggccggccgctgagcttcgacggcagcagcggggcggtaggacacgcgcacatgcggttgccttcagacgactcagcggcagagggttacatgggcgcagcctatggcagcaacggctccggcggtgacactcgaaatgagcggcttggtgctgaagacatatgctgcggacgatgaccgccatgcatgaagctgccagcagcttgggcagcaacatgcacaatggtgctgcacagtccggtgctgatcttgcaatatgatttgatactatgctccctgagat

SEQ ID NO: 2459 - DNA, 279 bp, Chlorella sorokiniana
  unsure (1)..(279): unsure at all n locations; Clone ID: LIB3602-019-Q6-K1-H3
ggtngaccacgcgtccgaggacgcgtgggctcacagagtactgcatcaaggggtcgctttatgacatcattgctgaggcctcgcagagtgcagaagcagccgcggcgctgacctggccctcccctatcactatcctgctggattcggctgctgggctgggctacctgcacagccgggccatcctgcaccgagacatcaagagccccaacgtgctggtggatgatcagtggcggcgcaagctggcagaattcaacctgtccaccatcctgaaccagcaga

SEQ ID NO: 2460 - DNA, 472 bp, Chlorella sorokiniana
  unsure (1)..(472): unsure at all n locations; Clone ID: LIB3602-019-Q6-K1-H4
accacgcgtncgagagcacaaggaggacacggcctggagcctgatgctcagcaatggggtcatcaagacgtacgactcgtacggagcggtggtggaggtgtctgtggaccacaatgccgcgctgcacggcgtggacttgcaggacatccagctgcaccgcatctcgctcatggagcggtcgcgcgtcgtgcgcggcatgatgaccaagctgccggtgtccacgctgctgtgggcgggctggtacaagctgtggggcaacagcaaggacatgcacggcgtgctcatgccggagatcaaccgcggcgggctgctgctgatctaccagatcctggccgacacctcgcaggcggacatcgcaaaggcgctgcaggtcatcaccgcgtcgttgcaggcgccccagccctgcatgttcttctgcaagctgggcaaggaccgcaccggcctcatggcggccctggtgctggcagcctgc

SEQ ID NO: 2461 - DNA, 502 bp, Chlorella sorokiniana
  Clone ID: LIB3602-019-Q6-K1-H5
cgctcgtcctacgtggcggccgtcacctttgtggcctgcctgctgcccttctttggagagctgatgggcctcatctcttcaatcggcctcatgcccgtcaccttcatcctgcctcccatcatgtggatgcgggcgcgctcgccagctggcgcggagcgcgcgctgtgcctgctcatcgtggccgcatgcagcgtcatcgcggcgctgtcgtttgtgggcagcgcccgaaacatcgcggtgctggccagccagtttggcctgttctccggagcgcggcgatagcaggcgggccggtcgggcggcagcgtgcgaggcggcggcacgctgctgctggctggattcgtgcgactgcttcgaaccttccttgctcccctcgcttgctgccaagcagcggacgcacgcgttttcttgccaactgaggtcccacatgtatgttgcacttgctgtactgcccatctgatctgttgccccagtccctgctctgttgtaagctatgcttgct

SEQ ID NO: 2462 - DNA, 375 bp, Chlorella sorokiniana
  Clone ID: LIB3602-019-Q6-K1-H6
gcgaggtgatagtgtctggcaagctgcgtgcgcagcgcgccaagagcatgaagttcaaagatgggtacatggtgtcgagcggcaacccggtgcgggagtacatcgacggagccactctccatgtgctgctgcgtcagggtgtgcttggcatcaaggttcgcatcatgaaggagtgggatccgactggcaaggttggcccccgcacccctctgccggatgtcgtcaccgtgctggcacccaaggaggaggagtatgtcagcgactccaaggaaaagcttgccaaggcttgagagctggtcgcacattagatgtactgctgcatgttaaacacccaaagcaaacaattgtaatctttgcgatgggctggtgaaaaac

SEQ ID NO: 2463 - DNA, 382 bp, Chlorella sorokiniana
  unsure (1)..(382): unsure at all n locations; Clone ID: LIB3602-019-Q6-K1-H7
aaaaaaaaaaaaaaaaaaaaaaagcaaaaaacataaaaaaaccaaaaacaaaaaaaaaaaaagaggggaacaggggaaaaaaacgaaaggggcgagaaaaaaaacaaaaaaaaaaaacacacaaaaagaagcagaaaaaacaagaaaggggggggggccaacgaaaagaacaaagaaagacaccccgccgacggaaaaagaaaacccccgaaacggggccccaaaaaaaaaacaacggggcggcgcncaaaaaagaggagaagggaaaaacccgggggaacaccaaagaaaagggcgagaaaaaaaccccccaaaccaaaacgggggaaaaaaaaaaagggccccccaacaaacgccccccccaaaaaggggcccacccaaa

SEQ ID NO: 2464 - DNA, 318 bp, Chlorella sorokiniana
  unsure (1)..(318): unsure at all n locations; Clone ID: LIB3602-019-Q6-K1-H8
ggtggacttggagngggcggcgctggctgacgaccccgtgctggtcatgaagtattgagcgggcagcaaatgcgcagttttgaggactggactgtgtccccttctgtgctgtgctcgcccggcgggcctgccttgccctgacctgctcaagctcctgcacgtgcttcctnctgctcttcctgacgtctgctggcttgcagttttgaccggttctcttctctgttgccccacatcttgaacgtctgctattccgcaatgtcagccttttagttctcacaaccgtactggtcaattcagagtttgtaaacgagtgaaggg

SEQ ID NO: 2465 - DNA, 304 bp, Chlorella sorokiniana
  Clone ID: LIB3602-019-Q6-K1-H9
gttcccctcccctcttacccctcgctcccaccgcccaaaggaccgctgcacccttcacgtgcgtaaccggggccccctccgctatggctggctcgaatcgtttttccccctcggccccgcatgcaaatagcgtgctgcttgcccggccgaacacacccccgcatgaatcctgctaactgacagcgagcgctgcctcggtagtctggtctgtgttaaatgttcatttgcttgcgcccagttcgtgaacacgccatgtgacagacagatggggtttatacaaacgcccttgggcatttatacagta

SEQ ID NO: 2466 - DNA, 254 bp, Chlorella sorokiniana
  Clone ID: LIB3602-034-Q6-K1-A1
ggagaggacagcagctctgcaaccatggtggagtccgaccagactttctgccgcaagaagaacgcggtggcggtggcctatgtgaagcgcggcggggcctagatccgcctcaacggcgccccgctggagctggtgcagcccgagacgctgcgctggaaggcgtttgagccggtgctgctgctgtgcaagcatggcttcttcaacgtggacatccgcatccgcgtcaagggcggctgacaggtgttccagatcta

SEQ ID NO: 2467 - DNA, 366 bp, Chlorella sorokiniana
  Clone ID: LIB3602-034-Q6-K1-A11
cggcgaggcagcagagcgctctgcccgttcatcataagtaagctgccacgcgagccgggttgcccctgtggtgcggccgaccagccgcaggctccgacatgtaatgctcccctgtacgtctaccttcgccctgcctatcttccacactctacactctgctctaacctcttcctctcttctatgactacccctcttttcactccagcctacactctctgacctactactaagctgaactgcttgagggtgccccactgcatgctcccgagctcatgcattgtgcactgcattgcatcttgtccagcgcctaacaacgagggcaagccacgtgtggcatttacagctcaaggaggacatcttatacac

SEQ ID NO: 2468 - DNA, 469 bp, Chlorella sorokiniana
  Clone ID: LIB3602-034-Q6-K1-A12
caacccgaattccacccacgccccacggcattctcttggggaccaggcatgctgcgaggccgacacgcatctactgccagccatgtgtcattgctggcactctctctgtggaaactcctgacatgaacggctgccatgcgccgaacgcgctctgacccccttgcacatctgcgccacagtgcaggcggcggagcggcttgagctgccacctctcgaagcactgatcggacgagacacatgcacatttgccggacaggatgcctactgatcactgatccaatagtgctggtcggaccaacttgagcaccggcactgcatggcacatgatgtgcggccactgtgacggctgctggagcagcacaccagaacagctgaccaccggcagcgcaagcaggctgaaagagatgaatgcaaatcgtgcatgcctgctcactgtgctcactgaagtgccataaatattacatcatga

SEQ ID NO: 2469 - DNA, 89 bp, Chlorella sorokiniana
  Clone ID: LIB3602-034-Q6-K1-A2
ggacgtgtagatgactcctgcgcactgctgcaatgctgggttagtcggctagacacacctgttcgcccaccctgagatgggacaacttg

SEQ ID NO: 2470 - DNA, 453 bp, Chlorella sorokiniana
  Clone ID: LIB3602-034-Q6-K1-A3
gattgaggcagcagttgaacgagagcggcgcaggggagcaccaggcgggccttacattgctgagcagcacattcgcgaggcggtggcgctgctgcagcggtggggcttcagccaggagcagctgaacagtgtgctggctgacagtcgagtactcactcggacggcggccgacattgaggctgtgctggtctggctgcagcggcagttcgggctgcagcgtgttgaagtggccctagcttgcagccgtcagcctgcaatgctggcacagaagcaggaaacgttgcaggccaactggcgggcgtttgaagcggcataccagcccgcagcatcggcaaggactgcattggcagctgccctgcgggcggggcgagggcatttcctgcggttcaagccaaagacaatcagggagaaagtgcaccagctgcagcagctgttctttgttgacgaccgcag

SEQ ID NO: 2471 - DNA, 377 bp, Chlorella sorokiniana
  Clone ID: LIB3602-034-Q6-K1-A4
cttcgaccccctgggcctggctgacgaccccgacaccctggctgagctgaaggtgaaggagatcaagaacggccgccttgccatgctgcccatgttcggcttcttcatccaggccatcgtgaccggcgagggccccatcaagaacctgaacgaccacctggctgacgcctcggctaacaacttctacgccctgtacgccaagaacctggcgtaagcacttgtcgtacgaacgtacgaggcccgcgcgcgattgtgcgccccttgagaagatcacacgaccctgtcgcaccgcactgccgcctgtacgcacccaccatgtgtatgtgctagagcctatgaagttttgtgtaagcccttgatactcctaaaaaagaaaa

SEQ ID NO: 2472 - DNA, 513 bp, Chlorella sorokiniana
  Clone ID: LIB3602-034-Q6-K1-A5
gctgacggggatgtggagatggcggatgcagacaagcaggcggcagcagacgctggggacagtgcggcagcggccaagcggcagaaaaccgaggcggcggctggcggcgccggcgcagctttgccggcagctggcctgagcgagaacctgctgacggcatgccgcttctatgatcgcgagtgtgctggctacctggcagacgaggacctggaggagattgcttacatggtttccgacagcctgtccaggaagcgcgtgcaaggcctggttgactcggtcgccaagcgcagcaagttcagctacctggagcacgccagcctggtggtgccacccgcggagccgccagcagctgcagccggtggcggcagcggtgtaacgacgagcgagagcggcatggtcatgatcaacggaatggcggtggacgtgcctgcactgtagcagcgcttggtcgcagcagacgctgcacggcgcgcggacgaagaccgacagcgaactgcggagcaagcaaaggca

SEQ ID NO: 2473 - DNA, 357 bp, Chlorella sorokiniana
  Clone ID: LIB3602-034-Q6-K1-A6
ggcggctacggaggaggctcctcaggctacggtggcggcggctacggcggtggtggcggcagctacggtggcggtggctatggcggtggcggcggtggcggcggcgcccccagggccccccagtccttccgcgaaggcgactggtactgccccagctgcaacacccacaactttgcctcccgcggccagtgcttcaagtgccaggcgccccgcggcgactgagcgtgacatggcacagcacacgcactgtgcatgccgccgcccggcggcagagttgcagcacagcggcggggtgcagggctacctgtgcgcatgccggctggagcaaccgctgttgcttgattaaaatgcactcgc

SEQ ID NO: 2474 - DNA, 301 bp, Chlorella sorokiniana
  Clone ID: LIB3602-034-Q6-K1-A7
acgcccttgtggcgaagtctgagcgtgcgccactcagaggggcagagttcctacagcagcgacggcgacctctagtgccggagcggccagccgtcttgagcccagccacggcactgcacagaggcgtacgcggcggtgaattggggcaccaactgtggttgagggggccttggtactccgtaaccggctcgggtggtctctgcaatctcatcatctgggcgcgtctggcgctaacagggcttctagataagtgggccatcgtcatggagggcgcacgtggacgtcgggtctctacgagctc

SEQ ID NO: 2475 - DNA, 182 bp, Chlorella sorokiniana
  Clone ID: LIB3602-034-Q6-K1-A8
aaaaaaaaaaaaaaaaataaaaaaaaaaaaaaaaaaaaaatattttaaaaaaaaaaaaaaaaaaaaaaaggaagggtgggtaaattataaagaaaacaatataggggcggcttttttgggggttccagtttttagtacttgggtttgcgaatctttgttttttatttggtgacttttaattt

SEQ ID NO: 2476 - DNA, 402 bp, Chlorella sorokiniana
  Clone ID: LIB3602-034-Q6-K1-A9
cccttcaagtcacccagaaagccagcagccatgcagaccgccgctgtgcgcgcccccatcgtggcttcggcccagcagcagaaggccgcccccaaggcgaccgtggcggccctgccccgtgtggccaaggccctgggtgccggtgtggcctccctggccctggcgctgagcgccaacgccgccactgtgaagctgggcgctgacaacggcgcgctggtgttcgacccctccaacatcaccatctccaagggcgagtctgtgacctttgtgaacaacgccggcttcccccacaacatcgtgttcgatgaggacgatgtgccctctggcgtgaacgccgaggcgaacagccgcgaagactacctgaacgcccccggcgaggagttcacccgcaagctggacacc

SEQ ID NO: 2477 - DNA, 520 bp, Chlorella sorokiniana
  Clone ID: LIB3602-034-Q6-K1-B1
ggagaggacagcggctctgcaaccatggcggagtccgaccagactttcggccgcaagaagaatgcggtggctgtggcctatgtgaagcgcggcaagggcgagatccgactcaacggcgccccggtggagctggtgcagcctgagacgctccgctgtaaggcgtctgagccgtggctgctgctgtgcaagcatcgcttctccaacgtggacatccgcatgcgcgtcaagggcggctgacaggtgttccagatctactccatccgacaggccatgtgcaagggcattgtgcacttgtaccataagtacgtggatgagcagagcaagaacgagatcaaggacatcctgctgacctacgaccgcacgctgctggtggccgaccctcgccgctgcgagcccaagaagttcggtggccacggtgcccgcgcgcggtttcagaaatcttacaggtgaaggctgccccgtgggacggttgggcgcctctggaggcttcttctgcgccgcttgcgtggcggcagcggcg

SEQ ID NO: 2478 - DNA, 331 bp, Chlorella sorokiniana
  Clone ID: LIB3602-034-Q6-K1-B10
ggccgccagtctggagcgccagctacagcacgttgccgcgctcgatggccctgccaaccagcctcgacgcacagctgaagcgctgcaacacacccgtgacaaaccgtgcaacagcagccacacactgcgttgcttgaaccccctttccgtgacccaagacccgatccattccgtgatctctcccatctgcaacccagcacactcccccattccctggaccccatgcatgaccctcccccctccctgaccccgaaccattccgatgaatgaaaccacccccccgccgctgtgcttgccccacacatgtgtacagatgtaagcacacagtcca

SEQ ID NO: 2479 - DNA, 551 bp, Chlorella sorokiniana
  Clone ID: LIB3602-034-Q6-K1-B11
ctcctgcgctattcggcgcagctggcgcaccagcaagcggccagcacctccacggcggtgcaggcagcagcatgcgcgggcagcaggcggtggttcgctaccaacagccatgacatcttcaacacgcaccgccacgaggcgcacaacaactgggacaccgagttcgatttcaccgatgccaactacgagaaggttgcggagatcatgtcgcgctaccccaccaactacaaggccagcgcggtcatcccgctgctggacctggcgcagcagcagaacgagggctggctcagcctggcggccatgaaccgcgtggccaagatcctggacatggcggagatccgggtgtacgaggtggccaccttctacaccatgttcaaccgcagcaagatgggcaagtaccacgtgatggtctgcggcaccacgccctgcatgctgcagggcgccaagggcatctacaaggcgctgaaggagcacctgggcattgactacggccagaccactccggacgggatgttcacgctgggcgagatggagtgcatgggcgcgtgcgt

SEQ ID NO: 2480 - DNA, 494 bp, Chlorella sorokiniana
  unsure (1)..(494): unsure at all n locations; Clone ID: LIB3602-034-Q6-K1-B2
gggacgtgcacatctctgtggcgctcatggacgagttcatgcgctacgcggtgagtaacacgcgtcggggcatcgagacgtgcggcatcctggctggggagctgagcgcggatgatgcggtgttcaccatcaccaccctcatcgtgcccaagcaggagggcaccaccgacacggtggagatgctgaacgaggaggagatcttcgaggtgcaggacagccgggcgctgtacccgctgggctggatccacacgcaccccacgcagacctgcttcctgtcgtccgtggacgtccacacacactgcggcttccagacgatgctggacgaggctgtggccattgtgatggcgcccaaggacccatccaagcgcgtgggcatcttccgcctcaccacccccggaggaatcaagctggtgcagcgctgcccgcagcgcggctttcatgcacacccgcccaccgacacggngcagcccatctacgagctgtgcgggcacgtg

SEQ ID NO: 2481 - DNA, 118 bp, Chlorella sorokiniana
  Clone ID: LIB3602-034-Q6-K1-B3
aaaaaaaaaaacacaaaaaaaaaaaaaaaagaataaaaaaaagaggagctttcataaaaaaaaccacccttacgggggggcccatctgaggttcccggttttctaacgcgggccttat

SEQ ID NO: 2482 - DNA, 462 bp, Chlorella sorokiniana
  Clone ID: LIB3602-034-Q6-K1-B4
gcattatcttgcaggcccccgagttgctgcgaggcggccgcgcctctactgccagcgatgtcttctcgtttggcgtggtgctgtgggagctgctgacgtggcggctgccctgggccggcagcggcctgacgcccttccagatcggcgccaaggtggtggcgggggagcggcttgagctgccacctcgcgaagcactgcccggaccagacacaggcacatttgccggcctggatgcctactgtgcactgatccaagagtgctgggcggcccagccggagcagcggccgggcatggcacaggtggtgcggcggctgcgagggctgctggagcagcacagcagcacagcggcgcagcggcggggcaggcaggcggcggcggctgaatgcagttcgtgcatgcctgctggctgggctcactgaagtgccatcaatattacatcatgagccaacatttaagttatgc

SEQ ID NO: 2483 - DNA, 346 bp, Chlorella sorokiniana
  Clone ID: LIB3602-034-Q6-K1-B5
aaaaaaaaaaaaaaaaaaaaaaaaaaaaaaaaaaagaaacgataacaaggttcgaagagatataaaaaaacaaaacttgagggggggaaataaaatggaaaaaaaataaaaatgggtatgcgtgtttcagggggtccctttttctgtccgtttttttgcaccgttatgacttttgtatactttgcctttatttaatttgatggccttgcgctttatccccttttggctgggaaacccttggggttacccgattttaccgcttttcattcctaaccctttttcgccctgtgtgcctattcgaaggggtcctgtaggggcccctttcccgcgcttttttcttttttta

SEQ ID NO: 2484 - DNA, 285 bp, Chlorella sorokiniana
  Clone ID: LIB3602-034-Q6-K1-B6
tttttttttttttttttttttttttttttttttttttttttttttttgattgtaggatgttagagtttgttttgtataggaaggaatgaaataagtttttgatttaaaatgtttattgagggttatttttatggtttaaaagggggggggggggggaaaaaaattgtttggaaaaaaaaggaaaaaaaaaaaggtcttaaccttaaagaacccggggggggggggggaaggggacaaaaaaaaaaaacccttgggggggcggggaaaaaaattttttgtacattt

SEQ ID NO: 2485 - DNA, 430 bp, Chlorella sorokiniana
  unsure (1)..(430): unsure at all n locations; Clone ID: LIB3602-034-Q6-K1-B7
cgtacctggagcgccagttcgagtcattcggcggcgcttcgctggacgacctggtcaagcatgcgctgcacgcgctgcaggcctcgctgcaggatggcgagctgactgacaagaactgcagcgtggcggtggtgggcaaggacaccaccttcacgctgctggaggacgaggccctggcgccctacatcacagctgttaaggaggaggagccctccgcggcaggcatggaggcacaacagccggcggcagaggaagagggagccgctgccgccggcggcgagggcgagcagcagggcggcggcggcggcgacgagggcggcgcggcccccatgcaggaatagagttgcggtggactgttgaatggaagcaggcaaactgcacatcactgccggcccgccctgggcacagcagctgtaaatgtaccgtcgng

SEQ ID NO: 2486 - DNA, 490 bp, Chlorella sorokiniana
  unsure (1)..(490): unsure at all n locations; Clone ID: LIB3602-034-Q6-K1-B8
cgccgctgctgctggcggcgcggcgcgggcacacgcaggcggtgcagctgctgttgcagcatggagctgccaccgacaagcccaacagcgcgggcgtcactccactcatcgccgccacgttgttcggccacgatgagacggtggctgcgctgctggccaggggtgcgggcatcactgtgcgggacgcgactttcaagcgcacgccgctgcactttgctgcgctggccgacgccgagcgtgtggcgcgcctgctactgcagcacggtgccgacgctgctgcggtggacaccagcggagcgacgcccatggacctggctgttgagtacgaatgcaccatggtagtgcgtgtgttcaccagccgcggctgagggccagcaagggagccggggctgctgaggctgcactgcgcacagngctgtcctccctttccatgctcaaccgtctcagctcagtctgttcgcgccctgtaactgggttcatgtggcaaaaa

SEQ ID NO: 2487 - DNA, 552 bp, Chlorella sorokiniana
  unsure (1)..(552): unsure at all n locations; Clone ID: LIB3602-034-Q6-K1-B9
gatgtctgcctcaagccggcgctcaaagcagcggccgctgtggatgcgacctcgccccgccggccctccgccttccctgccagccaggcgcgacagctggcgctgatgctgcgcggccaccctgccggcattagcaccaagcccatgctgggcaagcactacgacccgtgcatcgactcggagacggaagcgtacctgaaccgccgggacgtccagctggcgctgcacgccaatgtgtcgggcgagctgccgggaccgtggaaggactgcacccaggacatccagtacaagcggcgcgacgtgctgcgctccatcctgccgctgtatcgcgagctggttgacgcggggctgcgcatcctggtgtacagcggggatgtggacgccatcgtgccagtgattggcacgcgcaactggattcgcaagctggacctgccgatcaccaagccgtggcggccatggacgtccgcgacaggccaagtcggcgggtggacggtggagcaccagggcctcacctttgcctcagtgcgaggcgcanggcacatggtgccctat

SEQ ID NO: 2488 - DNA, 304 bp, Chlorella sorokiniana
  Clone ID: LIB3602-034-Q6-K1-C1
ccttttcaagccaaccctacccacactttccaagcaaacccaaatcttctgaagcgaaagaacagttttctcccctcctttcattccagtaccggtgcctagctatcaaccgtctccccagcagggctgtcaagaatttttgttcagttaccggctctcgtgagctgtggctgctgcagcagctgctgcttttcccccatccggcttgcgctgcgcatgcgccgccgatcctactaacctcccctttcagtacctccccttccagatcttaggtggaaatatgtattccaactggtgctacaac

SEQ ID NO: 2489 - DNA, 248 bp, Chlorella sorokiniana
  Clone ID: LIB3602-034-Q6-K1-C10
agactatcaacccggacagctacgccgcttattacgccccaactaatgcggcagcaggcaccgccgcaggcagcatggtcgttgcaacatccgcagctgccgtcgccctgctggcgctggcatgaccagtttaactatattcttatgcaccgcattgcggcctcatttcattgcactgggcgtgcacaatccattaccccctgcactgcattacaacctgtgcgcctgtgtaatgcattcagttgggc

SEQ ID NO: 2490 - DNA, 64 bp, Chlorella sorokiniana
  Clone ID: LIB3602-034-Q6-K1-C12
aaaaaaaaaaaaaaaaaaaaaaaaaaaaaaaaaaaaaaaaaaaaaaaaaaaaagggcggccgat

SEQ ID NO: 2491 - DNA, 320 bp, Chlorella sorokiniana
  Clone ID: LIB3602-034-Q6-K1-C2
cacagacctgctgccgcccatgatgaccaacaacgagtggcttcgctcgcagcactgggtcatgcaggtgctggcatttgcggcattctattccggcgcggcagtcatggctctcatcggccggtggctgtgatgccgccgtgctgctctcctgtgcatgtcgcgcgcggcccctgcgttccatttgtggcagggagtcgcctttgttgtatgctcaactgttgtatgctctgcgttgccacaatgtatgactctccttctttgtttctttatcctcctcactttgtatgctaccttgtatgctgcaagacatttaactc

SEQ ID NO: 2492 - DNA, 418 bp, Chlorella sorokiniana
  Clone ID: LIB3602-034-Q6-K1-C3
aaaaaaaaaagcgagagcggcaatcgacataaaaaaagacaacaaaggggctggagactattgaaatagaccagcagccggtgttttgcaaggaacgctatacctttctccatggggcccttccatgtaacgagttgatcttggcctaacaaccttgcgctgggggaaattttgtagtgtcccaactgattaaacttgtgggacatctccctttctccagttgtaggaaaaacacactagggccgccccgtttgctttttaaaaaacctgctcagttttgaattgttaatgggatgccccctgtggatgggcattaaacccctcttttgtgggggttatacacagcgggaccggtatagttttcctgcccctagcccccactcttttcggtttttttccttcctttttctctcacgtt

SEQ ID NO: 2493 - DNA, 514 bp, Chlorella sorokiniana
  Clone ID: LIB3602-034-Q6-K1-C6
tgatcagcagagcggaggccaaaggcgcctgggaaggcgaaagccgacggccagcgaagaacagccgccatggctgcctcccacaagaagtgggtgcctctggagtccaacccggatgtgctgaacgagtacgctgccaagctgggtgctgacctgtcccagtaccagttctgcgatgtctttggcctggacgaggagctgctggccatggtgcctaagccggtggcggccgtgctgctgctgttcccggtgacggagggcaccgaggcggctcgcaaggcggagcaggaggagattgaggccaaggggcaggaggtcagcccctccctattctacatgaagcaaacgataggcaacgcgtgcggcaccatcggcctgctgcatgcactggccaacagccgtgacaggctgcacattgccgacggctccttcctgcaccagttcctggccgcaaccgagggcatgggggctgccgagcgaggcgcttaccttgagcacccgccccagggcgccg

SEQ ID NO: 2494 - DNA, 454 bp, Chlorella sorokiniana
  Clone ID: LIB3602-034-Q6-K1-C7
ctgcccttcagatcatgaagagcgacgaggatgtgcgcatgatcagcgccgaggcgcccgtcctgtttgcccgcgcctgcgagttcttcattcaggagctgacgctgcgcagctgggccgcggctcaggagtacaagcggcgcaccattcagcgcagcgacgtggccacagcaatcacgcgcacagacgtgtttgacttcctcattgacattgtgccgcgggaggaggccaatgaaccgcccggcactgacggcgcagccgccgcggcacagctggtgggcgtgcctcccccgccggtgccaatgcctggcggtggtgcgccgaagatgggcatgctgtcaccagcccagcagcagcagcagcagcagccgcagcagcagcagtttcagggagaggggaagcagaagcagcagcagcagcaagagcagcagcagcagcagaagcagcagggcca

SEQ ID NO: 2495 - DNA, 481 bp, Chlorella sorokiniana
  unsure (1)..(481): unsure at all n locations; Clone ID: LIB3602-034-Q6-K1-C8
ccggcgagagcggcgatcgcctgcagaaggccgccaaggtgctggagcagctgactggccagcagccggtgtttggcaaggcgcgctacaccgtgcgccagtggaccattcgccgtaacgagaagatctcggcccacgtgaccgtgcgcggcgagaaggcgatgcagctgctggaggcgggcctgaaggtgaaggagtacgagctcatccgccgcaacttctccgactcgggcaactttggctttggcatcaacgagcacatcgacctgngcatcaagtacgacccctccaccggcatctacggcatggacttctacgtggtgctggagcgccccggctaccgcgtggcgcgccgccgcaagcagctggccaaggtgggcgtgcagcaccgcgtgacgaaggaggacgcaattaagtggttccagcagaagttcgagggtgtggtgctcaacaaggcccacgccgcctaagcgggaggacg

SEQ ID NO: 2496 - DNA, 419 bp, Chlorella sorokiniana
  unsure (1)..(419): unsure at all n locations; Clone ID: LIB3602-034-Q6-K1-C9
ccgcagcacacccaacattcttccctccttgcttttcctctcctccatcccccagctcccctgaccactccgctgccggcattctgccttcctgaccctgcctcttctcttattcattgcccgcacagctgtccgccccaccttgatgtgccatgggtgctgccaaccaaaccgcttggcgcgcccacctgtgaacaaaaacaaaatacgcagttgccctcccttgatccctgtaacaatcccccttttttgagccgatacccgtccgtcttgctagccttgcgcccgtccaatggcgtccctgtcccagccccacatttttgccgcttcctgggacgcctgcatattcctggccgccccctttcctaatctagctttatcctgttacgagcacacttgtaaacgagcagcttgtcnna

SEQ ID NO: 2497 - DNA, 337 bp, Chlorella sorokiniana
  Clone ID: LIB3602-034-Q6-K1-D10
gttcacatacgtgttcgtttgcaacaatcaaatcaacgggggggggggggccccccactccgggagcagttgcccgcgagtcaaaactggggccctccttgtgcaacccttgcgtgaaagggggcccggcaaccaaatgccggttggccggggaagcaacaaagtgcaaagctgaacaaactggcgcatcaccagagagacaagtcatgtgtggcaaatgaacagggaggcgggcatgccaagcccccaacagttggaatgcccccagcccccttgcaggggtggtttgcccccttggccacccctttaggtaataacgggggctttttcccggccg

SEQ ID NO: 2498 - DNA, 432 bp, Chlorella sorokiniana
  Clone ID: LIB3602-034-Q6-K1-D12
tttttttttttttttttttttttttttttttttttttttttttttttttttttttttttttttttttttttttttttttttttttttttttttttttttttttttttattttttttttttttttttttttttggggggggggaaaaggtttcccagggaaaaattttttttaaaaagggggaccttttggcttttggggggggggggggggtttttaaaaaaaaaaaggtttttaaaaaaaacccaaaagccaaaaggggggggttttttgggggggggggggtccaaaaaccttggggtattaatttttggatggggccccccccccgggagggtttaaaaaaaaaatttaaaaatggcaacggggggcgccttttttaagaaactaatttttgggcccgggttgggaaaaaaattttttttttttggggg

SEQ ID NO: 2499 - DNA, 411 bp, Chlorella sorokiniana
  unsure (1)..(411): unsure at all n locations; Clone ID: LIB3602-034-Q6-K1-D2
cgacgagggcgagattgtcgatctgtacatcccccgcaagtgctcgtggaccaacaagctgatcacggccaaggaccacggcagcgtgcagatcaacattggccacctggacgagagcggcgtgtacaccaactcgttctccaccttcgcgctctgcggccaggtccgcgtcaagggcgaggctgacagcgctctggaccatctgtgggccaagaagcgggctgagatcggccagtgaagcgctgctgagttctagccgccagccggctgggctacacagctgccagccggcggtgggccagccagccttgggtcggccagtgatgcgctgcgaagcaaagtgctgagcgggcgggcgctccggcgcgccgncgncagccacgcagtgcaagctgtaacgcgcctccttgc

SEQ ID NO: 2500 - DNA, 448 bp, Chlorella sorokiniana
  unsure (1)..(448): unsure at all n locations; Clone ID: LIB3602-034-Q6-K1-D3
ctgcagtaagcggtgtggaggcttgacgctgggggaaaccagccagcagccatggcgttcttccagcgagtgatgaactacctcctgaacgaggtgctggtcaacagcctggccaacagccgcaccttccagcggtttgccatccgcagcaacgccatgatgcaggacatggccaagaagtcggcggagcagaaggcgcagctggggcagacggcggtggagaagggcggccacttctggaaggtcttcagcgaagagctgacaaaggggatgaaggacatcaacagcaaagtgaagtgacgctgagaacgatgtggcgttgagcctgggtggctgggcagtcgacaggcagagctgctgccgtcgcattcttcatcaccccaacttgccactgccgcctcgttcttatcgcgctngtgcccctctttgatcgtgcttgcttttgtct

SEQ ID NO: 2501 - DNA, 516 bp, Chlorella sorokiniana
  Clone ID: LIB3602-034-Q6-K1-D4
cttcctcaaggtgaacaaggcgaccatgaacatgctgcagcgggtggagccctacgtggcgtacggctaccccaacctgaagaccgtcaaggagctgatctacaagcgcggctttggcaaggtcaacaagcagcgcatcccgctcaccgacaactcggtgatcgagcaggtgctgggcgacaaggacatcatctgcgtggaggacctggtgcacgagatcttcaccgtgggccccaacttcaagcaggccaacaacttcctgtggcccttcaagctgtcctcccccaagggcggcatcgacaagaagcgcctgcactacatcgagggcggccaggccggcaaccgccaggagtacatcaacaacctggtgcgcgccatgaactgagcgctgagccggcgagcacagcgcagcgcgcgcagcacgcacagcgcggcgcgtgcagcagcctggacggagcggccccctgatgcctgctagccacggcactgttggccgggccagtcgtgaggccccga

SEQ ID NO: 2502 - DNA, 332 bp, Chlorella sorokiniana
  Clone ID: LIB3602-034-Q6-K1-D5
gcgcaacggtgccgccaacttcggcgaggctgtgtggttcaaggctggcgcccagatcttccaggagggcggcctcgactacctgggcaaccccaacctggtgcacgctcagtccatcgtggccatcctgctgacccaggttgtgctcatgggcctgattgagggctaccgcgtcaacggcggcccggccggcgaggtggtggaccccatctaccccggtgaggcctttgacctcctgggcctggctgacgaccccgacacccttgctgagctcaaggtgaaggagatcaagaacggccgcctcgccatggtgtccatgtttggcttcttca

SEQ ID NO: 2503 - DNA, 385 bp, Chlorella sorokiniana
  Clone ID: LIB3602-034-Q6-K1-D7
cggaagggccggctctccaagcgcgtgaagctggtgcgcgacattgtgcgcgaggtggcgggccaggcgccctatgagaagcgcatcatggagctgctcaaggttggcaaggacaagcgcgccctgaaggtggccaagcggaagctgggcacccacaagcgcggcaaggccaagcgcgaggagatggccggcctgctgcgcaagatggctgccaaggcgcacaagtaaacgcctgtgcagccacagcagcagcccgcagcagcccccatcgtggcggggcggccgcagcgcagcacggcacagcacagcgcagcgcgcggcgccgcccgccttgcagcagcagcatcactgtgcctagcacctgtgatgtaacacagcacccggc

SEQ ID NO: 2504 - DNA, 508 bp, Chlorella sorokiniana
  unsure (1)..(508): unsure at all n locations; Clone ID: LIB3602-034-Q6-K1-D8
gctgcgcctgctgcgcccgctgtcagcctggtggcgcatccgcagattagcccgcacgagttccaccagagctgggctgcttggaaccccggggcgctctctttccaggctgagctgtctccctcggctgcagccagcgtggaggcaaatgcataccgggacttcacgggccacatcgggcaggcccacatggccaacttgagcgacgccgcgcgagggctccgctgcaccctaccgattcctgttccatgcccaggcagcaagcagcgggtcacacgtgctggtgcagatcaccgtcagcaaggcaccaccggcagcagccgtggtgatcaagagcggtgacgcagcggcggctgcacatgtccaggagctgctgcagacgctgctgcttacgctgtgaggcagcggcagcagctcgcgcttgcatgttgacagcagtcggcgtccccaagcatgtgaatgcgacttgtaattgtactgcatcaaannaaaaaaaaaanaanaaaan

SEQ ID NO: 2505 - DNA, 438 bp, Chlorella sorokiniana
  Clone ID: LIB3602-034-Q6-K1-D9
ggctcagcattctgcagctgaagcactcagcatggccatcgctgagccgtgaagcaaggccaaacaagcccgccacgagcggaggacagtagagaaccaaaataaccagcagccctttgctgcctattgtactgatgtgcctgtcaatttatgtgatgcagcccctacctgtccctgcaaagcgatcgctataaaaaaaaaaaaaaaaaaaaaaaaaaaaaaaaaaaaaaaaaaaaaaaaaaaaaaaaaaaaaaaaaaaaaaaaaaaaaaaaaaaaaaaaaaaaaaaaaaaaaaaaaaaaaaaaaaaaaaaaaaaaaaaaaaaaaagggggggccttttaaaagaatcaagttttacttccgcgggtttgcaacgtaaaagtttttttatggggcccccaaaatcaaattcttgggccgggtttaaaaaccgtgggga

SEQ ID NO: 2506 - DNA, 416 bp, Chlorella sorokiniana
  unsure (1)..(416): unsure at all n locations; Clone ID: LIB3602-034-Q6-K1-E1
ggctgcttgggtggagcacagcggctggcaccatgtcgaagcgtactaagaaggtcgggatcgtcggcaagtacggcacccgctatggcgcttcgctgaggaagcagatcaagaagatcgaagttagccagcactccaagtacttctgcagcttctgcggcaagttcgccatgaagcgccaggtggttggcatctggaagtgcaaggcctgcaagaagacccaggctggcggcgcgtacgtgctcaacactgcggcgtccgtgactgtgcggtccaccatccgccgcctgcgggagcagaccgagaagtaagcgagcggccattgaggagtgaagcgggcggcggcggcggcgctgcagcagcgcgctgcagcgtgccgggtggccgctgcttcatgatgtaacgcagaanagaac

SEQ ID NO: 2507 - DNA, 169 bp, Chlorella sorokiniana
  Clone ID: LIB3602-034-Q6-K1-E10
caaccagaaccaagcatcagccgcaaacgatatgccacgcacaacacctcccctccaggctttgcaaagcgtcgtgcgcagcaggtcccaccctattttcgcatggatgatgatgatgtgtagcgttagccatatgtgtgcgtgtgggcgttatgtaagtgcaggaagc

SEQ ID NO: 2508 - DNA, 63 bp, Chlorella sorokiniana; identical to SEQ ID NO: 961
  Clone ID: LIB3602-034-Q6-K1-E11

SEQ ID NO: 2509 - DNA, 429 bp, Chlorella sorokiniana
  Clone ID: LIB3602-034-Q6-K1-E3
caccacccacaattccatttgcaccgtgctgctgctgcttgcatagtcgttgctgcaccactaccacccccatttgctaagggacgcatgtgcccactggtcgctgcattaccctgcacccgcccgccgaccgtacccgcacgccccatttgattgcttgccagcactgaaccgtactgccccccctccagaccgtatcgctttgccgcacacgcagccgcatgcgcgctgcgcgccgccgtccccgctggcggctgctgcgcgtgctgtgcgtgcttcgtgtgcatgaggccgctgccacccaaccccgtacagaagcacaaaacaaccaccacaacaactggcaccctcttgatgacatatcgacttgcggcgggcccgctgcccgcccctcagacgcaagcatgatgaatgtaaacagcctcgcat

SEQ ID NO: 2510 - DNA, 89 bp, Chlorella sorokiniana
  Clone ID: LIB3602-034-Q6-K1-E4
gccaaggcgtactggactgagggccgcaacgagctgcgccgccaggtgggcaccctgcgcttcgacctgaacgcggtggccgacaccct

SEQ ID NO: 2511 - DNA, 437 bp, Chlorella sorokiniana
  Clone ID: LIB3602-034-Q6-K1-E5
tgaaggccgacctgaccagcgtgggcggctatgacgaaatcgtggtggaggcgccgctggagatggcgacaggcatgctgcgctcgctgggcgcgccgctagacccactgaccattgaggggctggagaccagcttcagggacgacaccatctgtggctacgccatcttcttgctgcgcatggtcaccgcctgtgagatcaagcggcgcgccgacttctttgcgcccttcatcatgggcctgtccgacctggatgtggccaccttctgccagaagtgcgtggagcccatgggcgaggagagcgaccacgtgcacctggtggcactcaccgacgcgctgtaggtgccggtgcgtgtcgtgtacctggaccgcagcctggcgcccggcggcggtgtcggcggcgacggcaatggcgaggtgcacgtggacatgcacgac

SEQ ID NO: 2512 - DNA, 304 bp, Chlorella sorokiniana
  Clone ID: LIB3602-034-Q6-K1-E6
gaaaaaaaaaaaaaaaaaaaaaaaaaaaaaaaaaaaaaaaaaaaaaaaaaaaaaaaaaagaaaacaaaaaagagaagcaaaaaaaagggggggccaaaggggggggcggtttaaaggatccaaggttcccaactctaaaactccgacataaaactttttaatttgggcacctaaaaccaaattattggcccctgttataaaacttaaccccctgggaaaaccctggaatttcccaaaaaaaaaaccaggggggcaaaaccccttttccccatagggggaataccaaaaaaggccaaaccaaacc

SEQ ID NO: 2513 - DNA, 500 bp, Chlorella sorokiniana
  Clone ID: LIB3602-034-Q6-K1-E7
tgtacctcaagtgggagtggctcgaggcggtgctggcgcgcattgcggcgctcaacggcaacgtcaccgcctggcgccagcttgcagtcgaggagtacatcctgcacgttggctagttgggcagtgcgcaacactcctgcccttccactgcgccaaggcagcggcaacggccagggcaggcagcgggggtggcacaggagctgcgccgcagcagggcagcaaccaggacagcacctcagcagccacagcgctgcatgtggcggggccatcaccaccggcggctgctcgctctgccgcggctggacggcgccactggtggcatgcggcctgacaactggcatgcagtgcatctgtggtttggctgcgggccggcacaggcagcgcaccacctgcctcctggtgctaccacgtactacctgccctggtggtcaagccatgcatgcaccatgtgtttgctgcttagggccaagcgcaccacaacctgccattgccaaacacca

SEQ ID NO: 2514 - DNA, 560 bp, Chlorella sorokiniana
  Clone ID: LIB3602-034-Q6-K1-E8
ggcgcatcgtcattggcagcagccgcgcgggtgtgcccgtcaccgcagacgacctgggcgtgggcggcgcgctcaccgtgctgatgaaggacgcgatccagcccacgctgatgcagacgctggaggagacgccggtgctggtgcacgccggcccctttgccaacatcgccaccggcaactcgtccatcgtggccgaccagatcgcgctcaagctggcgggagcggagggatacgtggtcaccgaggcgggctttggcgctgacattggtgctgagaagttctgcaacatcaagtgccgctatagcggcctgagccccgactgcatggtcatcgttgccactgtgcgtgcgctcaagatgcatggcggtggcccgcccgtggtggccggcaagccgctggaccacgcctacaagacggagaaccttgacctggtgcgcgccggctgcgtcaacctggcccgccacatcgccaacgcacgcgcgtttggcatccctgtggtggtggccatcaaccgcttcgccacggacaccgacgctgagctggaagtggtgcgggaggag

SEQ ID NO: 2515 - DNA, 505 bp, Chlorella sorokiniana
  Clone ID: LIB3602-034-Q6-K1-E9
aaaaaaaaaaaaaaaaaaaaaaaaaaaaaaaaaaaaaaaaaaaaaaaaaaaaaaaaaaaaaaaaaaaaaaaaaaaaaaaaaaaggggaaaaaaaaaaaaaaaaaaaaaaaaaaaaaaaaaaaaaaaaaagggggggggggcttttttaggggaccaatttttatttcccttggttggcggttttttttttttttttgggggacaaaaaattttgtttttgggcgcttttttcaaaagggggcacatggaaaaacccggggtttcccaaataaaaaggtgttgggaaaaaatccttttttaaaaggggggtaaaaaacaaaagggtccggcccttttcttttttccaaattattgcgcccttagaggtgaaagggcccccccttttgaagggttattttagccggggggggggggggtgtttcccccaagttaattcttttttttttgccggcccttttaggggtttttttttttgggtttttttaactttgtttttcccccaaaa

SEQ ID NO: 2516 - DNA, 193 bp, Chlorella sorokiniana
  unsure (1)..(193): unsure at all n locations; Clone ID: LIB3602-034-Q6-K1-F1
gtggcgcaagctcatttcgttgccagaggcgtatatgctcgcaagcatgcggcccacggccacctgaacccctgaacgcttcactttctcttttttgcagcatttcatttagtttgaccccctcggtattctgcttgccttttgttgcgcgtgccacattgggcacccgcacgctttgttaacgaagcattna

SEQ ID NO: 2517 - DNA, 156 bp, Chlorella sorokiniana
  Clone ID: LIB3602-034-Q6-K1-F10
ggcggcgtcaccatgcgccgctcccttgctttccgtttcactgtccctttcgttcctgcgttcgtttagtggaggaggcccgcctgtgtacctgacctggtggccgcgtttttggttgagcggcttgtagccgcacatctgtattatcagctacgt

SEQ ID NO: 2518 - DNA, 428 bp, Chlorella sorokiniana
  Clone ID: LIB3602-034-Q6-K1-F11
cggacgcgtggggtgaaggtggtgtcccccaccaacaccgtggagcggcggtgcagcgtgtggatcggcggctccatcctcgcctccctgggcaccttccagcagatgtggatgtccaaggcggagtatcgcgagtatggcgccggcctggtgcacaaaaaggcgccctgaaagggccgcagcctctctgtgtgcacactcacacgtggagcatggcgtccctgggggccagctgcagccgcacaaggaatgatggctgctcaacggctctcctgctgcaacgctagccgtccagaggatgcactggctgcagcagtgtcggcctgcggctgcggacttggcagcatgcgccagaccagcctccttgtttgctccccagtgctgctgctgtccaatggctatcattcggctgtgtaacatggagcgcc

SEQ ID NO: 2519 - DNA, 408 bp, Chlorella sorokiniana
  Clone ID: LIB3602-034-Q6-K1-F12
caagtacatggtgaagaacgcgggcaaggacgccttccacctgcgcgtccgtgtgcaccccttccacgtgctgcgcatcaacaagatgctttcgtgcgccggcgcagacaggctgcagacaggcatgcgcggtgcgttcggcaagccatttggtgtgtgcgcgcgcgtgggcatcggtcagatcctgctgtccatccgctgcaaggacacgcacgctgcggtggcggaggaggccctccgtcgtgccaagttcaagttccccgggcgccagaagatcgtggctagcaggaactggggcttcactccctacctgcgcgacgattacttggagtggaagcgtgagggccgccttgtgaacgacggtgtgaatgccaagctgcttggcaaccacggcccgttggacgcacg

SEQ ID NO: 2520 - DNA, 288 bp, Chlorella sorokiniana
  Clone ID: LIB3602-034-Q6-K1-F2
cccacgcgtcctgaaaaaaaaaaaaaaaaaaaaaaaaaaaaaaaaaaaaaaaaaaaaaaaaaaaaaaaaaaaaaaaggggcggccgtttataaaggatacaagctaacaaacggcggcgtgcagcgagataccttttttatggtcccccctaaatccgggtgcctggccgtagtgtgaccacgttgtaccacggcaaagccctgccttttcccactttattcgcgtggcaacctttcccctttccgccgggtggcgaaatggcaaaaaggcccaaaccccccctcttt

SEQ ID NO: 2521 - DNA, 445 bp, Chlorella sorokiniana
  Clone ID: LIB3602-034-Q6-K1-F3
gtcccaccctgggacctgcagccacgattgctgatgcaccaccactgcaccaccactgcccttgatacgtgaagtgaataccgcccgctcgcacccgccgctcactggccgccgccacaacttttttgccgcgctcttgctctttgctgagtaggctcctcgcggctgtgctaccatgccaactgaaaccctacaactgcactgaagccgggagtttccaacccgactgtcacccccatgccatagccttttttgcgtcgagatgcagacgccgtgccttgtaacattaggaggggtaaaaaaaaaaaaaaaaaaaaaaaaaaaaaaaaaaaaaaaaaaaaaaaaaaaaaaaaaaaaaaaaaaaaaaaaaaaaaaaaaaaaaaaaaaaaaaaaaaaaaaaaaaaaaaaaaaaaaaaaaaaaaaaaaaaaaaagggggggcccttt

SEQ ID NO: 2522 - DNA, 179 bp, Chlorella sorokiniana
  Clone ID: LIB3602-034-Q6-K1-F4
caacgctgacgtggccttctccgaggtgtggagctggaagtttgaaaacggcggctaccgcaccgcctccctggcggagacctttgcaaccagcacagagagcaatgcagttcagctggggagccatgccttcatcggtggtcccgggcccagcggcggtacactggtggagctttgat

SEQ ID NO: 2523 - DNA, 550 bp, Chlorella sorokiniana
  Clone ID: LIB3602-034-Q6-K1-F5
gttagagtcggctttggcacgcgcatgctgctcacctccatcattggcatcctgctgcaccagccgccgacggtgctgctagcccagcaaatattcgtcatgctgttagtgcgggcagactactgcagctgtgccatattccaagaccccgtgtcaaaactgcgcatcgctgcggcatgggacgtgctggagctggcgtccgtgtttgtgcagccgtgggggcacacatttgcaggccggcgccctgaaccgcacctgcagtgcgcggcggtgctgacgttcaacaagctggctgctggcattctactgcccgtgctgctggcattgcgcctccggcggaaatctacatggatgggcgtcgatagggttgaccctgtgcccctgcccgagcctgcacagcagcagcatgcacagccgcgagcagagcgcggcaagcggcagcccagccgcttcaacataacaatgacttgccagctgtgcgggccaacgggcagatgcggcccctgcaaagcggctgcatgcagcttgggacgacaacccaacagcagca

SEQ ID NO: 2524 - DNA, 558 bp, Chlorella sorokiniana
  Clone ID: LIB3602-034-Q6-K1-F6
cgccgaggggagagcacgatgcagatcttcgtgaagaccctcacgggcaagaccatcaccctcgaggtggagtcttcggacaccatcgagaatgtgaaggccaagatccaggacaaggagggcatcccccctgaccagcagcgcctgatcttcgccggcaagcagctggaggacggccgcaccctggcagactacaacatccagaaggagtcgacgctgcacctggtgctgcgcctgcgcggcggcatcattgagccgtccctgcagatcctggcccgcaagtacaaccaggacaagatgatctgccgcaagtgctacgcccgcctgcacccccgcgctgtgaactgccgcaagaagaagtgcggccacacctcgcagctgcgccccaagaagaaactcaagtaaactactcgcttcggcacgagcggaagcggcatgagcggcagcaaccgctgcccctcccccgccccgccagccgggatgccatgacagcaccggctgctcagctgctgatgtgctgcatgtcaattgctgctgcggaaatgtaacggtggtagc

SEQ ID NO: 2525 - DNA, 384 bp, Chlorella sorokiniana
  Clone ID: LIB3602-034-Q6-K1-F7
cgacaccttcgtccacgtgactgatctgtccggcaaggagacgctggtgcgcgtgactggtggcatgaaggtgaaggccgaccgcgacgagtcgtccccctacgccgccatgcttgccgcccaggacgtggccacccgctgcaaggagctgggcgtgaacgcgctgcacatcaagctgcgcgccaccggcggcaaccgcaccaagacccccggccccggcgcccagtccgcgctgcgcgccctggcccgctccggcatcaagatcggccgcattgaggatgtgacccccatccccaccgactccacccgccggaagggtggccgccgcggtcgccgcctgtgaggcgggcgcgctatgcgcgctccggccacagcccggatgct

SEQ ID NO: 2526 - DNA, 527 bp, Chlorella sorokiniana
  unsure (1)..(527): unsure at all n locations; Clone ID: LIB3602-034-Q6-K1-F8
gccttcccctgcaaccagtttggcgcccaggagcccggcagcaactcggagatcaagtcctttgccgagcgcaagggcttcaagggtcccatgtttgccaagtcggatgtgaacggccccgacgcgctgccgctgtttggctacctcaagtcggcgcagggcggcctgctgaccgctgacatcaagtggaacttcaccaagttcctggttgaccgcagcggcaacgtggtcaagcgctacggcagcaccaccagccccatgcagattgagagcgacatcaagggcctgctctgagcggtgtgagggcaggtgccagccgctgctgggaccgctgtgctgggcaacaggccgtgcacccgacagccgccacagttggcggctgcgctttgctgccgcaccttgtgtgctcgccccgatttgaatgtaccctggacccacccccacgccatttgattgattcctgtcagactgtctgccaaacttgaggagctgattgctgtgtgacaactagcagcaaaaaanaaaaa

SEQ ID NO: 2527 - DNA, 515 bp, Chlorella sorokiniana
  Clone ID: LIB3602-034-Q6-K1-F9
atcggatttcccaacaggtgctactttgcttgcgtcaacttccacgccggtgacacctgggagatcgaccactggtaccaccccagccacaagtgctacaccaagcactggactgcacgctgctcccgctgctaagctatcagcttggcactatttacgcctgctgagcaagcagcgctccctcgcaagcgcctgctgagcaagcagcgcgccacgccctgactgtgcaccggtgcctcgcaccgctgctcctcttgtacgcctccgcctctgctgctcctaggagcacgaaggcaaggcgtgcaagaggcatcgctacaagagctccccgattggaagtgcaccctcggagcactgccacctgctaacctacgtgaactccccaacgtgaaaacatcgcaacccatgccgtgaccccccgcccctgcctgaccatatgcccgtgatcccctcacgtcttttccctgctgtgacctcaagccccaagttttgtgccccctgccccggatgccctg

SEQ ID NO: 2528 - DNA, 175 bp, Chlorella sorokiniana
  Clone ID: LIB3602-034-Q6-K1-G1
gtttaacaggaaggtaaaccaagttgcaaaaaaaaaaaaaaaaaaaaaaaaaaaaaaaaaaaaaaaaaaaaaaaaatttttaaaaaaaaaaaaaaaaaaaaaaaaaaaaaaaggggggcggcctttttgggggctccatgtttccctccccttgcttcgcctttaatggtttttt

SEQ ID NO: 2529 - DNA, 406 bp, Chlorella sorokiniana
  unsure (1)..(406): unsure at all n locations; Clone ID: LIB3602-034-Q6-K1-G10
gggggatgcgtgttacatcgttaccgggcagcattgtcgtaccaagtgagcaaggtggctcccgacgagcagcagatgaccaacgagagtaaaaacgggggtacaggggagcggaggagagagtacaggggataaagagcccgatgtgccgtctagaattgccgcgatgcccgctcccgctggtccttttcgcgctttgcatacagccgctctagcgcgcggcgcgccttgccggcggggaagttggacatgtcaaagtagtggggggccaggtccaccagccactcccccttgatgtccgtcacggngcggatgtagttcttgctggtcagcacaaacttctggtacagcgcccactcgggcttgtggtccaggcaggtggaagggtgcaggtacaccacctggt

SEQ ID NO: 2530 - DNA, 410 bp, Chlorella sorokiniana
  Clone ID: LIB3602-034-Q6-K1-G11
ggactctggagcacatcctgatgcacagccccagcctgcagctgctgcagacagcatggcggccgcctgccgcaccccacatccccgctggtgctgagccgggtgcgcagcaacagcaagagctgcagcgctttgagcaggcgcatgccttctgccgcacatggcgcctcaagctgcagcacagtttcatgcctacctggatccttgacgcaagctttgaggaagcgctggctgaggcggccagccaggcactgcctgcttgaaagcagagctgccgccatgctgcccccctgaatcttgatgcctgctgctgggtggttgcggctctacgcgcctgttgaatgaggcgggctgagcacagccacgcctcccttctgctgcctccgctttatgtgtaagatggccatgtc

SEQ ID NO: 2531 - DNA, 220 bp, Chlorella sorokiniana
  Clone ID: LIB3602-034-Q6-K1-G12
tgctagcttatctacgccagtttttcgcaattctggctgcaagctgtatcacgccagcttgtcaattgcttctgcttagctcaatgcagcacgccctgcacttggcttaccgcgtccctgccgtcgcaatctttcatcccacacttaacggatgcccgcgggctccactcccatcctatgctcaacctcccctgccgctgagcatgtaagcagtgcggtc

SEQ ID NO: 2532 - DNA, 577 bp, Chlorella sorokiniana
  Clone ID: LIB3602-034-Q6-K1-G2
cccagaccgatccatgtgccagtgcgacggctgctcagagtggctgcacccagagtgctgcggcacgacgctgcaggcggtggaggcgctgcccagttggttttgccccaactgcctgcggaagcaggctgcatcatataccagcagcggcagcgcgggggcgccgccagccccgcaccagggcagcaccgcctggctgctgggttctgcggcaccgagtgcggcagaatcgccgctgccacctcttcaattggacccagcagcagcagcggcagcggcaatagggggcgggctaggcggtggcgcagtagcgggcggctcagggcagacctggagccgggagccgctgccactgtctgggacgaatggcgctgtgcagccagcgcaggtgccggcatcggatgcgctgttgggggccctgcgtgcccagctggcgcagcagcagcagccaccgctggggcagccgcccccgctgccgcagcaggagcagccgctgtatggctcattgcagggcgggtggacgtgctgagggcctggcttcctaggtctgtgcccgctgctatgcatgtcctcgcct

SEQ ID NO: 2533 - DNA, 561 bp, Chlorella sorokiniana
  unsure (1)..(561): unsure at all n locations; Clone ID: LIB3602-034-Q6-K1-G3
gccgcagccgacggcagcagcagtagcggcgacggggcagcgcaggagctggccagctgccacagcgccttgcagcacctgtgctcgcttgcaaccgccgaggaggagcatgcggctgaggagcaggaagcggctgcagcggcaggtgcagggggagcaggggatgtgcctccgccgctgctgctggagcggcagccagtggcagcgactgagttccttcggcgactggggcagcagcggtggggctgggaaccagacgcagcgggcagcgcagccgccttgcagcagctgagggcggcgctgcagcgggaacctggagcggcaggggcacatgccgctgccgccatagcggcagaagcaccagcagcagcagaggccacagggacagcggctgtgattgcgccggtcactcctgcagacgaaccaatgcagcccgcangcacggtggcaggccagcctggggcggatgcagctgacagggtgatgcgggatgggcaggtggaagagctctgaagaacagcaacgcacaagcacacaacgcacaacattctgcttgactga

SEQ ID NO: 2534 - DNA, 265 bp, Chlorella sorokiniana
  Clone ID: LIB3602-034-Q6-K1-G4
gcggtgacaacgacaccaccggcgttggcgccggcgcggcccgcactgagttccgctccgtggccgccaccaccgcctaagcgcctctcaacagccttccgacctggcactcaggccccggcacacgggcgcagcacgacggtgcttgcgcccgtttgggcggggcgggagacccaggtcggaaggcagttgcggggcgccaaggcgctggaggcggccccggagcggaaccaagagcgggccgcgccggcgccaacgccggtgg

SEQ ID NO: 2535 - DNA, 378 bp, Chlorella sorokiniana
  Clone ID: LIB3602-034-Q6-K1-G5
ggcatggcgcagaccggcagctgtggatagaccccttggcatcagctgtgctggtcctacctgcgagtgcagcagtacacggcgtcccattgccagctgaactgttgtcacagctgccgctgtgccagcaggcggcaatgttggagctgctgttgcccaagtgcagcccagcggcggctgaggcagcaatggcgatggcgagactggcttatggcgctgcaacagatggcaggcatgtggaggcgcagcagtcgctgtggcgccatccgctgctgagctggattctgccagcagcagccactgcactggcgagcagcattcctgatgcggcacctcagctttggcaccagacagtggccatggtggcaggcgtgtcgt

SEQ ID NO: 2536 - DNA, 269 bp, Chlorella sorokiniana
  unsure (1)..(269): unsure at all n locations; Clone ID: LIB3602-034-Q6-K1-G6
caggctggctgagcacttaggctagacagcagctgcccgttggcctccctgcacccggttttgctcccttcttgcttccacaacccgcttgcagcaacgttgctcgtgcactgctcccagcagccggtggtgctcaacgatggggtcacccggacacccgacctccgctgttgttgtttcattccagcattgcatgcccacgttgtgttgtttccagagccagtcagcctgtggaccaggcccagcctctgtaacccaagcaagcnnaa

SEQ ID NO: 2537 - DNA, 169 bp, Chlorella sorokiniana
  Clone ID: LIB3602-034-Q6-K1-G8
cccacgcgtccgaaaaaaaaaaaaaaaaaaaaaaaaaaaaaaaaaaaaaaaaaaagggggcacaataataaagaaaaaaaaaatgggcgtacgttttagaggaaacaaaatttggttgtctgttgtggcgaatacataattctttgggggggttgctaaaatttaattt

SEQ ID NO: 2538 - DNA, 579 bp, Chlorella sorokiniana
  Clone ID: LIB3602-034-Q6-K1-G9
caccacaacagatctagttgcccgaggccgctcatcgcgcgccctgcacaacccttgaagtgcccagcggagcggcaggggcgcaccgcggcttcccaacgcatccaggagttaggaggaagctctagtagcaggccccaggatgtgcttcatacccatcttctttgtgtgcggcgacatggagcggacgcgggcgctgggcgaggcgcgcttctgcgccaactgccaaaccaaggacggcgcacagctgtacgagtcttacacgcgcttccacttctgcttcatcccactctgcaagaccggcaaccagcggcgctactaccgctgcaccacatgcggagcgatgtaccctgcttgagtgcagcggccaagcttgcacggcaaccgagctgccccagccagctgcagccaaattgcaaggctggctcagcgcatcagggcacaactgctgccgtgccgcccttcgctgctgtgcttgcagtacgttgccatgtaccatatcagttgactgcatcctgtgcagcagcagtcctgtacaggaaatcgctatgctttgtgggctcgtgctaatttgagccg

SEQ ID NO: 2539 - DNA, 463 bp, Chlorella sorokiniana
  Clone ID: LIB3602-034-Q6-K1-H1
gctttgtcatccacaacaagcagcgggagaaagcggcgcagctgcccgagggagtgccgcaaattgtgggccaggaggtggacggagatgcctgggtcgtgtatccgtgggacgcggaagacattgacgagcataacgagctgggccagcagtgaggcaggcagcggtagctagtttttccttgccgccctccctgactgttgggcagcctcctctttccgcgttcatctccctgtcgccgcgctgtgagaagcaagctcttgctgtctgctcttgcagcgaggcattgtcatgcacgtctgtcatgtgtttccccagttcgacgctgttcccttttctaagcaggcgccgcggtcgtggccgccggcgtgctgcgccattcaattttacccatgaaagggtgcctgcacccgctcttatgctgggcactggcctgtttggttgctcctccccattttctcac

SEQ ID NO: 2540 - DNA, 313 bp, Chlorella sorokiniana
  unsure (1)..(313): unsure at all n locations; Clone ID: LIB3602-034-Q6-K1-H10
ccggccggaatcccggtcgcccacctccgacttggggagctgtgtgaccccatcatcaacgcgctcaggagggcggctcggctgctgacgagatgctcgagtgcttcaactcggcnacatccaccgtcgacagctggcaccaagcacgcggcatgctgaacggcagcccgcactgtggccacgagcggcggctggcgagaagacaccatcctctgcctatggagctattccacctgcgcccgacagcgcaccatcggctgccacatcgggaccgaccaagctgcgtgacgggtggagttctgctatgaaacct

SEQ ID NO: 2541 - DNA, 413 bp, Chlorella sorokiniana
  Clone ID: LIB3602-034-Q6-K1-H11
cgcgctcctcggacaatgtgacggaccgctactggggcgacggcaacaccacggcgttgcacctggcctcgctgctggccttttatgagcggttccccgccttccgcgaccggccgctctttgttactgggcacagctacgcgggtcactacattcctttgctggcgcaagcgatcctggagtacaacagcgccctgcccagcggcggacagaagctgaaccttcaggggtatgcagtaggcaacccgtggaccgaccctgcactggacaatgccggcgctgttgaggtttggtattcagagggcatgatccgccaagagacatatgaagggctgaagcagcactgcaacatgagcgcagtggtgctttggcgcaccgatggcgagagcggggtgcactgggagtgcgccaca

SEQ ID NO: 2542 - DNA, 503 bp, Chlorella sorokiniana
  unsure (1)..(503): unsure at all n locations; Clone ID: LIB3602-034-Q6-K1-H12
gctctgcggcccttcatacctttgtacctttctgtatcatcttgcagcaatggcagccggctgcatctttctaacatcgtcaccggcccactcgtttgtgccatgcccacctgcctccaacgtcacccttcatcaaccctcacccaacccatccacctgccacccatccactcaccttccctccgccacaacctctgccacccactcaccacccatcacccgctcaacgccctccatgcaccatcctccccatccaccaaatctgccaccccaaacgcacgtncgccgctgcaccacctgccgccccctcacccgcacccatcttccacccgccacctttcctgccgctcaccgccgcacatnctacctnccacacctcactccatgtccacccttcacccgcgctttacacagcggctgctgccatgcaaagctgctgccaaacccattcatcatgctcgcacacccactcacccacacgttcaacgtattcagacccattt

SEQ ID NO: 2543 - DNA, 181 bp, Chlorella sorokiniana
  Clone ID: LIB3602-034-Q6-K1-H2
cggacgcgtgggcaactacactgcaatgggccgctccgtgggcttcttccagatccagcccatcaactctagccctgagtagatgttgacgagtgttttcatattcacctttattgtgctcctgacgctgttgggctttttcatcttcaagaaggtgatcaataaatgtcctatgctgttc

SEQ ID NO: 2544 - DNA, 173 bp, Chlorella sorokiniana
  Clone ID: LIB3602-034-Q6-K1-H3
gaagaaactcaagtaaactactcgcttcggcacgagcggaagcggcatgagcggcagcaaccgctgccccccccccgccccgccagccgggatgccatgacagcaccggctgctcagctgctgatgtgctgcatgtcaattgctgctgcggaaatgtaacggtggtagcgatc

SEQ ID NO: 2545 - DNA, 253 bp, Chlorella sorokiniana
  Clone ID: LIB3602-034-Q6-K1-H4
gcacagcaaatggctggactttggcggcaaggatgggaacgcttggctggagtaccgcctgccggcggagcagccgcgctacgtgctggacagctatgcgctcacctcggccaatgatgagccggcacgtgacccgcggcacgtggcgctggaagcattctctgacggcactggcgagtgggtggtgctggatgagcggcgagacctgcgcttcacgcagcgccaccagcgcgtggtcctgcagatcagcgct

SEQ ID NO: 2546 - DNA, 279 bp, Chlorella sorokiniana
  Clone ID: LIB3602-034-Q6-K1-H6
aaaaaaaaaaaaaaaaaaaaaaaaaaaaaaagaaaaaaaaaaaaaaaaaaaaagaaaaaaaaaaaaaaaaaaaaaaaaaagggggggaagaaaaaaaagaaaaaaaaaaaacgaaagcagaaaaagggaggaaaaaaaaaaacggggggggggcggtaaaaagggaaaaaagggaagacgcggggaaaggaagggaaaagggaaaaaaaggggggccccaaaaaaaaaagaagggggggagagaaaaaaaggggggggggggaaaaaacggggggaggc

SEQ ID NO: 2547 - DNA, 63 bp, Chlorella sorokiniana
  Clone ID: LIB3602-034-Q6-K1-H7
aaaaaaaaaaaaaaaaaaaaaaaaaaaacaaaaaaaaaaaaaaaaaaaaaaaaaaaaaaaaaa

SEQ ID NO: 2548 - DNA, 222 bp, Chlorella sorokiniana
  Clone ID: LIB3602-034-Q6-K1-H8
cggacgcgtgggcgagcggcttggagcacaggggcaccatgaagttctccagcaccgtgaccagcagccgcaggaagtgcaggaaggcgcacttcacggcgccctccagcgcgcgccggaagctgatgagcgcgccgctgtccactgagctgcgcaacaaatacggagtgcgctcggtgcccatccgcaaggacgacgaggtgtctgtcgtgcgcggcacct

SEQ ID NO: 2549 - DNA, 414 bp, Chlorella sorokiniana
  unsure (1)..(414): unsure at all n locations; Clone ID: LIB3602-034-Q6-K1-H9
acggacgctgtcacggcggccatgcacgatcgggagtacgaggagcagatgaaggcgcgcaaggagatgggcacggtgtgcgccgacctcgagtttgagctggaccgggacgaccctgatgccatggatcccaaggaggtgtgggcggagatgaaggctgcggggtgcccgccacctgaggtggatctcgacaccgagttcgaccgcgatgaccccatgctggcggacaagagccacctgcgggacgcgccggagccgccccagcccgccgacgtcagcggagagatggacctgatggcggatgccgaggacgtgcctgcccagaagcaccagaagatgggagcttgagcagcagcgcacggcggcggcgagcagcagcctccgccaagcagtggagcaactgctangcgcagc

SEQ ID NO: 2550 - DNA, 212 bp, Chlorella sorokiniana
  unsure (1)..(212): unsure at all n locations; Clone ID: LIB3602-037-Q6-K1-A12
ccacgcgnncnnagcacagcgcgtngcggctaggcaaatcgtcagtcaagcagcgccggctggcggccaacgtgagagctgcggttgagcgagcccaagccggtgcccaaatcgtagcggcatgtgctgcataatgctgtttttcctacgggagggtatcctgtcttttagcaggcctgcgcctattgaacattgctcctcccaggtggacc

SEQ ID NO: 2551 - DNA, 268 bp, Chlorella sorokiniana
  unsure (1)..(268): unsure at all n locations; Clone ID: LIB3602-037-Q6-K1-A2
gaaaaaaaaaaaaaaaaaaaataaanaaaaaaataaaaaaaaaaagaagaaaaatataaggattaagtagggggcgtttttttaaaggataaagtttagtatgcgtcatcgaaataaaatcacttttatnttttaccaaaancaaaaaaagaaaaccctgttaaaactaatatactggaaaaaccctggatttcccaaacttaagcgggtggaagaacaaacaggttataacagatggcgtaattcaaaagaggcccgaactgattgg

SEQ ID NO: 2552 - DNA, 222 bp, Chlorella sorokiniana
  unsure (1)..(222): unsure at all n locations; Clone ID: LIB3602-037-Q6-K1-A3
gctgtgcgtcagtcacagcgcggcctttcagcagctgtgctcccgggtggtgcggctgatgcgcggcagcgccggcacgatgcccgcagatggcggcggcacagggggcggtggaggcaagccgagcgtttcaatttttcccancaagaaggcacgcaacgagtagtgcagccggttcggggatggcagccgaaagtgctgttggcagttgtaggctatgct

SEQ ID NO: 2553 - DNA, 323 bp, Chlorella sorokiniana
  unsure (1)..(323): unsure at all n locations; Clone ID: LIB3602-037-Q6-K1-A4
gccttacgcaccccaacagagcgggccagtggtgcccctaacgcgacccgcacacaccccgcgcacccacgttccggcacaacgcatgatagcgctcctgctcccccctgtttctcctgtctgtttgtaatttttcaatanctctgccctgctgactgctgccgaatttgtttgctagtgtgggcccccttagccttcagacactgtgcgtcaccccctgcccagccgcccagcggcaccccctgtgcttgcgcctcagaactgtcctgcaccgccgccacttcccataacaaatatagcatggtcatgtaaagtgcagtggc

SEQ ID NO: 2554 - DNA, 250 bp, Chlorella sorokiniana
  Clone ID: LIB3602-037-Q6-K1-A5
cctcactccatgtccacccttcacccgcgcttcacacagcggctgctgccatgcaaagctgctgccaaacccatccatcatgctcgcacacccactcacccacacgtctaacgtatccagacccattttcaaggccctactgggcagtgcctttttgcgtccttatgccgatctggtaccaggacttaatgtgtaacaaatggtatgtaaaaaaaaaaaaaaaaaaaaaataataaaaataaaaataagg

SEQ ID NO: 2555 - DNA, 389 bp, Chlorella sorokiniana
  Clone ID: LIB3602-037-Q6-K1-A6
cccacccgtccgggacaagaccaccgaccccattgaggccattgcccgcctctcctacttctacaagcacgagtcgtgcggccagtgcacgccctgccgcgagggcaccggctggctgtacgacatcatgacccgcatgaagaaggtatactccgggctggaggagattgacatgctgtgggaggtgaccaagcagattgaggggcacacgatctgtgcgctgggcgacgccgcggtctggcccgtgcagggccttattcgtcacttaaggcccctgatggagcatcggatagagcaggcgtctgaggagctggagcgcatttcggcttgagtgcagcacccaacaaccagccagtacacaaccgttgcagcaaccttatgcgttatgt

SEQ ID NO: 2556 - DNA, 262 bp, Chlorella sorokiniana
  Clone ID: LIB3602-037-Q6-K1-A7
acgcaggcaggcccttggctagccacaccctgcacgccgttgcgtctgcccaacacacaaccttgctttgcgcacacgtggccagcgagcagcagcagccgaggacgcctggagtgcaccgccattttgatcagccggcactgtcgaacgcacccttcactccataccaaacgaaagcatcacaccgccctgaatcactcctgcacaaccaggcttctctgtaagtaaatggagagaaaaaaaaaaatttaaaaattaatta

SEQ ID NO: 2557 - DNA, 393 bp, Chlorella sorokiniana
  unsure (1)..(393): unsure at all n locations; Clone ID: LIB3602-037-Q6-K1-A8
cagccatgcagccgcagtgcgcaacttagcgacagcaatcagcaacacagccgcagcaaccgtgagcaacaacacacatggcccaacctcagaagcgatggcattcagcaacacatgctcagcaacagcaatgcacancacagcaggagcaccaacgcatggcacggcaccagcaacgcatggctagcagtaagcattcgagcgcatttgcacctcaccgacatgctttaaaaatgaagccttcgtcaatgccttagctgcatggctgcgcacccatgtgcgctcgatccatttgcagccgtgcagccgttcattggcgcgcacacacgtctggctctgcattccacactttactctgtacagcacacaatcgattgtgatcagcatcgtnaa

SEQ ID NO: 2558 - DNA, 445 bp, Chlorella sorokiniana
  Clone ID: LIB3602-037-Q6-K1-A9
cgcgcttgcagtattccggttttcttctgggtgcgctctgcacagtaagcagctcttaggtgcattgcatcggcaaccctggcccgccgccagcacaatagttagcctgtgcacctccccttcatgtcagctgtgcacagcctggatggctgggttgccgcaaaggcctgcgcaatcttctttgtgggtctgccaagcgcatggcggcttacatgcgacccagtgcgccgcagcagctgtccgctcgggttgggcaactaagaagtttgtggaagcctcgggttgccgtggtctcccagcaagtgttggagaagcagactgcagcaaaacgctgttgtagatgccgtagtgtgcttgtggtaagccgcgattcccagcaaatgcgctgcagcacagcaaggctgcagggccattgccaggcgtcgcggtactgcaagcatgattc

SEQ ID NO: 2559 - DNA, 237 bp, Chlorella sorokiniana
  Clone ID: LIB3602-037-Q6-K1-B1
tgggtatctcccgtgattccctgcacaagcgccgcgccacgggctgtaagcagaaggcatggcgcaagatgcggaagtatgagctgggccgccaggccgccatgaccaagctgtgctccaacgtgtgcgtgcgcctttttcgcatcctcagcggcaactccaagttccgcgcgctgcgccttgaccacggcaactatttctaggggcttggaggctgtgtccggcaaggtgcgcatt

SEQ ID NO: 2560 - DNA, 289 bp, Chlorella sorokiniana
  Clone ID: LIB3602-037-Q6-K1-B10
acctgctcgttgcacttacatgactgtcttggctgtaaaggatagatcaggctgaggcagacaacagaccaaaaagggggtcttgcattgatatcaaacaaacaactgttcagtggaggcacggccgtgtcctttgttttaaaactggcaccaaacattccatggagatcagtggctttgctagccgctttttcacttgtggctgttgaaccaggtcaccgccacggggtcgcccaggttgtgcgccttggcaaagctcctggtgttgaacttggcccgcttgctgggc

SEQ ID NO: 2561 - DNA, 358 bp, Chlorella sorokiniana
  Clone ID: LIB3602-037-Q6-K1-B11
gctggaggaaggggcagtgtacagcctgccagtgctgccgctggacggcctggtgctgtgccccggcaacacgctgccgctgcggctgaccttccgcggcgaccgagcactggtgcagcaggcgctgtcggctcctccggcgctatcgcgcctcattgccgtcgtctgctgcacacgctcctacttcacgccccagctcatgctgcagcgggtggggtgcatggcggagatccgcaagatgggcggcggaggcatcaacctgctggccaagggccggcagcgcgtggaggtgcagtttgaagcagtggtagacggcagcctcagcctgtcctaagtaccagtcagggtgctgtctgag

SEQ ID NO: 2562 - DNA, 287 bp, Chlorella sorokiniana
  Clone ID: LIB3602-037-Q6-K1-B12
gcgtccggcgggtgatgttcggcggcaagcagctggaggacggcctgtccctggaggcttgcggcatcagcgatgactcccagatgtacatcctgatgcgcctgctgggtggtgccaagaagcgcaagaagaagacctacaccaagccgaagaagcagaagcacaagcacaagaaggtgaagctgcgggtgcttaagttctacaaggtggacgacagcggcaaggtgcagcgcctgcgcaaggtgtgcccccagtgcggccccagcatttttatggccacccacttc

SEQ ID NO: 2563 - DNA, 389 bp, Chlorella sorokiniana
  Clone ID: LIB3602-037-Q6-K1-B2
gtcccctgtagtggagcagcccgccttcagccatgggtaagactcgcggtatgggagctggccgcaagctgcggctgcaccgcaaggacgagcgctgggcggacaaggactacaagaagtcgcacctgggctccgagtggaagaagcccttcgccggcgcttcgcacgccaagggcatcgtgctggagaagatcggcattgaggccaagcagcccaactccgctatccgcaagtgcgcgcgtgtgcagctgatcaagaacggcaagaagattgcggcgttcgtgcccaacgacggctgcctcaacttcatcgaggagaacgacgaggtgctcatcgccggtttcggccgccgcggccacgccgtgggtgatatccccggcgtgcgcttc

SEQ ID NO: 2564 - DNA, 366 bp, Chlorella sorokiniana
  Clone ID: LIB3602-037-Q6-K1-B3
aaaaaaaaaaaaaaaaaaaaaaaaaaaaacgaaaaaaaaaaaaaaaaaaaaaaaaaaaaaaaaaaaaaaaaaaaaaaaaaaaaaaaaaagggaagacaaaaaaaaagaaaaaaagggggcggccgttttaaaggacccaattttacttccccttgctggcgaggaaatagtttttttatggcggcccttaaattaatttaattggccgtggttttacagtgtcccaactggaaaaacctgggcgtcacccactttaatcccctggcagaaaatccccttttgcccagggggattaatatcaaaaaggcccgcccaattcgcctttcaaaagaaaggcccacttgaatgggcaatggaaccccccct

SEQ ID NO: 2565 - DNA, 409 bp, Chlorella sorokiniana
  unsure (1)..(409): unsure at all n locations; Clone ID: LIB3602-037-Q6-K1-B4
cctgcaccctgcgtttgcacggtgcctggcctacgttttaactgcctctgcaccaccaaatgagcaccgcataccgcctcaagaaaatcccagccctatcagtgcactgcctctgtggcccttttgatgcattgtnagcgcccgactgtcacaacctgccgccctggctcatgaatgggcccgtgctctgtctgcccctggcggccggttcccgcaatttgatcaagaccaagcgcatgttgcattgagagcgatgccccttgcatgtctgcctgcgtgttgtaacacttcaatgnanaataatttaaaaaattattatttttttatataaaaaaatataaaatttttatatatattattattatttttttatttataatatttattttttttttattttatttttatt

SEQ ID NO: 2566 - DNA, 498 bp, Chlorella sorokiniana
  unsure (1)..(498): unsure at all n locations; Clone ID: LIB3602-037-Q6-K1-B5
cgcaacgcactgcgcgcaaacggcctgtgctgggtggcctgcggcggcatgcacctctacaacgccggcgctggtgtgcagaagaaggaggttgcctactcgtccgctgcgctggcaggcgtgctgggggcgctgtgcctgtggcgcggcttccgcaacaacgatgacgatgccaaggagctgtgagcttcaacacaatttctgacaccttttgtgtttgatgcgttgcacaactgatgggaacaatgagcaggacgcccaggcatgtggagacgggggctaaagggcagttgggggatgccgagctgcagcaggaggcagctggcggacagcaaacagcctgactctgaatgattnttgtgcacagcagggacgaggcgcttgtgcatcgccctgccctggcacacgctcctgacgcccttttggctttgatccgttgcatagcgcaaattcgactaggcgtgctgtactgtaatcgtatggcccccccnnnaaaaa

SEQ ID NO: 2567 - DNA, 302 bp, Chlorella sorokiniana
  Clone ID: LIB3602-037-Q6-K1-B6
aaaaaaaaaataaaaaaaaaaaaaaaaaaaataaaaaaaaaagaaaaaaaataaaaaaaaaaaaaaaaaaaagaaggggggtagtagaaaaaaaaaaaaaaaattataaataagaaaaaataaaaaaaaattaggggggggttttttttgggggttcaaattttacttggggggttttgaaaattatttttttttttttggggccccttattttaatttttggggggggtgttttaaaaggtgggttggggaaaacccttggttttcccaattttattggtttgggggaaattccctttttg

SEQ ID NO: 2568 - DNA, 332 bp, Chlorella sorokiniana
  Clone ID: LIB3602-037-Q6-K1-B7
aaaaaaaaaaaaaaaaaaaaaaaaaaaaaaaaaaaaaaaaaaaaaaaaaaaaaaaaaaaaaaaaaaaaaaaaaaaaaaaaaaaaaaaaaaaaaaaaaaaaaaaaaaaaaggggggggccgttttaaaggaccaaagtttacttccccttccttgcaacgtaatactttttaaatagggccaccaaaataaaattaacgggccggggtttaacaacgtcgggacgggaaaaaccttggggttacccaactaaatggcttggcagaaaatccccttttcgccagttggggaattagcaaaaaggcccgcacggatcgcctttccaaacagttgc

SEQ ID NO: 2569 - DNA, 392 bp, Chlorella sorokiniana
  Clone ID: LIB3602-037-Q6-K1-B8
cttcgatgaagtgctggaggcggaggggctgggagaggatgcgccgccacctggcagccgccgccaggagcctcgtttctcctttgtcagcggcggctacacgggaggaaacctcacctccctgtctgattcggaggatgaggaggggggcagcggcgagggaagcacagcgacggcagaccacagcatggcgctggcactgcacgcgcagcaggcgcttcaaatcacggcagcgcctgccgggcgctcagacctggtggaagctcgctcggcagccgactacctcctgcacaagcgcagctggcagggagtggagacgccgctgacgggcgcggcaccggcgccggtggtggcggcagcagaggggcgggccgggccggcgggggggtacg

SEQ ID NO: 2570 - DNA, 449 bp, Chlorella sorokiniana
  unsure (1)..(449): unsure at all n locations; Clone ID: LIB3602-037-Q6-K1-B9
gcgcgaggtgcaggcgtgccgccgcgccttccctgacgcctacatccgcgtggtgggctttgaccccgtgcgccaggtgcaggtgtctggcttcctggtgaaccgccccgcctctgtgcgcgactaccagggcccctccacccgctccgtgtaagcggtctgcggcatgatggccagactgtgcgcctgacgccccttcaccagggctgatggcgcactgcagcatacattttttgcagcggcggcagcccggagccgcccgccctttttgggcggcgcggcggccctgccttcgtggcagggcggcggggcagcgggcgcaagcccgccgctgcgtctcggcgcttgctgctacccatttttgtagggatgttagtgcacacgccactgagactcngcctatcgccccggtgccaccccccgggcaggcgaggacccattttaaatac

SEQ ID NO: 2571 - DNA, 402 bp, Chlorella sorokiniana
  Clone ID: LIB3602-037-Q6-K1-C1
gttgaacgctcctgctgagagcgcattgtggcaaacgcttcctccatttcatgcccgccgcatccaaccggcgccggttgtttgtttgttcgtgttcatgatcacccaaccgtcggttcgttgcaaggcgctgcctgtcggcagcgccgcttgtcccgcgctgcccatgcccgtttttagtcctcctgtttccccccgttttgcacagctgctgtgcctgtgctcccctgtttcccccctgttttgttttcttcccctgtcgcacgccgccgccactggcgcgcccgtgccgtctcactgtgtagtccacgcatgcatcgatctctgatctttcagccccgaatctctttttttttcgaatcgctccccaaacgtccaaagtgtaaccattaccttcgtggc

SEQ ID NO: 2572 - DNA, 282 bp, Chlorella sorokiniana
  Clone ID: LIB3602-037-Q6-K1-C11
aaaaaaaaaaaaaaaaaaaaaaaaaaaaaaaaaaaaaaaaaaaaaaaaaaaaaaaaaaaaaaaaataaaaaaaaaaaaaaaaaaaaaaaaggagaattataaaagggggcgccctttttaggggtccctgttttccttccccgggcggcgaacttgttgttttttttttggggccccttaatttaattccccggccccatttttataacccccgtgttgggaaaacccttggggtcccccccttaattccctttctacaaatcccctttttgacaggtgggt

SEQ ID NO: 2573 - DNA, 460 bp, Chlorella sorokiniana
  unsure (1)..(460): unsure at all n locations; Clone ID: LIB3602-037-Q6-K1-C12
cgcgactgggtgctgggcacgccagctgacggcagctacgtgtccatgggcgtgtacagcgacggcagctacgatgcgcccaagggcgtgatctactccttccccgtcacctgcaaggacggcaagtnntccatcntgcagggcctgtccatcgacgacaagtcggccgccaagatgaaggccaccggcgacgagctggtggaggagaaggctctggccctggagtgcctggccgagtagagtgcttcagattgaacggcaccccaggcagctggcatggcacggctgctccggctgccgccggcgccatttgccgtcggccgctgcacacgattcttggcaatgaacctcctcccattggaacgcttgctgccgcggcagctcttttggtgggcgcattcatgcgccttggcgggttttaccgtctgaacgcttgcacatgtgccgccccgcccttttt

SEQ ID NO: 2574 - DNA, 273 bp, Chlorella sorokiniana
  unsure (1)..(273): unsure at all n locations; Clone ID: LIB3602-037-Q6-K1-C2
acggcgcattgccggcagccgcagcgcccgcgcgccatgcacgccctccctcccctgactccacccctgcagctcttttttcccttgctttcaaaatattcagagtgtaactggttagccgtcaaaaaaaaaaaaaaaaaaaaaaaaaaaaaaaaaaaaaaaaaaaaaaaaaaaaaaaaaaaaaaaaaaaaaaaaaaaaaaaaaaaaacaaaaaaaaaaaaaaaaaagnaaaggtaaagggaaaaaaaaaaaaaaaagnacagacaagaaaaa

SEQ ID NO: 2575 - DNA, 423 bp, Chlorella sorokiniana
  unsure (1)..(423): unsure at all n locations; Clone ID: LIB3602-037-Q6-K1-C3
actccctgtaccccggcggcttcttcgaccccctgggtctggctgacgaccccgacaccctggctgagctgaaggtgaaggagatcaagaacggccgcctcgccatgttctccatgttcggcttcttcgtgcagggcctggtgaccggcaagtcccccctggaaaacctggctgaccaccttgctgagccgtctgtgaacaacggcttcgcgtccgccaccaagttcctgcccctggcctgaacgccgtcgtcaacctggagcgacctgngcatcccatattaacggcggccagccggttttggacaagcacacacaacatatgagattcccaacctccctgcgcactgcttgtaacaatcctggctccctcttgtacccttgacccgcactcgggcgtggatatgtaacgttccgcgggact

SEQ ID NO: 2576 - DNA, 388 bp, Chlorella sorokiniana
  Clone ID: LIB3602-037-Q6-K1-C4
aagaagggcaagaagtactacaagtacgaggtgctgacccggtccgccgacggcgatgagggcggccgccaccagctgattgccgccaccgtgtccaacggcaacctgtacctgatcaaggtgcagtgcggcgacaagcgctggttcaagggcgccaagcgggaggccattggcgcctgggactccttcaccgtggtgtaagcacttgcaccgtggtgaccccgccgcagtagccgccgcagcagcagcacagcacacgagaagaaacaccccccccccacactttcccttgcttgtacgttcctccgctcttgttggccgtcccgcgggcgccagccacaatctgatttttcgctcagcgtgtgtgccacaccatgtgtaacgactt

SEQ ID NO: 2577 - DNA, 486 bp, Chlorella sorokiniana
  unsure (1)..(486): unsure at all n locations; Clone ID: LIB3602-037-Q6-K1-C5
ctcgtcggcctcggtcaaggagtggcaaccatgaagaacgacgagggcgagattgtcgatctgtacatcccccgcaagtgctcgtggaccaacaagctgatcacggccaaggaccacggcagcgtgcagatcaacattggccacctggacgagagcggcgtgtacaccaactcgttctccaccttcgcgctctgcggccaggtccgcgtcaagggcgaggctgacagcgctctggaccatctgtgggccaagaagcgggctgagatcggccagtgaagcgctgctgagttctagccgccagccggctgggctacacagctgccagccggcggtgggccagccagccttgggtcggccagtgatgcgctgcgaagcanagtgctgagcgggcgggcgctccggcgcgccgncgncagccacgcagtgcaagctgtaacgcgccttcttgcaagctcacagcnganaaaaaaaannnaaannnannna

SEQ ID NO: 2578 - DNA, 430 bp, Chlorella sorokiniana
  Clone ID: LIB3602-037-Q6-K1-C6
cccagcaggaggagcgctggctggcgcagtgggagtggctgctagacgccgaggacagcgacagcgacggagggggcagcagccgcggggccgcgcctggcgccacgccctcccccgcagccaagctgccacgcagccgcagcgccggcagcacggccagcggcggcggcgatgcacggccgcctggctcgcccaggggcccgccccgcgtggtggctgtgcacgagggcagtggccaggtggcgggacccggcttccagcaccctgagtgggtggctggccgcctgctggtgtttgaggacggcagcctgtgctttgtgtgcaaggaggggctgaaccaggtcacagagatgcgccagctgcgcctgccgagccggtaaacgtacctggttgcctgccctgctcatgttgcataccaaaatgcattgtt

SEQ ID NO: 2579 - DNA, 302 bp, Chlorella sorokiniana
  Clone ID: LIB3602-037-Q6-K1-C7
taaaaaaaaaaaaaaaaaaaaaaaaatgattaataatataaaaaaaaaaaaaaaaaataaaaaaaaaaagcaaaataataaaataatatataatgagacaataaattctttaaattgcagtgttattttattatttttggcccccctttttaggggtcccaggtttacttccctttctttgcaggtctttgttttttttttgggggcccttatttaaattttggggcccgcggttttcccccttggggcgtggaaaacccttggtgttcccagtcttttttctctttggcgccattcccttt

SEQ ID NO: 2580 - DNA, 537 bp, Chlorella sorokiniana
  unsure (1)..(537): unsure at all n locations; Clone ID: LIB3602-037-Q6-K1-C8
gtgaacgacctgtcccgcggctgcaccgtggccgacattgtcaacaccgtggcatgcactgccgtccaggccatcggcgccaagcagcaatcggccaccaagcccagcgccgctgctgcggcgtgagcgcccagccgctggccccgcccttgcccgccccacggctaaggaatgcaccctcctcaaaatgcaagccacacgggcgcattgcccactgcacccacattggccggcggagccccacagccgcccacacatgacacacacactgctccctcaaagctcgcgtttttgtgttgctgctgatgctgaactccccgctggcgcactgctgcttgatacccagaccgctggcggcgccggcgggctgacgccctcccaccactcgctcgatnttgccctgctctgcgcctcgctgctgcaatgccccggcccgacggntggggcccgctcctgcattaagntttcgttgcccctacacctttatactcttggaatgctgcctcgatggcggcgggtgtaaagcttcgcgacttc

SEQ ID NO: 2581 - DNA, 340 bp, Chlorella sorokiniana
  Clone ID: LIB3602-037-Q6-K1-C9
aaaaaaaaaaaaaaaaaaaaaaaaaaaaaaaaaaaaaaaaaaaaaaaaaaaaaaaaaaaaaaaaaaaaggggggagccgttattaaagagaaacaaatttacaaacacgtgcttgcaaaaataataaatggtggtgtccttttttaaaaaatcaaatttactggccgtggttttacaaggtattggattttttttaagggtgccgtaactaaatttaatgggctgggatttaatcctcttttggtgggaaaactttttggttaacaggttttatccgattggcttaaataacatttttgccccttggttggttaatggaaagggccctgtaggggcgctt

SEQ ID NO: 2582 - DNA, 107 bp, Chlorella sorokiniana
  Clone ID: LIB3602-037-Q6-K1-D1
cggacgcgtgggctgccatcgcctccacttgtgcattggctggagtgtaaaccgcatatatggcaaaaaaaaacaacaataattaatacaaactcatcccccctcac

SEQ ID NO: 2583 - DNA, 411 bp, Chlorella sorokiniana
  Clone ID: LIB3602-037-Q6-K1-D10
ggccaacccccgcgcctacaagatccccgactggttcctgaacaggcagaaggacgtcaaggacggccgctactcgcaggtgacctcctccgcgctggacaccaagctgcgcgatgacctggagcgcctgaagaagatccggaaccaccgcggtctgcgccactactggggcctcaccgtgcgcggccagcacaccaagaccactggccgccgcggcaagaccgtgggcgtggctggcaagaagaagtaagcagcttcttgcgggcgcggcctgcggcacgggcggatgctggcggctgggtgacggcggctggcgccgcccgcgcagcaaccccactggcagagccggcggcagcaggtggatccacaccagtcgttgcagtgctgccgtcgtgtaatgcacccttcgcg

SEQ ID NO: 2584 - DNA, 411 bp, Chlorella sorokiniana
  Clone ID: LIB3602-037-Q6-K1-D12
cggacgcgtgggcgaaacagccaaccagccaccatgctgatctccaagaagaaccggcgcgaggtgtacaagtacctcttcaaggagggcgtgctgtacgcggagaaggacttcaacctgcccaagcacccctatattgaggtgcccaacctggaggtcatcaagctcatgcagtccttcaagtccaaggagtatgtgaccgagcgctacgcctggcgccacttttactggttcctgaccgactctggcattgagtacctgcgcgagttcctgaacctgccctccgagatcgtgcccgccaccctcaagaagagcacgcgccctctggagcgcgagggcgcgcgcccgccccgtcgcgacggtcccccccgtcgttttggcgaaccgttagggctacccgttcctagaaag

SEQ ID NO: 2585 - DNA, 470 bp, Chlorella sorokiniana
  unsure (1)..(470): unsure at all n locations; Clone ID: LIB3602-037-Q6-K1-D2
gctgctgctgccggagcacgactacggcctgagcgtcaagcagatgcaggtgctgggcctcaccaacgaagccaccggctttggcgcccgcctgccggaggtcaaggcggaggcgctgcgcgccaaggccttctatgtaggagatgaggtgacggagaccaagcggcaggtggcgcgcatggcggttgacacaaaggcgcccggccaggcgccgcccgatctgccctcgctgctgctggacggccgcatctgctacatcggcatgtcgctggtgcctgcggtgacggagctggtgatcagcgagctgctgtggctcaactactcggcgcccgacaagccggtgtacgtgtacatcaactccaccggctcgcagacgatgcanggcgaggctgttgggtttgagacggaggccaccgccatcatggacaccatggcctacatccgccccgacatctacacactggtgcctg

SEQ ID NO: 2586 - DNA, 511 bp, Chlorella sorokiniana
  Clone ID: LIB3602-037-Q6-K1-D3
ccttgcacagcgctttggggttgccccagcggcagcagtgcaaggcgcgcaaccggcgccggcgccgctgctggtggccagcaggcagggccggcacgtggcactcatgctgaatgccacagtgcttgccatctatcaagccgcctttccacaccaggcgctgcgccagccaaatcagggggccctggcgtggatgcaggtgctgcagccgctggccatggtgggcgtggcagttgtggtgctggccaaagcgcgcgctcggcgcggcggcggcgacgcctcagactttggtctgggcttgggcgggcgcggcgggccagctggcgaccctcgcctgcgcgagtttgagcgactgctgcagaacccgctgacaaaaggggccaccgcacggcagcgccaccgcccctacagcggtggcagcagcggcagcgagatggaagacagcggcggcggcaggggccggggcggcacaggcagacgaggcgctggaccggagccaaacaagcagggc

SEQ ID NO: 2587 - DNA, 482 bp, Chlorella sorokiniana
  Clone ID: LIB3602-037-Q6-K1-D4
cggacgcgtggggccgcgtatgcccctccgcccacgtatgcagcaccgcccccacagtatggcgccccgccgccatacggtgcaccgccagtgtacagctacccgcccacgtatgctgctgctcccccgccaagcgcctacccatccggcacgagcagcatggcctatggcgccatgggcgcaatggccggcgcggccatgggcgctgcagtgttcaagccacaccacggcgtgcactatggcggcatgcattacggccatggctaccacggaggcttcaagcacaagggcttcaagcggcccaagtttgggttcaagcgccccaagttcggattcaagcggcccaagtttggagggaaattcggcaaatggaagtgacctccccttccccttccttcctggaccaatctgccgcctgctctgccgcctagtcgccggccttctgtttcttggcgccctgcgtttaagcgggatggaacact

SEQ ID NO: 2588 - DNA, 345 bp, Chlorella sorokiniana
  Clone ID: LIB3602-037-Q6-K1-D5
agctgagcaagtatgctgaggcagccgatggagcggcgccgctgcccagcaccaagcagcagacggccagtgggctgtccatcgtgagcggcgatgaggaggcgcagacggtgctggattggaagggagagcccatgcaagtgcggcccggcgaccggctgccgggagtaaagttcctgtgatggctgccgcttgcaagctgggcgggtttgagccaagagtggaggcagccagacctgggcgcagcatgccgcggcaagggtggctaggcatgaagtagctcttgcgtttgaaaactgaacgtcgtttaacaccagaagttctgctgttaaaaaatggaagggc

SEQ ID NO: 2589 - DNA, 490 bp, Chlorella sorokiniana
  unsure (1)..(490): unsure at all n locations; Clone ID: LIB3602-037-Q6-K1-D6
ggccgtcatatgtgtgcgtgcttttgtgagcccagatgccaggcagacctgccagcgtttcagcggcacacttgcctggcgcagctgctcctgccgccgcccacaagcgctcgctgcactgcaatctgcatggctcacatctctgctgtgcaacttttgcacttggccccagctctccgcactcctaccccacacccctgaaccaccaagcagaccacgaccacacgtctgagccgcacagcccctacgatggcccctcccgcacccccaccccgcccttgggcctggcggggcagcatgccgccgccattgccgcggcggtcgccgaggtggaggcggctcgggcggcagggcaggaagcgggggtgcgcttncagctgccaccccgcccgccgaaccacgccgggtcgagcggcagcctgggcggcaccaacggcaatggccactcgcagcaggggcagcaggagcagcaggagcagcagcagggttc

SEQ ID NO: 2590 - DNA, 438 bp, Chlorella sorokiniana
  Clone ID: LIB3602-037-Q6-K1-D7
gggccagacgatcgacaaggtgctgaactttgcggtgcccgaccagctgctggtggaccgcatcaccggccgctgggtgcaccccgcctcgggccgctcctaccacgagaagtttgcgccccccaaggtggcgggcgtggatgatgtgacgggcgagccgctggtgaagcgcaaggacgacaacgcggagacgctcaagagccggctgtcagcgttccatgcgcagaccgcccccgtgattgccttctacaaggacaaggtggtgaccatcaaggctgacaagccgcaggaggatgtggcctcgcagatccgcaaggccctgggctgagcaacaacacaacaagcacgcgccctgcggcgccagcctgttggccagccagctggcacgagagcagcggtactgtgggcccgccgggacgggcagcacgcccacccatg

SEQ ID NO: 2591 - DNA, 71 bp, Chlorella sorokiniana
  Clone ID: LIB3602-037-Q6-K1-D8
aaaaaaaaaaaaaaaaaaaaaaaaaaaaaaaaaaaaaaaaaaaaaaaaaaaaaaaagggcgaacaatataa

SEQ ID NO: 2592 - DNA, 70 bp, Chlorella sorokiniana
  unsure (1)..(70): unsure at all n locations; Clone ID: LIB3602-037-Q6-K1-D9
tcgaaaaaaaaaaaaannnnnnattanttttnttaataaataaatataaataaaaaaataaaaaattaaa

SEQ ID NO: 2593 - DNA, 399 bp, Chlorella sorokiniana
  Clone ID: LIB3602-037-Q6-K1-E1
cacgggctctgctgatacaaccctcttgcgaatgacagccctgcgggtggccaagtgcctccccctgccacacttgcatgccatgccgagcttgtgcaaacgttgcattagctcaattggttaattgctgcatctccatgtcaccacttctgctggtaatgccctggtaaattgtgtctgcccaacatcccttgtaacagcgccgctcctcgccgccccttgcgtcccatccctgcaggacagcagcggcatttctcgcgacgagatggcgacggcgctgatggaggtgtcggaggggcgcatcccctcggaccgcatcgtgctgcgcgagctgtggcgggagatctttggctggtccgcgctggacgagcccaccagtgagtctgcgtttattggtta

SEQ ID NO: 2594 - DNA, 502 bp, Chlorella sorokiniana
  Clone ID: LIB3602-037-Q6-K1-E10
ctcaggaaggtcacccactctatctcccctctctttagcttgacacagctctgtgtcgcccagcaaggcggctcaggctgccccctgctggtgcgggaagacacaacgtaatgaacactgcagccgggagtaaaaccctgggcagcaggctgtgtgagctgctgctactaatcagtggcatttatctctctcacccccatactcttgcagcaacgtgcaccatgtccaagcccacggctagctagagcccaggcgtgatcgagcatgtggtgttggcgcttgcgcccagctggaagtcagaagtgcgcacatggtgcacccaccaacaaggcacagatggtgcggcgttgccagaaattggactagcaggtgcagcccaccacaggcccctcttgcagcacggccagcagccgtcctggagtcagcctgccatggaagctgctcaagcatgcggcgaacagtagcagcggcaccagctgccagctgcagcctgtggcgcaca

SEQ ID NO: 2595 - DNA, 537 bp, Chlorella sorokiniana
  unsure (1)..(537): unsure at all n locations; Clone ID: LIB3602-037-Q6-K1-E11
cctgccgcgcggggctcttccagaacatgctgtttggtggcgccatttcagacgtgatgcagatggctcaagtcaagcgctccatggagttggtgcggggcatgacggcagaggtgcaagccgccgcgcantgggcctcccagaacgccgccgcgcaccagcagcgcgaggccggggtgcgccagcagctggccaccatgcacggcgagtacgaggcgctccgccgccaggtgggcgcttgaaagggcgggggcagacccatctcaggccgtgcggcccagcaccgccggcgtgtatcacgctgcctgcaaccctcagcacagcaccagcgtccagcctggtccccagaggctgcgcagcaaccaaatttaccatcatgacgggcggcaggccgtcacagcggcgctacaaccaagcagtatgcgcatgcaaacaggcggtggcggcagcagcaccacctcaaccgttgcatcccttaaacagacaggatgacttttcgttatttgcacagggctgttccgctttgtattcagtttt

SEQ ID NO: 2596 - DNA, 196 bp, Chlorella sorokiniana
  unsure (1)..(196): unsure at all n locations; Clone ID: LIB3602-037-Q6-K1-E2
gtttcatgtttgtacggcagatggcgattgcattttcccatgtgcttcgtccctcgttgcgctcttcttccctgctgctcgcattgatggttctttcccgcggtctgagcgaggcaatggcaccggcctgcgggcgccgcagattttgatgcgtcagattgatccttgttccaggcagattgttagtaatgattng

SEQ ID NO: 2597 - DNA, 547 bp, Chlorella sorokiniana
  Clone ID: LIB3602-037-Q6-K1-E3
ccccggcgaggtgtctgacaccatcgccaagatggccaagaagggcatgaccccctcccagatcggcgtgatcctgcgcgacagccacggcatcgcccaggtcaagtccgtgaccggctccaagatcctgcgcatcctcaagggccagggcctggcccccgagctgcccgaggatctgtaccacctcatcaagaaggcggtggccatgcgcaagcacctggaggccaaccgcaaggacaaggacggcaagttccacctgattctggtggagtcccgcatccaccgcctggctcggtactacaagcgtaccaaaaagctgccgcccaactggaagtacgagtccgccaccgcctccgcgctggtgcagggctgagcgctcgcctcgcgcgtgagctgacggctgcagccacggctatctccaactggtgtgccagcaggcatcaccacgaagcagccgcagctctccagctggctctgcctgcgtttgcagcccctggcttgatgtgctgctctcttgcatgcatgcgccaagcgcatgtgtaaagct

SEQ ID NO: 2598 - DNA, 259 bp, Chlorella sorokiniana
  Clone ID: LIB3602-037-Q6-K1-E4
gttctagatcgcgagcggccgcccacgcgtccgcacatcctacctcccacacctcactccatgtccacccttcacccgcgcttcacacagcggctgctgccatgcaaagctgctgccaaacccatccatcatgctcgcacacccactcacccacacgtccaacgtatccagacccattttcaaggcccgactgtacagtgcctttttgcgtccttatgccgatctggtaccaggacttaatgtgtaacaaatggtatgt

SEQ ID NO: 2599 - DNA, 263 bp, Chlorella sorokiniana
  Clone ID: LIB3602-037-Q6-K1-E5
ggcgcctcttttctaccccttttacccctgcctagcgaatccccttcccttcggacctcttccactgctaccagccctgtcgcatgccagcatgctcttgcttttcactgcacggcatctgcccatcggccgatgcccctcgcctccccccgctgaacaaatcccgttggaaaaaacaaccgccccctgcgggcacgcctatatgcacttgcacaaattgcagctccaaatacatcacgcatgtcacgggcagcacaccattc

SEQ ID NO: 2600 - DNA, 500 bp, Chlorella sorokiniana
  Clone ID: LIB3602-037-Q6-K1-E6
cggtaccgtccggatcccggtcgaccccgcgtccgaaaaaaaaaaaaaaaaaaaaaaaaaaaaaaaaaaaaaaaaaaaaattaaaaaaaaaaaataaaaagatagagagggtgggggtgaataacttggaaaatgaaaatttaggggggtgggggggggggtttttgggttcttatttggggggggggggtctgggatgttttttgtttttatttgggcgccctaaattggacttcctggccgcccttttacaactgggggcccgggaaacccctggcttttcccccttttgtccctttggggcctttccccctttgcccttttggcgaaatggccaaaggggcccgccctgtcccccttcccaaaggttgccatactttatggggcattgggggccccctttttatagggcctttaacccggggggttgggggggttccggcccttttacctttatattttctagggccttacccccggttatttgttttttttctttt

SEQ ID NO: 2601 - DNA, 502 bp, Chlorella sorokiniana
  unsure (1)..(502): unsure at all n locations; Clone ID: LIB3602-037-Q6-K1-E7
cccctccctgatccacgctcagtccatcgtggccatcctgctgacccagctggtgctcatgggcctgattgagggctaccgcgtcaacggcggcccggccggcgagggcctggatgccctgtaccccggtgaggccttcgaccccctgggcctggctgacgaccccgacaccttcgctgagctgaaggttaaggagctgaagaacggccgcctggccatggtgtccatgctcggcttcggcgtgcagggcctgatcacccgcaagggccccattgagaacctggctgaccacctggcggcccccgacgccaccaacttctgggtggactacgcccccaagtccgccggcatcggctactaagctgtttccgtcgcttgactggcgccgcccgctcgcccgcccgctgagtttacggccactcgcggcaacaggcagcagcggggtctgtactttctgactcctncggcgattgctggtggcgcaccttgcttgctttgatgc

SEQ ID NO: 2602 - DNA, 199 bp, Chlorella sorokiniana
  unsure (1)..(199): unsure at all n locations; Clone ID: LIB3602-037-Q6-K1-E9
nttttttttttttttttttttttttttttttttttttttttttttttggaggccgctcgctatctaaaaaaattataaaacgcgaacggcccctataaaaaaacaaaaattacataaccatacattacaaataaaaaatattccacattgacacaaaaattaaattaaaactgataaatacataaacaacaactaattg

SEQ ID NO: 2603 - DNA, 235 bp, Chlorella sorokiniana
  Clone ID: LIB3602-037-Q6-K1-F1
agcggtcgccctttttttttttttatttttttttttttatttatttttattatgtttttctatttttggtggggttttttttttttttttttgaggggcaggatggtttacaggtaaacattggttagctcccattttgggctctaagtaaaaaaaagcgagcaaaagccgggcatatttttatctagggggaacattatgcatggaacagcgaggacaaatttttataaggggg

SEQ ID NO: 2604 - DNA, 520 bp, Chlorella sorokiniana
  unsure (1)..(520): unsure at all n locations; Clone ID: LIB3602-037-Q6-K1-F10
cacctctatgtggctgacgtggcagaggcattcgacatcatcctgcacaagggcaccacgggagaggtgtacaacatcggcagccaaagggagcggacagtggtggaggtggcggccgacatctgccggctgtttgggctggaccctgagcaccagatcaagcatgtgcgggatcgtgcattccaagacaagaggtacttcatctgcgatgccaagctggcggcgctgggctggcaggagagcacagactgggcggatggcctgcgcagcacggtagattggtacctgtcgcacggcttctcagactactgggactcagtggcggtggagtctgcgctggagccgcacccattcagcacagccccgggctcgcaacagtcactgtcacagtcaaacgggacagccaacggcaacgcaacgggtggcggttaagctgcagccggcaaggcagtgccgcgcacagcttgcctgcctgccctgcttgtttnntgtcaatttgcgctcactgagtactgtcacc

SEQ ID NO: 2605 - DNA, 392 bp, Chlorella sorokiniana
  unsure (1)..(392): unsure at all n locations; Clone ID: LIB3602-037-Q6-K1-F11
ggcattcccgcgtccccgctgtcgcagcagcgctacgggcgcctcggccgcggtctcagcggcctgagcggcgccagcagcggggcgctgttgaatgaggacgtgctgccgccgcttgacgagcacagcncatctgccgcagctgatggactggtcagtgatggaacagctgcaatggagtctgggaaacaggagaacggagcagtcgtgcagcaccggtgggagcagcagcagcagcagcagcagcagcagcatgaccagcagcatgagcagcagcagcagccagaacaacgacaagttgatggaacaacctccagcgggagctagagactgctagtaagcactagtgaatgaacactgccaccttgtataagtgaggttgtgtaaacttg

SEQ ID NO: 2606 - DNA, 366 bp, Chlorella sorokiniana
  unsure (1)..(366): unsure at all n locations; Clone ID: LIB3602-037-Q6-K1-F12
gcgtccgaagtttcattttttgatcggcagttttcgttgcaagaagatcccatttgcttgcggggtgccgggcccgccccgcccgcattccttcccactgcatcatatcttggcctgccgctgatgattcggcgttnactgccctgtcgtttctctgttgtccccccccttcccgccccctttccccgcacaacgcccgatccttgcccgccccgcgctgtccagcttcctgcgcacttccctgctacccctcacttgctgtcacgaaaacgaatcgacggccgacgaggccctgtaacactgccatgaaaaaaaaataataagaatactatacaaagtaatatatatctttcttaattaaaaata

SEQ ID NO: 2607 - DNA, 447 bp, Chlorella sorokiniana
  unsure (1)..(447): unsure at all n locations; Clone ID: LIB3602-037-Q6-K1-F2
ggcctggcgcggcgcgcttagcaagaacctgcaggagctcaggatacacctgtgccagaccggcaagggcagccagggcgccagggactttgtgctgagcagctaccaggagctgaagaaggccaaccccaccttccccatcctggtgcgggagtgcagcggcgtggaggccaagctcattgcccgctacgactacggcgtggaggaggcggtcaaggtggaggggctgagcaaggccgacatcaccaagcagctggaggcgctggtgaagaagggggagagcatgccgcggtcagccgagagcgagggcaagctctgagggcgcggcggcctctgaacgcgcagctgcaacttgcgcacaacttgcgcggctggcgctcgccgncacgccggcaggcatgcacgctctgagcgcatagctgtacgctcgctgccatgccggcaact

SEQ ID NO: 2608 - DNA, 425 bp, Chlorella sorokiniana
  unsure (1)..(425): unsure at all n locations; Clone ID: LIB3602-037-Q6-K1-F3
gcacggcctgctctgcggcccttcatacctttgtacctttctgtatcatcttgcagcaatggcagccggctgcatctttctaacatcgtcaccggcccactcgtttgtgccatgcccacctgcctccaacgtcacccttcatcaaccctcacccaacccatccacctgccacccatccactcaccttccctccgccacaacctctgccacccactcaccacccatcacccgctcaacgccctccatgcaccatcctccccatccaccaaatttgccaccccaaacgcacgtccgccgctgcaccacctgccgccccctcacccgcacccatcttccacccgccacctttcctgccgctcaccgccgcacatnctacctcccacacctcactccatgtccacccttcacccgcgcttcacacagcg

SEQ ID NO: 2609 - DNA, 533 bp, Chlorella sorokiniana
  Clone ID: LIB3602-037-Q6-K1-F4
ccaagcgttgcctccccttgcaagcccacacgcctgcatgaggtgcagacttcccttctccagcttagtagcttgctgaccatgtgtccgtgctgtctcatggctctctgtgctgcgtgcaggccatggcggcgcgctcgcgaggcggcaactcaatggccatgaccgcctgcttcgccggccccctgttcaacatgctggttggcctgggcctgggcttttgggcgctgctctcagacagccacatgcgcaaggcagccgtcaagctggacccagtcgtgcttgtgggctgcatcttcataatgctgaactgcgcctgcgtggtggcagttgccctgctgcaccgccagtggctgcccgcctggtctggctgggccatggtggggtgctatgcaacataccttaccgctgtactcaccgtgctagcatttgattgacttgcttgcttgctctgcggcttctctcctggcttgctgctgctgtttgctgggcctgtgcaacatgatatcgcttggcctgatccttgctcgaat

SEQ ID NO: 2610 - DNA, 389 bp, Chlorella sorokiniana
  Clone ID: LIB3602-037-Q6-K1-F5
ggtggagctgacccggtcaggcaataccatcacgtcggtgactgccgaggtgtttgagctggactccgaggaccagaaggagcatgcgcagctcatcacggacttccaaaatgccacgcactggcccaagcacctgctggtgcactacacctgggagacgcagcacgaggagaacgaggacgcaggcctgctggtcctcttctcagcggcggcatttgcggcgctgcttcttgggcttaacgtggcaaggacgtatcaggagcgtctaaggcagttcctctccgatatcgcgggggagagcggcagcagcttggcagcggcagccggcactgccaaggccgactgagtgcacgtggccattgcaaaccgcagtgtaatgcattcatgcg

SEQ ID NO: 2611 - DNA, 368 bp, Chlorella sorokiniana
  Clone ID: LIB3602-037-Q6-K1-F6
aaaaaaaaaaaaaaaaaaaaaaaaaaaaaaaaaaaaaaaaaaaataaaaaaaaaaaaaattaaaaaaataaagggagaggtgagataaaaaagttaatagtgaaagtatttgtaaaattttttgtttggttttgtgtaatttatttaaggggggggtgggtgagttttattatagtaatgattgggaaaaatttgtggttttttgttttttttgagttttggatttgatatgatttttgtgttggttgtttttttatagtttggggatttatattgttttgttgtgattagtttttatagatgatgtgggtgggtaaattgggatgtgtttgtttaaggttgtgttttgagtgggtagagtttgtttg

SEQ ID NO: 2612 - DNA, 517 bp, Chlorella sorokiniana
  unsure (1)..(517): unsure at all n locations; Clone ID: LIB3602-037-Q6-K1-F7
cagcgacctttgctgtgtctccggcttgcccaatagcctgcggccggtgaagctcttctccgcaaaccctgccatggccgagcttctgccggcgccttcccagcaggccgtgtgggtccctgaatcgctgcaggactgcgtagaagtcggcctgaggctcaaggaggccgcgttcgctgcgtaccgagagggagaccacgccgagctgcgccgctgccagctcaaggagagccagtacctgatcagctgcaccatccacgacttggagcacccctcgcccggcgcgccgctgccccgccagtggctggagccaagtgcgagccagcagctgctgcgcgggctgcaggcagacctcgcccgcgtcaaccagcagctgcagcaggaacatctggcgccagcatcccctgcagctgagggacacgagcactangctactgtgcgctgcggcggtgcgctgccaccccagtgctatgctcggncagctcttcggacagtcattcaacgctgtgcaccacgc

SEQ ID NO: 2613 - DNA, 371 bp, Chlorella sorokiniana
  Clone ID: LIB3602-037-Q6-K1-F8
cctgtagtgaaggtaaagtctcaccatgggcaagtgcggcaagggcacgggcagctttggcctgcgccacaccaagacgcacacgctgtgccgccgctgcggccgccgctccttccacatccagaagagcacctgcggctcgtgcggctaccccgcggccaagatccggaagtacaactggagcgtgaaggccatcggccgcaagaccaccggcaccggccgcatgcgccacctgaagaacgtgcagcgccgcttccgcaacggcttccgcgagggctctgctgccaagaagatcgctgcctaaacagctggtgtctgcagctacgcggcagcacgttgagccagctgtgtagcaggatgtaacaccgcga

SEQ ID NO: 2614 - DNA, 330 bp, Chlorella sorokiniana
  Clone ID: LIB3602-037-Q6-K1-F9
caagctgcgcgtgtgcgcgctgcgcgtcaccgagaccgctcgcgcccgcatcctcaaggctggcggcgagatcatgaccttcgatcagctggcgctggtggcgcccaccggcagcaactgcgtgctgctgcgcggccccaagaacagccgcgaggccgtcaagcacttcggccccgcacccggtgtgcccggctcccacgccaagccgtacgtgcgcagcaagggccgcaagtttgagcgcgcccgcggccgccggaagagcaagggctacaaggcgtaagcgcccccacgcctcagcggccggcgggcggcggcggtcgtggatgcgct

SEQ ID NO: 2615 - DNA, 255 bp, Chlorella sorokiniana
  unsure (1)..(255): unsure at all n locations; Clone ID: LIB3602-037-Q6-K1-G1
tcggggggcccgcccgctcgctgctcgccttccgtcgcctgttgttccttgaggcacccgaactggagggcagtccgttgctcaaggagctttcccgcccagaggtgctgcaccacctgtactcccgtgcaccgtctcgctctctanacaacggacgtgatccactgccctgtcgccatgctcggccccctgggctgtctgacccccgagctgctgcaaaaccattaatgttattttctccgcgctggaggcctt

SEQ ID NO: 2616 - DNA, 495 bp, Chlorella sorokiniana
  unsure (1)..(495): unsure at all n locations; Clone ID: LIB3602-037-Q6-K1-G10
caacaccctcgagcccggcaagccgtttagcgaggtggtgtggggcgcgcggcggcgcggctacacggaacccgacccgcgggaagacttgtcaggcatggacgtgacgcgcaaggtgatcaacctggcgcgcgagtgcggcaacaagatcgagctgtcggcggttgatacagagtcgctggttccggaaccgctcaagaactcgccgtcaccccaggaattcatggactcgctgcaccagtttgacggtgacatggaggcgcggctgcgggaggcagatgagcacggcgaggtgctgcgatacgtgggcagctacgatgcagagagcggggtgtgccaggcccacgtgcggcgcttccccaagagccacccctttgccaacctgtctggaacggagaacatcatcgccttcacaacgctgcggtacagcaacccgccgctgatagtgcggnggccgggcgctgggcccgctgtgactgcggcaggcgtgtttgg

SEQ ID NO: 2617 - DNA, 332 bp, Chlorella sorokiniana
  Clone ID: LIB3602-037-Q6-K1-G11
gcacgatgcaggggctgatcagccgcggcgcctacactgcctgggtgcagcggcatgtagtgcaggcgcagtacgtcaaggatccgtaccgtctgccctagtacctggctgcctcgcagttacttgctgacatcaacaacgaggcgccatcccggtgcaacaagctgttccgcgagaacttgtcctcgatgcagtgactagcgctgttcctgtttgaggatgattacattgtgtggaccagcgagtcgtcacatgtggcttctactacggcaggcatatgatcaccatgaaggacaccgatctgtactcacataacaggcatagagctgggt

SEQ ID NO: 2618 - DNA, 115 bp, Chlorella sorokiniana
  Clone ID: LIB3602-037-Q6-K1-G12
cggggtgggttatttgtctcaacagggcgctcattctacagtaagtactggggccccaccctcaaagtttctggggggagaagatacctttgttggcaaaaaaacagagagggca

SEQ ID NO: 2619 - DNA, 430 bp, Chlorella sorokiniana
  unsure (1)..(430): unsure at all n locations; Clone ID: LIB3602-037-Q6-K1-G2
gcgagaccgaggactcgttcattggcgacctggctgtgggcctggccactggccagatcaagaccggcgcgccctgccgctccgagcgcctgtccaagtacaaccagctgctgcgcattgaggaggagctgggcgatgccnccgtgtacgccggcgagaactaccgccacatcgccatcgcctaagcgcttcagcgatgagcatccgctgggccgaggcagtgcagcccaggcactgctgctgccactgtgcaagccgcggaactttgccgggcctgagtgcacttgcggtgggcaccgagcaaacccaaacatgaggcacggcggggatgaccagcttctgctagccgcagattgagcagcccgcagcagccgccccgtcgtgcggcggtgcctgatccgtggacagtgcggggcgcattagcgctcgc

SEQ ID NO: 2620 - DNA, 462 bp, Chlorella sorokiniana
  Clone ID: LIB3602-037-Q6-K1-G3
cggaggaggagcctggacgcaatggtgcagggcggctacaagtaccaccagtaccaggtggtgggccgccatgtgcccaccgagaaggagccggagcccaccatctaccgcatgaagctgtgggccaccgacgccgtgcgcgccaagtccaagttctggtacttcctgcgcaagctgcgcaaggtgaagaaggccaacggccagatcctggccatcaacgagatctttgagcgcaaccccaccaccgtgaagaactacggcatctgggtgcgctaccagtctcgtaccggctaccacaacgcctacaaggagtaccgcaacaccaccctgaacggcgctgtggagcagatgtaccaggagatgggcagccggcaccgcgtgcgctccccctgattcagatcatcaagaccgccacgctcacggggtcccagtgcaagcgcgcgggcacgcagcagctgcacg

SEQ ID NO: 2621 - DNA, 274 bp, Chlorella sorokiniana
  Clone ID: LIB3602-037-Q6-K1-G4
gtgaggaggctgcggcagcggcagaggcagcagcagaggcagcgggcggggagggtggctctaaggatgagctgtgatgcagcagagcagtgaaaccctagtgctaccaccgtgccttgctcagcgatggtcttgacctgagcattcccactagccgaccctggatgccctacctgtcctgagattttattggcacctgcccttgcgcgtgcattgaagcttgaactttgaagttgcttgcagcgtggtgcatgtgtgtaagcgatgtgctgcg

SEQ ID NO: 2622 - DNA, 488 bp, Chlorella sorokiniana
  Clone ID: LIB3602-037-Q6-K1-G5
agttgccctttttgcaaaacgaaccttttccgccacgctgcctggcccggcctcgcgcgcggtacgatgcctgccgagggctcgccgcccattttgcatgactccctaggctgctggccagccacgcgcccccaagctgcacctgttttccctgtttcctgcccatctgtgtaccccttcagcccccctgccgacccgttttttcctgcccccatcctcacccaacccacaagccacgcggcccacaaacgcatttggttgcaccgccaccctctcagctgcccttcagagtaccatctgaaagctaagcataacgccaagccactgctcgctcctttcggatcgcccatttggttggttgtcggcccctcttccaatcggccccgcctcgacttgatcctcatcacgtccgcttttgtctgcactcctcaggggcgtgccaattgtgcgcgccgccgttgtatcctgccaactgtaacattaatgac

SEQ ID NO: 2623 - DNA, 419 bp, Chlorella sorokiniana
  Clone ID: LIB3602-037-Q6-K1-G7
ggccccgaccgcgccaagtggctgggccccttctccgagggctccgtcccctcctacctgaagggcgagttccccggtgactatggctgggacaccgccggcctgtctgccgaccccgagaccttcgcgcgctaccgcgagattgaggtcatccacgcccgctgggccatgctcggcgccctgggctgcctgacccccgagctgctgcagaacaacggcgccgctgacttcggcgaggcggccgtctggttcaaagccggcgcttcgatcttcaacgaggacggcctgaactacctgggcaacccctccctgatccacgcccagtccatcgtggctgtgctgctgacccagctggtgatcatgggcgccgccgaggcgtaccgctacagcggcgagggccccgtggagaccagcggcga

SEQ ID NO: 2624 - DNA, 385 bp, Chlorella sorokiniana
  Clone ID: LIB3602-037-Q6-K1-G8
gagaacaagggcaagtggatcaacccgctgattgggtggaccagcaccgccgacccgctggagaacgtggcgcgccagctgtacttccccaccaaggaggacgccatcgcttttgcggagaagaacgggttcacatacgaggtgcaggagtaccacaacccctcgggccagcggccaaagcgcttcctgggctatggagacaacttctccgtgaagcgcaagggcctgcccaccggcggcctgcggtcggagcagaagaagtgaggcggcttcggcgttcgctgggctggccgcacagcagccctgcgtctacaccgccccttgcggacagggcatgtgtgaccccgcgccagctcaactgcctttgcttgcatgcaccccgact

SEQ ID NO: 2625 - DNA, 392 bp, Chlorella sorokiniana
  Clone ID: LIB3602-037-Q6-K1-G9
gtttttcaatgaatgaattggacccattggtgctgattgtttaggctttgcccgctacctttattccatcccgttttcccctcgcccctttgcaagggggcgtaccacactcctcccccctccagctcactgtatcagcttccctgctcagcctccttggcagcgctgtgcccccacagcagcgggccgcccctccatccgcgggctcgtcgtaccaccgctagcatttgatgcaacccaatctgcaatagattgaggcaggcaccagggctgtgcctgcccccctcgggctgaccaccctgctcgttgcgcaccatatccttccctggtcttcaagagtttgagcgacaccaccatccacttgtgtgtacacatgtaaggcagagtggaac

SEQ ID NO: 2626 - DNA, 318 bp, Chlorella sorokiniana
  Clone ID: LIB3602-037-Q6-K1-H1
caaccatcagccgtcgcaccgtgatacccccgttgcaccaatcctccccgccagagagcgcgctgctctcacgcccacatttcaagctaacacttgaccctgcactttttgccgcccataatcccctccgtcaatgaaacgaatgttatactgcccttctgcacccttcattttgcgcactggcacagttttgccctgatgctctcaattcgcgagcgcttcgatccgtctgtcctttgttccgtgtgagtgttccttttttccccgctcctcctaccatgtgtattcttgggtcatatgttgtaacatagagttttc

SEQ ID NO: 2627 - DNA, 91 bp, Chlorella sorokiniana
  Clone ID: LIB3602-037-Q6-K1-H10
aaaaaaaaaaaaaaaaaaaaaaaaaaaaaaaaaaaaaaaaaaaaaaaaaaaaaaagaaaaaaaaaaaaaaagaaaaaaaaaaaaaaaaagg

SEQ ID NO: 2628 - DNA, 435 bp, Chlorella sorokiniana
  unsure (1)..(435): unsure at all n locations; Clone ID: LIB3602-037-Q6-K1-H11
gctgaattgnacgcatggtgcggnacggacttctctgcgtcccttcatacctttgtacctttctggggcagggtgcagcaatggcatccggctgcatttttttaacactgacaccggcccactcgtttgtgcttttctcaccggggggcaacgtcacccttcatcaaccctcacccaacccatcctactgttacccattcacttacctttccttcttcacaacctcatccacccacttaccatccatcacccgctctacgtcctccatgcaccattctccccatccatcaaatctgccatcccaaacccacatccgtcgtggaccatctgccgccccttacccctacccatttttcacccgactcttttctgtcgctcaccgtcaaacattctaccttccacactcaatccatgtccacccttaccccggcttta

SEQ ID NO: 2629 - DNA, 489 bp, Chlorella sorokiniana
  unsure (1)..(489): unsure at all n locations; Clone ID: LIB3602-037-Q6-K1-H12
gcgtccgcaagtttgtgctgctggtgaacaagcaggggcagacgcggctggcaaagtacacagacagcagcctgaccacagatgagcggcgggcgctggaggcggagatcgtgcgcaagtgcctgacccgtgtggacaatcanttcaactgtgtggagcaccgcagctggaaggtggtgtaccgacgatatgcctccctgttcttcctagtgggcatcgatgatgaggagaacgagctgggcatcctggagatgatccactgcgtggtggagacgctggacaagtggttctccaacgtgtgcgagctggacatcatgttcagcctggagaccacccaccacatcatcgatgaaatgattgccaatggctgcatcgtggagaccaacaaggccaacgccctgacacctgtgcagctgctggagcgtgtgtcgtagcagcggcgtcaatgggcaccaagcccactggtgcaccccatgcctactcctgatt

SEQ ID NO: 2630 - DNA, 425 bp, Chlorella sorokiniana
  Clone ID: LIB3602-037-Q6-K1-H2
atcgacatcagcaagcagggcctgaactccatccagaatgagaccgtgaagctcaacctgatgggcaagtccaagaccatggagagcaaggactgggtggacccccagggccgcaagggcaagggctacggcgtgtaccgcttcgccaacaagtacggcgccaacgtggacggctacagcccgatctacacccccgacacctggtccgagtctggcgactcttacaagctgggcaccaagggccttattgcttgggccggcctgattgtggtgctgctgggcgtgggcatcaacctggtgatcttcacctttgccctgggccaataaatggcgacgccccccgcgtcggcagcagcagcagcagccagcagcattcccttgcagctaccccccgagaagacaaacccttaccctaccctagctgg

SEQ ID NO: 2631 - DNA, 390 bp, Chlorella sorokiniana
  Clone ID: LIB3602-037-Q6-K1-H3
ggcggcgcagctggaggcggcacaagctgccgccgcccgatcctgcgcatacctgcgatgcgccaacctgggcggcggcggcgggccggcggcgggccagggtagcgtcagcagcaagtgcagcgcctgccgggtggcttggtactgtggggaggggtgcagccacgcagactggcgcggccccacaggccaccgcaagacgtgcaaggcgctgggggcagcaaaggcggcacggcggcaggcagcagccgaggcggcggcgatcgaggcggcagcggcaggggcaacgactggaatccagagcaccgttagcctctaatgctgttatagatctgcaacattggaatcctgagtgatttggatgcctcaaactgtcacaatctccacctc

SEQ ID NO: 2632 - DNA, 432 bp, Chlorella sorokiniana
  Clone ID: LIB3602-037-Q6-K1-H5
aaaaaaaaaaataaaaaaaaaaaaaaaaaaaaaaaaaaaaaaaaaaaaaaaaaaaaaaaaaaaaaaaaaaaaaagggggggagatttaaggggttaaaggttgagtgcgctttgttggaaccaaattaatttttttttggtgtaccttagaggggtttaatagggggggggttttttattcattgtttttgggaataccttgcgggtaccccacttaattacctttgcgtaaacccccttttttccatttgggttaattcccttttggccccgcccgtttggcctttccaaggcttgccccatttgatttgccaatgggaacccccctttggcgggcgttttaaccccgccatttagggggttattaagaggtggacccgtgcactttccccgcatctaaaccccgcccctttccgtttctttctttccttt

SEQ ID NO: 2633 - DNA, 456 bp, Chlorella sorokiniana
  unsure (1)..(456): unsure at all n locations; Clone ID: LIB3602-037-Q6-K1-H7
ggcagccccagccccgcagtcgcagcctttgctctcgaccacctgaacgatgtgctggtgaacggtgtcggcctggcaggcgcggtgctgggcgccaaagtggctcccttttgggaccccgccatcgccattgcnctgtccctctgggtcgtgtgggcctggggcggccaggcacaggagcacctgctcaacttggtgggcagatcggcaccgcccgacttgctgcagcgcctcacgtaccttgccttctatcacgacgagcgcgtgcagaagattgacaccgtgcgggccttcacgctgggcagcagctacattgcggaggtggacattgtgctggacccgctcatgacggttcgagaagctcacgacattggcgagtcgctgcaggtcaagctggaattgctggccgaggtctctccgagcatatgtgcaacatgaactaccgaatttcacgcc

SEQ ID NO: 2634 - DNA, 358 bp, Chlorella sorokiniana
  Clone ID: LIB3602-037-Q6-K1-H8
caggcagcgggtgcgcgagatcctcatctgctactgcatccttctggattcccagaagccgctcactgccagtgagctggacgccgcctgcgagcgcttcctggccgcccagtttggctgcaagatcgacttctgctgcgaggaggcgctgccggccatcctgaagtggggcctggccgccgaagacaaggccggcggcctgaccgcggtgccactgcccaaggcgctgcagcggctggacgacgtgtttgacaacatctactcgttctcgggttccgccaagaacatcctcgccaaagcagcctctggaacagactcctcggccacggccgcagcagtgggcgaggcgggcggcgcc

SEQ ID NO: 2635 - DNA, 466 bp, Chlorella sorokiniana
  unsure (1)..(466): unsure at all n locations; Clone ID: LIB3602-037-Q6-K1-H9
cagctatagccggacgcgcagcgacgtggagtttagccagtacatgcgggacaacgggtaccacatcatccccatcgcagccaagcaccagctggagtacggctgcaactgcctcaacctgggcaacgagcgcatcatcagcgtgcacatggagacggcgcgccagattgtgcaggacccgcacttctttggagacgtgcagtgcatcgactacagccccatcacatccatgtacggagctgtgcactgctcctcccaggtcgtcaagcgtgtgccccgccgcttctgagcgcccccaagtcgggcagccagcggacggcacgtcagcgatgctgcatgtgcacagttggatctagagcttggcgtggcggcttgctctctcctgctctatttgatgctgctccttctctaaacgctgccccattcttttgcaatcacataaatcgaggtgtaaattcaaccgncg

SEQ ID NO: 2636 - DNA, 321 bp, Chlorella sorokiniana
  Clone ID: LIB3602-040-Q6-K1-A1
gcagcggccaagcttgcacggcaaccgagctgccccagccagctgcagccaaattgcaaggctggctcagcgcatcagggcacaactgctgccgtgccgcccttcgctgctgtgcttgcagtacgttgccatgtaccatatcagttgactgcatcctgtgcagcagcagtcctgtacaggaaatcgctatgctttgtgggctcgtgctaatttgagccggcctggctaccagttgctacccacttgcctctgcttcctgctcatgttttgttgcccctctatgcttctgttagctgctcataatgtaagccttacagaacg

SEQ ID NO: 2637 - DNA, 386 bp, Chlorella sorokiniana
  Clone ID: LIB3602-040-Q6-K1-A10
ggcgtgtacaagaacgaggagatcccccgcgtgcccattgtgtgcacgggtaacgatttctcgaccctgtacgctcccctgatccgcgatggccgcatggagaagttctactggaaccccacccgcgaggaccgcatcggcgtgtgcacgggcatcttccagcacgacaacgtgaaccgcgcggacgtggagacgctggtggacgccttccccggccagtccatcgacttcttcggcgcgctgcgtgcccgcgtctacgacgacaaggtccgcgagtggatcggcggcattggcgtggagaacatgggcaagcggctggtgaacagcaaggagggcaaggttgagtttgacaagcccggcatgcccctggccaccctcatgcacta

SEQ ID NO: 2638 - DNA, 387 bp, Chlorella sorokiniana
  Clone ID: LIB3602-040-Q6-K1-A11
cggacgcgtgggcggacgcgtgggcggacgcgtgggcgccgctcagcgagcgcgagcgatccgtcttcaagctcttcatctgagttttggaggcacaaacagtctagttgcagttgcacacagaacgccgtacaatgttgtgcatgcacgcctaccatgcctgctgttgcgccgcacgttgccacagcacggcagttgctcagtgtttgatggccggcgcgccccaccggcggcagcttgacagctgccccgcactcctgagtgccacaatgttcatgtgaacttttgagcaaacccccctgattggcctccaagccggttctcatggcatgcttgcctgccaaaacccagcaaaccctcttcccttgctcctacgtgcacatacat

SEQ ID NO: 2639 - DNA, 445 bp, Chlorella sorokiniana
  Clone ID: LIB3602-040-Q6-K1-A12
gagcgaccgtaggatcacggtcaaggagagctggcgccggcccaagggtattgactcgcgtgtgcgccggaagttcaagggatgcggcatcatcatgcccaacattggctacggcaccaacaagaagacccgccacgtgctgcccaacggcttcctcaagtttgtggtgaacaacgtgaaggaccttgagctgctgctgatgcacaaccgcaagtactgcgccgagatcgcgcacaacgtgtccaccctcaagcgcaaggcgattgtggagcgcgcggcggagctgaacattgccctgaccaacggcaacagccggctgcgcagccaggaggacgagtaagctgctcgcccccctgcgtcaccagcagcggcgccagtacctttggagcatagcagcggcttaacattggggggctactgcttcccatgtaaggcaaccccattc

SEQ ID NO: 2640 - DNA, 302 bp, Chlorella sorokiniana
  unsure (1)..(302): unsure at all n locations; Clone ID: LIB3602-040-Q6-K1-A2
gngcttctttgccgagaagaccgagaaggcgccgctgcccgctgagtatgtggccaaccagaaggcggtggacgcggcgctgctgggcaagctgagcgacgagctcaagggctacctgtccagccgcttcacgctgcgctctggcgaccggccgcacctcatgaagttctgaggtgccagcctggcagctcgctcgcccagcaagcggcccggcggccgggcttgcttggcggcagcccgcgcggcacgcggcgggtccgtagtgcacggcccgacgagcgctgtgcggcggcggcatggcg

SEQ ID NO: 2641 - DNA, 432 bp, Chlorella sorokiniana
  unsure (1)..(432): unsure at all n locations; Clone ID: LIB3602-040-Q6-K1-A3
aaggtcaacaagcagcgcatcccgctcaccgacaactcggtgatcgagcaggtgctgggcgacaaggacatcatctgcgtggaggacctggtgcacgagatcttcaccgtgggccccaacttcaagcaggccaacaacttcctgtggcccttcaagctgtcctcccccaagggcggcatcgacaagaagcgcctgcactacatcgagggcggccaggccggcaaccgccaggagtacatcaacaacctggtgcgcgccatgaactgagcgctgagccggcgagcacagcgcagcgcgcgcagcacgcacagcgcggcgcgtgcagcagcctgnacggagcggccccctgatgccttgctagccacgcacttgtnngccggccagtcgtgaggccccgagcgcacccgaatgtccaaggagtgcacggggggc

SEQ ID NO: 2642 - DNA, 435 bp, Chlorella sorokiniana
  Clone ID: LIB3602-040-Q6-K1-A5
gtcaagaagaacaacgtcaacgtggcggcgctcacgcagtctgagatccgcgacatcatcctgggcgcggagatcacgccgcccagccagcagcggcagcagattgcggagattgagaagcaggcgcgggagagcgggcagatgacggcggtcaccaccaagaccacaaacgtgcacggagacgacctcatcgtcaccaccaccagcccatacgagcaggccgcatttggcagcaagacggactggcgcgtgcgtgccatctccgccgccaacctgcacctgcgcgtcaaccacatctacgtcaactcggacgacatccgggacagcggctacacgtacgtgatgcccaagaacctgctgaagaagttcatcaccgtggccgacctgcgcacccagattgcgggcctgctgtacggcgtcagcccgcccgacaac

SEQ ID NO: 2643 - DNA, 422 bp, Chlorella sorokiniana
  Clone ID: LIB3602-040-Q6-K1-A6
cgctgttcatccccggcggccacggcatctgctttgacggcaccagcaacgagatgaagctgctggtagagacgttctgggcaaatggcaaggtcgtttcagctgtctgccacgggcctgcggccctgaccacagctgttggccccgacaaccagtccatcattaagggccggcaggtggctggcttcagcaaccacgaggaggaagctgtgggcaagaccaaggcggtgcccttcctgctggaggacaagctgaaggagctgggcggcgactacgtggtgggccccgactggcagcctctggcagtggcgtcgggcaagctgatcacggggcagaaccccggctcctccaagcgcgtggccgagctggtgatcgaggcggtggcccccggccctaaagagccggtgcacgggaagggagcc

SEQ ID NO: 2644 - DNA, 454 bp, Chlorella sorokiniana
  Clone ID: LIB3602-040-Q6-K1-A7
cacacctgccttccccgcgaggcgctgtgttcgctgccgatcgaactatggggtggtgggcggcaagtgtgccctggtcgttggcaccacaagcgccattattgccaattgccgcgcggcgtccatgaatgctgcctgcgttgagtgccacccggacgccacctgcaagcggtgccaccccacaatcaacacgttcctgtcccctacaaacacggtctggttggatgctggctacccagagactcagtgcacaaccagggacgccatcgcaaagcaagctaaagccatcgctggcgtggacctgctggcagtaaacgccatgtcgcctttctgccgcgagcttgacacagacttccgctgcgctgcgtgtgcttactggacgcccagtgtggcgcgcggctacggccctgtccctacgtcagacccaaataaaatcgactgccagcccaatgat

SEQ ID NO: 2645 - DNA, 438 bp, Chlorella sorokiniana
  Clone ID: LIB3602-040-Q6-K1-A9
ggcgattcaggaccagattgccaagcttgagaagcggcacgcggtgcacattgcggcgtacggcgagggcaacgagcgccgcctgaccggcaagcacgagacgagcagcatccacgacttcagctggggcgtggccaaccgcggctgctccatccgcgtgggccgcatggtgcccgtggagaagtgcggctactacgaggaccgccgccccgcctccaacctggacccctatgtggtcacccgcctgatttgcgaatcagcgctgctcatgtaaagaggaggcaacggccacctctgactggccggcccggcttgacgcggcggcagcggctgaattggccccgccgctgcggcaccggtgcccgcctgcgacgccagctagccaagaaggcgtcgacttcaacaaatgaagtctggcttgccgggccaccccggcgc

SEQ ID NO: 2646 - DNA, 380 bp, Chlorella sorokiniana
  unsure (1)..(380): unsure at all n locations; Clone ID: LIB3602-040-Q6-K1-B1
catcgccagcgtgacggaagccattgccaggggcagccgcgacgtcacagaggagcttctggagcacatgtcgccagaccagcggcgtcagctgatcaagctgcagcaggaggcactggcgcttggtgcggaaatgctgggcaaggcggcccccggccccggcgctcccacagacggagtggagcagcaaccagggcggtgaacgcctgtggtgacgcagcagccagcccgctctgcgatgtgtagtttcaacaatcaacacaggaggaatggattgtaaacttgacgtgccnnanaaaaaaagaaaaaaaaaaaaaaaaaacaacaacaacaaaaacctaaaaaaaaaaaaaaaaaannnggcctaaaaaccaaaccct

SEQ ID NO: 2647 - DNA, 311 bp, Chlorella sorokiniana
  Clone ID: LIB3602-040-Q6-K1-B10
agctcaacccctacgccaaggtggcgcgccgcgccgagctgctggccgcgcagaagggcgccaagtcggccaaggtggaggcggcccgcaaggccaaggccgccgcgcgccccgcggtgaagaaggtgtccaaggccttctacagcaccatgatcaccgactcggactacgtgggcgaggactacgaggtgttcagcagctggctgggcaccacccagtgagcgccccggccggagtagctccccaaaggaggcgagcgcggcgcggcggcgccgcccgccgcgggcggcggagggtcaccggcccgcggc

SEQ ID NO: 2648 - DNA, 407 bp, Chlorella sorokiniana
  unsure (1)..(407): unsure at all n locations; Clone ID: LIB3602-040-Q6-K1-B11
tggacatccatgaggaggtcgagcagaatgcgcagctgcgtgtgcttcatgagcacagcgagaagtttgacctgcgggcggagggcgtgttcaagtacctgcagatcttcaccgccatggccaacagctttgggcacggctgcaataacgtgagcaatgccgtgggcccgctggcagccatctacggcgtgtggctctactcttctgtgtcggaggagtcccaagtgcccgtctggatcctggtgctgggcggcgcgggctttgtggttgggctggccacctttggctacaagatcatgagcgtgctgggcgtgaagatgacgcgcctgacctccagccgcggctttgttgtggagttcagcacttncatcatcatcctcactgccacccgctttggcttgccctgt

SEQ ID NO: 2649 - DNA, 200 bp, Chlorella sorokiniana
  Clone ID: LIB3602-040-Q6-K1-B12
tttgtttcgtacaccttactgtgttaaccttcagccctgcttgcctgacaccgtttcatgccgttctcagctcacttcctttctgctgaaatttgcatggcgtgcgcagttgcatccgattgcacaagtctctgttgccaagcagcgcagttgcccgtctgcaatttcctgctcgccatttgtgtaacatatgtcggcca

SEQ ID NO: 2650 - DNA, 480 bp, Chlorella sorokiniana
  Clone ID: LIB3602-040-Q6-K1-B2
ctgctattaccctgctcttcatgcctgcctgcccgccgcccccagccaatgcctttcttgccgtggcgggcagcgcagcccacccagccccctcttttgcctcccaatctgattgattgactgcttactttgctgtgcgctgcacgccccacacgaatgccccgcctgaagcaatgagccccaacctgcacccgactctgacttgcgcaagcacccgctgcacgcccccaactccggcgcctgcctgcctgccaccctgtactgacccctgcttgtgcccccgcctccaacgaccgtctgctttttttcagctcctgagccgtctcagctgccatgccattatagcactcgtttgccccagctcctgtgccgtctcagctgccgagccactctagcactcgtttgccccaccccgaccttgcgtcggccccctagcctccctgtgccggtatcgtagtgggccactcaccctgccgcggg

SEQ ID NO: 2651 - DNA, 449 bp, Chlorella sorokiniana
  Clone ID: LIB3602-040-Q6-K1-B3
tgcctggctggccgacgagcgcagccaaagccttaattgccggggcgggcagggcagcccacccagccccttcttttgtctaccaatctgattgatagactgcttactttgctgagcgctgaacgccccacacgaatgccccgcctgaagcaatgagccccaacctgcaccggactatgacttgcgcaagcacccgctgcacgcgcccaactccggcgcctgcctgcctgccaccctgtactgacctgtggtcgtgcccacgtctgcaacgaccgcttgctttttttcagctcctgagccggctcaactgccatgccattatagcactcgtttgccccagctcctgtgccgtctcaactgccgagccactctagcactcgtttgccccaccccgaccttgcgtaggcccctagccttcctgtggcggtatcgtaatgggacactcaccc

SEQ ID NO: 2652 - DNA, 286 bp, Chlorella sorokiniana
  unsure (1)..(286): unsure at all n locations; Clone ID: LIB3602-040-Q6-K1-B4
aaaaaaaaaaaaaaaaaaaaaaaaaaaaaaaaaaaaaaaaaaaaaaaaaaaaaaaaaaaaaaaaaaaaaaaaaaataaaaaaaaaaaaaaaatggaaaaaaattttggggntataatttttatggtccttttgtttggggcgggtgatttggaatgttgtggtttttttatagggtttgtttaggtgaatttttgtggttgtggttttggaaaaatttttgggggaaaccttttttttaaccttgtttattacccttttttcccctttcgctttattagccttggg

SEQ ID NO: 2653 - DNA, 417 bp, Chlorella sorokiniana
  Clone ID: LIB3602-040-Q6-K1-B5
gactgagccactgctgcaaaggatgccagcaggcagccagttggaccgcttcggcatggctcgactcaggctgggcacatgcctggcccgcccctctgcgctgctgccctccaacagtgagcagccattggtcgacagcgcaacctggatgattggtgggatgtgcctccaggtcagcagccagccttcttccgccgggcgccctactcctgttgatgcaccgtctgccgcgtgcaattcgccggcaacaacgaatgagaccccgcccagggcgtctacaaccttgttcgtgcgccacacaactgcgccacacaactgcgccacacaacgtggccccccactgttcttttgttccccacatgttggtctctttcatacccagctttcgaagcccacgttcggttgcttccagcgcac

SEQ ID NO: 2654 - DNA, 285 bp, Chlorella sorokiniana
  Clone ID: LIB3602-040-Q6-K1-B6
gggatgctcaaacttacatgtgtgcaaacaaattggtgttcaaaaatccaggggtttgttggctgcacaaatcggatgggaagggcggagggaaccggaaaggcgtgccgcgaaaaccacccctggaaaaggaaggcaagtcttttggggctgggtggacaaatgagcacagcagatcaggagtggggaccactttttatcgcaggtttgatgaggggctcggatgaatatcggtggcaaaaacggacgttcattgggtgagggaaaggcccacgcagggaaaac

SEQ ID NO: 2655 - DNA, 402 bp, Chlorella sorokiniana
  Clone ID: LIB3602-040-Q6-K1-B7
ggccacccccacccccagcgtcagccgcagcgagcggcagcagtcgggcggggtggcggcgctaccgccgctggcgccccggcgcagcgaggatgttgctcggccctccggcggcagcggcaccctgctcaccaccgcccgtgtgctggccacacgctcgtgctctgagagcttggccctgcccacctctgcggcagcacagctggcgcagcagctgcaggagtggcgatcgactgcaacatcggccagcgagaccgctgccacccggctcagccagcagcagcagcagcagcactcagggcagcagcagcagccgccgccgccgccgcagccctcgacacgtggcagcagcgggggcgtagagccggagcctgtgcggcacagcatctgaaccctaagcgc

SEQ ID NO: 2656 - DNA, 298 bp, Chlorella sorokiniana
  Clone ID: LIB3602-040-Q6-K1-B8
gggcgagcaacaggcaaccatgccgtcccagaagcgcttcgccatcaagaagaagctggccaagaaggccaagcagaaccggcccatccctccttggatccggttccgcaccaacaacaccatccgctacaacgccaagcgccgccactggcgccgcaccaagctgggcatctaagcgcctcccacgaggagcagctgacggcagcagccccggcacggcaggcagtgcgctggccgcgcttgcaaggcagcccgtcagtggcatgatgacagcttaagcttgtaacgatggcctagc

SEQ ID NO: 2657 - DNA, 417 bp, Chlorella sorokiniana
  Clone ID: LIB3602-040-Q6-K1-B9
aaaaaaaaaaaaaaaaaaaaaaaaaaaaaaaaaaaaaaaaaaaaaaaaaaaaaaaaaaaaaaaaaagggggcggccgataaaaaagagggcgacctttattaacagcaccaaactaacaaaaacgggctggcctttttaaaggctccattttaacgtccgcccgattcaaaccaatggccttttttttaaaaccccttaaatgaaataacttggccgctttttaaaaaaaacggctttggaaaaccccctgctttcccaaatttaatgacctgagagcagttccccttttttccgcttgcctaattacaaaagagccccaccccgtaccgcctcccaaactgttgcccaacttaaatggccaagggaacgccccttttacctagccataaccctacgggggggtggtggttaccccc

SEQ ID NO: 2658 - DNA, 464 bp, Chlorella sorokiniana
  unsure (1)..(464): unsure at all n locations; Clone ID: LIB3602-040-Q6-K1-C1
cacccttcatcaaccctcacccaacccatccacctgccacccatccactcaccttccctccgccacaacctctgccacccactcaccacccatcacccgctcaacgccctccatgcaccatcctccccatccaccaaatctgccaccccaaacgcacgtccgccgctgcaccacctgccgccccctcacccgcacccatcttccacccgccacctttcctgccgctcaccgccgcacatcctacctcccacacctcactccatgtccacccttcacccgcgcttcacacagcggctgctgccatgcaaagctgctgccaaacccatccatcatgctcgcacacccactcacccacacgtncaacgtatccagacccattttcaaggcccgactgtacagtgcctttttgcgtccttatgccgatctggtaccaggacttaatgtgtaacaaatggtattgttat

SEQ ID NO: 2659 - DNA, 403 bp, Chlorella sorokiniana
  Clone ID: LIB3602-040-Q6-K1-C10
gcaaagcgtgtacgacaaggtgtttgattacctggagatgaacgaccggatagagatcctcaactcgcggctgcaggtgctgcacgagctgctggacatgctgcggctgcagggccaggcgcagcacagcgacttcctggagatcatcatcatcctgctcatctgcgtggactgcctaatcttgctcttcacgctggcggcgctgctgggctgggtggggcccggcggtggcagcatacacaaccagctggcgggcacgcgctggggcgcctcgctggcagccctgctgggcggcggtagctgagctttgcggggtgcagggagcaccacatgcccctgcgcccatctggcggtctcacatgatacaatgacactagcaagcactgcatgccccatgacacca

SEQ ID NO: 2660 - DNA, 202 bp, Chlorella sorokiniana
  Clone ID: LIB3602-040-Q6-K1-C11
aaaaaaaaaaaaaaaaaaaaaaaaaaaaaaaaaaaaaaaaaaaaaaaaaaaaaaaaaaaaaaaaaaaaaaaagaaaaaaaaaaaaaaaaaaaaaaaaaaaaaaaaaaaaaaatggggggggcggttttaaagaaccaaagttaattaccgggggcttgaaagttaaaatttttttaatggggccccaaaaataaattaaagg

SEQ ID NO: 2661 - DNA, 326 bp, Chlorella sorokiniana
  unsure (1)..(326): unsure at all n locations; Clone ID: LIB3602-040-Q6-K1-C12
attagcgccccccccccctagcacccagtgcctgtcgatgtgcctcctttttccaagggccaccccctgccattctaacactcaccagcttgcgtatcccctgtccccggtttataaaagcgcactgacttcctaccctcggtatatgtgccccccctcaccccctcttttgccaccccctcttttgcgtccacccctgccaatgaagcggacatgctgcctccctctctccctgacccccgacggtgccagcatcccgctcgagccgttttccactctttgtgctacaccagcatgcgttgacttggtaacaatcactgctnagg

SEQ ID NO: 2662 - DNA, 449 bp, Chlorella sorokiniana
  Clone ID: LIB3602-040-Q6-K1-C2
agaagctggaggagaagtaccgcattgccaacaactgagcaggaccatgacgacgtcctgcagtactaggcactgcaccattgttttggcacccccagccgccaaacccaagcctcagcgcgtgccattgcagcagcggcggcggcccgcctgctgaccgctgcgcgcgattgtcttgttcaccgcccgctgagcagccattccttgacgcctgtgtcattttgtcccctcacccataaacatgcccgagaattgaactgccccgccgctatcacagcctgtccctcttctccccgatttcatcgccccacgccgcgccgtgggcgagttttccgatgccctttgcctttcatgctaccacatccgccactggcagccctacctatatgaatgacgccggtccgtcctactgtacaacatgccgcaacatcccgtgtaaccaggcatgc

SEQ ID NO: 2663 - DNA, 417 bp, Chlorella sorokiniana
  Clone ID: LIB3602-040-Q6-K1-C3
cggacgcgtggggaagaaggaggttgcctactcgtccgctgcgctggcaggcgtgctgggggcgctgtgcctgtggcgcggcttccgcaacaacgatgacgatgccaaggagctgtgagcttcaacacaatttctgacaccttttgtgtttgatgcgttgcacaactgatgggaacaatgagcaggacgcccaggcatgtggagacgggggctaaagggcagttgggggatgccgagctgcagcaggaggcagctggcggacagcaaacagcctgactctgaatgatttttgtgcacagcagggacgaggcgcttgtgcatcgccctgccctggcacacgctcctgacgcccttttggctttgatccgttgcatagcgcaaattcgactaagcgtgctgtactgtaatcgtatggac

SEQ ID NO: 2664 - DNA, 394 bp, Chlorella sorokiniana
  Clone ID: LIB3602-040-Q6-K1-C4
cggacgcgtgggcagatcacgggagacagggtgtacagcaagctcaagtacgagtctggcgtgcaccgcgtgcagcgggtgcctgccaccgagacgagcgggcgggtgcacacctccaccgccaccgtggcaatcatgcctgaggtggacgatgtggatgtgaagattgaccccaaggacattgagctgaccacagcacgggccagcggcgcgggcggccagaatgtgaacaaggtggagacggcggtggatctcatgcacaagcccacgggcatccgcatcttctgccaggaggagcggacgcaagggcggaaccgcgagcgcgccatgacgctgctccgcgccaagctgttcgaattggaacttgagaagcagcgcagcgagatttcggcac

SEQ ID NO: 2665 - DNA, 183 bp, Chlorella sorokiniana
  Clone ID: LIB3602-040-Q6-K1-C5
aagtgcagggtgtgcctgccacccaaactagcggacattttcacacttccaccgccaccgcagcaatcatgcctgatgtggacgatgtggatgcgaatattgaccccaaggacattaatcttaccacataacgtgccagcgtttctgacggtcataatgtgaggcggtggcagcatacacaac

SEQ ID NO: 2666 - DNA, 394 bp, Chlorella sorokiniana
  Clone ID: LIB3602-040-Q6-K1-C7
aaaaaaaaaaaaaaaaaaaaaaaaaaaaaaaaaaaaaaaaaaaaaaaaaaaaaaaaaaaaaaaaaaaaaaaaaaaaaaaaaaaaaaaaaaaaaaaaaaaaaaaaaaataaataaaaaaaaaataaaaatacagggggggggcccttttaaaaaaccaaattttacttccccttacttgcaagacattaatttttttttatgttccccaaaataaatttacttgccctcattttaaaacattctaacttggaaaaccccttggtttccccactttaatcgctttgaaaaaaatccctttttccctacttggcttataacaaaaaaagccataatgattgccctttcaaaaaatttccctaccttaaatgcaaaaggaaaccccccttttaactgt

SEQ ID NO: 2667 - DNA, 115 bp, Chlorella sorokiniana
  Clone ID: LIB3602-040-Q6-K1-C8
ggcggccgctcgcgatctagaactagtcaaaaaaaaaaaaaaaaaaaaaaaaaaaaaaaaataggcactgaaaaaaaaaaaaaaaaaaaaaaaaaaaaaaaaaaaaaaaacaacg

SEQ ID NO: 2668 - DNA, 461 bp, Chlorella sorokiniana
  Clone ID: LIB3602-040-Q6-K1-C9
cggacgcgtgggcggacgcgtccgtgcggcttcctgcctgctgtgcacccggctccccataagcatccccaccacaaaccccaccccgccatccacatcacacccctgcttgcatcgcacctctccccatctaatacacccctcgtgcctgcccttgccccatgccatgcggtatcgtgcggtgcctgtgcccagtggtttatttctgtcaaccgattccttcctgccttattgcggctccttccttccttcagtgggccctgcctttgatgagagcggccatgcctgccgcccctcctgcccgccccgtccctccatctcacagcccaaccccccaacgaatgaaacctgcaacgctcgtgcgttgttgcttttccaagcccgccgggggcaccccctccccacccggcagcctcaatctagctcaaccgcaactagccatgccccaacacatgtgccct

SEQ ID NO: 2669 - DNA, 404 bp, Chlorella sorokiniana
  Clone ID: LIB3602-040-Q6-K1-D1
gcagcaggcagcggcgctccgacggcgctcaaggcggcggcggcagcgacaaaagggggcggccggacgagcacggaggagtctgaccagattgaggccgtgtttgctgctgcctgagtggctgctggttgcggcagcctgcaagacccctcgtggccttactgatacgctgtgtttcagagcgcaaccctgtcacccatcagtcccatatctgtactgaccctattttgcaattgtttccctatcgctccctcctacctggccccaccctgtcgcacctgcccgtgcctgtacactgcccaccccccctgcagcctactcgtgctgcagcacctgtatacccgccactcctcttcttgctctttacctttaccattttggccattttgtaacaagagagcagt

SEQ ID NO: 2670 - DNA, 67 bp, Chlorella sorokiniana
  Clone ID: LIB3602-040-Q6-K1-D10
aaaaaaaaaaaaaaaaaaaaaaaaaaaaaaaaaaaaaaaaaaaaaaaaaaaaaaaaaaaaaaaaagg

SEQ ID NO: 2671 - DNA, 484 bp, Chlorella sorokiniana
  Clone ID: LIB3602-040-Q6-K1-D11
gcgcaacatgctgctcaagaagttcttcattgcctactggcggaaccccaactacaatgctgtgcggttcttcatgactacctgcatcggcctcatcctgggcctggtgtacctggaccagggcaacctgggggatggcgagaccagcatcagcacggtgcaaaacatcatgggcctgaccttcacgctcacaatcttccagggcatgttcaattgcatgacggtgcagccggtcatggctgccgagcgcacggtgttctaccgcgagcgcgccgccagctactacagcgctgtgccgtataccatggcaacgggtgtggtggagctgccatacctggcagtgcaagccgtcctcatggtcctcgtcaccacctactggatggttggctacgaaatcgttgcgtggaagatcgtgctgtacaccatcctctacttcttctccctcaccatgttcacctactttgggcagctgctcacgtttgcg

SEQ ID NO: 2672 - DNA, 414 bp, Chlorella sorokiniana
  Clone ID: LIB3602-040-Q6-K1-D12
acctggagaagcagtttgtgcagtcctggctgctgtgagccgctgctgtagcctgctggcgggcaacggcagctgcgctgcgcggctctgccgccccgcctgccgccccggcccccggccaaccaccgcccccaccaccacctgtcacccgccctgtatggcctctagactttgagcgtgagctgcccctgccacttctgcttcctgtgtgcaccccgcgtgtggcatgatgatactatggatcccctccaaatcgacttgcgaatgcactcgccccgctcttgttcactgccaccccttggcagcatccccttgtaccctcctccctgttctccggtttgaaccaactcgcctgcctgtgccaaacgaccccctcggccggatctttattcgcccccacctttttgcgctcac

SEQ ID NO: 2673 - DNA, 85 bp, Chlorella sorokiniana
  Clone ID: LIB3602-040-Q6-K1-D2
aaaaaaaaaaaaaaaaaaaaaaaaagaactaaaagaaaaaaaaaaaaaaaaaaaaaaaagacaatacaaaaaaacaaaagaggag

SEQ ID NO: 2674 - DNA, 486 bp, Chlorella sorokiniana
  Clone ID: LIB3602-040-Q6-K1-D3
gcgacctggaccgcagcatcaagttctacacagaggtgctgggcatgaagctgctgcgcacgcgggacaaccccgagtacaagtacaccctggccttcctgggctatgggcccgaggagtcgagcaccgtgtttgagctgacctacaactacggccgggagacttatgagaagggcaacgcgtatgcgcaggtggccatcagcacgcaggacgtctacaagacagcagaggcggcaaaggcggcgggcggcaacgttgtgcgggagcccggccccgtgccaggcatcggcaccaagatcacggcagtggtggaccccgatggatacaagattgtgtttgttgacaatgaggacttcctgaaggagctggagcagaagtgaagatgagggcagcgggcttggcgatcagcggcgcctgcttaggtggcgggatccgtcatgggcgcaagggctgcatgagagacgagattaaattgcatgggcgcct

SEQ ID NO: 2675 - DNA, 448 bp, Chlorella sorokiniana
  Clone ID: LIB3602-040-Q6-K1-D4
agctttcagaggtcacggcagcagtaaccatgcaggcactcagcagcagcaagctcatcgcctctggcgtgcaggccaagagccagcagcagcgctctgctcgggctgccgtcgtggttcgcgcctctgccgagggcgtcgaccgccgcgccgccctgggcctgctggccgctgccgctgccgtcagcaccgcgcagccctctgaggccgcctacggtgatgccgcccgcgtgttcgccggcaacatcaccaacaagtccggcttcatcccctacgccggcgagggcttcgcgctgctgatccccagcaagtggaacccctccaaggagcaggacttccccggcgtggtgctgcgctatgaggacaacggcgacgccgtgaacaacctggtggtgctggtgcaaaaggtgggcaagaacaacatcgacgagctgggcagccccgacaa

SEQ ID NO: 2676 - DNA, 473 bp, Chlorella sorokiniana
  Clone ID: LIB3602-040-Q6-K1-D5
ccggcacagcagcaggcacagcaggggcagcaggggcagcagcagcagcagctgcagccagacggcgagcaggcgcaggcccagctgggcaggcactcgctgcaccagacgctgtggcagcggctggagcgtgccgcagtcgggagcggcagcggcggccgcggcggcgccagcattggtcgtggggaggaggtagatagcagctcaggcagctcaggcggcagtgaggagcttggcggtgctgccgtggaggcgcaagcggaagcggaggcggcgccagcatttgtgccagagtcgctgcctcgcaagctgcgcaagcggcgggcgctcagcccagaggagcggctggtgctaggcatcctcagcgaccctcgcttcgactaccggggccgcacgcgcctgccgtccagcatggcacggcatgagtctgagtagtccaagcagtccactgcattcaactaaacacagctgat

SEQ ID NO: 2677 - DNA, 524 bp, Chlorella sorokiniana
  Clone ID: LIB3602-040-Q6-K1-D6
tgtagggcgcctgcagggctggagggcctgccccgctggtgacaggctgaggccttttcaggctggtgacaggctgaggccccactggcagatggccgggcggagctccggccacccttggctggcctccagtatgcttcgccggccctggtcttccctgccgcaaacacaacccacccgtccgtcccacctacccgctactgccaactccctgttgctgtgctccacctccttctgttcggtccccgtgtgtcgtcctgcacaccatttgtgtacaccgcaggctccatacctccctgctcccctgctctgctctccccgcacttgcctctgcagcgaacggcgcaacggcaggcgcacatgtgttgcgctgcgcacgcggattgcgcggcgctctgccactgcccttgcgccccttttcccatgcggcagcggtcgcccactgccccaatgatacacccctacccctgcagcgcgctcgcagcctgaggctgtctgcccgctcggcactgtaaagctgcagt

SEQ ID NO: 2678 - DNA, 483 bp, Chlorella sorokiniana
  unsure (1)..(483): unsure at all n locations; Clone ID: LIB3602-040-Q6-K1-D7
gcctgccatcgctctctgggcgcagagggcaaggacgcggcggtgaagatgttctgggacggccgcatcaaggccttccacaccgaccgctacgaggcgggccaccgcgccaccaactacaagcgctggctggaggcggcgcgcccctaccccatccagtatgaggaggggtacgagccgtacgtgatcatccaccgccgctacgtgccgtggtacgacgagcgctttgtgggctaccgcaagaacaaggtggtgcacctcctctacctctcctcctccggcatccagtgggtggtgcacccccgcgcgtttgcggtgcactcgncgcacccccgcgcccgcacctggaaggtcacccacaagaccggcctgtgggaccagctggccgagatttacgaccaggccaaggagggcatgttccagggcacctacctgcccgtctccatgtactcgtgcgggggccacacagcgggcccgctgatg

SEQ ID NO: 2679 - DNA, 397 bp, Chlorella sorokiniana
  unsure (1)..(397): unsure at all n locations; Clone ID: LIB3602-040-Q6-K1-D8
cacatttcgttcgcccccgttcgcctcattcatttggttctgtccccccccctcctccccccacacaccccgttgtctgtactgctgctgccccctgcctaaccaacgaacgcccgacagcgtgcggtggcggcgtgggcgcggcattccgccgctccgttcctgagaagactcccctcccccaccccaccccgcacttggtagcacttttctgccgacagcggcgggcgtgccctgcctgctcagatttccagcccgctcccactgcccaaattttttgcaccgcttgtagcatcgcccggccgagctccacaccactcagattggnaagcgcggcaaggcgcgtggcggcgtgtgcgactgctcctcagatctgtaaatccctcatcgctggaca

SEQ ID NO: 2680 - DNA, 302 bp, Chlorella sorokiniana
  Clone ID: LIB3602-040-Q6-K1-D9
cgaggagcgcgcactgaagcatgcaagatgtgtgcttgtgaagctgcgcgtgccttctctgagtctggaaggcagcgaatgtatggtgctgccaacttgaacgagaagttgccaaccaactgctgacgcaaccagtgctgaatgcccccaccctgtctgctctttcgtgcaaacccgcaatgcatgcttgccgctctgctctgccgtctctctgtatttatcagcttttcaatagatgcccccttgacaaatcttccccttctttgagatgagcctcacttgcgcttgtaagcactgcaaga

SEQ ID NO: 2681 - DNA, 401 bp, Chlorella sorokiniana
  Clone ID: LIB3602-040-Q6-K1-E1
gcgagttctggagcgggggcagggctggcgcggcgtgctggtgtcagctggagagaagggctctgcgtacgccttccgggcgccgggcggcaagctggacatgagcggcgtggtgccggtgctggacgtgaaggtggcggacaccactggagcaggggacgccttcctggcaggcttcctgttctacctgctgctgagcggcgggctggagtcgctggtggccgaccccggcaagctgcggcgcggagtggagtttgcgaccgcctgcggcgccttcacctgcaccaagcccggggccattgacgcgcagccgactgcggcagatgcagaggccctgctggctgacaagggccgcgtggggcagtgaagcagtgtgccgcgacaaaatgcccacgcagtgc

SEQ ID NO: 2682 - DNA, 361 bp, Chlorella sorokiniana
  unsure (1)..(361): unsure at all n locations; Clone ID: LIB3602-040-Q6-K1-E10
ctgctcgcgtgcgcgccgccggccctgctttctcctccccctcgcactgcctgcatgcacagccccaacgcagtccgatccgtgtgccaacactcaccccattgtcccattcgcttgcttgcaccgccaagcccaccagttgctctgctgatgctgaaccgctgggccgcccgccctccttagcgggcgcccctgttgccgcactgcttgctgctggcttttcaacgctccacccccgttgtatcgatcgatcgaacagaagttgcctgggtgccaaacagcgcgccgcctcctcacactgccttgtaagattacagtcacannnnanaaaaanaaanaaaaaaaaaaaaaaaaaaaaana

SEQ ID NO: 2683 - DNA, 435 bp, Chlorella sorokiniana
  Clone ID: LIB3602-040-Q6-K1-E11
gccgccgccagcggcagcagcgggccagaggacacaacagacgcgtcacaggcagcggcagcggcagcggaggatgcagcagccgaggagggcggcggcggcggcaaaaagaagcgcgtcacatttgcggatgaacagtcgggcagcgaggacggcagcggcagcggcagcgactcggaatgggaggagcggccgaagatgacaaaggaccaaattaaggaggcacgcaaggcgcacaagaaggaggtgaaggaggcgaatgcggagcggcgcaagcagaagatgcccaagcacgtgaagaagcgggccaccaagacgggcaacaagaagaaatgaggaggctcacaaatttgtggccaagaaatttgtgcagtgttgaaagtagtccttcactctgcttgcctagtgctctccaaagctgcagtaggcatcaca

SEQ ID NO: 2684 - DNA, 355 bp, Chlorella sorokiniana
  Clone ID: LIB3602-040-Q6-K1-E12
gcccgtgttccacaagaaggccaagaccaccaagaagattgtgctgcgtctggcctgcaccgtgtgcaaggcccagcacatgcacgccatcaagcgctgcaagcacttcgagatcggcggcgacaagaaggtcaaggggctatactagtaaaaaaaaggagagcggcaggcggagagcatgaccgagaaatggaggcagcggcgcccgctcaccctgggcggcctgctccccgcccggcgcctcgctttggccgcctctggccactcgtacgcctccttgtccatgcccttgtgcttcctgagctgcccaacctggcatgcaagcagcctggccgtctgtaatgccattggcgtg

SEQ ID NO: 2685 - DNA, 434 bp, Chlorella sorokiniana
  Clone ID: LIB3602-040-Q6-K1-E2
tgcttttccaaccgcaccctggttttcaacagtaccccgcatgcgtgggggcgcatgccccgctcgctgaaccgccatgcccttgtagccaaaagcgtcactcaccttctctctctttaatgttcacctttctttcctctccttccttgctttgctgattatgggcgcgcccggccgcgggccgccccaaccctttgttatcgcttgtccacacgctacctcgtcccctcccctgccctcgcgcctcaacaacgagtgagcctcacaagctgccttttcagcagccgacaaccgctgcgccatttcgtcgcataatccccccacctgtcccacccatttttgttgaaccaggccgcgtttgcctcgcttgctcaagctccgtgtccccaccttgcaatgctgcaacggcgccccattgtcacgccatgtctata

SEQ ID NO: 2686 - DNA, 451 bp, Chlorella sorokiniana
  Clone ID: LIB3602-040-Q6-K1-E3
cggtgctgccgcttcagagcgccagccgtcgccttcaggcagcgcagggcctccccctgctggccgccccagactgagcagcagcagtgtaacgccacagcgcatccccagcagcagcacggcgccacaaccacagcgcatccccagcagcagcatggcgcctcagcgcatccccagcagcagttcacaccgcaccctggcggaagtgcggggcctgtttgatgctgcacgttgggatggcggtggctcttgaagaaggcagcagcccatgccatgcacggcgcttgtcttgtcttgtcttgtcttgtctaaacaccatgtcacatctgtgtccgcactcagaagaccccatctgcctttgaactgcactttcatagtcaacgttccaattctgccaccgatttgaagtctttgctttcctgctcaaccttagcgtacctgcatgcagtac

SEQ ID NO: 2687 - DNA, 476 bp, Chlorella sorokiniana
  Clone ID: LIB3602-040-Q6-K1-E4
ggctctgggccgcgagctgctgggcggcaacggcatcctgtccgagttcctggtggtcaaggcctttgccgacatggaggcgtactacagctacgagggcacgtatgaggtcaacgcgctggtggcaggccgcggtgttacgggcatttctgccatcaagcccccgcgctcgggcaaggtgcaggtgcaggcctgaggtctgactggctgctcagtagcaaggaggcatgcagttggcgtcctgctcagcaagtgcccgcctgccgccaggctggctgcgcagcactggctctgtactctagtcaaggaggccaggatggagtgccttacatcgcgcatgcagcggcaatcaaaagttttgatacaaacagccgggcgctcgccccaacggcgccacacgattttggaatgaatggccggtgcacatacccttctctcttgtgttcttcacttgcaatcaatagcgtctaacgtgt

SEQ ID NO: 2688 - DNA, 370 bp, Chlorella sorokiniana
  Clone ID: LIB3602-040-Q6-K1-E5
ccaggggggggggtttaaaccccttttttaggccccgcggggggggccccccgaaaattatttggtctttttttggggggggcaaattttttaaaaataaaacgggttttttgggaatttttttttttttttggggggggggtgggggttttttaccccaacaatttgcccgggccgccctattttttttttttttttttcgggagttttttaaaaaattgggggggcccaaccaccggttttttgggaagtattcccttttccaaaaaatttaaataaaccctttttgttaaataaaaataggggggggggctttttaaaaaaaacaaatttttctcccgggtggttgggaaaattttttttttttttt

SEQ ID NO: 2689 - DNA, 95 bp, Chlorella sorokiniana
  Clone ID: LIB3602-040-Q6-K1-E6
aaaaaaaaaaaaaaaaaaaaaaaaaaaaaaaaaaaaaagaaaaaaaaaaaaaaaaaaaaaaaaaaaaaaaaaaaaaaaaaaaaaaaaaaaaaagg

SEQ ID NO: 2690 - DNA, 446 bp, Chlorella sorokiniana
  Clone ID: LIB3602-040-Q6-K1-E7
gcagtttgatgacgagacgggcgcccgggggctgctgttccagattgagtaccccgaaattgaggagggcagcaagccgcggcaccgcatcatgtccagctacgagcagcgcaaggagccctggtccaaggagtggcagtacctgctgttcgccgcggagccctacgaggtggtggccttcaagatccccagctacgaggtggagaagcacccggagcgcctgttcacacactgggacccagacaacaaggtctactccctgcagctgcccttcaagccgccgcaagcacccgcggggcggccagcggcgccagcaggaattccgccgcagcagctgccgccgccgccgcagatgccgccgggcatgggccggccgccaggcatgggcggccctcctccgggcatgggcggccctcctcctggatggggccggcccggctggtgag

SEQ ID NO: 2691 - DNA, 281 bp, Chlorella sorokiniana
  Clone ID: LIB3602-040-Q6-K1-E8
taccccttccggatcgtttcatgagagtttcatgccgcaatgcttgcccgcttcctctactccactgtgctcgcagcttgctcgctcgcccccacttgcacgctcgttgttctgcgttgatgatgcttatcgatatgtgatgcaaccaaaggtaatacagaagtcccaaaaaaaaaaaaaaaaaaaacaaaaataaaaaaaaaaaaaaaaaaaaaaagcaacaaataaaaaaaaaaaaaacctaaaaaaaaaaagaaaaaacctataccaaacattaaagg

SEQ ID NO: 2692 - DNA, 245 bp, Chlorella sorokiniana
  Clone ID: LIB3602-040-Q6-K1-E9
gttgagcgccgacagccattctagcgaatcctagcctgcgcgccctcctgcgcccaaccctctcattgcatgcatcctcttgtgcttcctccggttttcctcagcccctccatttgaccgctgccacatgcccggcggcgataagacccctatgccccaatgcctccacgcgcatgcctcatgcacacacacagttttgcagtagcgcatccagttttgtcacgtgtagcgtcatgtgaatggat

SEQ ID NO: 2693 - DNA, 446 bp, Chlorella sorokiniana
  Clone ID: LIB3602-040-Q6-K1-F1
cccggccttgcgctgcgctacggccacgccggcgatgtgttcatccccaccatcggcttcatctactttgctggctggctgggctacgccggctccaagtacctccagaccgtggccaccgccgccaagcccatcgagaaggagatcatcatcgatgtgcccctggcctggaagctgctgtgggagggctttggctggcccctgcgcgccttcgccgagtacaagaacggcagcctgatggaggacgacgccaagatcaccgtctccccccggtaaattggcagcccttgtagcggcgccgcgcccatttgtgcgcgcgccagcagcagcagcagcagcagcttgtatcatgactgcggccgtgggaagaggccgcggcgggcaaaggcctgagagctaaccaaccaagctccctggttaaggcctggggaagcgccgggtcggcg

SEQ ID NO: 2694 - DNA, 487 bp, Chlorella sorokiniana
  Clone ID: LIB3602-040-Q6-K1-F10
ggagctggtggcccaggtgcgcaaggccattggccccattgccacccccgatgtcatccactgggcgcctggcctccccaagacccgctccggcaagatcatgcgccgcgtgctgcgcaagattgccagcaaggaggaggaccagctgggcgacacgtccaccctggccgaccccggcgtggtgcaggtgctgctggagctgcgcggcaagtaaactgcgatagtatgcacttacgcgagtgacaccggcagcccggctgcccgcccgcccaacagcgatacacagagccggccccccacgaacgggcggcggttgaacgagccacccctaacctcatgcaccctgaacccaatgcctttgcctgtttccgtttccctgccgctccgctctctgaccgctcagtctctccgggggctttgtcgcacgcactcgagttttccccagtggggggcgcggaccatgcgcccgcccctcgagccccatttt

SEQ ID NO: 2695 - DNA, 430 bp, Chlorella sorokiniana
  Clone ID: LIB3602-040-Q6-K1-F11
gcccaacaagtatgttgaggactggggcgtgcgccgcgagcacattgagaacgagttccggtgggacgccaggacgctgaccaacatcgccgtttgggcgggcctggtgccgtacgccgtctacatgggctgcgtcgcagagttcaacaaggtggacacgattgccaagcggcccgagcgggagatgtggggcagctccgactaagcagccagtgccatggctgtgtgccccacagcccatttgccgattggccggcgcataccacacctggcgttgaaaatgccagctcgtgctgccgctgagctctgccgttgattgcagccgctcccctccttgctctgcttctctgctcctgctcctcactgctcctcactgctgctgcacgccttctgtgcggcctgtacttgtctgcacctgtttcaactcaca

SEQ ID NO: 2696 - DNA, 60 bp, Chlorella sorokiniana
  unsure (1)..(60): unsure at all n locations; Clone ID: LIB3602-040-Q6-K1-F12
ttntttttttttttttttttttttttttttttagttctagatcgcgagcggtcgtttttt

SEQ ID NO: 2697 - DNA, 559 bp, Chlorella sorokiniana
  unsure (1)..(559): unsure at all n locations; Clone ID: LIB3602-040-Q6-K1-F3
acggctgcgagatcaaggacctgtctgcccccgtggtcatgggcgcgggcgccaccggcggcatcctctactggctggccatcttccctgtggacgtggtgaagagcgcgatgatgaccgacagcatcgaccccgcacatcgcaagtacccctccatacctgtggccgtgcgcaagctgtgggccgagggcggcgtgtctcggttctaccgcggcttcagcccctgcctcatgcgcgcagcacccgcaaacgcggtcatgctcttcacagtggacaaggtcacgcacctgctgaacgagtgagcagcagcatgagagtggtgtggcggcccggccgtcggtgcagctgcaggcgatctgcagcccgcttgccgcaagccgcacgaagcggcggccatgaaaggagcggnncctgcagcctccgcatgcaccttaccgtccacctgcctttttgcctgcacccatctattcatcgtgattgtgaacccgccaattacactgactgtgtgtgccagctgcttcgtgcctagtgcgatcagatcctctttgctagcgtacgc

SEQ ID NO: 2698 - DNA, 504 bp, Chlorella sorokiniana
  unsure (1)..(504): unsure at all n locations; Clone ID: LIB3602-040-Q6-K1-F4
cctcaccagaccggttcaagccaaccaccggactgctggcccgcggctggaccctcaaggcctacgtgagcggcggctcgctggtcgcaacctttgagttcgtcctgccctcggatttccaaaaggcggccattcgcgccggcaagataccgcgggctcccggccaggacatcagaggtaccaacccagccggcgtcaccttcctgctggcatttggggatgtgaacagccagaggcagctacaggtgggtacagggctgggtacaggatgatggacagccaggatttcaacacattggctggcggcggcggcacaggaggcggcacaggcggcagcagcgatccagaccacctaccatcgcagggccaaggcgcggcagccggtgccatgttgccccggatgccatccgtcatcccctgtctcaactcgtctcgccctcaggctgccatgcccactactctnctcattccctctcctcttcccctgcagcgccactggatgac

SEQ ID NO: 2699 - DNA, 504 bp, Chlorella sorokiniana
  Clone ID: LIB3602-040-Q6-K1-F5
gcggcccaaggcctccatccccaaaggctggatctggctgtactacctcgacccagccagctactcgctgtacggcatggtggccaaccagctgggtgacgtggactcgctgatggagctgccacccggctcggtgcccgcccaggtgccggtccgcacctttgtggagagctactttggtttcaagcactcctttttcggctggtgcgcgctcatcctgattgccttcacggtcttcttccgcctcatggccctgctggcgctcaagcgtctgaacttccagcagcgctgaagtggcggcgatgagagagcggcatgcacaggacagacccggctggcgcatagccagcgcaacgtttcagccctcttgctagacttggagagtgttacttcttttgcgtatgcacagcgccttgcgccctggtgcgggacggacaggctgatcgtgccgtacccagcccttctcccccttgccgataaaactcgtgcgcgaatgagcgtttt

SEQ ID NO: 2700 - DNA, 461 bp, Chlorella sorokiniana
  Clone ID: LIB3602-040-Q6-K1-F6
cggacgcgtgggctgcagcaaaacctggcggccagcggctggccggcggagcgtttcagctgggtggcgggtgacgtggcggcgctgccgtttgaggatgccagcatggatgcggttgtgtgcaccctggtgctgtgcagtgtgccagacgtggggcaggtgctgtcggaggcagcacgggtgctcaagcccggcggccggctgctgttcatcgagcacaccaccgcagaatcgggccggcagccgctgctgtggatgggccagcgtgcgctggagcccctgcagcggctcctggcggacaactgccacctcactcgagacccgctgcccgcaataaaagccgtggaatgcttctcgccagcggcgggcgggggcgtggaggcgcggcggttcatcgtggacggcgcctcgctcattgcgccgcatgtggcgggcattgcgcggcgggcaatgcgtgaagc

SEQ ID NO: 2701 - DNA, 339 bp, Chlorella sorokiniana
  unsure (1)..(339): unsure at all n locations; Clone ID: LIB3602-040-Q6-K1-F7
aaaaaaaaaaaaaaaaaaaaaaaaaaaaaaaaaaaaaaaaaaaaaaaaaaaaaaaaaaaaaaaaaaaaaaaaaaaaaaaaaaaaaaaaaaaaaaaaaaaaaaaaaaaaaaaaaaaangggggggccgttttaaagaatcaaagttaacttccgcgggcttgcaacgtaatagtttttttatagggcaactaaaattaaattaatgggccgcggtttaaaaacgtcgggactggaaaaaccttggggtaaccaaattaaatcgctttgaaaaaaatccccttttcgcaagttggggtaataaaaaaaaggcccgaaccaatcgcctttccaaaaatttgc

SEQ ID NO: 2702 - DNA, 263 bp, Chlorella sorokiniana
  Clone ID: LIB3602-040-Q6-K1-F8
gtgccctctggcgtgaacgccgaggcgatcagccgcgaggactacctgaacgcccccggcgaggagttcaccgtcaagctggacaccgctggcgagtacggcttctactgcgagccccaccagggcgccggcatggtcggccgcatcaccgtgaactgagcgcagcatgctcagcgccgcggcgtgcactgacccatttttgaagcacttgctgtctctcttcggttgactggcctctattcagggtgtaacgctacacacgc

SEQ ID NO: 2703 - DNA, 410 bp, Chlorella sorokiniana
  Clone ID: LIB3602-040-Q6-K1-F9
cgaggccgtgcccggcgtcatctcgtccctctattacgccatctccccggcggccaaggcggccagcaacatcgacgctgccattgccgccaacgtcaagcaccagatggagcagctcaaggtgtcgcccgtgctgcagggcctggtgaaggagggcaagctcaagatcgtgggcggggtgtacgacctggccaccggcaaggtcgtcgagatcgcctaaatgggccccagctgggcgggccgcggccgcgcggcgcacacgcagcgcaggagcagtgctcggccggcggcggcggcggcgcgctgacggcgtgctggcgtgcgcattggccagggccgccctctgcttgaatcccttcaagacctctggctctttcatttcctcctctttcatctttccagccacccct

SEQ ID NO: 2704 - DNA, 358 bp, Chlorella sorokiniana
  Clone ID: LIB3602-040-Q6-K1-G1
ccgggctgtagtgctagcagacggagagcacttgcaacatgcccgccagccaaccgtgctgagctcccgctgtggcctgccttgcacccaccattatcaatcagactgcctcgcttcctatggctgtccccttatgccgtccccatgccgctgagcgcccccgtaacctttctgcatccgttgcatatctggtggcctgcctgcaacgtcgtccccaagctgcagcaagagcagctttcctacggcgatgcacggctgctcgcctgcagtttttgccacctcttgtgtgaccctccgccatgcatgccctccattccatcccatctttacaactctttcctggtaactcatgccatgc

SEQ ID NO: 2705 - DNA, 324 bp, Chlorella sorokiniana
  Clone ID: LIB3602-040-Q6-K1-G10
aaaaaaaaaaaaaaatttaaaaataatataaaaaataaaaaaaaaaaaacatatattaaaaattaaagtaaaaatgatataaataaatataaaaaaaaggggtgtctttttttgtgggtgcgcctttttttggggttcaatgtttcttccccttttttttatagtgttacttttttttttttccctgctcattttttttcactggcggtttttttacaaccttttgttttggaaaattttgggctttccaaattttttttttttggacagattccccttttggaaagattgcttttttggtaatagttcccaacctttggcctt

SEQ ID NO: 2706 - DNA, 507 bp, Chlorella sorokiniana
  Clone ID: LIB3602-040-Q6-K1-G11
cccgccgccgccgcgcccttccccgctggcgaggccacccccgcacagcacctgcgcaacgtgttctaccgcatgggcctgaacgaccaggagattgtggcgctcagcggcgcgcacaccctgggccgcgcccgccccgaccgctccggcttcggcaaggagtccaccaagtacaccaaggatggccccggcgccccgggcggctcctcctggaccgtgcagtggctcaagtttgataattcctatttccgcgatatttacgagcaaaaaaatgcagacctgctggtgctgcccaccgacgcctgcatctttgaggacgaggccttcaagccctttgccgagaagtacctggccagccaggacgccttcttccaggactatgtggcggcgcacctcaagctgtctgagctgggcgtggagtgggatggcgagcccgtgaccctgacccgctaagcggcacagcttgtgacgccagggacacccagctctgagcgcgattgagataca

SEQ ID NO: 2707 - DNA, 468 bp, Chlorella sorokiniana
  unsure (1)..(468): unsure at all n locations; Clone ID: LIB3602-040-Q6-K1-G12
tttttttttttttttatatttttttttttttttttttttggttgtnnnnnttttttattatattttttttttaatttttttaaatttttttttttttttttnccccggacaagaaacaaaaagaaaggggcccgcgggggcaagggggaaacaaaaaaagaaaaggggggcaaaaagggccccaaaaaaaaaaaaaacggggggaacaacggggggaaggcagcccaaaaaaaaaaggcccaaaaaagaaacccccccccccccccttagaaagcagacaaaaaaaaggcccggaaaggggcgttaaaaaaaaaaaaaagtaaagaacgcggggaaggaaaaaaaaaaccttctaaaaggggaacaaaaataaaaaaaccggggcgggggtaaaaaaaggggggaagggaaaaaaccggggggaaccaaaataaaacggcgggaaaaaaaccccctttggaagggggg

SEQ ID NO: 2708 - DNA, 148 bp, Chlorella sorokiniana
  Clone ID: LIB3602-040-Q6-K1-G3
gaaggaggcggaggcgcgcgaggctggccaggaggttgagaagaagaagcctgtggtggtcaagtacggcatcaaccacatcacgcaactggtggagagcggcaaggcgcaatgcgtggtgattgcgcacgacgtggaccccattgag

SEQ ID NO: 2709 - DNA, 497 bp, Chlorella sorokiniana
  Clone ID: LIB3602-040-Q6-K1-G4
caggatgcggcgcggcagcggctctgcgactacatcaagcgggcggagtacacaaccctgtttgacttcccaacgaagggcatcctgcaggaggcggtgaagcacacccaatatgaccggctcaaggacagccagggcaaggcgcccggcctgctgggctggtggcccgagaaggcctgcacctttgtggacaaccatgacaccggctccacgcagcagcactggcccttccccagcaagcacgtgatgctgggctacgcctacatcctcacccaccccggcatcccctgcctgttctgggagcacagctttgactggggactggccgcagagattgacaagctggtggcgctgcggcagcgggcgggcatccaggccaactccaagctggagatcctggccgccgagaaggacatgtacgtggcccgcatcaacggcaacgtgacagtgaagcttggtccccgctatgacatgggcaacctggtgccccgcaagga

SEQ ID NO: 2710 - DNA, 445 bp, Chlorella sorokiniana
  Clone ID: LIB3602-040-Q6-K1-G5
ggcagaagggcttcatcccgctgtccacctacctgaccaactacaagctgggtgactatgtggacatcaaggtcaacgccgcggtgcacaagggcatgccccacaagttctaccacggcaagactggctgcgtgtggaatgtgaccaagcgcgccgtgggcgtggagctgctcaagcaggtcaacgggcggtacatcaagaagcgcatccacgtgcgcatcgagcacgtgacccccagccgctgccacgaggagttcctgcgccgctgcaaggagaacgacgcggcgcggcacgcggccaaggtggagggcaagccgctgccggtgctcaagcgccagcccaagggcccccgcaccgaggccatcatgctggagaacgtgaagatggagaccatcacggccatcccctacgatatcctcaaggagggcgtgctctgagcgtgatc

SEQ ID NO: 2711 - DNA, 505 bp, Chlorella sorokiniana
  Clone ID: LIB3602-040-Q6-K1-G6
ccgggctgctgcgcaaccacattgtggaggggctttacaccaccgcggcatggccctccaaggttggtggccagtacggcaagtccatgacttccgctggcggcctggccttgacgtggtgggtcgatggcaaatacacattccgctgcggcggcttcttcccaggttacgaccaagtgggctgccagctgagcaacctgcagtgcggcaacagcatcatgcaagtgctgacggatgcttgggacgctcccgcgccgcccaagtgagggcatgttaagatgaagaacctgtcagtcgcacatgccagctgagtcgcggcagtgcaatggtcccgccgtgcagtgtttttccttgaggcgccgctcaccctgctgccaacgcatgcatgttttcggctcatgagtgcgcttgcctgttccggctctttccatacttgcagcaccggtttctgctgccccgcacacagcacaatacattcagatgtgcttgcaactcgtgtaactac

SEQ ID NO: 2712 - DNA, 391 bp, Chlorella sorokiniana
  unsure (1)..(391): unsure at all n locations; Clone ID: LIB3602-040-Q6-K1-G7
atcactggctgctggaagcgccagaggagcgagcggcgcagctgtggcggcacgacagctcagactgggccggagcggcaccagcagcccagggtggccctagcgaagctcgaattgcggcaacaagtggcggagggcgggcagcggagcaccagcggcggcggcaggagggcggcggcaggggccctgtaccgcaggtgcctgtgctagcagagggagctgaagcagtgcaggcagctggggaggcggatttgcagggggcacagggcagcagtgaagagcagcggcggctgcttggcggaggcgagggcggcagatccgattcgcagcggcagcagcagcagcagcagcagcaggggcatgggcagcagttagatgcangggatgctga

SEQ ID NO: 2713 - DNA, 353 bp, Chlorella sorokiniana
  Clone ID: LIB3602-040-Q6-K1-G8
acctgaagaccgtcaaggagctgatctacaagcgcggctttggcaaggtcaacaagcagcgcatcccgctcaccgacaactcggtgatcgagcaggtgctgggcgacaaggacatcatctgcgtggaggacctggtgcacgagatcttcaccgtgggccccaacttcaagcaggccaacaacttcctgtggcccttcaagctgtcctcccccaagggcggcatcgacaagaagcgcctgcactacatcgagggcggccaggccggcaaccgccaggagtacatcaacaacctggtgcgcgccatgaactgagcgctgagccggcgagcacagcgcagcgcgcgcagcacgcac

SEQ ID NO: 2714 - DNA, 353 bp, Chlorella sorokiniana
  Clone ID: LIB3602-040-Q6-K1-G9
aagcgcgccgtgggcgtggagctgctcaagcaggtcaacgggcggtacatcaagaagcgcatccacgtgcgcatcgagcacgtgacccccagccgctgccacgaggagttcctgcgccgctgcaaggagaacgacgcggcgcggcacgcggccaaggtggagggcaagccgctgccggtgctcaagcgccagcccaagggcccccgcaccgaggccatcatgctggagaacgtgaagatggagaccatcacggccatcccctacgatatcctcaaggagggcgtgctctgagcgtgatcggcggcgacgttccgttgattgcggctgcagcttagtgagatgtaaccccgcag

SEQ ID NO: 2715 - DNA, 289 bp, Chlorella sorokiniana
  Clone ID: LIB3602-040-Q6-K1-H1
acttcttcttcgcaaccggagccggagcgctgtttggcgtggagtacttgatgtacggcctgcccacagcagccaccacgcacttcatttacgactggatcgcgctggtgttcatcctgcgcgagtggggcggcagcagcggcgcagaagaggctgggtaacggcgagctcggggaaaaatccattctcagatcccatcctcagcatgcgcctgtccttccccggcccttttcaaaaattgatctgctgtaattgcactgcagtttacaaaaaaataaagaaggcgtgc

SEQ ID NO: 2716 - DNA, 255 bp, Chlorella sorokiniana
  unsure (1)..(255): unsure at all n locations; Clone ID: LIB3602-040-Q6-K1-H10
gcgtgaggaccagcgcgagttcgccaagctggtcgagtccttcaagaccatgtacaacgacggcccccgcgtcagctggggcggcggcatcatgggccccaagagccaggcggcgcanaagaagaaggagcgggctctggccaaggacgcccgcctccgcgtgtaagcgggcagtacccacctgccgttcaccgggcgccgggccgggacagcccggccagcaaggtctgcgtgccgggcgtgggcgcgggcgcc

SEQ ID NO: 2717 - DNA, 555 bp, Chlorella sorokiniana
  unsure (1)..(555): unsure at all n locations; Clone ID: LIB3602-040-Q6-K1-H12
ctgcggttccggtccggtttcccggttcgccccgcgtccgaaaaaaaaaaaaaaaaaaaaaaaaaaaaaaaaaaaaaaaaaaaaaaaaaaaaaaannnnnnnnaaaaaaaaaaaaaaaaaaaaaaaaaaaaaaaaaaaaaaaaaaaaaaaaaaaagggggccgccccttttgggggttccagttttccttccccttccttccgcctttttatttttttttttgggccccctattttcttttccctgcccgcctttttcccccttcttgcttgggaaccccttggctttccccctttttttccctttgcggcccttccccttttccccggttggtttttttccgaggggccccccccctttcccctttcccaccttttcccccccctttttggcttttggcccccccctttttccggccctttttccccgggggtttttgtgtttccccccaggttgcccttttcttttgccggccccttttcccccgttcttttggtttttttcctttctttttttccccctttcgccgtttttccccgtaaggtttttttttgg

SEQ ID NO: 2718 - DNA, 65 bp, Chlorella sorokiniana; identical to SEQ ID NO: 672
  Clone ID: LIB3602-040-Q6-K1-H2

SEQ ID NO: 2719 - DNA, 64 bp, Chlorella sorokiniana
  Clone ID: LIB3602-040-Q6-K1-H3
aaaaaaaaaaaaaaaaaaaaaaaaaaaaaaaaaaaaaaaaaaaaaaaaaaaaaaaaaaaaaagg

SEQ ID NO: 2720 - DNA, 384 bp, Chlorella sorokiniana
  Clone ID: LIB3602-040-Q6-K1-H4
cggacgcgtgggcggacgcgtgggcttaccatgtccggaagggccctggccaagctgtttgacccgctggtcgcctggatggcgccgcgctaccaggcggtggtgggcgcggagctgcgcaagtacgggctgcggtacgaggacctgtacgacccgcagctggacctggacgttgatgaggccctgaagcgcctgccccaggacgtggtggatgcgcgcaaccagcggctgaagcgcgcgtgcgacatcaacatgaagcactctgagctgcccaaggacctgcagcagctgcagacgccctttgagttctacatgaaggacacgctggatctggtgaagctggagtcggacgagcgcctggctctgggcgctggcaagccgtac

SEQ ID NO: 2721 - DNA, 520 bp, Chlorella sorokiniana
  Clone ID: LIB3602-040-Q6-K1-H5
gacccccgagctgctgcagcgcaacggtgccgccaacttcggcgaggctgtgtggttcaaggctggcgcccagatcttccaggagggcggcctcgactacctgggcaaccccaacctggtgcacgctcagtccatcgtggccatcctgctgacccaggttgtgctcatgggcctgattgagggctaccgcgtcaacggcggcccggccggcgaggtggtggaccccatctaccccggtgaggcctttgaccccctgggcctggctgacgaccccgacaccctggctgagctcaaggtgaaggagatcaagaacggccgcctcgccatggtgtccatgtttggcttcttcatccaggccattgtgaccggcaagggccccgtgcagaacctgtccgaccacctggccttccccttcaccgacaacttctactccctgtacgccaagaccctggcgtaagcggcctgcacttgctcctgcttgagcctcgactggcggcgggcgtgaccctgtggcagtgcg

SEQ ID NO: 2722 - DNA, 411 bp, Chlorella sorokiniana
  unsure (1)..(411): unsure at all n locations; Clone ID: LIB3602-040-Q6-K1-H6
gccgcggctctgtgccctttcaaccacaacaatggcaggggcagggccgttgctccctgcctgatgctcccatgaataccagcactgtacgtcctcccctgggaaattttgtccgccatgcttcccctgcgcaagctgcctgcccacttttgtgttgtcgtcctttcgagcggccagcttgctttctctctaccacatgcgccccagcacggcgcttgaataccgtgcccgtagcctgtatatgcccgtctctttctggaatgtactcttcatgcagcctggccaaacacctgcactggcccccgccccgccccaacattttgagaagcccactttcctttgctttgctccttcgcctgccatgttctgctcctgcgttntgtgcatgctcttctagatctgctctgcttt

SEQ ID NO: 2723 - DNA, 344 bp, Chlorella sorokiniana
  Clone ID: LIB3602-040-Q6-K1-H7
cccacgcgtccgggactacatctactcggtggtgcctgtgctggaggacgcgctgatggatcgagaccttgtgcaccgccagaccgcgtgcgcggttgtgcagcacatgtcgctgggcgtggcgggcctggggtgcgaggacgcgctcatgcacctgctgaactacgtgttccccaacatcttcgaggtgtcgccccacatcatccagacgacgacgggcgcgattgagggctgccgcgtcgcgctgggcccagccatcatcctcaactacctgatgcagggcctgttccaccccgcccgaaaagtgcgcgaggtgtactggcggctctacaacaacgtgtaca

SEQ ID NO: 2724 - DNA, 342 bp, Chlorella sorokiniana
  unsure (1)..(342): unsure at all n locations; Clone ID: LIB3602-040-Q6-K1-H9
nnaaaaaaaaaaaaaaaaaaaaaaaaaaaaaaaaaaaaaaaaaaaaaaaaaaaaaaaaaaaaaaaaaaaaagagggaaaaaaaaaaaaaaaaaaaaaaaaaaaaaaaaaaaaaaaaaaaaaaaaaaaaaaaaaaaaaaaagggggggggcccttttaaagatccaaattttacttcccgggccttggaaggtaatattttttttttggggcccccaaaataaattttttggcccggggttttaaaccgcgggagtgggaaaaaccctgggtttccccaatttattccctttgaaaaaaatcccctttttcccagttggggaaataaaaaaaaggcccccccc

SEQ ID NO: 2725 - DNA, 371 bp, Chlorella sorokiniana
  Clone ID: LIB3602-041-Q6-K1-A1
aaaaacaaaaaaaaaaaaaaaaaaaaaaaaaaaaaaaaaaaaaaaaaaaaaaaaaaaaaaaaaaaaaaaaaaagggggggggcggaaaaaaaaaaaaaaaaaaaaaaaaaacgggggggcgcagaaaaaaaaaaacatgttatagggcgccccaaaaaaaaaaaaaagggggcggtggggcacaccgaagtaaaggaaaaaaccgggggtaaccaaagtaaagggggggaaaaacaagccccttccaaaaaaaggggctaaaagaaaaaagcccctaacgaagggggtttaaaaaaagaggagcccccgaaagggaaaagggaccacccctggaacggcccaaaaaaggagggggagggggggggtaaccc

SEQ ID NO: 2726 - DNA, 573 bp, Chlorella sorokiniana
  Clone ID: LIB3602-041-Q6-K1-A10
cgctgtaccggcagtcgaagctgggtcagagcttggtggatgccctggatcagctcgtagaggagggcaagctgcccccgcagctggcgctgcgcgttctcgacgagtatgaccaggtggttctggatgcgctggagaacaaggtgacggccaagggcacgctgaagggacacctggacatctaccgctactgtgacaacgtgtggaccttcattgtgtcggacgccaccttccggctggcgcccacgcagaacagccctcggcgggacgagcaggaggtgaaggtggaccagtgcaagatcgtggtggtggaccagcggctggcgcccaatgccgacaaggagtgatgctgctacacctccggcagtaacatcattcccccatagtggcaccgacgtctgtccagcagccagctcacccggcctcagaactcagttcaaacctcggcacaccttccgctcccgtgtccgctatgctctgctccactccctctgctgcccagctctgctcccggcttcccgtgcgcactgctctctgttgcgttaaagctggaacaatgcgatagtctgcaac

SEQ ID NO: 2727 - DNA, 561 bp, Chlorella sorokiniana
  unsure (1)..(561): unsure at all n locations; Clone ID: LIB3602-041-Q6-K1-A11
agacgagcagcggcacacgatggcggcggcagtgccacatcatgccagcaggagcacagatgggcagcggcatggggcggcgtcggtgccgcatcatgccagcaggcgggaacagcgtgagatctcgcctcccggccgccgccccggcagcagcagcgggcgggcaagcgatgcagagcagcagcgggagggcgggccgcgggagggcagcaggcgggatgagggagagcggcggccagaaggcagggaggggcggcatcatgaggagccgcgaagggagcgattcagggaggagcagcgggctgctgatcggcatgcggagggcaggcagcgggacgagcgccgcagagatgaacgtgacagccggcatgcctgcggcgatcgtggcagacaggaccatgacaagcggcatggcggcagcgagaggggcagggaggaccgggaggggcagcacggcagcggcgagcggggcagggaagagcagcggcacagcagcagggggcgtgctgagcggcggngcgagcgccacagcagtcacagggatgagggattgacccggca

SEQ ID NO: 2728 - DNA, 450 bp, Chlorella sorokiniana
  Clone ID: LIB3602-041-Q6-K1-A12
aaaaaaaaaaaaaaaaaaaaaaaaaaaaaaaaaaaaaaaaaaaaaaaaaaaaaaaaggaaaaaaaatgggggaggagatataaataaaacaagcataacatacgaaataatacaaaaatctgggggggcccttttagggaatcaaattttacttccctgtccatcgaagtaaatggtttttctttggggaaacccaattttaatcaacttgcctcgctttccaatctttccagttgggaaaacctggggtatccccaattaaatcgtttttgaaaacatttccttttactgaatgggcattatagcaaaaggtgccgcccctttttactttccaaaaatttgggggtttttagtggttatgggaatcccctttgtatcgctctataaacccctggggtcggtttgtttccttcctttgtaacccttactttcggctttccccctaaagcc

SEQ ID NO: 2729 - DNA, 116 bp, Chlorella sorokiniana
  Clone ID: LIB3602-041-Q6-K1-A2
acaaacaaaaaaaaaaaaaaaaagaagaccgaaaaaaaaaaaaaaaaaaaaaaaaaaaaaaaaaaaaaaacacggaagggggcgaggaaaacaaaaaacacaaagggggccgcccc

SEQ ID NO: 2730 - DNA, 597 bp, Chlorella sorokiniana
  unsure (1)..(597): unsure at all n locations; Clone ID: LIB3602-041-Q6-K1-A3
acaagaaggcgccctccttcctgtccattcacatcggcatcaaggccgacgtgctgccgcccgggtcggagtgccaccagatcattgtggaggactgggacaagatggaggagccctacggcacgctgtttgtgagcatcccctcgctcctcgacccctcgctgtgccccgagggcacccacaccttccacgccttcacgcccgactggatcgacaactggagcgggctggagcgggcggactatgagaagaagaaggaggaggtggcagacgccattgtggcgcggctagagaaggtcttcccgggcctcaaggcaggcacaatattcagggaggttggcacgccacgcacgcaccgccgtttcctcaaccgaacagacggcagctacggccccatcccctcgcgccgcccactgggcatgctgtccatgcccttcaaccgcaccgccatcaaggggctctattgcgtgggagactcgaccttcccggggcagggcgtgaacgcagtcgtgttctccggctttggctgcgcgcaccgcgtgctgtgcgacctcngaaaggcaccgcggctgccgggcattgacgagggttacaatg

SEQ ID NO: 2731 - DNA, 298 bp, Chlorella sorokiniana
  Clone ID: LIB3602-041-Q6-K1-A4
ctcacggccttgctgtcaccgctagccgctgcctgaccaagaatggccaagagcaagaaccacacggcggctaaccagtccgccaaggcgcacaagaacggcatcaagaagccgcagcgccagcgctactccagccgcaagggcatggaccccaagttcctgcgcaaccagcggtacgccaagaagcaccaggccgccaagaagtgagctcgagcagcaggctgcagccagaggcgcagcggttcttgccagcgcccctctgcctctgatgttcactcccgtgtaatgcttcgttaac

SEQ ID NO: 2732 - DNA, 506 bp, Chlorella sorokiniana
  Clone ID: LIB3602-041-Q6-K1-A5
gcctgaagcagaacgcggcgcagagcttcagggaggccaagccatggtccgaggtgctggaccgcaccgcgtttgccaagcccgccggcatggctgaggccacggggcgcatgcgcaagaacgtggcctacttcaaggtcaactacggcatcgtggcggtgtccaccaccgcgctggtcatgttcatgaacccatggtccctcatcgtgctggcggtcctggcgctgctgtggggatacgcctacgtcgtgcgcaccacgccgctggtcatcaatggccgcgagctcagcgaccgcgagaagttcctggcgctgagcggcacctcgctggtggtcatcttcttcctcaccagcgtgggagccacgctcttctacgccctcggcctgtccatgctgctcataggcgcgcacgcggcgatgcgggtgccagacgacctgttcctggacgatgtgcccgagtcgcagcagggcggcttcctctccctgctcacaggcggcgccaagccc

SEQ ID NO: 2733 - DNA, 538 bp, Chlorella sorokiniana
  unsure (1)..(538): unsure at all n locations; Clone ID: LIB3602-041-Q6-K1-A6
aagagatgaaggcaaagattgcccagctgcgggcgcgtgatgcccaactgcaaaagaacgcgctgctgctggcagacagcctgggccagatgagcggcggcatgggtggccagtcggacgcctgtgaggaggcggaggactggagagcctgctgagctgcggcggcactccccagcaaattgcgacagtgtggcagcgccaccgcccgtgcgctagccgctagctgtccagaggacgtcccccagctgctgcaaaatttcgccttccagccctaccaccgtacgatgtgagaatcgcagcccgcgacgagagaattattatgtgtcgctccttttgtgcccttccccctttgattagatctgccggccccatctgttcgtattgcctgctagcgccatttctgtacctcgcgcggcttgcgtgcctctccccctctgcttgctgcctgcggcttggtgtctttgtcactgacatcccctgtgcgatcagctgatctgttaagctgtcacgacacannnnanaaannanaaaanaaaaa

SEQ ID NO: 2734 - DNA, 73 bp, Chlorella sorokiniana
  unsure (1)..(73): unsure at all n locations; Clone ID: LIB3602-041-Q6-K1-A7
naaaaaaaaaaaaaaaaaaaaaaaaaaaaaaaaaaaaaaaaaaaaaaaaaaaaaaaaaaaaaaaaaaaaaagg

SEQ ID NO: 2735 - DNA, 521 bp, Chlorella sorokiniana
  unsure (1)..(521): unsure at all n locations; Clone ID: LIB3602-041-Q6-K1-A8
cgcgcattagcgctcgctgcccgcggcacatgtgccagccatgatctaattctagatttcccttgctgcccgcgtggcgcctgcgtgcaccacggggcctctccctcttgcgcctgcccctgttgactacccaggcgcttcgctttctcccatgccattgctgcgaagacccttttgacacaaccacacgcgcaaatgaccagggcaaaaaaaaaaacggaataaaacaaacaaatcaataaaaagaaaaaagaggatgtggcagacgccattaagagcgcggatggacaaggccttcccgcttctcaaagcatgcacaatatttagggggggtgggacgccacccatgcaccgtcgattactcagccgagcagacgggggttacggtcagatgcactcgcgccgtccactgggcatgctgtncatgccctttaaccgcaccgacatcaatgggctctattgcgggggagactcccccttaccggggcaaggcggggacgcactcatgttctccggctttg

SEQ ID NO: 2736 - DNA, 559 bp, Chlorella sorokiniana
  unsure (1)..(559): unsure at all n locations; Clone ID: LIB3602-041-Q6-K1-A9
gcgtcagctggcctcattggcttcagcctcgccctgccatcagcaccgcccacctaatgcccgctccaacccacccccctgtgtgcagacaacagcgccagcctggcggaggcgctgcgcaacatcatgatgccccgccgagaccaggagaacttgcagctggtggtcatcacgcacgatgagcaggcacgctgtcggctgcttggctgctgctgccgctggcgtcgctactgccactgtcaccgcaattgtgttgctacagctgccgcgcctgttcgagagcgctatgcctgtgcctgtgcttgccgaggcgtgttggcctgctggccccaccaccctgccacctaggctgaccggccacaccgccggtgcctgctgggtgcagtttgcgcgcctgatcggcacacgggagcatgcggagtacatgtggcgcatcacaaaggacgaggcgcagcgctgcacaatcacgcaggaggacattatggagtgaagcagacccaaggtgtgccgagtgcangcacatgcgccgccaccgcttgcagtgcagcatcagttcagc

SEQ ID NO: 2737 - DNA, 523 bp, Chlorella sorokiniana
  unsure (1)..(523): unsure at all n locations; Clone ID: LIB3602-041-Q6-K1-B1
ggagcatcacatgtgcccacggcttctgtctgccagagtgcaagcagtgatgcactgcacatgaagactaacaaaccagcacccagccctcttgagtgcgctgccgcaaccacgctgctgctgcaggcgggggcccacatcgatgctgtggaggtcatgcggcgcacaccgctgatgtacgccgtcctgtacgactgcgcgcagcttgcctgcgctcgggacccagacccagacctggcggccctgctggcccgccatcagcagtggccagctgtagtatcaaagcagcggcagccggcatcattagcagcagcagccgcaccaagcagcagcggccagcaccagcaaaagggctcactggctacccagctgcccgcttggtgttagtgcagctgaatcgcgagtgtcgcggttggcatgctggcggcctgggcggcacgtatgttacactggaccgtgtgtgtttccaaataatctagcggacaatgtacagggtaactcagggaaggaaaaaaaaaanaaa

SEQ ID NO: 2738 - DNA, 539 bp, Chlorella sorokiniana
  Clone ID: LIB3602-041-Q6-K1-B10
ctttgcagcgctcagcgcagcagcaaccctgcttgccaagtggcgtctgcctacggagcttctggcacggttggcggctggtgcggcaggtggcgacacagcggcaggcagcgaggcagggccagccagcggcagcggcgggctgctgcaatccatagctggctgcttggacgaggattacgagccagatactcgccacctggcgtgccacacggtgcagctgctgctggaggcagttgggccgcacctgccacccgcccagctggcggcgctacagccggagctcatgcggcgcttggacgacagcagcaaccgcgtgcgaatcgctgcctgcggggccctgcaagcctggctcgcgagcctgcaagcggcagcggccagcagcagccaaggaggcttggcagacgcggacgcttccagcctggccagtagcatgctaatacatttagatgatggggacgatgaggtggctggtgcggctagtgctgtgttggagcagcttgcggcactgcggccaggcacggtgcggccactggctg

SEQ ID NO: 2739 - DNA, 168 bp, Chlorella sorokiniana
  Clone ID: LIB3602-041-Q6-K1-B11
cagctacctcgcgctgccgccgccctcggcggcgcccgacggcggcatgggcgcgcagcagccctacggcggcggctatggcggcatgccacagcagttctgagcgcgcaggcccgctgctcgctgataccctgtttctgtccgcccctgacctgtaaatgtgctggc

SEQ ID NO: 2740 - DNA, 289 bp, Chlorella sorokiniana
  unsure (1)..(289): unsure at all n locations; Clone ID: LIB3602-041-Q6-K1-B12
gacggaccccagcgcacccactcacgcccagcagtcgatggtgctggtcccgctcgacacctctggcattacagtcgtcaggccgctgccggtgtttgggtttgatgatgcgccgcatggccatgccgaggtgctgttcgagtcggtgcgcatgcccgaggatgctatcatcctgggcgaggggcggngctttgagattgcgcagggccggctgggccccggccgcctgcaccactgcatgcgcctgatcggcatgggagagcgcgcgctgcagctgctagtgcagcgc

SEQ ID NO: 2741 - DNA, 580 bp, Chlorella sorokiniana
  Clone ID: LIB3602-041-Q6-K1-B2
gatcgccccacgcgtccggcgcgctgcagttcaacaaccccaaggtgcaggcgtccatcgccgccaacacctacgtggtcagcggcgccagccagcccaagcgcgcccacgacgtgatggcatccatgctggccggcatgggcggcatggcgggcctgcagcagatgatgggcggcatgggcggcatgcccgccttcaacccggagggcgcggccgacgagcccgaggaggaggacgacgacgtgcccgagctggtggagaactttgagcaggcggcccagtaagcgcccaacaagcgccccgccggctgaaggagcgaggcggcaggccaagggcggcgcccggcgcccgcgccagcacatggagcggatcgctggagcgctgcccggcgcgggcgctttgcgcggcgtgccccgccccgtcttcccagcacagcatcagcagcagcagctggccggcgcctgcccctgctcattgtttgagcggacgtgcgcggccgagagcacggaccgtttggtaactaacctgcggcccgcaacatcacagtacactcttgcagcagcttgcacatgggacaagt

SEQ ID NO: 2742 - DNA, 576 bp, Chlorella sorokiniana
  unsure (1)..(576): unsure at all n locations; Clone ID: LIB3602-041-Q6-K1-B3
cttcagggtcgctgtggagatcatcgtgggcttcgacgacagctggatcagcgaggagggcttcccagttgtgaacgagctgttccgcacctggctggagggcctgttcagcttccctgtacaaatccctggcaccgcatttgcgcgcggcatgaaggcgcgcgcagagctcatgcgccgcatccatgcttcgctggacgtgctggaggcacagcaggcacagcaggagcggaacggtaccaccaaggcagtggagcgtggaaacggccaggtggcggccgacgccagtggcaccacaagcgcagcgattgggctgggcggtgctggcactggcgccagcaagggcgctgccggggcgggcgagcagcgcaccgccctcgacctgctgatggcttccaaggatgatgatggcacgggcctgagccgggccgctgccgcagatagcgtgctcaccctgctgtttgcgggccacgacacctncgccaccaccctgacccaagtcttctggcacctgcactcgcacccagaggcggaggcgcgcctgcgcgctgagcaggcggaggtgcttgccaagca

SEQ ID NO: 2743 - DNA, 556 bp, Chlorella sorokiniana
  Clone ID: LIB3602-041-Q6-K1-B4
ctcaacttcagtgctgtcagtgcttgcaccttgccgggggcgccccgccatgcgggaggcgccgctgcccgctgcagcggtggcctccacgccgcgcccgccccggtggtttaacaacaaatttgattattgcggtgtacttcccactcgcacccacccacccacgcaccccaacgacgtccctcatccttgccccctgtagctgcctgccagatgcttggtttggccagatgctcagcatcgcccgcgcgctcgcccctcccctaccctttttcgggcatgcgcgccctcggatgccgtccttcggctaaatttgcaagccccgccctgtccttcctcgttatgccttgcgcattttttgccccctgcgaccagtggaccctcggtccctggtcctcaaccccacacctggcccaaccggcctcaccctgcctcacgcctaagtctgatgtgcaccgcactccgttagccccctccttcccccttttcaacgtctgccgcaagccgatttacttactgcaagcacttgctttaggtgtgtaatgcaatctgattc

SEQ ID NO: 2744 - DNA, 540 bp, Chlorella sorokiniana
  Clone ID: LIB3602-041-Q6-K1-B5
gaggaaggcacgttagtgctgagagcgccagtgaaaatggtgttcgtgcggacggaccgcacgcatgtgctggacctcgcgtccacggccaccgtggccgatgtgaaggccgccatcgaggcgcgccagggcatccccgccgaggagcagcgggtgatgttcggcggcaagcagctggaggacggcctgtccctggaggcttgcggcatcagcgatgactcccagatgtacatcctgatgcgcctgctgggtggtgccaagaagcgcaagaagaagacctacaccaagccgaagaagcagaagcacaagcacaagaaggtgaagctgcgggtgctcaagttctacaaggtggacgacagcggcaaggtgcagcgcctgcgcaaggtgtgcccccagtgcggccccggcatcttcatggccacccacttcaaccgcgtgtactgcggcaagtgccacctgacgtacgtgtacgacaaggagggccagaccgcctaagcgccccgctcccccctgcggatgcacgcttagcagcagcacacg

SEQ ID NO: 2745 - DNA, 538 bp, Chlorella sorokiniana
  unsure (1)..(538): unsure at all n locations; Clone ID: LIB3602-041-Q6-K1-B6
cggacgcgtgggggcccaccgcggcgaggcatcactcttgaagaggtggcgcagcatgcaagcgaggacgactgctggacggtgctgcggggcaaggtgtacaacataacccactacctgcggttccaccccggcggcgtgccgctgctgctcaaagtggcaggcaaggatggcacggcgctgttcaacaagtaccacgcctgggtcaactatgagttcctgctgcaaaagtgcttggtcggcctgcttgcgcccccaagcgcctctggagcggcaggagcagcagcaggtgggacagcggcagcatcagcaggcgggacagtggcattgggcgtggcggctgcaaatggaagcaacaacagcagcgccaccagcctacaggaagcggcagacgcagaggaggggcgagagcagcagcagccggcactcggcggcaagctctagtgccatgctgccccttgctgttggagtgctcaacccttagctgctgcagactgaaagtaacattgcacgttgaanaaaaaaaaanaaaanaaaa

SEQ ID NO: 2746 - DNA, 381 bp, Chlorella sorokiniana
  unsure (1)..(381): unsure at all n locations; Clone ID: LIB3602-041-Q6-K1-B7
naaaaaaaaaaacaaaaaagagaaaggggggcatcgggcggccgattctaaagttaacaaagcttacctacccgcgcatgcgccgtcatatcgtgtaatgtagtgtaaccttaattgaatggcctggccggcggtcttcaacggaaaaactgggaaaatcccgggcttacccaccttaatccccttgccgcttatgcccctttcgttagttggggaaatgtccaaaaggcccgtactgatcacctttgccaacacttgcatagactaaatgacgaatgctacaccccctctttcaggcacattaaacgcggtggttgcgcgcgttacccccagtttaatcgctacacttgtcgcggccctaacacccgctcctttcccttt

SEQ ID NO: 2747 - DNA, 421 bp, Chlorella sorokiniana
  Clone ID: LIB3602-041-Q6-K1-B8
cttgtaaaaattcttgttcttttttgggccccaaaagaaaaaaacccggggagggtaaaaaaaaaaaaaagggggggggaaaaagcggggggctcaaaaaacaccgggggggggggggggaaaaaaaaaaaaaaaaacccccgaaaagggcaaaaaaaagggggggcccttttttaacaaaagaaaaaaatgggggggggggggcaaaaaaaaaggggggcccaagcgccccccggggggggggggggggaaacttcctcaagcttataaaaaaaccccggggtgttaaaaaagggggccttttccggggggaaaaaagggaccccccggggaaaaaaaaaaaaaaagggcttaaaaaaaaaaaaaggggggggggggccaacaaaaaatttttaaaaaaaaagcccccccctgggggggg

SEQ ID NO: 2748 - DNA, 431 bp, Chlorella sorokiniana
  unsure (1)..(431): unsure at all n locations; Clone ID: LIB3602-041-Q6-K1-B9
gtagcaaacatcgcagtaggcaaagcagacaagccggcgggtgcatgaggcagctgcggcgcactcctcgccagcagcccccgccagccgccggttggcagcagcggtttcccttcgctgcctcacttccccgcacgcagcactgccccgtaccatcactgccctgcaagtatgccacgcctgttgtgcagcccctgctgcgccgcttggtgctaccccccccacgtccacgtgtcataagtgccctgcctttttcgcaaaccctcataaactccaaccggtcagccattggtgtgatagacttcacctgccttccccctggccctaggaaacactagccagccagcttacatctctctatacaataaacctcgcccctctgcccctgtaatactgcctggttnaaaaaaaaaagaaatccnatccttatt

SEQ ID NO: 2749 - DNA, 563 bp, Chlorella sorokiniana
  unsure (1)..(563): unsure at all n locations; Clone ID: LIB3602-041-Q6-K1-C1
gnggtatggcggcggcgctgtgcggggcggcgctccctacggaatcggccccgtgctgccgaacgacgcagctggcacacagtttgaggtgccggcgtccaaggttgaggccctgagctgccggggcaacgagagcaacctgaacgagtgctcctggatgctggcgcgcagcgcttacctggacctgctcagcgtggcgtgcgagggagctcagaccatctctgccgtgcgcctcaccaacaacggcactgccggaggggcagagggccggctggaggtgcagatgggcggcaagtggggcacagtgtgcggattcacggcctggtttgacgagggggccgccgcggccgcctgcacccagctgggattcccaggaccggctcgcattgtgaacggcaccgcctacaccagcgatgcaagcctgcccatcctgattgcacacgtggcatgcggcacggctgccaaccagaccagcctgaacgcctgctcgtttgactggaatgacccgcccatgcccacgtgcgagcatgccgatgatgttgggctggtgtgcaccaaagagt

SEQ ID NO: 2750 - DNA, 406 bp, Chlorella sorokiniana
  Clone ID: LIB3602-041-Q6-K1-C10
caacaagcagcggatcctgcggacccctggcggcaagctggtgtaccagctggccaagaagaagacctcccaccccacctgccccatctccggccagcggctcaatgggctgcccgcggtgcgccccaacagcctgcaccgcgtgaacaagagcaagaagacggtgcaccgcgcgtacggcggccacctggcggcgggcgtggtcaaggagcgcatcgtgcgcgccttcctggtggaggagcagaagatcgtgaagaaggtgctgaagctgcaggctgccaaggaggctgcgcaggccaaggccgcggcggcaggcagcaagggcaagaagaagtccaagaagtgagcggcgcacgcgagcggacagttgcgccccatgctcccgctgtaatgcaccctcgatgaa

SEQ ID NO: 2751 - DNA, 158 bp, Chlorella sorokiniana
  Clone ID: LIB3602-041-Q6-K1-C11
gcgagttggtgccttacaacttgatcctatccagcaagtggcacccgggggttgcggcctcgctaggcggcgctttacgcggcagccttgcccttcttcttctgcatcttcttcacatagaactcgagctcgcggccctccaggatgtagccgtccgc

SEQ ID NO: 2752 - DNA, 581 bp, Chlorella sorokiniana
  Clone ID: LIB3602-041-Q6-K1-C12
cggacgcgtgggtctgcaccgtcaatcggctctgcagctgcgagctttggcacgaaagcctcggaacccacacctcgcagcaaacatgggcattgtcgatgccatgcggcggctgagcggccggccctacagcggggagactgagcccaagtcgccccggtcgccccaggccacgtggagggacacagacccaggctacaaccccaacatggccaagacggggcgcagctactacgacacggtagagaacaagaaggcttcgcccggcatctgggactaccacctgcagtctgagaaggctgagcgggaggcgagccacgacgtggcgcgcgccgccttcaagtccatgggcgcctccaccactccccaaggcgatgtgctggatgcctctgccctgcgcaagatgtttgcctcggaccgcgtggaccagctgatggccatggccgacaagaacaaggacggcaagatcgacttcaaggagttctgcgacctgatccgcaggtacccctgcgactgagcgatacataaggcagatgcacggaccaatccctgcaataaatgcaccgtttcacaccgggcca

SEQ ID NO: 2753 - DNA, 545 bp, Chlorella sorokiniana
  Clone ID: LIB3602-041-Q6-K1-C2
cggacgcgtgggcggcggggggcaggcgatccccaggcccgcccgctgtggagcgcagcgcagcgcagcgcagcatgcatgccagttggccagccgtgcgcgctgccgcgcccctgtaacacacccctgaaaaaaaaaaacccacgcgtccgtcttgcagcaatggcagccggctgcatctttctaacatcgtcaccggcccactcgtttgtgccatgcccacctgcctccaacgtcacccttcatcaaccctcacccaacccatccacctgccacccatccactcaccttccctccgccacaacctctgccacccactcaccacccatcacccgctcaacgccctccatgcaccatcctccccatccaccaaatctgccaccccaaacgcacgtccgccgttgcaccacctgacgcaccgttagccgaagtcatctggcacccgccacttttcctgacgctcaccgacgcacatactaccttccacacctcagtgcatgtgcacccttcacccgcgcttcacacagaggatgctgccatgcaaa

SEQ ID NO: 2754 - DNA, 553 bp, Chlorella sorokiniana
  unsure (1)..(553): unsure at all n locations; Clone ID: LIB3602-041-Q6-K1-C3
gcctcttagcctacagcgagcacaggggcaaccatgaccaagaagcggaggaacggagggcgcaacaagcacggccgcggccacgtcaagcgcgtgcgctgcgagtcgtccgccgccatggtgcccaaggacaaggccatcaagcgcttcatcgtgcgcaacatggtggacgcctcggccatccgcgatctgcaggacgcctgcgccatcgacggctatgcgctgcccaagatctaccgcaaggtctactactgcgtgtctgccgccatccactccaagattgtgcgcgtgcgctccgtcaaggaccgccgcaaccgcgagccgccccgccgccccggctttggcgcccgccccgagcgcaagtgagcgtcggcatggccgcagcagcagcagccgctgaggagcagtgagggcggcgctctgcagccgcgcctcgtcctgcgatgagtcagcaccgcggggccgcccggcgcacggnacgccacccggcaggcagcttatttatgtgcgctgggccgcgcgccggcgccccgtgtaaatcgcgatatgnaaa

SEQ ID NO: 2755 - DNA, 558 bp, Chlorella sorokiniana
  Clone ID: LIB3602-041-Q6-K1-C4
cgttcaccaagctgttcaaccggctcttctccaagaaggagatgcgcatcctgatggtcggtctggatgccgccggtaagaccaccatcctgtacaagctgaagcttggcgagatcgtcacgaccatccccaccatcggcttcaacgtggagacggtggagtacaagaacatcagcttcaccgtgtgggatgtgggaggccaggacaagatccgcccgctgtggaggcactacttccagaacacgcaaggcctcatctttgtggtggacagcaatgaccgcgaccgcatcggcgaggcgcgcgacgagctgcaccgcatgctgaacgaggacgagctgcgcgatgcggtgctgctggtgtttgccaacaagcaggacctgcccaacgcgatgaatgcagcggagatcaccgacaagctggggctgcactcgctgcgccagcgccactggtacatccagagctgctgcgccaccagcggcgagggcctgtatgagggcctggactggctgtctcagaacatcgctaacaaagcttaaaaaaaatactggcgagccgggc

SEQ ID NO: 2756 - DNA, 439 bp, Chlorella sorokiniana
  unsure (1)..(439): unsure at all n locations; Clone ID: LIB3602-041-Q6-K1-C5
acctgcctcgcatcagcatctgcgcgcctccagcaggcagccggcagggctgccatgcagcacgtgatcagtgcaccgcactgctctgagcccgccgcacgcggccagcttctcagctcgctcgctgcggcggcaccactggaattcaggagtagcaaatgtcatgccggcagctgcagcgctggccggccagcctgtacaacaacccaccaactcagggctgtaccaactgcacgctaattcgcgccgcaccagggcgtttccagcgccctcgccgcgtctctgtttacatgccttgctttcatctgcctgcctcctcttctgtacatgcgagtcaattttccgccgtatgcgcactctggtgttcttttctttcatgcagcctcttacctctgctcattcctgtgcttgcaaacacgtgtaaaagtagcagctcana

SEQ ID NO: 2757 - DNA, 562 bp, Chlorella sorokiniana
  Clone ID: LIB3602-041-Q6-K1-C6
cggcttcaaggtcaaggtgagggctagtgcaggcttgtagtgaagcagtggcggtgaagcttgcatgctcactggcagggcggtttgttgcattgcccgcaggcgtgcacttgtgcgcacgtatgcccgacctgtgcttcacacccgcctgtgctgctcccccctctgcagtacgagaccaagggcacgatcacctctgaggagtctgacaagctggaggacccgaacacacgctttgtctgcgtcttcgacagcaccttcgtctaggcgaacagccccccccatctgcccccggggcaacaaccggcaaccgcaaccctccctcgccaaaccgcatgccccgcaagccacggccgcgccctgctgcgccagcctttgcacacaacccctagccgtcagttcatgcaaccccaaccatcagccgtcgcaccgtgatacccccgttgcaccaatcctccccgccagagagcgcgctgctctcacgcccacatttcaagctaacacttgaccctgcactttttgccgcccataatcccctccgtcaatgaaacgaatgttatac

SEQ ID NO: 2758 - DNA, 519 bp, Chlorella sorokiniana
  unsure (1)..(519): unsure at all n locations; Clone ID: LIB3602-041-Q6-K1-C7
ggcgcggtggagtgggcaattcgttcgcgatggtgaacgtcccgaagaccaagaaggccttctgcaagggcaaggagtgccgcaagcacaccatgcacaaggtcactcagtacaagaccggcaaggcgtcgctctacgcgcagggcaagcggcgttacgaccgcaagcagtccggctatggtggccagaccaagcccgtgttccacaagaaggccaagaccaccaagaagattgtgctgcgtctggcctgcaccgtgtgcaaggcccagcacatgcacgccatcaagcgctgcaagcacttcgagatcggcggcgacaagaaggtcaaggggctatactagtaaaaaaaaggagagcggcaggcggagagcatgaccgagaaatggaggcagcggcgcccgctcaccctgggcggnctgctccccgcccggcgcctcgctttggccgcctctggccactcgtacgcctccttgtccatgcccttgtgcttcctgagnctgcccaacctgcatgcaagca

SEQ ID NO: 2759 - DNA, 556 bp, Chlorella sorokiniana
  Clone ID: LIB3602-041-Q6-K1-C8
gcttgcagcgccctgggatgcagcagcagcagcagcagagccagcggacagctgcggctatcgagcggcggcagccgacgactgggcggcggcgctgcactgcgcctgcggcgcagcctggtgcctgccccaagcccagccccgcagcagcgtcagcagcagcggctgcagccggcgcaagtctggccgtttgacctggcatggggcgccagcgtggactacaacacgctctgggacacgctgccgcagaacctgtttgcgctgtccctcttcccatacctcggcttcctctaccacctgacacgcagcaagcagtcgccgcctctggccctgtttggctggtacttcctgctggcctttgtgttcgccaccatccctgccggcatctacgccaagaaggtgtactacacagcgcttgccaatgtcgactggctgcacggctcggcagaattcctgctcaccctcacaaatctcttcatcgtcctgggcatgcggagcgccatccgcaaagccgaagaagagaacgcggccaaggcggcggcggcagcagcaggcg

SEQ ID NO: 2760 - DNA, 523 bp, Chlorella sorokiniana
  Clone ID: LIB3602-041-Q6-K1-C9
ggacgcattgctcgaccagaacatgcctgcagacgagcttgctttgttggaggagaacgtgcgcgtcactggcgctgggctccagaagctggcggcagcggcgcgaggcgagcgctagatggcgcagcggcggctggttgcgtcggcacgatatgtggaggctcggaacgacgccatgtggagcgacctgttccacgctgacgtacgcgctgctgagtggagcctggtagccatgccttggctgcagctgaacgctctgccgcagtacccaaactcgatctggtactgcctgcgagtcggtgtggcagtactggcattttccaagagcagtgggcgtgccgtggcgcgctctgttcatcacactgactggctgtcgctcatttgcttcgacctctgccgcacgttcttccaagcccccgctgctctggagcggcgcctctgcatcccctctccttccctcccaacatttcatcagctcagctgcagctctctcgctaacaacccctggtaaatctgtgactca

SEQ ID NO: 2761 - DNA, 575 bp, Chlorella sorokiniana
  Clone ID: LIB3602-041-Q6-K1-D1
gcacgctgtgctgagcacgctgcggctgagggccctggtgctgcaccaggctgggcttgccccaagcctggctgcaaccccaggccgttaggcctgcagcgcagcctcaacccaacgccgccacccgccaacgccaacccaaccctgcggggtggccccccgccccgctggccggccaatcgcgcccgccccgtcttgtctgcctccgctactcatcacccctcccatccattacagccgcactactactaggttttctgcccaccctgccgcaccgcaaatcaacacacgccgttggtcgcattgccgcatgcgcccgtcggcggcacgacaccccccgccgacacccaactgaccctgccgttgtttgcctagcgcgtactgtctgattgtctttcgttccagcgcggcagcgccccaccccctggctcgccggctgctcccttccttcctgggcccaccgcccgttttgacatgtgggctgcaagccttcccccgccgcaccggctggcccaaggccggccagtcagtgtggcgacatgacacacacacttgctgcctttgcttttccatgc

SEQ ID NO: 2762 - DNA, 568 bp, Chlorella sorokiniana
  unsure (1)..(568): unsure at all n locations; Clone ID: LIB3602-041-Q6-K1-D10
gtcaagggcgccacctggtttgagaccggcgccgccatgctcaacggcggcactctcaactggttcgcggtgcccttcgtgaacttcaacaacccgctgcccctgttcgccgtggtggccatcaacgtggccctgatggccgcggccgagaactaccgccgcactgaggacggtcccgctggctacgccccgggtgtgggcaagttcgacgagtctgtgtactccaacatggacaacctgtaccccggcggccccttcgaccccctgggcctggctgacgacccggaggtgctggctgagctgaaggtgaaggagatcaagaacggccgcctggccatggtgtccttcctcggcttcgccgtgcaggcggccgtcactggcgagggaccctacgcgaactggtcgaagcatgttgctgaccccttcggctacaacctgctgaccatcctgtcctctgaggaccgcgccgccgtgctctaagcagccggccccgcctggcgcccgccgncgccccgagtgtagctctgtagtcccaccccttccctgtttccgcttgttcttgtgctct

SEQ ID NO: 2763 - DNA, 89 bp, Chlorella sorokiniana
  Clone ID: LIB3602-041-Q6-K1-D11
aaaaaaaaaaaaaaaaaaaaaaaaaaaaaaaaaaaaaaaaaaaaaaaaaaaaaaaaaaaaaaaaaaaaaaaaaaaaaaaaaaaaaaagg

SEQ ID NO: 2764 - DNA, 221 bp, Chlorella sorokiniana
  Clone ID: LIB3602-041-Q6-K1-D12
gactgagtgtacctcttttccactacttgttgacctgatgcatgcagttgccaccagcgagtgggatgtaatgcaaacatgctgcactggttgggttgcactataaattctggaccccttttacaggctattaccaaagccaatcaggccatgttattgttacatggcctgctgcagcccattctacgtgcccattctacgtgcatgtaacatggcttgat

SEQ ID NO: 2765 - DNA, 386 bp, Chlorella sorokiniana
  unsure (1)..(386): unsure at all n locations; Clone ID: LIB3602-041-Q6-K1-D2
gcactgctgcccagcacagtgggtatgctccagtgggaacgctgattgctgggaggcagcggggccctgtggcgcccctgagcgcagctcatcgcactttgtacactgctgtacccccggccgccatgagcggccctcgcatatcagatcaacgaaccaatttcatctctgtgcatttggtgggtgcttctgaggcttcatatttggcacttgacgtttgtaagcagcccngcnnanaaaaaaaaaaataaaaaaaataaaaaaaaaaaaaaaaaaaaaaataaaaaaannnaaataaaaaaaatttnnttatgggccccttgggggnacgannatnntttgtgacacccaactgaccctgccgttgaatggctagcgcgtactgt

SEQ ID NO: 2766 - DNA, 478 bp, Chlorella sorokiniana
  Clone ID: LIB3602-041-Q6-K1-D3
ggcggcggcgagcagcgagcctgccgctgcgcccaagaagcgcggccgcaagaaggccagtgccaagaagtgaaggtgctgagctggagctcgcccgcgctgtgctgcgctgtgctgcgctgtctcgtgctgtgctgtgctgtgctgtgctgtgtcatgccgggctgctttggtatgcatgtggggtgaggcgtgcggatagccgccgcctgctctgcttaccacctggcttcgttgtcttgctgagttttcgcagtgctgccagcgacggcaagttgttttccccacataacttgcttgcattttcccaatgctgctgtcgccattcttagctgtggctgggcccgcgccatttgcggcccggcacgattgatttgctgcgtccggcgtttattctgccggctgcgacttcggccctccaggcctgtttccctgtatgtatttggctttcgctttgattgcaacatgcacactggtg

SEQ ID NO: 2767 - DNA, 517 bp, Chlorella sorokiniana
  Clone ID: LIB3602-041-Q6-K1-D4
cgggcaagaccatcaccctcgaggtggagtcttcggacaccatcgagaatgtgaaggccaagatccaggacaaggagggcatcccccctgaccagcagcgcctgatcttcgccggcaagcagctggaggacggccgcaccctggcagactacaacatccagaaggagtcgacgctgcacctggtgctgcgcctgcgcggcggcatcattgagccgtccctgcagatcctggcccgcaagtacaaccaggacaagatgatctgccgcaagtgctacgcccgcctgcacccccgcgctgtgaactgccgcaagaagaagtgcggccacacctcgcagctgcgccccaagaagaaactcaagtaaactactcgcttcggcacgagcggaagcggcatgagcggcagcaaccgctgccccccccccgccccgccagccgggatgccatgacagcaccggctgctcagctgctgatgtgctgcatgtcaattgctgctgcggaaatgtaacggtggtagcga

SEQ ID NO: 2768 - DNA, 569 bp, Chlorella sorokiniana
  Clone ID: LIB3602-041-Q6-K1-D5
cgctctatgagaagcggcccaagacgttcggcattggcggcgacctgccggccaagcgcgacatgcgccgctttgtgaagtggcccaagtacgtgcgcatccagcggcagcggcgtgtgctgaaccagcgcctgaaggtgccccctgccctcaaccgcttcacccgcacgctggacaagaacatggccgagagcctgttcaagctgctgatgaagtaccggcccgaggacaaggcggccaagaaggagcggctgctgaaggaggcggaggcgcgcgaggctggccaggaggttgagaagaagaagcctgtggtggtcaagtacggcatcaaccacatcacgcagctggtggagagcggcaaggcgcagtgcgtggtgattgcgcacgacgtggaccccattgagattgtggtgtggctgcccgcgctgtgcaagaagatgggcgtgccctactgcatcgtcaagggcaaggcgcggctgggcaccgtggtgcacaagaagacggccaccgcgctggcgctgacggcggtgaagaacgaggaccagcgcgagttcgccaagctggtcgag

SEQ ID NO: 2769 - DNA, 374 bp, Chlorella sorokiniana
  Clone ID: LIB3602-041-Q6-K1-D6
cgcttgcttgggttacagaggctgggcctggtccacaggctgactggttttggaaacaacacaacgtgggcatgcaatgctggaatgaaacaacaacaacggaggtcgggtgttcggttgaccccattgttgagcaccaccggtttttgggagcagtgcactaacaactttttttcaagcgggttgtggaaacaaaaagggagcaaaaccgggtgcagggaggccaacgggcagttgctttttatcctaagtgctcaaccacccttccagggggatgtgagcttcttggagcgccccattaggcgggctgtcggggcacggcatgccacggacggcaacaatacaagggccaaggttcatggtcggtgtgggga

SEQ ID NO: 2770 - DNA, 567 bp, Chlorella sorokiniana
  Clone ID: LIB3602-041-Q6-K1-D8
cggctgggacccctgcttttcctacaccaaggtctgcatcgcctccgcctgcctgcgggagctgccgggctgccactttgtggccaccaaccttgactctgccgacacgatgggcaatgggcggttcatgcccggcaccggctgcagcgtgcacgcagttgagacggcagcagagcggcaagcggtcaatgtgggcaagggtggagactggctgctgcccttcctgtgcgacaagtacggcctgcggccagaggaggcgctcattgtgggggacaggctggacactgacgttgcgctggggcgcgcaggcggcctgctgacagtgctgcctatgacgggggtgaccacggaagccaagctggcagcagcaggcccacacgagctgccgcactatgtcgtgcccaacctggcggcgcttgccggcttggagttctagcctggttcttgacattattgattgaatcaaactgctgttcttctacatggtgtctgttcactgctcttcccttgtgaatcagcgccaacaaatgcgctggaacagaagctggccacgttccactgtacgag

SEQ ID NO: 2771 - DNA, 526 bp, Chlorella sorokiniana
  Clone ID: LIB3602-041-Q6-K1-D9
aaaaaaaaaaaaaaaaaaaaaaataaaaaaaaaaaaaaaaaaaaataaaaaaaaaataaaaaaaaaaaaaaaaatgaaaataaaaaaaaaaaaaaaaaaaaaatataaaaaaaaaaaaaaaaaatggggggggccattttaaagaaccaatgttaacgtccccgtacttgaaacgtaaaaatttttttaaggggccactaaaatcaaattaaggggccggcttttaaaaatttctgtgacagaaaaaccccttgcgtacccaaaataaactcattggaaaaaaaacccttttcactaacttggcgaaaaagcaaaaaggcccccaccaatcgcttttccaaaaaattgccaacacaaaatgaaaaatggaacccccctttaaccgacaaataaagccgggtgtgtggggggttaaccccaagtgttacccttaaattagcaagagcctaagccccgacatttttgatttaatcccattcttttttcgcaacatggggggttttccccggtaaagctttaaaaaggg

SEQ ID NO: 2772 - DNA, 219 bp, Chlorella sorokiniana
  Clone ID: LIB3602-041-Q6-K1-E1
gcgacgtgagaccggtgcaggctgtcgtcgtgcaaactcgcaagctgaaggctaaggatgcgcccaagccgggggccccgcctccccgcaaggcggtcggctgcaccctgaaaattggcggcaccaaggtgaatagcgtggctccccccgtcaaggtgggcggcaccaagctcatcggtggcaccaagtcggtgggcggcacccgcgctgtgaaggcca

SEQ ID NO: 2773 - DNA, 376 bp, Chlorella sorokiniana
  Clone ID: LIB3602-041-Q6-K1-E11
aaaaaaaccatttgttaaaaattaaggcctgggaccaaatcgggttaagggcccaaaaagggcttttacaggggggccttaaaaaagggtttggataccttggacctgtgggggaaggggtgtgcaaacattatggatgggtttggaaaaaatttttattgggaaaaccccttttttaaaacccgggtaaaggggggacattgagggggggggggggggtaagattttccgcggaaaacccaaaaaaagggggggggtgaaaaataggttccgtttaaggggcccaattttgttcaacgggggaccttcttttggggtggcaaattttggggatggggaggatggttctttgggggcttttaacgggttatggggg

SEQ ID NO: 2774 - DNA, 549 bp, Chlorella sorokiniana
  Clone ID: LIB3602-041-Q6-K1-E12
ccagaaggccgtggacaaggcgtacgacgagctggagggggcgcgcaagaaggtcacctcccagaaggaccgcatcgagaagacccgggggcagctggccaccaaccccaaggccaacgaccgcatggcggcggaggagtcggcgctgcagggtctggccaccaagctcagcaccgcggagctgaaccacaccaacctggaggcagcgcagcacgcgcgcgtcactgccctgaacaaggacgccatcaagatccgcgccgccattcggtctgcgctggaggccaccagcagcgcgctgacctccgccaaggagctggtgtccaccgacaccgagccgcagccgcccacagccgctgccggcaccggcgtggcgggccgctgagcggggcaaggcagactcaacgcaggccgggcaaactcatgaactcaagcaatgacatgcatgtgcgtgtggggtgtttgatttatctgactgcagaaactcaaagaatcacacgggtatggtctgtgcctacagcacttatttgctgcacaatgggtgtaacaagc

SEQ ID NO: 2775 - DNA, 535 bp, Chlorella sorokiniana
  Clone ID: LIB3602-041-Q6-K1-E2
ccactcggagcaccatggtgaagtacgcgaaggaggtggcggagccgaaggccgccaaggcccgcgggtccgacctgcgcgtccacttcaagaacacgcgtgaggccgccttcgctctgcgcaacatggacctgaccaaggccaaggcgtacatgcaggcggtgattgaccacaagcgctgcgtgcctttcctgcgctacaacggcggcgtgggccgcacctcccaggccaagaacgagggcaactcgattggccagggccggtggcccaagaagtcggccgagttcctgctgggcctgctgaccaacgcggagagcaacgccgagagcaagggcctggacgtggatgcgctgtacgtgagccacatccaggtcaacaaggcgcagaagggccgccgccggacttaccgcgcgcacggccgcatcaacgcctacatgtccagcccctgccacattgagctgatcctggcggagcgcgggcaggcggtgaaggccgaggcggaggacaagcgccgcaagctgagcaagaaggagct

SEQ ID NO: 2776 - DNA, 193 bp, Chlorella sorokiniana
  Clone ID: LIB3602-041-Q6-K1-E3
cgccacccattttttgctccaaaagccggcccttttgtaccccgccccaccgctgccactccctgctgctcgctgcacccgctcgctccctgtatgctgccccccttccgcactgcccctgatgcgctctgtagattacaacgctgactgatacaaatggttctgtgcctgtatggtggttcatgtgtgacac

SEQ ID NO: 2777 - DNA, 583 bp, Chlorella sorokiniana
  unsure (1)..(583): unsure at all n locations; Clone ID: LIB3602-041-Q6-K1-E4
ggaacaaaacacctccagcaaccctttctaccagcgtgccaagtatgtgtttgtctatcctgaggtggaggactggggcgcagcgtacgatgacgcactgaggcaggtcaactccaccgccaactggcgccaagtgttgtgcgtcccagagcagttcatgggcggcatcctggacccgcactgccagcagccggggtctgcaggcatcctcatattcttccggtggttcctgatgaggaacctcaactctacaggggcattcagccagtatgagcgctttattgtcacacgctcggactacatgcacaagatcaagcatgcgccattgtcgctgcttccgccacagtacatctggattccggacggcgagcagtataatggggtgacggatcgccacattattgtgccacagcaatacctgtcgggcagcattgacttcatgacagacatgctgcttgatcctgagggtctggtggcacgaatgaaggcctacacacacgcgttcaatcttgaagcgttcatcaagtttaccctgctagatcgcggnctctggcctatggtgcgcttctttccatacacgatg

SEQ ID NO: 2778 - DNA, 61 bp, Chlorella sorokiniana
  Clone ID: LIB3602-041-Q6-K1-E5
aaaaaaaaaaaaataaaaaaaacaataaataccaaaaagccaaaaaataaaaaaaaatatg

SEQ ID NO: 2779 - DNA, 491 bp, Chlorella sorokiniana
  unsure (1)..(491): unsure at all n locations; Clone ID: LIB3602-041-Q6-K1-E6
gttggcgcggtggagtggacaattcgttcgcgatggtgaacgtcccgaagaccaagaaggccttctgcaagggcaaggagtgccgcaggcacaccatgcacaaggtcactcagtacaagaccggcaaggcgtcgctctacgcgcagggcaagcggcgttacgaccgcaagcagtccggctatggtggccagaccaagcccgtgttccacaagaaggccaagaccatcaagaagattgtgctgcgtctggcctgcaccgtgtgcaaggcccagcacatgcacgccatcaagcgctgcaagcacttcgagatcggcggcgacaagaaggtcaaggggctatactagtaaaaaaaaggagagcggcaggcggagagcatgaccgagaaatggaggcagcggcgcccgctcaccctgggcggnctgctccccgcccggcgcctcgctttggccgcctctggccactcgtacgcctccttgtccatgcccttgtgc

SEQ ID NO: 2780 - DNA, 578 bp, Chlorella sorokiniana
  unsure (1)..(578): unsure at all n locations; Clone ID: LIB3602-041-Q6-K1-E7
ccgtggcaccggtgcaggctgccgtcgtgcagactcgcaagctgaaggctaaggatgcgcccaagccgcctcccccgcctccccgcaaggcggccggcggcaccgtgaagattggcggcaccaaggtgaagagcgtggctccccccgccaaggtggccggcaccaagctcatcggtggcaccaagtcggtgggcggcacccgcgctgtgaaggccatcgaggtgttctccagcgagaagcagttccgccagaagcagcaggacggtcggcaggcgcccaagattctcagccgcatcgagcagctccggctgctgtccaagctggagcagagcggcctgctgagcgtgctggagaagcagggcgtgacgctcagcaagctggagcagagcggcctgctgtccaccgctgagaagctgggcctcatctcgctgctggccgaccgcaacttccccggcaccctgtatgcgctggcaactgccctgctggtggccggccccgccgctgtgtacttcctccctgacgactctggcgccctggtggcggtgcangcgctggttgccctgacctgcattgctggc

SEQ ID NO: 2781 - DNA, 173 bp, Chlorella sorokiniana
  Clone ID: LIB3602-041-Q6-K1-E8
ggcgtaagcgcccccacgcctcagcggtcggcgggcggcggcggccgtggatgcgctgccgcagcgccgtcggcacagtttacggtggcgctcttttagccctctctctgttgctgctgctcgctgtttgctgaggcgtttcttcgcttacgcccgtacgcgtggtcagtccc

SEQ ID NO: 2782 - DNA, 82 bp, Chlorella sorokiniana
  Clone ID: LIB3602-041-Q6-K1-F1
cacaaagccagatggccagacaatgatgtagtttctgccacatgaagatcgcccccacccctgtaatgcatgtatccttgtc

SEQ ID NO: 2783 - DNA, 522 bp, Chlorella sorokiniana
  Clone ID: LIB3602-041-Q6-K1-F10
cctattgcctgtggggtctcaggagcaggatggtgaagttcctgaagcccgggaaggtggtcatccttctgtccggccgctatgccggcaagaaggcggtcatcgtgaagaactacgatgatggcaccagcagccgcccctacggccacgcgctcgtgtgcggcctgtctaaggagccccggaaggtgatcaagcggtcgtccctcaagacccaggcgcgccgctccagcctgaagaccttcatcaaggtggtcaactaccagcacatgatgcccacccgctacacgctggaggtggacctcaagggcgtggtgaccgccgagtgcgtggacaacagcaccaagaaggtggaggccaacaaggaggccaaggcgctgctggaggagaagttcaagagcggcaagaaccggtggttcttcaccaagctccgcttctgagggagtttcttggagagcctaggttgcagcagccgtgacgtgacgtgctccttgccccgagacgccatgtaacgtcacaccccgc

SEQ ID NO: 2784 - DNA, 82 bp, Chlorella sorokiniana
  Clone ID: LIB3602-041-Q6-K1-F11
aaaaaaaaaaaaaaaaaaaaaaaaaaaaaaaaagaaaaaaaagaataaaaaaaaacaaaaataaaaaaaacagagcatgcgg

SEQ ID NO: 2785 - DNA, 489 bp, Chlorella sorokiniana
  unsure (1)..(489): unsure at all n locations; Clone ID: LIB3602-041-Q6-K1-F12
gacgcagcggacagagcagccggtcaccatggtgcagcgcctcacctaccgccggcgtcacagctacgccaccaagtccaacaagcagcggatcctgcggacccctggcggcaagctggtgtaccagctggccaagaagaagacctcccaccccacctgccccatctccggccagcggctcaatgggctgcccgcggtgcgccccaacagcctgcaccgcgtgaacaagagcaagaagacggtgcaccgcgcgtacggcggccacctggcggcgggcgtggtcaaggagcgcatcgtgcgcgccttcctggtggaggagcagaagatcgtgaagaaggtgctgaagctgcaggctgccaaggaggctgcgcaggccaaggccgcggcggcaggcagcaagggcaagaagaagtccaagaagtgagcggcgcacgcgagcggacagttgcgccccatgctcccgctgtaatgcaccctcgntgaanaaaa

SEQ ID NO: 2786 - DNA, 417 bp, Chlorella sorokiniana
  unsure (1)..(417): unsure at all n locations; Clone ID: LIB3602-041-Q6-K1-F2
cgccaagctggcgtaagcacccgccagccaggcggctggccggtaccacccggacggccgccgcggcaccccgcagcagcccccttgccagctggcgccccacgcgccggcgcaacgttttgactccctctcgcaccctggtggggtttgtccaccggcggggcccccgcgccccagcccgcagcagctgcagcagcattcctctgctctacaccagtctcgctagttccctccagctttgattcccggccccgcccgacgcggcgggcgcccccgcactctagagcgcctgttcactttgtactgccacccccctaccacccgcgcttgccccgcggcgtgtgtaacgagaagaaaattcaacaaccattcctccnaagaaaaagaataacgaaacagttgaatgctataacctac

SEQ ID NO: 2787 - DNA, 500 bp, Chlorella sorokiniana
  Clone ID: LIB3602-041-Q6-K1-F3
aaaaaaaaaaaaaaaaaaaaaacaaaaaaaaaaaaaaaaaaaaaaaaaaggggcggccgcctcgcgaactaaaactgagctaaatcgagggcggctgccccacaacacaccaacacaacgtaaaagactccctctcgctccctggtggggtttgaccaccgtcggtgcccccgcgcgccggcccgcaggaactgcaggagcattcctgaacagtttgttcaccaacatcaccggctgcggcagtggtaaccactacatgtgccggtaaaacatgccgcccgtggtgtaagccgtttagcataacggccggcggcactcccctgcagagcagcaacagaggcggcagcagaaccagcttggctgtgttgggagccgccgtacaggcgcttggctgccgggccgctgcatgctctaacctccgtagcaaccgaccgcatgcccttgtgccatttcactcgcaaccgactcatacacatagctgactgtaacaatagactgac

SEQ ID NO: 2788 - DNA, 323 bp, Chlorella sorokiniana
  Clone ID: LIB3602-041-Q6-K1-F4
gccgcagtgtgtgaaggcgtggctggagtaccaggcgtgtgcggagcgggtggagaaggacgagtctggcgaggcgcactgcaccggccagtactttgacttctggcactgcatcgaccagtgcgccgcccccaagctgtttgccaagctcaaatgagctggccgggagcggcgggcaggcgacattgggtgacatctgcacatgcctcgccgcccgcccgcccgttgtttgccgctgcaccgccctttccatgctgacccatgcgccgtgctgcctggctgacgccggcagaggcttgctgtaacacgttcccgctcaaaaa

SEQ ID NO: 2789 - DNA, 587 bp, Chlorella sorokiniana
  Clone ID: LIB3602-041-Q6-K1-F5
ggacggccggtctagcaggtactgggcagccatgacggcagctgaggtcaagctgttcgggaagtggagcttcgaggatgtggaggtgaacgacatctccctggaggactacattgcggtcaagcccaagtatgcgcgcttcaccaatcacagtgcgggccgcttccagaagcgccgcttccgcaaggcgcagtgccccatcgtggagaggctgaccaacagcctgatgatgcacggccgcaacaacggcaagaagctgatggcggccagcattgtcaagcacgcgtttgacattgtcaacctgctgaccgaccagaacccggtccaggtgctcgtggacgccatcatcaacggcggcccgcgtgaggatgccacccgcattggcagcgccggtgtggtgcgccgccaggctgtggatgtgtcgccgctgcgccgcgtgaaccaggccatctggctgatcaccaccggcgcgcgcgagagcgcgttccgcaacatcaagaccattgcggagtgcctggcggacgagctgatcaacgcggccaagggcagctccaacagctacgccatcaagaagaagacgagatcga

SEQ ID NO: 2790 - DNA, 566 bp, Chlorella sorokiniana
  Clone ID: LIB3602-041-Q6-K1-F6
ggagaagaccctgttcgaggacaaggacaaggactgaagcagcggctcagcctgccacactgtggcccccacagtggggctgcatatggagaagggtggcgatgatggcagcagctcaagggcctgctgcagaagggcggctgcttggacgagggacgacaaacaagccggtggcttgctagcagcttgccagtggcggcatggccaccgcgtgccagctgaggcaagccgcctgaaacgaaccagttgaaaatatgtgctgccgctgcgctgcggtgcgcagaggcacacgcggacatcgtactatcggtgaactctggacttggccagcataagttttgagctctgttgttttgcacctgcacctgagagggagacagcatttctgcccaagccgcatttgagtttcattctcgccctctccacccatcaatctgccagagtgtgcatttcatactcacactcttccaaacttgtgtcagcaagcataacagccgcaaatgcatagttcatccatccatcatgtagtgtggtcactgtagcgcgtagtgtaactggcgggaggt

SEQ ID NO: 2791 - DNA, 440 bp, Chlorella sorokiniana
  unsure (1)..(440): unsure at all n locations; Clone ID: LIB3602-041-Q6-K1-F7
cggacgcgtgggcgaggtgtggcgcacaggtcaggcggcggtgtatggcggctggttccgccccagccccaagcccaagacgcaggggcagcagtgaggcggggccggcgcacaacagtcctggccacggcggctcgcaagctggcttgccagccccacagcggcagggcaggtagcctcgctccatcttggcaccagcccggctggcagcggcacgcgctcaaagcagcacagcaaatgatgaccaggcgggatgccaacctcacagtagcgtgtgtttccagttttgatgctcggtttttggaacccagatttttcccactgctcctctcagcccgactcagcccatctgacttgcacccctgcatgctttctggccctgacccatgctcctcggtccatttcattgacacctagcgacttgttacacgcnnnngaca

SEQ ID NO: 2792 - DNA, 488 bp, Chlorella sorokiniana
  Clone ID: LIB3602-041-Q6-K1-F8
cggcagcagcggcaaatggcagcggcgatgcagcagcagcggtggacggcggcggcaagcggccggcggagaacggcagcggcgatgcagcagcggcagcaaagaacggcgcaaacggtgcgccggctgcggcggcggcgggcgccaagcgcttcaaggctgcagagttgaagcccaagggcgcggacgacaaggtgtggaacagcttgttcaccagcagcaccggcggcggcagcggcaacgactacatgtgccgctcagccatgcggcgcgtggcgtaagccgtttagcataacggccggcggcactcccctgcagagcagcaacagaggcggcagcagaaccagcttggctgtgttgggagccgccgtacaggcgcttggctgccgggccgctgcatgctctaacctccgtagcaaccgaccgcatgcccttgtgccatttcactcgcaaccgactcatacacatagctgactgtaacaatagac

SEQ ID NO: 2793 - DNA, 417 bp, Chlorella sorokiniana
  Clone ID: LIB3602-041-Q6-K1-F9
cgcgggagcggtctcgcgagcgcgagcgcagcgaccgcgatcgggagcggtcagaccgcgacaggtaccgggagcgggagcgcagcagccgcgactacgatagggaccgcaagcgcgagcgcagccgggagcgcggatacgaccgctacgacgacagcaagcggcggcgcgagcgcgacctctagccccccagcagccagccattactgctcgcacagcagccgctctgtgggagcagccacctctagccccccagctgccaggctctgctgggccccactgactgagacggcggccggttgggacagtaggcgtagctgcctgctgcccagctgtggcggcattgccttgttgacttgccgtggcacgctgctgtgtgccacctagccggctgcgtgcgtgtaacacccgccatgc

SEQ ID NO: 2794 - DNA, 559 bp, Chlorella sorokiniana
  Clone ID: LIB3602-041-Q6-K1-G1
cgacacggggcccaacaccggcggcatgggcagctacagccccgcccccgtgctcacgcccgccatcgagcagcaggcgatggaggagctgatataccccaccgcccgcggcatgtgcgcggagggcacccccttccgaggcgtgctatttgcggggctcatgattgagaatgggagggccaagctgctagagcacaacgtgcggtttggcgaccccgagtgccagtcgctcatggtgcggctgcagagcgacctgctcgagtcgctccaggcgcagtgccgcggcgagcaggtcaagctggagtggagctcagaccccagcctgacggtggtgcttgcagccaagggctaccccggcagctacgccaagggcggccccatccgcaacctggaggcggtgacgggcgccaaggtgttccatgcgggcactgccatgaaggacgggcaggtggtgtcggcaggcggccgcgtgctgggtgtgacggcggttggcaaggacgtggcggaggcacaacgcaaggcatacgcagcggtggaccagatcgacttccccgatgga

SEQ ID NO: 2795 - DNA, 312 bp, Chlorella sorokiniana
  Clone ID: LIB3602-041-Q6-K1-G10
caatgtagttacaatgcgctgctttgtgcaagaaaacacacagtcgcaggtgttgagccggattcatttgtgtcatcagaggaagttgggggtggacaggtcgttggcgagcttgtagaggccgagtgcggggcccacaaagcggaagagcgcccagcccaccagcaggccgcccacgctccacagcgccgccttgttggcccagaacaggaagccgcgctggcccatgtacagctctgtggccttctgcagcgggtccatctcctcccagccctccgggaacagctggccctctttccagttagccatgcc

SEQ ID NO: 2796 - DNA, 362 bp, Chlorella sorokiniana
  unsure (1)..(362): unsure at all n locations; Clone ID: LIB3602-041-Q6-K1-G11
ttagatcggaaggggagccctttttttttttttttttttttttaaaatttcaatgtagcaacaatgggctggtgtgagcaagaaaacacacantctcaggtgttgacccggattcatttgtgtcatcagaggaagttgggggtggacaggtcgttggcgagcttgtataggccgagtgcggggcccacaaagcggaagagcgcccagcccaccancaggccgcccacgctgcacagagccgccttgttggcccaaaacaggaagccgcgctggcccatgtacagttctgtggccttgtgcagcgggtccatctcctcccaaccctccgggaacagctggccctctttccagttagccatgcc

SEQ ID NO: 2797 - DNA, 568 bp, Chlorella sorokiniana
  unsure (1)..(568): unsure at all n locations; Clone ID: LIB3602-041-Q6-K1-G12
cgccgcgtggccaccccaggttgacacagcagcgcggcagccatggcgtccaagcgtaagggtggcgtgggcggcaacaagttccgcatgaccctgggtctgcccgtggccgcggtgatgaactgcgccgacaacagcggcgccaagaacctgtacatcatctcggtgcacggctggggcgcgcgcctgaaccgnctgcccgccgccgcccccggcgacatggtcatggcgaccgtgaagaagggcaagcccgacttgcgcaagaaggtcatgcccgcgattgtggtgcggcagcgcaaggcgttccggcggaaggacggcacctacatctactttgaggacaacgcgggcgtgattgtcaacaccaagggcgagatgaagggctccgcgatcaccggccccgtggccaaggagtgcgccgacctctggccccgtgtggcggcagcagccaacaccattgtgtanagcggcggggcgtccggctggggcgtcgcggaacgcggaccacacttgaatacccaccgcctgccgggctcccggngcagnatgctgtaatgcacatccagcg

SEQ ID NO: 2798 - DNA, 556 bp, Chlorella sorokiniana
  Clone ID: LIB3602-041-Q6-K1-G2
gcgcagctcaccgcgctgagcaagggccgaaaggaagcggggcccggagcagcaggggaggcgcctctcagcgaagaggagcttcgagagcagcagaagcggcgcatgctgttcggccagagctggccggcggccgcgcccaaggcgccacagcaggcgcagcagcagcagcagcagcagcagcccggcggcggtggcgcggcggcgccagcgtcgcctgcccacgcggctggtggcgaggggcgggcaagcgggccgggcagtgcaggggtcagcccgagagggtcggcccatgcggaagcggcggcagccccaggggagatctatggcagcctgagcgcggcggccagtgcggctgggccgctcgccagcggcgcattcggcagccggctaggcagcctggagctgcccgccccgccgctgcatccagaggatagtggcggcatggcgcccggcagcagcagcggcaggagcgagcaggcagacccagcggcagcggcgctgttgggcggccctattggcggcggaggcagcggcggcggcagcggtcgccccg

SEQ ID NO: 2799 - DNA, 106 bp, Chlorella sorokiniana
  Clone ID: LIB3602-041-Q6-K1-G3
acattatgggaactaacttcagccgagcatgttgttctgtgcctggagggtcttgcggggggcaggggggcctttaaaaagtatcatgggcatgcctaaagggcgg

SEQ ID NO: 2800 - DNA, 110 bp, Chlorella sorokiniana
  Clone ID: LIB3602-041-Q6-K1-G4
aaaaaaaaaaaaaaaaaaaaaaaaaaaaaaaaaaaaaaaaaaaaaaaaaaaaaaaaaaaaaaaaaaaaaaaaaaaaaaaaaaaaagaaaaaaaaaaaaaaaaaagggggg

SEQ ID NO: 2801 - DNA, 246 bp, Chlorella sorokiniana
  Clone ID: LIB3602-041-Q6-K1-G6
cgcgagcggcgcccttttttttttttttttttttttaaaatcttaaacttacacaatcttcggtaagagagaggagcgttagggtaagaaaaggcgggccacgccgcgcaaacagcggtggcgggaccgcgtcaaaaacgggtgggtggcttggtgcatcccgcacacatgtaaggcggtttggggtgagcgtgattgggatggcagggcacaaatgaagggtggcagtgatggagcaaggggggc

SEQ ID NO: 2802 - DNA, 438 bp, Chlorella sorokiniana
  Clone ID: LIB3602-041-Q6-K1-G7
ggagtcgatgctgtacatgcggtacaagaagagcgacaactccttctacgtgtttgccgacgacattgtgccgcgccacatctcctcggcgctgcacctcgattacgacaccgtggcgggggccgaccgcttcggcaacgtgtttgtgtcccgcctgccgcccgagatcagcgcgcaggtggaggaggaccccacgggcggcaaatacgccgcggagacgggactgctgggcggcgcgcccaacaagctgcagacgctggtcaacttccacgtgggcgatacggtgatggcgctgcagcgggcggtgctgcagccgggcggccgcgaaatgattgtgtacggcaccatctcgggcgccatcggcgtgctgtacccctttgcctcgcgcgaggactttgacttcttccagcacctggagatgcacatgcggcaggagca

SEQ ID NO: 2803 - DNA, 575 bp, Chlorella sorokiniana
  Clone ID: LIB3602-041-Q6-K1-G8
ggacaagctgctgggccgctgcaagcagaagcgcggctacgagtacgaggtgcagtggaagaacgaggcggagaccagctggctctcccgcgaccgcctcgaggagatgggcttctccaagatgctcatggacattgacatgaaggaggctgccgccgccggcctgctgggcaagcccctgaccgccaagaacgtggaggagatgctgggcaacctgggcctgcccgccgagtttgccacccactcccagatccgcggcctgtcgggcggccagaaggtgaagctggtgctgggtgccgccatgtggcagcagccccacatcctggtgctggatgagcccaccaactacctggaccgcgagtccctgggcgccatggcctccgccatcaaggagtacggcggcggtgtggtgattgtgtcgcatcaccacgagtttgtgaaccaggtgtgccaggagaagtggaccgtgggcggcggcaagctggaggtgaccggccagtccgcggccgctctggaggccgccaagctggagtggaagcgccaggaggagaccaccgacgccttcggcaacacca

SEQ ID NO: 2804 - DNA, 338 bp, Chlorella sorokiniana
  Clone ID: LIB3602-041-Q6-K1-G9
aaaaaaaatgatagaaacaaaaaaagcaaaaaaaaaaaataaaaatgcaaactgaaaaaaaaaaaacaaaggaggagagcaaggtggaatgtgacgcaaccagccttaaagagatgggcttctacaagatgctcatggtctttgacatacatgatgctgactgcgtcgccctgtttttcaacgctctttatacgggaacaacgcgtggtgatatcttgggtctacctgtgttctgcccgaaaagtgtgtaacccagtcggatttccaaagaatggcgctcggccaaagggcctttttaccgctggttgaccttatgtggaaactgccccacatcctgg

SEQ ID NO: 2805 - DNA, 515 bp, Chlorella sorokiniana
  Clone ID: LIB3602-041-Q6-K1-H1
ggacatgttcctgactgaggaggagggcaagaaggtgctcaaggtggactgccactttggcaagcgcaagagcctggcgtccatccgcacctgcacctcgcacgtgcagaacatgatcaccggcgtgaccaagggctacgagtacaagatgcgcctggtgtacgcccatttccccatcaacatcaacatcgagaacaagggcggcaaggtggagatccgcaacttcctgggcgagaagattgtgcgcgtggtggacatgctgccgggcgtgacctgcgagcgcagcgccgccgtcaaggacgagctgatcctgaccggcaacgacatcgagctggtgtcccgcagcagcgcgctgatccaccagaagtgcctggtgaagaagaaggacatccgcaagttcctggacggcatctacctcagcgagcgcggcaccctggtgaagcccgagtaagcggagcccgcacgttgcagtagaggtggcggcacgagcgcagcagtgcgcagcgctcacgccc

SEQ ID NO: 2806 - DNA, 380 bp, Chlorella sorokiniana
  Clone ID: LIB3602-041-Q6-K1-H10
cgatctcgcagattcgagcgctcgacccacgcgtgcgattgtttcctatctcccttgctccaccctgtgtgcgctcgccacctcatttggttggtcgtcacccccctgatttggtgcacccatgcattgcccagtcgctccaccactgccccgtacgttgcgagaagagaacccccctctcccgtccctccccccaccccctccgccgctcccctgccgccccctccgccacccctccggcaaccctgccttgcgcagtggggcacgccctgctgctcaggcggatccgtagttcagccattcagctctgtgtctcggcatcctgtaaccggctattttgttaaaaaaaaaaacctcgccaattgtcctttccaaaaatt

SEQ ID NO: 2807 - DNA, 83 bp, Chlorella sorokiniana
  Clone ID: LIB3602-041-Q6-K1-H4
ccctgtgcttgcgcctcagaactgtcctgcaccgccgccacttcccataacaaatatagcatggtcatgtaaagtgcagtggc

SEQ ID NO: 2808 - DNA, 484 bp, Chlorella sorokiniana
  Clone ID: LIB3602-041-Q6-K1-H5
gtgaaccgcgcggacgtggagacgctggtggacgccttccccggccagtccatcgacttcttcggcgcgctgcgtgcccgcgtctacgacgacaaggtccgcgagtggatcggcggcattggcgtggagaacatgggcaagcggctggtgaacagcaaggagggcaaggttgagtttgacaagcccgccatgcccctggccaccctcatgcactacggcaacctgctggtggaggagcaggagaacgtgaagcgcgtgcagctggcggacgagtacctgagcggcgcggcgctggcgggcgcctccggcagcagcctgcccgagggctaccaggcccggtaaacggcggcgcgtgcagccgtgcggcccgcgctggcagccgcagatgaggcaccctgcctcacaatgactgcctgccggcgtgggcaggcgcagcgctccgccctgtgagccccctcgccagcgggcactaaccagtgtacca

SEQ ID NO: 2809 - DNA, 401 bp, Chlorella sorokiniana
  unsure (1)..(401): unsure at all n locations; Clone ID: LIB3602-041-Q6-K1-H6
gagaaccgagcggacgtaaaaaacgctggtgagaacgccttccccggccagaccatcgacttnttnggcgcgctgcgtgcccgcgtctacgacaaacaaaggtccgtggggggggtccgcttcataggaaccaaaaacatgggcgggcggttgcagaacatttattttttttatgggggacctaaacaagattcgcgtgcccatggttaaccacatgcaatatgggaaacccctggcgtaaccccactttaacgggttgggcgaacatccccttttcccagacgggataaaaacgaaaaaggctgtcccctttggcatttccaaaaaatgggctaccttaatgggtaatgggcaccccccttgaacgggccattaaagcgggggggggtggatgttacccc

SEQ ID NO: 2810 - DNA, 96 bp, Chlorella sorokiniana
  unsure (1)..(96): unsure at all n locations; Clone ID: LIB3602-041-Q6-K1-H7
ccacgcgtccgaaaaaaaatgangaggagggcaagaaggtgctcaaggtggactgccactttggcaagcgcaagagcctggggtgcattcacaccg

SEQ ID NO: 2811 - DNA, 529 bp, Chlorella sorokiniana
  Clone ID: LIB3602-003-Q1-K1-A10
ccgagttccagaccaacctggtgccctacccccgcatccacttcatgctctcctcctacgcccgcgtgatctccgccgagaaggcgtaccacgagcagctgtccgtggctgagatcaccaactcggcgttcgagccctcctccatgatggccaagtgcgacccccgccacggcaagtacatggcctgctgcctgatgtaccgcggtgatgtggtgcccaaggatgtcaacgcctccgttgccaccatcaagaccaagcggaccattcaggtcgtggactggtgccccaccggctgcaagtgcggcatcaactaccagccgcccaccgtggtgcccggcggcgacctggccaaggtgcagcgcgcggtgtgcatgatctccaactccaccggcatcgccgaggtcttctcccgcctggaccacaagtgcgacctgatgtacgccaagcgcgcctttgtgcactggtacgacggcgagggcatggaggagggcgagtttctcgaggcgcgcgaggacctggcggtcctgga

SEQ ID NO: 2812 - DNA, 462 bp, Chlorella sorokiniana
  Clone ID: LIB3602-003-Q1-K1-A11
cgtgcccctcccttcttgctgctgcctctgctgctgcatgacgcatctccttgcctgctacccgtcttcgatgcaaccttcctagctactgttttttcgcacggctgcacccacgaccttgcccatctggcttgcgcccacctcgattttgcgcctaccttttcccccggactgcacaccgctcggaccgtcttctgtgtatcactgccggtgctgttggcacactgttttgcccgcacatgctgcatgcgttttgatttgaggcaccgccccgtggtgcgtttatgtttcgctattcagcaattggccagtacattggttggcatgcttacatactacgttgtgatcaaccgattgtaatgaaacactggagaaaaaaatacaccgacaatcgccgagtcttctcccgcctggaccacaaaaaaaaacagccccacccgtccggttagttttagatcccga

SEQ ID NO: 2813 - DNA, 492 bp, Chlorella sorokiniana
  Clone ID: LIB3602-003-Q1-K1-A12
ctggtgggagggctgggccccatcggtgtggcgctgctctacagcaaggtcggcctgcaaatggccatgctgctcatccccgcctgctacgtggcctcgggcctgggcctggcggagaccgagggcgtgatcaagtctgagcgggagcggcggcactccgaggcagcggcgctgctgcaccaggcgcccacagaaacgggcagctaggcggcgcatgcggccccacagttttgaacgtacctcttgagcacagcaaccaaccattcgactctgagagaaatcacacagcgtttttgccctcgtgtctgtgtctgtgaccccaaataatgccttgagcgccaggcaaatgagccgctttcatccgcctgtgtattccttgcacccctccgtctgcctgacccgcatcgctaacggtgtgtggcactgcagttagatccacccctgcacagctacgcttaccttgtcagtacctgtttgtctgtaatcgatctg

SEQ ID NO: 2814 - DNA, 517 bp, Chlorella sorokiniana
  Clone ID: LIB3602-003-Q1-K1-A4
cacatgggcctgtccgccaacctgcggtaccaagtgctcaacggcctggacatggtgctgcaacccatgatgccttctaatgtcttccgcctctacgcctccatcatccgtggcctcaacaacctggcgggcggcatgtcctttgtcattattgccaaggcgctgggcgtgcaaaaggcagccgatgctgctcccgagccggtgcccgctgcagccggcaagaagcagaagtaagcaggccgcaacatgccgctctacctgcaaagaaccaccttggcgcggcgcacgcctcttgacgatacagcccatcatgtcgatgcttttgaccattcatggattgctgtccaaaccagaagagatgcctctgatcgcgctgcctccgcggatgtgctgttgactatatacccctgtaaggccacaaaacgcccaatggagctgcggatgttccaccgtgctggcaccactgataaccactcctccatgccccttccctcggggcgtgcaagttaaagcgatt

SEQ ID NO: 2815 - DNA, 264 bp, Chlorella sorokiniana
  Clone ID: LIB3602-003-Q1-K1-A5
catcgtgctcaccaagttcgacaccatcgacgacaaggtgggcgccgcgctgtccatggtgtacacctcgggcgcgcccatcatgtttgcgggctgcggccagacgtatgtggacctcacgaagctgcacgtgaagagcgtgctcaatagcctgctcaagtgatggacacgtgattgagtcctctggcaacagcttgcgagatagccagtcagcatcaggtcgtgctggccggctgccgagagccggctcgctgccgagagccg

SEQ ID NO: 2816 - DNA, 55 bp, Chlorella sorokiniana
  Clone ID: LIB3602-003-Q1-K1-A6
cggacaatgggacccccccaagaacgcgatcaacagcgcgagaaagtgcagagcg

SEQ ID NO: 2817 - DNA, 397 bp, Chlorella sorokiniana
  unsure (1)..(397): unsure at all n locations; Clone ID: LIB3602-003-Q1-K1-A7
cgccgtggaggcgttcctggccaacaacaccgaggcactcaacgacccggccggcctggccaagatcctgcgctaccacgtggtgcccggcaccaactacaagctggaccagctgaccgacggcctgtggctgcagaccctggtgcccggcgaggagggcaagctgctggtgcacaagggcgccaaccagaagaagcccaccctgatgaccacctctggccagaaggtgcagatctaccagttcaacctggagaccaagagcggcgcgcagctgttcaccgtcaaggacgtgctggtgcccggcacccaggtgctgcagtacaagcccgccaccgncgncgtccccaccaccttccccacccagatgtaagcagctagctgcacgctaggctgcacg

SEQ ID NO: 2818 - DNA, 468 bp, Chlorella sorokiniana
  Clone ID: LIB3602-003-Q1-K1-A8
ggccacgcacatgctcaaggccctgaacaaggacatgatgaagatggagaacgtgtacaagcagctgtatcctagcggctgctccttcaaaggacgctggcacccgcggtccaagctgcttgaagccttcacaaaaattcgttcaagctgactggttcaattgcaaatgacttgacgaaacagcacacacccaacaagcaagagtgcggacaacgtgtgcgggaggcggaccgcgtggcaaagtcaaaaccataagcgtcaaccaagcatgcctgggacacggagatcacagcgggcaccgcgtcagcagcgggccccatcgaccgggtgcagtgtagcctgtaggccgcttgcagatagcagcatggcagcggcactccacgatttgcatgtgatcagctactgtcctcaagcccgccccaagcaagtgctgctcagcatggagctggccttgcagtcttccacaaa

SEQ ID NO: 2819 - DNA, 462 bp, Chlorella sorokiniana
  Clone ID: LIB3602-003-Q1-K1-A9
ggtcgcccaccgtcgcgggagagatgcctgccattgctcgagatcacagtcttctgatgctgttggcggctttaccaacggcgacatcccgcggctgcgctggattcgtattttacatttttggccttcatggcattccaatcaacgactttcggcgcgacggctgtcctgccccaacagcatccgcgcctgcacggtccgggaccagattctgtccactgggattcagtggcagccctgggaaggattgggcctgtgggctgcgctggctacaacatttggctacctgctgtgccttaccaagcggctacctgccctaccagcgcgcgtgcgcaagcgagcgcgcctgagcggcgcggtgccgctctgggttacgcatcgttgacaataacatcttgtatgaagcagactctcattccatgaaaatacacatccctcagtctttgtccttgaaacactgtg

SEQ ID NO: 2820 - DNA, 285 bp, Chlorella sorokiniana
  unsure (1)..(285): unsure at all n locations; Clone ID: LIB3602-003-Q1-K1-B1
caggccgannnnaaagngccccngnacaacccngnccaaacacacaaaccaaccagccnggaaagcaaaanngccacnaggggcccccggcanacnagccgccccgcagcaagcccaaggcccagcccagaccccaacccagggcaacnggccccacgannccncccacccnccaccgcccacaacnagcgccncngcngccncagcccacccgccagacggcgcncgcccgccaaccccacccccaccccaacgagngncgggcagccgcggacncgccgcggc

SEQ ID NO: 2821 - DNA, 443 bp, Chlorella sorokiniana
  Clone ID: LIB3602-003-Q1-K1-B10
gccggcgcagcacggcgtgccagcaggcgcggcatcaggccgcccgccgcggcgacgggcgaggagcgggggcatgcaccagctttgcttgcacgctgcagatgcgcagctcggctcgcggtgcagcgtggcgcggcagggctgttgtgcccccgcgctagtgagatgacttcttagcagctgatgaggagatgcgtgcggcgccgcggcagagaggcgtgcatgcttcgcgaatggtaaccaaccggccaggcgggcggccaggcgggcaggtgtggtcctgcgctgccccagtggcagctggtgctgctcctgccccctgccacaccaatccaggccttatctcactctccattgttgcgttcctgctgcaccccaagttttgcgagttgcaacatgtgcctgtgttgctctgctctcctcgctttctttgctggcagcac

SEQ ID NO: 2822 - DNA, 557 bp, Chlorella sorokiniana
  Clone ID: LIB3602-003-Q1-K1-B11
cccaaggagccgcgggaccaggcgcccgtgattgttgcgggcaaggaccagggggaggtggacaacgactacttcctggtgcctgtggcggtgaaggaccacgagggaccgctggagaacaagttccctgtggagaaccgcctgctgccccagggccccgccgagctcaaggcgcacctgcagcagcggcgggcagcgccctactgggcccgcctggccgacttccacctcctgctctacctcgctcgccagcccaactttgacgaaccggaggtgtcggtgctggcggatgcggtgcacaccaagcaggcggtgcccgagggcttacaaatcatcatcgactcaatggcgggcctgtgaggcgcagccggaccacgcttgcaggcgcctgatcgcagttggcaccaaaccggtgtaaagagcactcaatgcggcaatgagacgagctgcaggcgcatgcgtaacacacatgtaggcgggaatgcaagcgcacaggatgcagctgcagcggcatgcttgtcaacttaccaagccagcagaataaaagccgcgtgagc

SEQ ID NO: 2823 - DNA, 450 bp, Chlorella sorokiniana
  Clone ID: LIB3602-003-Q1-K1-B12
gcagcccaagaggccgaggcggggcctgcctccagcctggctgcacaggctgagcagtgcatgctgctggcgcagcgcgcgggcgccctgtccgcggaggacgaggcgcactgggcggcgctgctggcctttcacgacacggtttggtacatgctgacgccgctgcagggcgcccggctgctggtggcgtgccgaggcttgtactcagatccagtgcagctggcgctggcggttgagcggctcgaagcacaggcggcatgtggcgagcaaactgagcctagcgtgagcgagcaggcggcgtcaccctggcagtcggcggggcacgcggacggcatcgacagtgactctgcggccgtcgacgacagctggaggcagcgagccgccgagcagatgagcggtgactgcccacagcactctagagagctctccaccagcctgctcacgctgaca

SEQ ID NO: 2824 - DNA, 465 bp, Chlorella sorokiniana
  unsure (1)..(465): unsure at all n locations; Clone ID: LIB3602-003-Q1-K1-B2
agcggctgaagcagtaccacatcaacaacctggaggtggtgcacgtgcggggcgacccgcgcagcatgaacgacatgcgccgcctcgtgcctctgtccgccttcaaggccgcggtggtggtctccgactcactgtggtgcgatggcgcagcgagcggctccgagggcgacccatcgctgcgcagtataaaccagtcggagatgctggccctggactcggcctgcctcatggtgcagctcaacatccgnctgctgctggaggagggcggccacccctcgatcagcatcatctgcgagaagctaacatacgtgggagtgacgcggtttgaggacgacacccgcctgccactgggcatcgcaatcaacagcagctcgtacgccggcaaagcgctcacgcaggtagcagtggacccccgctttctcaaggccttcatgcagctggccgtggagagcgacatgctggtgc

SEQ ID NO: 2825 - DNA, 134 bp, Chlorella sorokiniana
  Clone ID: LIB3602-003-Q1-K1-B3
agcggctgaagctgtaccacatcaacaacctggaggcggtgcacgtgcggcgcgacccgcgcagcatgaacgacatgcgccgcctcgtgcctgtgtacgccttcaacgccgcggtggtggtctccgcactcact

SEQ ID NO: 2826 - DNA, 482 bp, Chlorella sorokiniana
  Clone ID: LIB3602-003-Q1-K1-B5
aaggtgcgcacgggtgctacctggtgcctgtggtagtgaacgaccactagggacctctgtagaacaagttccctgtggagaaccgtctgctgccccagggccctgccgaacttaatggtcatgtgcaacatccgcgtttagcgcgctactgggctcgccaggacgacttccacctcctgctctacctagctcgccagcccaactttgacgaaccggaggtgtctgtgctggcggatgcggtgcacaccaagcaggcggtgcccgagggcttacaaatcatcatcgactcaatggcgtgcctgtgaggcgcatccggaccacgcttgcatgcgcctgatcgcagttggcaccaaacctgtgtaaagagcactcaatgcggcaatgagactagctgcaagcgcatgcgtaacacacatgtaggctggaatgcaagcgcacaggatgcagctgcagcggcatgcttgtcagcttaccaagccagc

SEQ ID NO: 2827 - DNA, 453 bp, Chlorella sorokiniana
  unsure (1)..(453): unsure at all n locations; Clone ID: LIB3602-003-Q1-K1-B8
agcgggaacagccggctggctgcctctgcactacgcagctggccatatgcacgagggtgcaagcaacggcaacgttgtgcgcctgctgctgcaggcggcgccacaagctgccatgatagcagagcgctgcgacaaccgtttgcccctgcaccttgctgccatggaaagtcaggaggtggtgacgcgcttgctgctggaggcagcacctgcagcatccacggcaaggactaaacgcaacttcctgcacagcacaccactcgagcttgcactatcatttgagcacccagcaaccgcccgtgttctgctgggtgctggccctcccgagcttgtcttggccgctcttgccgctcacaaccctgatcactctntgtttgccgattgcctgctggcccccggccgcatgccgctagaggctgcccattgngcattggtgccctccccctgcatcggcat

SEQ ID NO: 2828 - DNA, 521 bp, Chlorella sorokiniana
  unsure (1)..(521): unsure at all n locations; Clone ID: LIB3602-003-Q1-K1-B9
ggcccccatcggcgcagccgtagctgcgggcgcaccggtgattaccttctctcaggctctggcgtcggggggcccgccccaggccaacgggcgcaagcccggccagccggggcggacatgagacggctgcaaggccgctgaacaagttactatggggccgacaggtctgcactcaatggccggctggctggccaggcagggtgccctgctgcacatacgtgtgccccgattttcccttcaatagtatatgctcgaggccaatggcactgctctctccttgcgctgatcgcgcgtctcgggctccttggatctcttgatctgctaacctgtccgattcgggcaccctttcacggggtgccgctgcttcgatctgtgcgcgacgcgccgatttttaaacacttgtccgtagaagctgcccattgggcattggtgccctccccctgcatcggcatcggccgcgcgctgcccaccgccctggcctgctcccccgcccaagctgccctgctggtgcngcacctacc

SEQ ID NO: 2829 - DNA, 390 bp, Chlorella sorokiniana
  Clone ID: LIB3602-003-Q1-K1-C10
ctcgcgtgtgcgccggaagttcaagggatgcggcatcatcatgcccaacattggctacggcaccaacaagaagacccgccacgtgctgcccaacggcttcctcaagtttgtggtgaacaacgtgaaggaccttgagctgctgctgatgcacaaccgcaagtactgcgccgagatcgcgcacaacgtgtccaccctcaagcgcaaggcgattgtggagcgcgcggcggagctgaacattgccctgaccaacggcaacagccggctgcgcagccaggaggacgagtaagctgctcgcccccctgcgtcaccagcagcggcgccagtaccttgggagcatagcagcggcttacattggggtgctactgctcccatgtaaggcaccccaatcaa

SEQ ID NO: 2830 - DNA, 393 bp, Chlorella sorokiniana
  Clone ID: LIB3602-003-Q1-K1-C11
ctcgcgtgtgcgccaggaaaatcaagggatgcggcatcatcatgcccaacattggctacggcaccaaacaagaagacccgccacgtgctgcccaacggcttcctcaagtttgtggtgaacaacgtgaaggaccttgagctgctgctgatgcacaaccgcaagtactgcgccgagatcgcgcacaacgtgtccaccctcaagcgcaaggtgattgtggagcgcgcggcggagctgaacattgccctgaccaacggcaacagccggctgcgcagccaggaggacgagtaagctgctcgcccccctgcgtcaccagcagcggcgccagtaccttgggagcatagcagcggcttacattggggtgctactgctcccatgtaaggcaccccagtcaaa

SEQ ID NO: 2831 - DNA, 424 bp, Chlorella sorokiniana
  unsure (1)..(424): unsure at all n locations; Clone ID: LIB3602-003-Q1-K1-C12
ggctggcattgaggactgctacacctgctcccgcggctccacccgcaccctgggcaactttgtgaaggccaccttctacgccctggccaacacctacggcttcctcacccccgacctctggcgcgagaccgtgttcaccaagagcccgctgcaggagtactccgacttcctggccaagccggtggttggcaaggcctactgagcggcctccccatgcccgccgccccgcgcgccgcggcggcaggagcagcagcgtaacagcagcgccctgacgcgaggatagatgagagttgggaccccagtggccgctggggcgctgcgctggcagggcaagccggcgccccggcacacacctcacaccctggtgttgcattgggagacccgtgtaacaccgaccgcggnnnananannnnnnnnnnnnnnn

SEQ ID NO: 2832 - DNA, 256 bp, Chlorella sorokiniana
  unsure (1)..(256): unsure at all n locations; Clone ID: LIB3602-003-Q1-K1-C2
acgcgccaggccgccagctgacccggctgccaccaacggatcgncgggctgatggcggcttgcaacgcgctcttggagatgtgaggtcnaactccagcgctgngaactggcgtggcacggtccaggctgcgggccagccccagcgctgggtgatggaagcaggagatttggaggaaggagtccccacctttgtcgctccgccggccgccagggcggagcgctgcgtaggaaccaccccgccctagacgcccccgct

SEQ ID NO: 2833 - DNA, 491 bp, Chlorella sorokiniana
  Clone ID: LIB3602-003-Q1-K1-C4
gctgaacgacatcaaggcgctgctgggcaagatgctgttcagcggggcgggcatggagaagaaggttgagtggctgagcggcggcgagaaggcgcgcctggcgctcgccaagttcatgctcatccagggcacgcttctggtgctggacgagcccaccaaccacctggacatcccctccaaggagacgctggaggaggcggtcagcacgtttgagggcagcgtgattgctgtgagccacgaccgctacttcctgcgccgcatcgccacgcgcatcgtgacggtggacggcggcaagctggtggactaccagggcgactacgagctgttcctggagcagaacgaggaggaggcggagaagatggaggccaaagaggagaagcagcgcgagattgagaagtcgcagatcaaggccaagagcaagatgagcaaggcgggaaaagccaagtcgaataaggagaaggccaaggtctttaaccagagccccagtgccg

SEQ ID NO: 2834 - DNA, 304 bp, Chlorella sorokiniana
  unsure (1)..(304): unsure at all n locations; Clone ID: LIB3602-003-Q1-K1-C6
cccaacgacggcggcctcaaccgcaccgaggagaacgacgaggagcgcaccgccgggcccgggcgccgaggccacgccgngggagacaccaccggcgggcgcnncaagggggngaaggggaccggngngncccagcnggcgcncanccgcggcaagaaggagaagccccggaacaaaacgggccgcgcccagcagcggcaccagcggcgcgccgcggcaacggcaggcgccgagcaccaccgcacngcaccngccnggcggcggcaggggagggcgngcagcgcaggcagcgggcaccgccgcg

SEQ ID NO: 2835 - DNA, 492 bp, Chlorella sorokiniana
  Clone ID: LIB3602-003-Q1-K1-C7
caactctgcaacttgctacgaacagtgggcatgctgatcgtgctggcagaggctgtggacgagctgccgccccgccccaagggcctgccggcctgccccaagacttgcatccagaatgccgccccctggagcaagccgtttgtccaggagaagttcggcaagagcgggttcgagctgccctgagcggctagcttgtgcggaggtatgctgctgccaaagcaaggtgcacacaacctgccgcagagacgagtcgagcctcatgtccgccacactgtattgcgcaagatgtcaacatgtccttgtgcacctgctcaaaaaccttcttttacctgtcgccatgactttcattagtcgtgccacctgcctgctgcaaactgttttttccccggcagatcagaccatgccacttttcctgcgatgcaagcttcccctatcctgtcgcattactgctgtctgcatagatacgttttttctgttcatgtgataagaagt

SEQ ID NO: 2836 - DNA, 546 bp, Chlorella sorokiniana
  Clone ID: LIB3602-003-Q1-K1-C8
gccccatcgacttttacaagagccagatccaggtgcagatcatccgcgccaagtcggaccccgcctacaagccgccctacacaaatgtgctggactgcgtcaagtccacgctgcgcaccagcggcgtccgcggccccttccagggcctgtccgccacgctgctgcgcaatgcgcccgccaactccgtctacctcggctcgtttgaggtgctgaagaaccgggcggcggcacactacggctgcgagatcaaggacctgtctgcccccgtggtcatgggcgcgggcgccaccggcggcatcctctactggctggccatcttccctgtggacgtggtgaagagcgcgatgatgaccgacagcatcgaccccgcacatcgcaagtacccctccatacctgtggccgtgcgcaagctgtgggccgagggcggcgtgtctcggttctaccgcggcttcagcccttgcctcatgcgcgcagcacccgcaaacgcggtcatgctcttcacagtggacaaggtcacgcacctgctgaacgagtgagcagcagcat

SEQ ID NO: 2837 - DNA, 443 bp, Chlorella sorokiniana
  Clone ID: LIB3602-003-Q1-K1-C9
gccccatcgacttttacaagagccagatccaggtgcagatcatccgcgccaagtcggaccccgcctacaagccgccctacacaaatgtgctggactgcgtcaagtccacgctgcgcaccagcggcgtccgcggccccttccagggcctgtccgccacgctgctgcgcaatgcgcccgccaactccgtctacctcggctcgtttgaggtgctgaagaaccgggcggcggcacactacggctgcgagatcaaggacctgtctgcccccgtggtcatgggcgcgggcgccaccggcggcatcctctactggatggccatcttccctgtggacgtggtgaagagcgcgatgatgaccgacagcatctaccccgcacataggaagtacccctccatcactgtggccgcgcgcaagctgtgggcctgaggctggcgtgtatcaattcta

SEQ ID NO: 2838 - DNA, 394 bp, Chlorella sorokiniana
  Clone ID: LIB3602-003-Q1-K1-D1
attcgagaagcgccgatgccatacggcgcatggccccatcggggagaggctgaccaacagcctgatgatgcacggacactacaacggcgagaagctgatggtagcacaaattgtcaagcacgcggttgacattgacaacctgctgactgaccagaaccagtggcaggagatcgtggacgccatctataacggcggtccgtgtgaggatgccacccgcattggcagcgacggtgtggtgcgatagcaggatgaggatgtgttcccgctgagccgcgtgaaccacgccatgtggctgattatcaacgatgcgagctagagcgcgtttcgaaacatcaagaccattgttgagtgctctgcggacgatctgatcaacgcggccaagggcaacaacaac

SEQ ID NO: 2839 - DNA, 503 bp, Chlorella sorokiniana
  Clone ID: LIB3602-003-Q1-K1-D10
ccagggtgtgctgccggagtgggtgccgcagctgcagctgcacatgctgtgcgcaggcacgcccagcggcctgctggtcagccggtcagccaccaagggcacgcgcgtgttccgcctgcggcgagacgacgagctgctgcgcctcatgctgctggtgatcagccggctgtggcagcagcacgtgctgcgggggcagccgccgccgcagggcgtgtatgccagctggcgggagcaccacgacatggttcggcggatcctggaggtggcgcgcggcgccgagctgttgactacaatagaggaggggcaccacttgcctggcggcgacagccggtggttcctggattgagctgttacacatgactgtcacaagccgctgctacacttttgtactccattcagaatatgtatttcgttgcactgctcttcggttacagcgctgcggcagctttgtacaacgtccaaatcacatctcgcttgcttcaaattcgttgaaagactggcac

SEQ ID NO: 2840 - DNA, 499 bp, Chlorella sorokiniana
  Clone ID: LIB3602-003-Q1-K1-D11
ccagggagagctgccggagtgggtgccgcagctgcagctgcacatgctgagcgcaggcacgcccagcgggctgctggtcagacggtcagccaccaagggcacgcgcgtgttccgcctgcggcgagacgacgagctgctgcgcctcatgctgctggtgatcagccggctgtggcagcagcacgtgctgcgggggcagccgccgccgcagggcgtgtatgccagctggcgggagcaccacgacatggttcggcggatcctgcaggtggcgcgcggcgccgagctgttgactacaatagaggaggggcaccacttgcctggcggcgacagccgatggttcctggattgagctgttacacatgactgtcacaagccgctgttacactgctgtactgcattcagaatatgcatttcgttgcactgttcttcggttacagcgctgcggtagctttgtacaacgtacaaatgagatctcgtttgctgcaaatttgttgaaagactg

SEQ ID NO: 2841 - DNA, 518 bp, Chlorella sorokiniana
  Clone ID: LIB3602-003-Q1-K1-D12
gcaccgagagcgacttcaacaaggtggtgctcaagcggctgttcatgtccaagaccaaccgcccgcccctctcgctgtccaagctcgccaagttcatggccggcaaggacggcaagattgcggtgctggtcggcaccatcaccgacgacgtgcggctgtttgaggtgcccaagctgcgcgtgtgcgcgctgcgcgtcaccgagaccgctcgcgcccgcatcctcaaggctggcggcgagatcatgaccttcgatcagctggcgctggtggcgcccaccggcagcaactgcgtgctgctgcgcggccccaagaacagccgcgaggccgtcaagcacttcggccccgcacccggtgtgcccggctcccacgccaagccgtacgtgcgcagcaagggccgcaagtttgagcgcgcccgcggccgccggaagagcaagggctacaaggcgtaagcgccctcacgcctcagcggccggcgggcggcggcggccgtggatgcgctggcgcagcgccgccggcac

SEQ ID NO: 2842 - DNA, 401 bp, Chlorella sorokiniana
  Clone ID: LIB3602-003-Q1-K1-D2
gtacccgatgtaccccggtgaggcctaagaccccctgggcctgcatgactacccccacaccctggctgagcctgagggtgaaagagatcaagaactgacgcctccccatggtgtccatgtctggcttcttcatgcagaccattgtgaccggcacgggccctgtgcagaacctgtacaaccacttggcctcggcatccaccgacagcttgtactccctgtacgccaagaccctgtcgtgagcggcctgcacttgcttctgcttgagcctcgactggcggaagacgtgaccctgttgcactgcgctcacacttgcgcccgctgccttgcttgcctacagctcctctgttgcaacctggcgatggagtaacatgattgctggtgaaaaaagtcatgaaccttat

SEQ ID NO: 2843 - DNA, 441 bp, Chlorella sorokiniana
  Clone ID: LIB3602-003-Q1-K1-D3
ccgtttcatctggcaaggtgttcgccatgtttgtcaagtcgcccgcccggatgtacaccgagagcgagagcgacctgctccgcatccgctccaccttcaagactgtgtgagcacccgctagagccagcttgagccaggctgctcgcacacgggccgtgctgtgcgaagaggcacacctcggccagctgttgagcgctcacttggcagctctccttgctccactgggcatagcagcagtcgacctgcacacctccgcctgggcagcagcctgagacagtagccctggccctctgtgtgcaaaacctgcaattgctgaggattcttcctggccccctgcttcattggaccgccgtgggatttgtgtcctggtttgcacgaggctggctttttagccccgcaggaggttttgccaaatccgtgtggatcagtcccacgtttgaa

SEQ ID NO: 2844 - DNA, 273 bp, Chlorella sorokiniana
  unsure (1)..(273): unsure at all n locations; Clone ID: LIB3602-003-Q1-K1-D4
caggacaaccggaagcgcgacaagggcgagagcccccgcaacagccccccaaaggaacacgggcagcacaagacgcagcccgagaaagcgggcgagccgaggccaacgggcggcaagcaaagccgcagccacagggacagcagcacacacagcaagagccgcacccaagagccccacagcgacaccaaccggcacgccaagcccaaggccanagngagcaacaaccagaacaacgacgaagagcagagcacgaacgagagcaaggacaaccag

SEQ ID NO: 2845 - DNA, 486 bp, Chlorella sorokiniana
  Clone ID: LIB3602-003-Q1-K1-D5
cttcatcaccaccaccggcaacaaggacatcatcatggccgccgacatgtccaagatgaagaacaacgcgatcgttggcaacatcgggcacttcgacaacgaaatcgacatggccggcctcatggggtggcctggcatcaagcggcagaacatcaagccccaggtggaccgcttcatcttccccgacggtcacggcgtgattgtgctggctgagggccgcctgctcaacctgggctgcgccaccggccacccctcgttcgtgatgtcctgctccttcaccaaccaggtgattgcgcaactggagctgtggaacgagcgcagcagcggcaagtacgagaagaaggtgtacgtgctgcccaagcacctggacgagaaggtggcggcgctgcacctggccaagctgggcgccaagctgaccaagctgactgcggaccaggccgactacatcaacgtgcccgccgagggcccctacaagcccgcccacta

SEQ ID NO: 2846 - DNA, 271 bp, Chlorella sorokiniana
  Clone ID: LIB3602-003-Q1-K1-D6
attgcggagtgcgagccggcgttccgggaagccaaggtggtggacgcggcggagctgcaatacccacgtgccgtcacgcacttcagcccaggcagcccacaatggcggcccacccaggagacgagctttggcaacctgtggctggcggacgactgggtgaagggcgtgcagcatggcgccaacgggctgtcgcaggagcgggcgttggggacaggcctgcaggccgccaacctggtctgggaacggctggggcacgggcgccctgcagaca

SEQ ID NO: 2847 - DNA, 330 bp, Chlorella sorokiniana
  Clone ID: LIB3602-003-Q1-K1-D8
gtccgaatcgtgacccacgcgtcgggcggagcgcacacggaggctcagttgcgcgaggcggccccaagcgcccagagagaggggggcagtgacatggtgcggattgcccctctattactgtgatgcgcgagacatgtttcctgaaggcacatgacggacagttaaggcatcaggaacaagaacgtggggacaagagcgccagatgacataaaccgtgacacacgtatgctctgtacactgtccggcactttgtgacatgactagcctgaccgcatggcctgttaggcgcctgtgtttttcttctgtgcagtcccatgcttgtgctgatgt

SEQ ID NO: 2848 - DNA, 382 bp, Chlorella sorokiniana
  unsure (1)..(382): unsure at all n locations; Clone ID: LIB3602-003-Q1-K1-D9
gcaggctgcgcagagcgccggtctgccaaccctgcggctgagcaacagcgcaccttcccaccagcctctccatcggccgagacactgtacagcaccagctacaatatgtacgaaactgcctgagaagatcacacaatcccttattaccggtgctgagcccgctcagactatgacgcgctctctgtgcactcaactgcctccgcccagctatgtatatgcccgtctgctgagtggataccgcaggtgtaccccctccgcgctctgctgctgctgtacgaacaaacgaactatgtgagacactggccctcgntcactgacatgcctgcgtagcaactgctcgcggccaccttttggtgcagcactgcactcaatcctgtagcct

SEQ ID NO: 2849 - DNA, 549 bp, Chlorella sorokiniana
  unsure (1)..(549): unsure at all n locations; Clone ID: LIB3602-003-Q1-K1-E10
ctgcgagcgacggcagccgagggcggggccatggtcgatgagttgaagcggctgtggtccgaggcctatgaggcgtacggcaggacctccatcaagctggccaacgattttttcaccgtgaacgtctccccgactgagcccgtttcactggaggagctccggcagcaggagctgcagctgcagcaggaggcggctgcggtgctgcagcgtggcgccgctcaggggcggcgcccgcaggccggcaggcggcagccatacaaccagcagtacgggcagcgggagggccggccgcgggagcagtatggccagcgggggcagcagcagcggcaagggcccaggcaggacggccgcccgccctttgacagggctcgagggggctccgccggccagcagcggcggngtggcggccgcccgcagcagcagtggcagcaagcggccggttggcggccaaccaaaacgggacctccggggctggccagacaactaggaggcttagcgagtgcaaattgagtttgcaccagcgccgggcatggcatccacaccacacta

SEQ ID NO: 2850 - DNA, 421 bp, Chlorella sorokiniana
  Clone ID: LIB3602-003-Q1-K1-E11
actagatctagatcgcgagcggccggccttatggttgatgagttgaagcggctgtggtccgaggtctatgaggcgtacggcaggaccttcattaagctggccaacgatttttttaccgtgaacgactccccgactgaacccgtttcactgaaggagcttcgggaggaggagctgcacctgcagcaggaagcagctgcggagctgaacttggcgccgctcaggggctgaaaccggaagtcggaaagcggaagccatacaaccagcagtacaggcagcggtatggccggccgaaaaagcagtttggacagcggaggaaaaaggtttcttaagggctcaggcaggacagccgaaaaaactggggcagggctcgagggggctgcgtcattcaacagcggcggggtggcggccgcccgtattaggg

SEQ ID NO: 2851 - DNA, 502 bp, Chlorella sorokiniana
  Clone ID: LIB3602-003-Q1-K1-E12
ggcggcaagcagaaggcatggcgcaagaagcggaagtatgagctgggccgccaggccgccatgaccaagctgtcctccaacgtgtgcgtgcgccgcgtgcgcgtgcgcggcggcaactccaagttccgcgcgctgcgcctcgaccacggcaacttctcctggggctctgaggccgtgacccgcaaggtgcgcatcctggacgtgaagtacaacgcgtccaacaacgagctggtgcgcacccagaccctggtgaagggctgcatcgtggaggtggacgccgctcccttcaagcagtggtaccagcagcactacggcgcggaggtgggccagaagaagaaggccgccgccgccgcgcccgccgagggcgaggccgcctcccagagcaaccacgtgaagcggaagctcaagcagcgcaaccagggccgcaagctggaccagatgctggacgaccaattcgccaccggccgcctgtacgccgctctgtcctcccgccccggccagt

SEQ ID NO: 2852 - DNA, 423 bp, Chlorella sorokiniana
  Clone ID: LIB3602-003-Q1-K1-E2
gctacgcggacgtgatggatagcgccaagggctgggcgggcaccatccgcttcaacgaccgcctgtggcagcagttccaggctttctacacccggccagacaccttctccctgggcgtctgcaacggctgccagctcatggcgctgctgggctgggtgcccgccacaggcgccgcggagccggcgggccacctggccgacaccgagcagccgcgctttgtgcacaacagcagcgggcgcttcgagtcgcgctggtccatggagcgcatcgaggagggctcccccgccatcatgctgcaaggcatgggcggcgcccagatcggcgtgtggtgcgcgcacggagaggggcaggccatctttccctcgtacgaggtgcgccagcgcgtgatggccgacacactggcgcccatccgctactgcgacg

SEQ ID NO: 2853 - DNA, 204 bp, Chlorella sorokiniana
  Clone ID: LIB3602-003-Q1-K1-E3
cctatcatcgcctcccacgccggcggcgctgtgggcatcatgaccgcgcaactgctgacctccaacaagcgggggcagtgagcggctgcagccagttgcaagctgtctagcctgcatggttcgcttagctagccatagctgtggcagtaagccggtgcccccacgctggcgctctgcccgaggcaggcatgggctggagcacgt

SEQ ID NO: 2854 - DNA, 443 bp, Chlorella sorokiniana
  unsure (1)..(443): unsure at all n locations; Clone ID: LIB3602-003-Q1-K1-E4
cccacgcgtncgcccacgcgtacggacatgggcgcccactacgggctctatggcacagtgctcttccttttcgggctgtccatcagctggtgcggctgcaacaactccggtttgtttgcggagcttgtgcctgaggagcagcgctcaaccatttttgccttcgacagaagttttgaaggcgctgtcggtgccatgggcgcgccgctggttggccttgctgccgagcatgtgtttgggttcagtggcgtgctgggcagcggaagagggggggccacagaccgcagcaacgtggcggcgctgagcagcgcgctgctggtgtgcatggtggtgccctgggtgctctgcctgctctccttcacagcgctgcactggactttcaaggaggaccgaccaaaagcattccggcgaaatgatgaagaactgctacctctggagggtcagcc

SEQ ID NO: 2855 - DNA, 176 bp, Chlorella sorokiniana
  unsure (1)..(176): unsure at all n locations; Clone ID: LIB3602-003-Q1-K1-E5
cggacgcgtggggacgccaagaagcggctggagggtggcgtggcgcanctgatgagcgccaacatcgtgcagtgcatgggcgccatgctggacaccgtggtcttctgaggcagcagcggtgcaacagcagcggctgcagcgttggcagcggcagcagcggggggcactgcgggtac

SEQ ID NO: 2856 - DNA, 356 bp, Chlorella sorokiniana
  Clone ID: LIB3602-003-Q1-K1-E6
cccacgcgtgcgaactgatactgcctgttgtatgatggcgctgcatactttatcctcactcggacattgaattgactgacatgaatgcaacacctctccctttcattctgcggtacaaactgaacgctgcatcatcattggcggtctgccacgcagcccgccggactacttgcactgtgacggtttcctgcccattttgacaccaggactagcgtccagttgggccagactctgcttgaagccaacctactagtgcaacacatcttgcatactgcattactagtgcaacaattttacatgcaactgacagaattaccgccaccaagcctgcctgaacacaaaaacaaacgggcctg

SEQ ID NO: 2857 - DNA, 519 bp, Chlorella sorokiniana
  Clone ID: LIB3602-003-Q1-K1-E7
cagacggcggcgctggcgctcaagcgcgtcaagcgccaccaggcggtcattcactgcgagattgtgcggcagtcggcgcgggtgatagccatggacactgagcgcctgcggtcgggcgaccgcgcatgcgtgcgcttccgcttgctgcagcgccccgagtacctcacccccggcacccgcttcgtgttcagggagggcaggaccaaggggattggcatgatagtgcgcgcgggctctgctgtgcagcagcacccgcagcagcacgcgcagccgtcgcagcaggcgcccatcgctgcccactgagtggggcgggcatgcccagggtgcaacatgaccccatccatgacgccactcgtgaggcccacatgcggccgaggcgtgtaaacgacccgctggcgggaaatctaatgagcgggcttatcctttcacgcacctgtggcgcaaactgtgtgcgctgttgattgtagcttcctcacccatttgcacccaagcttgcatgttgtagcgctggtgcacgtt

SEQ ID NO: 2858 - DNA, 504 bp, Chlorella sorokiniana
  unsure (1)..(504): unsure at all n locations; Clone ID: LIB3602-003-Q1-K1-E8
cgcatggacctgaattcctaacccctgcaccccggcccgcggcagccgggcgtgtgtaaacgcgaagccgagtcagagcggntgatagccatggacactgagcgcctgcggtcgggcgaccgcgcatgcgtgcgcttccgcttgctgcagcgccccgagtacctcactctacgcacccgctttgtgttcagggagggcaggaccaaggggattggcatgatagtgcgcgcgggctctgctgtgcagcagcacccggagcagcacgcgcagctcgccgagtaggcgctcatcgctgcccactgagtggggcgggcatgcccagggtgcaacatgaccccatgcatgatgccactcgtgaggctcacatgcggtcgaagtgtgtaaacgacctgttggcgggaaatttaatgagcgggcttatgctttcacgcacctgtggcgcaaactgtgtgcacttttgattgtagctttctcacccatcttgacccaagctttgatgatgta

SEQ ID NO: 2859 - DNA, 321 bp, Chlorella sorokiniana
  Clone ID: LIB3602-003-Q1-K1-E9
cggcggccacaacaacggtcgtgtgggcaccattgtgcacaaggagaagcacaagggctacttcgacattgtgcacatcaaggacgcggccggccacacctttgccacccgcgtgaacaacgtgtttgtgattggcaagggcgacaagcccatgatctcgctgcccaagggcaagggcatccggcagagcatcctgcaggagcaggccaagctgtacggcaagtctgcctaagcgcaggcgacgccacatgagctgagccgacgccggcgagggccgcccgccggcggcccccacggcagacgcgcagcagcagacggggc

SEQ ID NO: 2860 - DNA, 451 bp, Chlorella sorokiniana
  unsure (1)..(451): unsure at all n locations; Clone ID: LIB3602-003-Q1-K1-F1
gctgactggcccagaagngagggaagagaaacgtagctcagctgccatatgcttcgaagcttgcttgcctgacattctacactcgaaggctgaaggaaggaacaagtacttggatatgttattgtcagctgcagagaaatttaaaaggagtccttacagctatgtttgggctgctgctggtaagcaaccggatctcgagaaccgtgtaggtgtgggtggatatggttatccagctcttgtagccttgaacgtcaagaaaggagcatatgctccactcataagtgcatttgagctcgagcatatcattgaagttgtgaaggaagcaaggcgcggaggcaaaggaaatttaccactggaaggcacacccgagattgcaaagacagaagcatgggacggtaaagatggagaaatcaaggaagaggatgagttctcacttgaagaactcatggga

SEQ ID NO: 2861 - DNA, 319 bp, Chlorella sorokiniana
  unsure (1)..(319): unsure at all n locations; Clone ID: LIB3602-003-Q1-K1-F10
gcttcccgctggcgcgcaaggtgctgcgcccctcgtcccgcaagttccgcaccaccttcaaggcggtgcgccccaacgtggccatctactgagcgcctcgccccaaggcggctcgcggccacactggcggcagcagcggcggcggcggcgacccagcttgtgctctggagcggcgccgctgaggaggagaaggctgcccggccggcgggcggccgccgcaggagtgcgcggcggcgccgcaggcggcagccggggggcggtggtngtgcgccccgtccccgccctgttgcccggttgggtgccnggctgccggcgcgtg

SEQ ID NO: 2862 - DNA, 521 bp, Chlorella sorokiniana
  Clone ID: LIB3602-003-Q1-K1-F11
cgcagctgtccgttgccaacgtgcggcgggaccaccccgagctgctggacaatggcgtggtggagctgcgggcgggcaacgtgctgggcgatgcgctggagggggaggagccatttgatgccatccacgtgggcgcagccgcgtcctcgctgccggacgtgctggtcaagaagctgaagcctggcggccgcatggtcatccccgtgggccgccagtgggagttccaagtgatgcagtgcatcgacaaagaccctgacggcaaggtccacaagcgcgacctcatgggcgtgcgttatgtgcccctgactgagcccggcgataccagctgggaggagtgaggcgggcaagtgcacgctgttgttgccgcggcagagcatgtgcattgctgccgccttttgtcgatgatgacttgccagatagattgctgccttgagactgcccccgaacgaacgacgacattttgtcagcataagctgcctcccttgcagcaccaacagttttgatgcatgctttaccagcgc

SEQ ID NO: 2863 - DNA, 480 bp, Chlorella sorokiniana
  Clone ID: LIB3602-003-Q1-K1-F12
ccgaaggaagcgtctgagtcgggacaaagatggcgaccgctatcaagcctgcccagaagccggatgtggaggaggccgacgccgtccccatccaccgtatccgcatcaccctgacctgcaagaacgtcaagagcctgaagaaggtgtgcgctgacctgctgcgcggcgccaaggagaagcagttcaaggtcaagggccccgtgcgcatgcccacccgcgtgctgaagatcaccacccgcaagtccccttgcggtaacggtaccaacacctgggaccgattcgagatgcgcctgcacaagcgcctgatcgacctgcactcccccgccgaggtgaggaagcagatcacctccatcagcatcgagccggcagtcgaggttgaggtcaccatcgccgacgtgtaagcagccatttcagctgtggaagctggtcgcacggtgcgcccctgaccgccgctggcgggcgggtcgagccttcggagcc

SEQ ID NO: 2864 - DNA, 434 bp, Chlorella sorokiniana
  Clone ID: LIB3602-003-Q1-K1-F2
tcgcctgcctgcgccccctgtgtcccctgcaccggccgatttctttctgttgccttgatgcatgcccaaccagacttgcaacaaagtctcccctgcattcactgcacctgtccccctctctgtccccctcaccctgcacccctcgcctatcggcgcctgccggcgggtgtaagcctctcacccaacaaaccctttgcactttgctttcgcttgggctgccctttacttttcattgagcggcgtcatgggcttgcccccgtaacgggcacaagggggagccgcccctaacttttgccttgccctttaaccagcgtggaaccaatattaataggctcctcaccccacgaaattagcccccacccgttggcctctcaaaaattaaaacaatttttttaaaccccccctttgtttttttatttaggcggagggttgaa

SEQ ID NO: 2865 - DNA, 395 bp, Chlorella sorokiniana
  unsure (1)..(395): unsure at all n locations; Clone ID: LIB3602-003-Q1-K1-F3
atagaatgaatgtgggctggcactcgtggctgtcgagctggccctactgcaccgacatgctggtggcgtgcatagagcatgcatcanagctgcgctgggctccggccatcaagctgccagctgtgtcatgggcgggcctggtggcagtggtcgctggagagctgctgcgcaaggcactcatgatacacgcgcagcacaagcttacgcacatgatccaactgcgcaagcgggcagagcacacactggctaccagtggtgtgtatgcctgggtgcagcacccggtctatgctggctggacaatctgggcagtgggcacgcatctgatgctgtgcaacccgctgtgcataccggcctatggtgctgcggcctggcgcttattaaaccagcgggatacg

SEQ ID NO: 2866 - DNA, 275 bp, Chlorella sorokiniana
  Clone ID: LIB3602-003-Q1-K1-F4
ggcggcacgcactggccggccctgcttggggcccgacagccgctgacggcgccgctcttttccaggcttgatattggcagggaagaggctgttagtcgccttccctcaccatggtgagttttgcccacacaggcagaaacccggcagcgggggcgacccatcttgccgtgccccgctatgtatgccaatgaggataagacacccaccgcctggggcggtcttcgcatgagggcgctatggcgcctcaggcggcagacagggggggccatgaaaga

SEQ ID NO: 2867 - DNA, 214 bp, Chlorella sorokiniana
  Clone ID: LIB3602-003-Q1-K1-F5
cggcgggcacgcactggtcggcccttaaagtggcgccggcaacacgtccacaacgccgatattttccaggctgtataggggcatggaaaatgctgtttctcaccttccctcagcatggtgacatttgccgccatacaaacaaaccctgcatgcgtgagctaaagcctgtcgtcgttgccacgttatgtctctgaggaggagaaggcaccccggc

SEQ ID NO: 2868 - DNA, 453 bp, Chlorella sorokiniana
  Clone ID: LIB3602-003-Q1-K1-F7
gtctggttcacccccctggtcatccagctggccaccctcctgctgtctggcgcgtgggccctcgtgtccggcggctcgtactacctggcccaccgcggcagcgggctggaggccacccccggcatcaacgcttcggtgctgggcggcgccgtgttcctggtcaccttcttcatcctcagcttcctgggcggcatcctgctcagcgtgctggacgcggtgtttgtgtgctgggccatcgacctggacagccagaccgtcagccagcccgatgtgtacgccgtgttcatggcggtgccggtgcccgggcgtgcagttgagcagcccgacggcgacatcatgtacggtgccggccagcagcagggcggcggcgcctaccagccgcccaatgtggcggctgtgtgatgcggacgccttggccagggtgcatgaagctgaacccttcgtcccttctta

SEQ ID NO: 2869 - DNA, 546 bp, Chlorella sorokiniana
  Clone ID: LIB3602-003-Q1-K1-F8
agcaaagttccgggctttgaaagcaaaggaggctgcatccaagccggagcaggccggcagcagcggcaacggcgcggcacccgctgccgctcaggcgcaggctgagcctgcctctgcggctgtggcagtagtggaggcagaggttgtggagcctgcggcagccgaggcgcaggccgctgaggggcagcagcagcaccagcaggcgccaccggcggccagcagcagcagcagcgcgtcggccggcggcaagggcggcaagaagaagggcggcaagcggaagtgagcaggcgtggtttggaagccagctggcactgctcaagccctcgcccttgaaaacagcatccgtatactttgatttgaggttgcaaggatgacacattctctccggcaactgaattctaatgtcacgtcgcaagctcgcacgctcccactgctcccttgcttccgtatcctcagcctctcgtgttgatttccacttttctcctgctgctgacccctgctgcaccaccttcatgcaacccgtacttctcctgcttttctccacac

SEQ ID NO: 2870 - DNA, 413 bp, Chlorella sorokiniana
  Clone ID: LIB3602-003-Q1-K1-F9
ggtccgtgagcggcaacatcctgtccgtctccgacggccacaacaaggtgaccctgtggaaggaggcggccgacgggcagtggcagcagatcacgcagtagcgcgggcgggcattggtcggcatgccaggccggcttttgcttgcatggcctggcccgcctggcgagggcagctagatgccaagcagccagccctatgcagcggcgagctgttcaggcaggccacaggcagctgctgggcagaacgaacagcggcaggcgtacgctggccagagcggcgcagcagattgccacaaccctcgccggacggccttcggacgtctgctcttgctgcacggaacctctgatcgttcaactctcctgacgtgacagcccaatcgtttttggtgcattgtaagcattgacaccgtgaaa

SEQ ID NO: 2871 - DNA, 535 bp, Chlorella sorokiniana
  Clone ID: LIB3602-003-Q1-K1-G1
ctgcagccgctccgctcgcatccaagtgtcgcggccagtcttcgatcacatctaaggggctggcaggcggcgccggccggccagggcggctatgtcgattttcgagtacaatggctcggccgtagtggccatggcgggcaaggagtgtgtggccatcggcagtgacctgcggtttggcgtgcagctgcagacgctagccacagactacaagaagatctacaagatccatgaccagctgttcatcggcctggcggggctgggcacggatgcagagacactctcgcagcgcttcaagttcaagcacaacatgtacaagctgcgggaggagcgcgacatcaagccctccgcctttggacagatggtgtccgccacgctgtacgagcggcgcttcggcccctacttctgccaacccgtcatagctgggctggagcctgatgggacgccctacctttgcggaatggacagcatctggagcgcaggagacggccaaggacttcatggtggcgggcactgccaccgactcggtgttaggaat

SEQ ID NO: 2872 - DNA, 288 bp, Chlorella sorokiniana
  Clone ID: LIB3602-003-Q1-K1-G10
catgcatgcacaaatatgccacgctcactctcgccccgcatctttcacacctcatgtcacaagtctgtgccatccggcctcttacatttccggacatcatcagcagcctacagcacatgtgcacgctcactgcattatctttggctgcctggcatatgcatgcggcagctggccgtctgcctgtaaaaaacaggtgtcaaaaaaaaaaaaaaaaaaaaaaaaaatggccaaaacataaaagaacctccatggaaaaaaacgcaaaccatcaacaatcaaccagaacat

SEQ ID NO: 2873 - DNA, 547 bp, Chlorella sorokiniana
  Clone ID: LIB3602-003-Q1-K1-G11
agacgctgtacctgctggaccagagcggcgaaaccgccaaagcggtggcccgcgagctgaccaagcgcggctttagcaaggtgtttgtggtgtctggcggctgcaacgcctggaccaacgccaagctgcgcaccaagccgtggcagggggaggggctcaacaccctgcgcgccccctccgcgcttgacgagatcatccaggtcactgagaagctggagcccctggccgagaagctggaggtgcccgagaaggtgaaggtcaacgcctgagctgcaagcctgtgagccttcaccgccactggcagcatggtaccagccgcccagagcagccattgctgtccatcgcggccccatctgatcgaacccaaggaatgtatccctcgcccccgtcccccgccctctgcctctcccagtggggccgccccccaacccagtctgatccgatttgcttgcgtgccgccatttcaggcactcccccttgtcgtccgcctgtacattacccgcttgacccaattgcatcggtgccaacagtgcgttcagtatgtaac

SEQ ID NO: 2874 - DNA, 515 bp, Chlorella sorokiniana
  unsure (1)..(515): unsure at all n locations; Clone ID: LIB3602-003-Q1-K1-G12
gcgccatcatcctggccaagatggccactgtgccggtgcgccgcggctactggggtaacaagatcggcaaggtgcacaccgtgcccaccaaggtcaccggcgagtgcggcagcgtgaccgtgcggctgatccccgccccccgcggtgccggcattgtggcggcccgcacccccaagaaggtgctgcagatggctggcattgaggactgctacacctgctcccgcggctccacccgcaccctgggcaactttgtgaaggccaccttctacgccctggccaacacctacggcttcctcacccccgacctctggcgcgagaccgtgttcaccaagagcccgctgcaggagtactccgacttcctggccaagccggtggttggcaaggcctactgagcggcctncccatgcccgccgccccgcgcgccgnggcggcaggagcagcagcgtaacagcagcgccctgacgcgaggatagatgagagttgggacctcaatggccgctggggcgctgcgctgg

SEQ ID NO: 2875 - DNA, 176 bp, Chlorella sorokiniana
  Clone ID: LIB3602-003-Q1-K1-G3
tactgcctgctaatagtcaacctcaacgaccgtgacatgttgtccatcgagatcaccgatctggtgggcatggtggcggccacgatctatgagtgcagaagggtgcacacactgacggctcacctgctgctgcactacctgccctggaccttctatgctgacgcgcactagatcat

SEQ ID NO: 2876 - DNA, 369 bp, Chlorella sorokiniana
  Clone ID: LIB3602-003-Q1-K1-G5
cgcaggactatggcagcaaaccagtggcggacgtggcctgggcgcccacgctgggtcggccctatgacatagtggccgtggcagcaggcccaacagtgctgctgtggaagctgactggcgcggcagacagcttgcaggctgagcagttggcgcggctgcagcacacagcgggtgtgtggcaggtggagtggaacatgctgggcagctggctggcggcttccaccgagggcggggaggtgtgcatgtggcggcccgacctctctggcgagtggctgctgctcaaccgcatcaccggcaagcccggcgctgcgtgatgccccatagcagccctctatcatggcggaatcgtgtaaggttgacagttgcaaa

SEQ ID NO: 2877 - DNA, 432 bp, Chlorella sorokiniana
  Clone ID: LIB3602-003-Q1-K1-G6
accgtttcctggtgcgccgcaccgagagcgactacaacaaggtggcgctcaagcggctgttcatgtacaagaccaaccgcccgcccctctcgctgtccaagctcgccaagttcatggccggcaaggacggcaagattgcggtgctggtcggcaccatcaccgacgacgtgcggctgtttgaggtgcccaagctgcgcgtgtgcgcgctgcgcgtcaccgagaccgctcgcgcccgcatcctcaaggctggcggcgagatcatgaccttcgatcagctggcgctggtggcgcccaccggcagcaactgcgtgctgctgcgcggccccaagaacagccgcgaggccgtcaagcacttcggccccgcacccggtgtgcccggctcccacgccaagccgtacgtgcgcagcaagggccgcaagtttgagcgcgccc

SEQ ID NO: 2878 - DNA, 549 bp, Chlorella sorokiniana
  Clone ID: LIB3602-003-Q1-K1-G7
gcaacagcagccgcctggcgttcatcggccactcccagggcaccactcagacctttgcagcgctggcgtcccacgcagagctgcgcagccagctcagctttgcagccatgctggcgccagcggtgcacatgcggcacatcagatcctaccccttgcaagtgctggcagccatggatgctgaccgggtgttcaacttgctgggagagtttgaattcctgcccaaccgggaggcggcagcagcgctgtttggccagatctgccgcaccacgccgctggcctgcgcatccatcatcactgccgttgcagggctgaacacagacaacatgaatgtcagccggctggagctggtggcccagtttgcgccatcaggcacatcagtgaagaatgtggcccactgggcgcaggcgatacgcaagagccggcagcgggagcacccgctcttccaaatgtacgactacggaagcgtgtgcacctcgccgcgtggcctgccccgcacctgcaacatgcgcgtgtacgggcagctggagccggcttcctatgatctgggcg

SEQ ID NO: 2879 - DNA, 557 bp, Chlorella sorokiniana
  Clone ID: LIB3602-003-Q1-K1-G8
ggacggccggtctagcaggtactgggcagccatgacggcagctgaggtcaagctgttcgggaagtggagcttcgaggatgtggaggtgaacgacatctccctggaggactacattgcggtcaagcccaagtatgcgcgcttcaccaatcacagtgcgggccgcttccagaagcgccgcttccgcaaggcgcagtgccctatcgtggagaggctgaccaacagcctgatgatgcacggccgcaacaacggcaagaagctgatggcggccagcattgtcaagcacgcgtttgacattgtcaacctgctgaccgaccagaacccggtccaggtgctcgtggacgccatcatcaacggcggcccgcgtgaggatgccacccgcattggcagcgccggtgtggtgcgccgccaggctgtggatgtgtcgccgctgcgccgcgtgaaccaggccatctggctgatcaccaccggcgcgcgcgagagcgcgttccgcaacatcaagaccattgcggagtgcctggcggacgagctgatcaacgcggccaagggcagctccaaca

SEQ ID NO: 2880 - DNA, 495 bp, Chlorella sorokiniana
  Clone ID: LIB3602-003-Q1-K1-G9
gccatgggctacgcagcgcaccgcgtgtggcaggcgggcggcggaccgctgccgctggcgctctacgggatccagctgggcctcaactttgcctggtccccgctcttcttcaagctcaaggacctgcgcctggcgtccatcgagatcaccgcgctggtgggcatggtggcggccacgatctatgagttcagcaaggtggacacgctgtcggcgcagctgctgctgccctacctggcctggacctcctttgctgcggcgctgaccatcaacatctaccagaacaaccccgacaagcgaaagcctgtcagcaaggcgtcttgagcggcagcgcagcgtgcctgccccccgccactcagcccatgctcgcctcaggagggccggcctgccaagaaggcggtcaaggaggtggcaggcgccaaggccgccctgcaagacctgcaagaagcgatggccaccaaggcgcgccaggcggcagaagcggtgcacggcggcgcc

SEQ ID NO: 2881 - DNA, 305 bp, Chlorella sorokiniana
  unsure (1)..(305): unsure at all n locations; Clone ID: LIB3602-003-Q1-K1-H1
cccaagcatcagtctctggtgcacacacgagcattgcttcgataggcggccctgctaagtgcataagtgagattccttaggctctaatgctagcagttaaactgatgtatgtacaaggggtnccaggggatatgggaggaggtttgatcatggtaggggagggtctctatgatatacaagcttacgttcgcgtgcctgcgaggattgaattatcatataggggctcctgcaactaatatactggccgccgatttacaacttcttgactgcaacaactctggtgttacctacattataccccttgc

SEQ ID NO: 2882 - DNA, 434 bp, Chlorella sorokiniana
  Clone ID: LIB3602-003-Q1-K1-H10
gccccttcgtcaaggagtgccccgtgggccaggcccccgccctgctgctcagcagcgacaacggctgcacctacgccgagtgcggcaaggcctctgctctggagcagcccgccgacggcgccagcggcagcctgcccaccaacgccgccgccatggccgcccccgccatcgtgctgaccctgattgtggtcgcctttgtggaggtgctgatgcacttctgctgagcgcctcatctgaagtgctgaggtgatcctgtcaggcccccatgcagcacagcccaaacagcatctgcctggcgcggcacagcaccgctgctcggccggcacgctgttcttgggctgctgtgcattgcagcatgctgctccggcggcgcggcagggcacctccccttcctctgccgcacacaagtatgcccgcccttccacgcctgcttc

SEQ ID NO: 2883 - DNA, 419 bp, Chlorella sorokiniana
  Clone ID: LIB3602-003-Q1-K1-H11
cgcccagattgagcgcgacctgatgcaggcgctggagaagcgcaagacgggcggcgaggagctggcgcaggtggtgcaagagatcacagagaagttcctgcaccacctgaaggaggaggaggaggagatgatgcccgagctgctcaagaagtgcaccgacgaggagcatattgagctggccaccggcttcatggaggcgaaggccaatgcgccactggagcctgagccggctgctgcctaggctgcatgctgaggctgcattacaaatgcacaggcacagcagcccaagctcagtgccagcaggctgcgcgggcagtgccgctggacactcgctctgcgagcctgcacattcatggggcctattgtctagactgccgctgacattgtcgcatcccttgccagccgccagtctgacccct

SEQ ID NO: 2884 - DNA, 358 bp, Chlorella sorokiniana
  Clone ID: LIB3602-003-Q1-K1-H2
gcgagccgccgccctttagttcacacagagtaaatcatgcgaaatgacacatggcacaggggccgggcgtgcgccggagccctccaagctggcaattaacattatgtcggaacgaatgggctccgggcgacccggacgacgcgccctcgtcacgcgtgcgccgctataatgtctacaagctagccgtggctgcgttgcctgcgttgctgcagctcactgggcaatcgcgttggacatgttggtcgtgctgcccccaaagttgtaggtgaacggcgatctcattacgctctttattgccttgatggggcccaccgctctccccagttgagcacaaagtgcagacacccatccccagcct

SEQ ID NO: 2885 - DNA, 171 bp, Chlorella sorokiniana
  Clone ID: LIB3602-003-Q1-K1-H4
acgcgtacgtgcaagatggcaagctgcgcctcatcctgctcaagggtccgctgggcaactgcgtgattacgggcgactttgatgtgcaggcacttgaggacacgctggctgccttctgcgagggcaagtgaagcccttcagtgcgtgctggcaaactgaactggtaaacaa

SEQ ID NO: 2886 - DNA, 285 bp, Chlorella sorokiniana
  Clone ID: LIB3602-003-Q1-K1-H8
aaaaaaaaaaaaaaaaaaaaaaaaaaaaaaaaataaaaaaaaaaaaaaagggcggccgcatctgggcggtccgatcttacggtatcccatgcttcctacgccatcattctactatagagttatctaatatcaatacattggtcgaagttatacaccgtcgtgacatgaaaaaaccctgtggtaaccccctgaagtcgcctagcataatatcctcgttgtacaagctggtgtaaaaacgaagaggcctgtagagaaggcccttaccaacagttgttcatactaaat

SEQ ID NO: 2887 - DNA, 400 bp, Chlorella sorokiniana
  Clone ID: LIB3602-003-Q1-K1-H9
cggcgctgtggagcagatgtaccaggagatgggcagccgccaccgcgtgcgctccccctgcatgcagatcatcaagaccgccacgctcacggcgtcccagtgcaagcgcgcggccacgcagcagctgcacgacagcaagatcagcttcccgctggcgcgcaaggtgctgcgcccctcgtcccgcaagttccgcaccaccttcaaggcggtgcgccccaacgtggccatctactgagcgcctcgccccaaggcggctcgcggccacactggcggcagcagcggcggcggtggcgacccagcttgtgctctggagcggcgccgctgaggaggagaaggctgcccggccggcgggcggccgccgcaggagtgcgcggaggcgcctcaagcggcagccgggggg

SEQ ID NO: 2888 - DNA, 468 bp, Chlorella sorokiniana
  unsure (1)..(468): unsure at all n locations; Clone ID: LIB3602-001-P1-K6-A12
cgggccgacccagcgnccggggcgtcttggccccnccaggaaccggcccgggggcggagcaaggacnggagcgcnacgagggggggncggcggggcngggagccanggcagncaccggcnncggcgngangcgcgggcaggacgngggcacngcacncnggancaccgccgccagcgcagnannggccaggggggggggggacangcngccngaggagcacggagcgacgccngccnnngcagcagcngagcggggcgnccgcagcagcaaacgcacccagcggcggccggcnggggccaagnnnagnncagcaagcaccgnaaccggcacanggcnancacgcaaaaaacccggagaacccgccccccccaaccccgggggggaaggcnancngggcaggcgacagcngccggcccggnnnncaaacccccaaccggcaacccccgggggggnggnggacacacgcc

SEQ ID NO: 2889 - DNA, 136 bp, Chlorella sorokiniana
  Clone ID: LIB3602-001-P1-K6-B8
gcacccgccctggccccgcccattaatcgccaccggtgtgggggttacgcgacacgctcccggtacacttgctatacccctagcgcccggttgtttccctctctttcccccctttattggcacgtttcccagcttt

SEQ ID NO: 2890 - DNA, 288 bp, Chlorella sorokiniana
  Clone ID: LIB3602-001-P1-K6-D10
acactgggtctcgccctgcatcaacccattaagctctgggggtgtcgcgcatactcacagcgagaccggtacacttgctagcgccctatcgtccggttcttttgctttctttccttgctatgttggcacgttcgccgggtttagctgtaaagctgtagatcggtggctggcttcagggtagcgctttactgctccacggcacctaaacaccagattactgggttagggtgatggttgacgtattgggccattagactgatagacggcctttgaccctgtgacgcacga

SEQ ID NO: 2891 - DNA, 349 bp, Chlorella sorokiniana
  unsure (1)..(349): unsure at all n locations; Clone ID: LIB3602-001-P1-K6-D3
acaaaggaancaaggcngnaaagggcacggnagcnngcggnnccgacgccgangccaacggagangncacgacagngaagnngaagaanggaagngnncncgaagggggggggggnanngnnggcancngcggcaggacaaagacccgncnncncanaggccaagccgnggacgagaaaggnggacccaagaccgangcanncnncgaaacaagggnagccggggnanacgcgaacggcgacgnggccaccnncccccngaagcncnacaacgagcagaggagagnngagcacgnggaccacgcccggaagnccgccgagcaggccgngagggcaancaaggccaagga

SEQ ID NO: 2892 - DNA, 214 bp, Chlorella sorokiniana
  unsure (1)..(214): unsure at all n locations; Clone ID: LIB3602-001-P1-K6-G12
cgggncgacccacgcggggcgaaaaaaataaaaaaaaaaaaaaaaaagagaaagagaaaaaaaaaaaaaaaaaaaaaaaaaaaaaaaaaaaaaaaaaaaaaaaaaaaaaaaaaaaaaaaaaaaaaaaaaagggaaaaaaaaaaaaaaaaaaaaaagaaaaaaaaaaaaaaaaaaaaaaaaaaaaaaaaaaaaaaaaaaaaagggggggggggga

SEQ ID NO: 2893 - DNA, 577 bp, Chlorella sorokiniana
  unsure (1)..(577): unsure at all n locations; Clone ID: LIB3602-001-P1-K6-G6
ggtccggnaccccggtcgccccgcgtccgcgcggcggccccgccgcgtgaagaaggcggcggccccgccaagcctgtcaacccgctctatgagaagcggcccaagacgttcggcattggcggcgacctgctggccaagcgcgacatgcgccgctttgtgaagtggcccaagtacgtgcgcatccagcggctgcggcgtgtgcggggggagcgcctgaaggtgccccctgccctcaaccgcttcacccgcacgctggacaagaacatggccgagagcctgttcaagctgctgatgaagtaccggcccgaggacaaggcggccaagaaggagcggctgctgaaggaggcggaggcgcgcgaggctggccaggaggttgagaagaagaagcctgtggtggtcaagtacgggatcaaccacatcacgcagctggtggagagcggcaaggcgcagtgcgtggtgattgcccacgacgtggaccccattgagattgtggtgtggctgcccgcgctgtgcaaagaagatgggcgtgccctactgcatcgtcaagggcaaggcgcgtctgggcaccgttgtgcac

SEQ ID NO: 2894 - DNA, 184 bp, Chlorella sorokiniana
  unsure (1)..(184): unsure at all n locations; Clone ID: LIB3602-001-P1-K6-H6
ccgggntcggacccacgcgtccgaaaaaaaaaaaaaaaaaaaaaaaaaaaaaaaaaaaagaaaaaaaaaaaaaaaaaggggggaanaaaaaaaaaaaaaaaaaaaaaaaaaaaaaaaaggggggaaaaaaagggggggagagggagagangaaaaaaaagaaagagaagagggaaagggagaaa

SEQ ID NO: 2895 - DNA, 97 bp, Chlorella sorokiniana
  Clone ID: LIB3602-002-P1-K6-D12
tccgcctgatgagcgttctactacccgtggccggcaggtgctgctggacgggcgcgacatccgctcctaacctgcgctggctgcgcgagcagattgg

SEQ ID NO: 2896 - DNA, 374 bp, Chlorella sorokiniana
  Clone ID: LIB3602-002-P1-K6-G9
gggggggggggcttgcataatattcctttttgggcagctaacttaattgcctggggggccgtttccatcgcccttaccaggagaattccccggctggaccgaaaatatgaccctccctgaaaatgcccctttagcaaggggggtgattaggaaaagggcaaggggacttttccttttgaaaaagttgtagcccccgaagggttaagggtccccccctcttttcgcccatttaaggccgggggggggggggggcccccaaagggggcccccctttttggttgggcctttatgccccgttttttcgtatgttttaaaacttttataggaaggttggcggctttttccggccatattatataaatggggggcttttt

SEQ ID NO: 2897 - DNA, 626 bp, Chlorella sorokiniana
  Clone ID: LIB3602-002-P1-K6-H12
cgtccgaaaaaaataaaaaaaaaaatttaaacaggaagaaaaaaaaaaaaaaaaaaatattaaaaaaaaaaaaaaaaaaaaaaaaaaaagggggggggcggccgttttaggggttccctgtttccgtccccgtgcttgcgaaattttttttttttttttgggttttcctttttttttttccgtgggggttgtttttccaccttttgggctgggaaaccccggctggtccccattttttttgcttggcggcttttttctcctttttcgcttttggtgttatttgtcaatggccctttccttctcgctcttttttttctttgtctctttcctttttggggttgggtcttcccctttgtgttctttttttttcggtttgttttttgtgttttcttttttttttttttttttttttctgttggtgtttctgtctctgttcctttttattttgtgggttttctttttttttttcttcttctcatttttttcttttttgtttttgtttcgttttttttcgttctttttttttttttgtttttcttttttttttcttgtttttttttttctttttttttggttttgcgtgatgtttttctcgttttttttttttttttttctttttttttttt

SEQ ID NO: 2898 - DNA, 522 bp, Chlorella sorokiniana
  Clone ID: LIB3602-027-Q6-K1-A1
gaagagcgtggtgtgcgccagcaaccccacctccaagatctgcctcaaggacagcgccaagaactgaggcgtgccagctggactgagcgagcgctgagcccttgctggccgcacctgaggcaggcagccattgctgactgccggggggcaccgggccgccacccgctgcccggcagcatgggcgaggcggcgtgagaaagagaggacttgtgcactgccacacagttttttggacacctgtgctgtaacatatacttgaggaaaaaaaaaaaaaaaaaaaaaaaaaaaaaaaaaaaaaatttggagaagcacctcgcagacccttggaacaataaaaggatttgcgtacgcacaaaaaaattgtgcccgggcggggggtcaactaatagatcaacacattgaggcagcacacacaactgcgcacccttggcatgggtttgattacgtactgcagacctgactaatgcaacctttcccctgatgagaactgctggatcggcctctgtttaatcaatgcatgcc

SEQ ID NO: 2899 - DNA, 526 bp, Chlorella sorokiniana
  Clone ID: LIB3602-027-Q6-K1-A10
atcccttgcaccaacgaggaccccgtgctgtttgacactgcggagatcccctggtgggcgtgggtgcgccgcttccacctgcccgaggcggagaagctgaacggccgcgccgccatggttggctacgtgctcgcgctgtttgtggaccagctgacgggcgtgggcctgctggaccagcaaaactcgttcctgggcaaggtgctgctgcacgtcgccgtgtttggcatcctgctcatccgctcctcctctgacattgacaagttccgcggcctgatcgacgaggccaccttctacgacaagcagtggaacgcgacgtgggagggccaggagcggcccagcgagtgagccgcgtgacgaccggtggcggcagcaggcgcaccattctgcgcctctacctgccaggtgccaccttcggcagcagcagcagcagcagcaatgccaacatgaaacgttacacgtcactctcaaagcactatccgcccccgcagcagtttcattgttcagctcctttcggttcctttctcct

SEQ ID NO: 2900 - DNA, 317 bp, Chlorella sorokiniana
  Clone ID: LIB3602-027-Q6-K1-A11
aaaaaaaaaaaaaaaaaaaaaaaaaaaaaaaaaaaaaaaaggaagaaagataataaagaaaaggaggtaacgtacgcgagaatgagaaaataataactcttgtatggtgcaataataaatttaattaattggccgcggttttaaatcgtgtggactgggaaatacagtggcgtttccgggttaaatcgtgttgtagcacatctcactttcgtcaggtggagtaatagtgaagaggccaggagtgatcgacatatggaacagttgtatagcctgaatgagtaatgggacacgccgtgtagcgattgattaatgccttg

SEQ ID NO: 2901 - DNA, 522 bp, Chlorella sorokiniana
  Clone ID: LIB3602-027-Q6-K1-A12
cgtgttttgtgctgctctctgccccccatccattggcggccaccaacaggccgatccaactgctcgcctttcatgttgtgcccctcccccgctagctacccgcgctcccccgtctatttagctattcgacgcaaccctacccaccctagctacccaacccacccccgcggccccattgggccccacaaggaccactagcaagtaccacctgaccacctcggagacgtacctaagcactatctatccaggccccatggcggccgctcagaagacggcccgcccggcacctaagccgccgcagcgtgcatgcggcccccggcacactgcaccccgtagacggatcagcacaacgcccaaaggacgagacgccaagcgctcaagccagccgcccgaaacccaacaataacccgagtgaccacggctggcccccaaccgctgccctttggggcttgccccccatccgtcttaccgcttcctgctccaccttgctttttccccacccccaccccctgctcaagcgct

SEQ ID NO: 2902 - DNA, 512 bp, Chlorella sorokiniana
  Clone ID: LIB3602-027-Q6-K1-A2
gcaggaggtagcacacactgccgaggagctggcctccaacctgggtaactacaagcgacagcaggcagaggtggaggcgctgctgctagaggatcccgacaacagcgagctgcaggcaatctttgacaacctcacggaagtcatacagctggcgcaggagctgtgccaggctgaaacacaggctgggactgcactgcagcgacaagacaacgaccagttgggcagtccggcacaattggcgccgacgttgcaggggcatgccgcggcccctggtccgtccgcctccactgcagcccctgccgcattgtcaacgctactgcccccccaagtggctgaacagatacgcgctgcacagcagcgtgcagcactgacaggacagggaccgcctgcgtgggcagttggcgctcagtgcagggccgtgtacagcggcgatggcaactggtataacgcggtcgttgaagccgtcggtcagacaggcacgttcatcgtggtttttgatggctatggaacgc

SEQ ID NO: 2903 - DNA, 525 bp, Chlorella sorokiniana
  unsure (1)..(525): unsure at all n locations; Clone ID: LIB3602-027-Q6-K1-A3
cggacgcgtgggcggacgcgtccgccaagaaggtggactatatggagctgccgcagcctgtgcggtatgaggagctgcagagagaagtgatgatgtccctcaagcccgacctgtttgagggcctgcgcttcgatctgaccaagccgctgaaccacaactttgcgctgagccactccatcttcatggggaacatcgatgtgcccaccgccaacccctcccaggttgtgaagatgcccatggggacgtacgagtttggtgccaacctagtcagcaaccgcggcaacctcatgctggggcgcatcaccagcgatggccggctcacggngcgcgtcaagtacgatgtgcacgagatggcggcgctgaagagccagttccagcttgccaccgagaagggcatgagccaggccatgtttgacattgacctcaagggcaaggactggaacgggcagctcaagtacggcaccagcaacttctatggcgccaactacttccagtcggtcacgccgcagctgtccctgggcggcg

SEQ ID NO: 2904 - DNA, 401 bp, Chlorella sorokiniana
  Clone ID: LIB3602-027-Q6-K1-A4
ccctggtccctggcgcactgtacccccctgtgcagctgcttgccttcaacatatgaaaaccctctgccgcgcggctccgctccccgcccctctctcttgctactgcctgcttttctttcgccggcgggcgcccgccctctgatcgcgcgccgcccgccccgccgcccccatttgtccacccacagctcacccaacttcgatcccatccgttgaatgctttgggcccgagggccgcccatgtgccgtgccaagcgctttcattgcttcccacaccgcaccactttcattgccgcccgccgctccacatggccggcggccggcagttgaccattcttcctcccacctcaacactgctgcgcgcccctcccgcctttttggagctgtgtagtaaaagccgctgc

SEQ ID NO: 2905 - DNA, 535 bp, Chlorella sorokiniana
  Clone ID: LIB3602-027-Q6-K1-A5
tggactcgcagctcgtcgacgcacagggcttcccccgggcagacgtggatgtggcagccatccgggccgatcgccacgccatcataacccagacaaacgaccacaaggcgctcacccggcagatggagcagctgctgcaccagctgcatgcgctgtccaaccagcctggcggcagcacagcaggcggggcagcagcggcggcgggcgagcctgcacgagcagcggcgggagctcttccggcagctgcagcacagcaaaccaacgtgcagcacccagcagccgctctgccgccatttgcggtagtggatgaggtgtcgcagggttcgcctgccgcagccgccggccttcagctgtgggaccaaatgctcagctttgcaggggtgaccaagcaaacgcccaacacgctgcaggcggtcgcagcggcgctgcaagccaatgaggggcggccagtggagacggttgtcctgcggcagggcgcgcctgcagtgctgcagctgacgccgcagccgtggggtggccgcggcctgctgggctg

SEQ ID NO: 2906 - DNA, 445 bp, Chlorella sorokiniana
  Clone ID: LIB3602-027-Q6-K1-A6
tcaagctcaacggcgtgcccgtgcgccgcgtgaaccaggcgtacgtcatcgccacctccaccaaggtggacgtgagcggcgtggacatctccaagtttgacgacgcctacttcaagagcgccgagaagaagcagaagaagcagagcgaggagggcttctttgccgagaagaccgagaaggcgccgctgcccgctgagtatgtggccaaccagaaggcggtggacgcggcgctgctgggcaagctgagcgacgagctcaagggctacctgtccagccgcttcacgctgcgctctggcgaccggccgcacctcatgaagttctgaggtgccagcctggcagctcgctcgcccagcaagcggcccggcggccgggcttgcttggcggcagcccgcgcggcacgcggcgggtccgtagtgcacggcccgacgagcgctgtgcggcggcg

SEQ ID NO: 2907 - DNA, 520 bp, Chlorella sorokiniana
  Clone ID: LIB3602-027-Q6-K1-A7
acctgggcaacccctccctggtgcacgctcagtccattgtggccaccctgctggtgcagctgatcctcgtcggcactgctgaggcgtaccgcgtggcgggcgaggggcccgtcgacacctcgggcgacaagctgtaccccggcggcttcttcgaccccctgggcctgggcgacgaccccgacaccctggccgagctcaaggtgaaggagatcaagaacggccgcctggcgctcgtctccgtgttcggcttcttcgtgcaggcgctggtcaccggcgagggcccgctggagaatttggagaagcacctcgcagacccttggaacaataacggctttgcgtacgcacagcagtttgtgcccggcctcaagtaaacgaatcgatcaacacattgaggcagcacacacaactgcgcacccctggcatggctttgattccgcactgcagtcctgattaatgcaacctttcccctgatgagcactgctggatcggcctctgtttaatcaatgcatgccccagccct

SEQ ID NO: 2908 - DNA, 69 bp, Chlorella sorokiniana
  Clone ID: LIB3602-027-Q6-K1-A8
aaaaaaaaaaaacaaacaaaaaaaaaaaaaaaaaaaaaaaaaaaaaaaaaaaaaaaaaaaaaaaaaaaa

SEQ ID NO: 2909 - DNA, 520 bp, Chlorella sorokiniana
  Clone ID: LIB3602-027-Q6-K1-A9
gacgggctgttgagcgggagtggacacccttgtacctttctgtatcatcttgcagcaatggcagccggctgcatatttctaacatcgacaccggcccactcggttgtgccatgcccacctgcctccaacgtcaccctaaatcaaccctcatccaacccatccacctgccacccatccactcaccttgcatacgtcacaacctgtgtcacccactgaccacccatgacccactgaacgacctccatgcaccatgctccccatccaccaaatctgtcaccggaaacgcacgaacgacgctgcaccacctgccgccccctcacgcggacatatcttgcacgcgtcacctttgctgccgctcaccgccgaacatcctacctcccacacctcactccatgtccacccttcacccgcgcttcacacaaagtgtgttgccatgcaaagctgttgacaaacccatacattatgctcgcacacccactcacccacacgttcaacgtatccagacccattttcaaggccc

SEQ ID NO: 2910 - DNA, 527 bp, Chlorella sorokiniana
  Clone ID: LIB3602-027-Q6-K1-B1
gccgcccatgcatactactaatgaagccgagctctcttctagacatgtgctccgcagcattgggccagctggctcgcccgggggctcaccgcactggtgcaggttgatgctgcagctgccatgatacagcgcctcttgcagccgctggatgaggagatgaatgagcacaaaaagttgcagttgcgcgaactggcggcattgaacgtcactctgaaagacgaacagtactgcttcatctgtggcgagtcagggcaccagcaaagcgagtgcccaaagaaggctgtcgatgtgtaccgtttgccagaacagctgcaaagcaaggttgacgagatgtatgccaaggatgtcgcgcgcatcaacccaggggaggccggcaagatggatcacgagtacaagtcgtttttggctgagctgggcgggggccctcctccgctggaggcaggagctgcacaccgaggcccgcatggacgggcccggccgggcgacgagctgccagattcttgcaagctgtatgtcggcaacctgtc

SEQ ID NO: 2911 - DNA, 455 bp, Chlorella sorokiniana
  unsure (1)..(455): unsure at all n locations; Clone ID: LIB3602-027-Q6-K1-B10
atttcgaatgcaccgctgcatgcctgcgcccgtgccctgcatatttccagcgctttcttttggttgcctcgtcccagctgcttagctcagtcgaacttgaattctttattcagcagagagaagagcgaagctgttcattgcgttgcgtgtgtgtgtgctgtaaaccaaccaacaaaaaaaaaaaaaaaaaaaaaaaaaaaaaaaaaaaaaaaaaaaaaaaaaaaaaaaaaaaaaaaaaaaaaaaaaaaaaaaaaaaaaaaaaaaaaaaaaaaaaaaaaaaaaaaaaaaggggggggcgtttttaagggttcacagtttattaaaggggggaatggaaggtaataatttttttatagggtccctaaaattaatttccttgccccctttttaaaaacgnggaaatgggaaaaacccgggggtcacccaatttaatcgcttggcaccaattccccttt

SEQ ID NO: 2912 - DNA, 394 bp, Chlorella sorokiniana
  Clone ID: LIB3602-027-Q6-K1-B11
cgctgctggaggagacgatggggcgcatggaacgcgtggcagcctggctgctgatgacgggcggcggcaagggcgccaacctgaacgtgtttatggaggcggccacggcatgggagaagcggcaggcggcactccgggcacgtgcccaggctgaggcgggctggacgcccttctgggctcagtccaccccggccaccggctcccgcatgcaagacgcagcgcgcgaagcagccgagggcggtggcggcagcgccacgctggggcgcggcgtcaatgcggccacaattgccagggcctcgcgcaagtggcgcgactggcagcgcaccaagcgcaacaaggcctcggcgctcatcaccgcatccagctccgtgagcagcagcaccgatgtgtgagc

SEQ ID NO: 2913 - DNA, 421 bp, Chlorella sorokiniana
  Clone ID: LIB3602-027-Q6-K1-B12
ctcaatcgcaccctgcccaaacaaacgcctacccacccgcggccgcgggcccagttttgaccgccttttgcctgattcctccccaacaccaatgcacgcccccaccctgcttctgtcccctctctctcccctttccgccatgctcttcccccccatgtttctctcccgttttgcccctgcaaagtaatcggcgggacagccccccttgcagccaccttggcttcccacgtattttttgttgctaatcgctgcccccttttgcgcgccgccggcggctgcgctctcccttgcccgcccgggcatgctctttggttccctcatatgatgcggcacccttcgccgtcacatttatccgctgcccttgcctttggctggcccttgcctgtgccacacaagcctgcattgtaacaccagcaaggtc

SEQ ID NO: 2914 - DNA, 254 bp, Chlorella sorokiniana
  Clone ID: LIB3602-027-Q6-K1-B2
ctctccacagaacaagcgaagatgcgcgctaagtggaggaagaagcggatgcggcgcctgaagcgcaagcggcggcggcagcgggccaagtaagcggcctgccccgcagcccagcagcgctgcggcgcctgggcgcagccgcccgctcgcacgcgtgcaacggcgctgcagcggccagccggcgtcacggagtccgggcgcccggcagccgccgatgaaatgtgacggccgagtgtgtaatgctcacgaccgtg

SEQ ID NO: 2915 - DNA, 506 bp, Chlorella sorokiniana
  Clone ID: LIB3602-027-Q6-K1-B3
cggacgcgtgggcgacgagatcaacaacgcggtggccgacgtgcggggcgtgatggagagcgagaaccccgaggacatcaaggccaagatcaacgcgctgcagcaggcggtgatgaagattggcagctcgctcagcggccagggcggctcgggcggcgagggcggcgagaatgtgcaggatgccgaggtcaaggacaagaaggagtagaggagcaatatgaaggacagccttgtggaggaggagagcagcatggaagatggagcgatgctgcagaccggagctgagaggagcagcttcaccccacccagcggccgcagcagctggcccggcggccgggcggctggcactcgtaacctgccctccctcccacctctgccctctgtccgtgccctccctctcccatcccttcccctcccaaccctgcctcgctcccctgcccctatgggcgcgccgccgctgcatgcactgacgggcgggattacacgcccccggtgttgcctggcga

SEQ ID NO: 2916 - DNA, 538 bp, Chlorella sorokiniana
  unsure (1)..(538): unsure at all n locations; Clone ID: LIB3602-027-Q6-K1-B4
ggcctgctctgcggcccttcatacctttgtacctttctgtatcatcttgcagcaatggcagccggctgcatctttctaacatcgtcaccggcccactcgtttgtgccatgcccacctgcctccaacgtcacccttcatcaaccctcacccaacccatccacctgccacccatccactcaccttccctccgccacaacctctgccacccactcaccacccatcacccgctcaacgccctccatgcaccatcctccccatccaccaaatctgccaccccaaacgcacgtccgccgctgcaccacctgccgccccctcacccgcacccatcttccacccgccacctttcctgccgctcaccgccgcacatcctacctcccacacctcactccatgtccacccttcacccgcgcttcacacagcggctgctgccatgcaaagctgctgccaaacccatccatcatgctcgcacacccactcacccacacgtncaacgtatccagacccattttcaaggcccgactgtacagtgcctttttgc

SEQ ID NO: 2917 - DNA, 525 bp, Chlorella sorokiniana
  Clone ID: LIB3602-027-Q6-K1-B6
aaaaaaaaaaaaaaaaaaaaaaaaaaaaaaaaaaaaaaaaaaaaaaaaaaaaaataaaaaaaaaaaaaaaaaaaaaaaaaaaaaaaaaaaatgaaaaaaaatttagggggcgggccgttttaggggttccagcttttccttccccttgctttcaacttgttacttttttttttgtttcccttaatttttttttcctgcccgtttttttacaacctcttgattggaaacaccttggttttccccaatttattcccttttcaccaattcccttttttgccagttggttttttaccgaatagccttcccccgttttcctttcccaaaattttcaaagctttattggtttttgggcccctctttttgcgggctttttaaccgcgcctgttttgtggtttcctcccattgtcaccgttttttttcccagccctttagccccctttcttttcttttttttccttttttttttcccccctttcgccgtttttccccgtgagtttttttttgggggcctctttttgggtttcc

SEQ ID NO: 2918 - DNA, 325 bp, Chlorella sorokiniana
  Clone ID: LIB3602-027-Q6-K1-B7
tgcaaccccaaccatcagccgtcgcaccgtgatacccccgttgcaccaatcctccccgccagagagcgcgctgctctcacgcccacatttcaagctaacacttgaccctgcactttttgccgcccataatcccctccgtcaatgaaacgaatgttatactgcccttctgcacccttcattttgcgcactggcacagttttgccctgatgctctcaattcgcgagcgcttcgatccgtctgtcctttgttccgtgtgagtgttccttttttccccgctcctcctaccatgtgtattcttgggtcatatgttgtaacatagagtttt

SEQ ID NO: 2919 - DNA, 521 bp, Chlorella sorokiniana
  Clone ID: LIB3602-027-Q6-K1-B8
gcatgcctaatctctttcaagcctgcttgcggtgcggtgcacccaccctgccgagtgccagccgcccccgtccctgtgtgtttgccaccatgcttgctcgggcctgcgcagccctcttttgtcacttgctggccctctagcccctgttttccaacccccagtcctcttgcggtgcatcctcggcacacagaggtgtgccacacgttccctgtctctttgtctagtcgagtcatcttccccgcacttggcagggcgagggttcaccaacttcgccccctcagcgcccgtgctgccggccggttggggcggcccctgctgccgccccactcatcctgcttgctctgatgcagcttgtcccagcgcctgcaattcttttgaccccattcctttcttttgcccgctagtttgtgctgctcctatcttcgtcgcatcacatgggtgtactgccccacgtttcatggcccatccccactcacaccttgcctcccgcccgagcgcactaccccccccatccccacccc

SEQ ID NO: 2920 - DNA, 523 bp, Chlorella sorokiniana
  Clone ID: LIB3602-027-Q6-K1-B9
agaacggcggcaagttccctgtgcaccccaagcaggagaaggccgccgctgaggcgtccaagaagcccgccaagttctaccccgcagaggatgcgccccagcctctggcgcgccgcgtgatccgccgcgccgccaagctgcggccgtccatcacccccggcaccgtgctgatcctgctggcgggccgcttcaagggcaagcgcgtggtgttcctgggccagctgccctctggcctgctgctggtgaccggccccttcaagctcaacggcgtgcccgtgcgccgcgtgaaccaggcgtacgtcatcgccacctccaccaaggtggacgtgagcggcgtggacatctccaagtttgacgacgcctacttcaagagcgccgagaagaagcagaagaagcagagcgaggagggcttctttgccgagaagaccgagaaggcgccgctgcccgctgagtatgtggccaaccagaaggcggtggacgcggcgctgctgggcaagctgagcgacgagctcaagggctacct

SEQ ID NO: 2921 - DNA, 474 bp, Chlorella sorokiniana
  Clone ID: LIB3602-027-Q6-K1-C1
gcatgatgcatttcacaatgattggagttccagagaagagagcaatcaataaagacacgaggggacgctgaagaacaggcggcggcaggctggctgctgggcaagagggcgccccccgacccaggcgccagcgcagcacgccaagaggaaaagcaagcggaaagaaaagctgctgctaggcgcgcagcggaatgaagctggcgccatgagggcaggacgtgatgcgctgcagcggcggctcagccccgccccaagctgtgctgccacggaggttcagcgggggtcttgactgggggagcaagcgcccgcatgccacactctacgtcttactgccgactgctgctgctgcccagcattcagcatgtgagcatggtgcggggcaaccaggcctcccggtgcttagagctcctcgtgcttctcctcctcctcctccttcttctcctccttcttctcctcctccttcttctctgcatc

SEQ ID NO: 2922 - DNA, 491 bp, Chlorella sorokiniana
  Clone ID: LIB3602-027-Q6-K1-C10
ttttttttttttttttttttttttttttttttttttttttttttttttttttttttttttttttttttttttttttttttttttttttggggggcaaaaccaaaaaaaaatggtggaacacgggcggggccggggggcgcccaccgtaacggcaaaagtaaagggcaaaaagggcagggggtgttttttttggaaaataaaaaaggaggggggagggcccggctgggaaccaaaaagggggctagggggggtggttgttaagctggaatgggtggggggccccccaaccggttaaggggcgcccccccgttaaagtggcgccaataaaaggggggcgggggggcccaactgggggggttgttgggggcccaaaaggatgggaaaagggacatttggtgctcctttgccgaccaaaaacaaaaaaccggcgcccccaatggccaccaagcccaagatgtacttgtggggggaaaaggcggtggccaccccct

SEQ ID NO: 2923 - DNA, 256 bp, Chlorella sorokiniana
  Clone ID: LIB3602-027-Q6-K1-C11
cgcccggccagcctctgtaacacatagcgtagaaaaaaaaaaaaaaaaaaaaaaaaaaaaaaaaaaaaaaaaaaaaaaaaaaaaaaaaaaaaaaaaaaaaaaaaaaaaaaaaaaaaaaaaaaaaaaaaaaaaaaaaaaaaaaaaaaaaaaaagaaaaaaaaaaaaaaaaaaaaaaaagaaaaaataaaaaaaataaaagaaaaagaaaataaatatagaaaaaaaaaataatagttaaagaggtgaataaatttaa

SEQ ID NO: 2924 - DNA, 528 bp, Chlorella sorokiniana
  Clone ID: LIB3602-027-Q6-K1-C12
cccacgcgtccgcccccgttgctcccaagcctacccgcaccacgatccacctcatggccaagctctcggtggttgttgcgctcctgctgctcgctgtcggtgcccgcgccggcagcgactccgacaagtgcgccctcgagttcaacgatccgtgcgagcagacctgcaacgtcaaaagcggacagatcgttggacctgatggcctagacctggaaggcgcctccgactgggcggccgacctcgccgccgcggtctccgagcgcgtgcacaaggacaaggagtgcaagatcgccttctggaccgtgctcaaggcctgccgcatggccgacaatgccgtccacatgttcttccagcacaacatcgagtgcccggacaacaacggcttcaaggtcaagtacgagaccaagggcacgatcacctatgaggagtctgacaagctggaggacccgaacacacgctttgtctgcgtcttcgacagcaccttcagctaggcgaacaggcccccccatctgcccccggggcaacaac

SEQ ID NO: 2925 - DNA, 532 bp, Chlorella sorokiniana
  Clone ID: LIB3602-027-Q6-K1-C2
aaaaaaaaaaaaaaaaaaaaaaaaaaaaaaaaaaaaaaaaaaaaaaaaaaaaaaaaaaaaaaaaaaaaaaaaaaaaaaaaagaaaaaaaaataaaaaagggcggccttttttatggttcacagttttattaacttgtctgtgctatagttttacattttttttggttgaagggggggttgtttttacgggccttctttttttaacgcccttgtttggcaaacccctgtttttttccaggttattcgccttgctccacttgcccttttttccagttggcttatttggaaagagcttggcacccaccctttttcctaactttggcccagcctgctttttggatggggcgctccttgaagggggcctttacccgtgccctttttccagattctccccattttttccgtttctttggccccccctttggggccttttcttttcgctttgttgcttgggtttttccccccggtcgccgtttttctccggggcgctttttggggggggtttttttttgttttccgttttttttttttc

SEQ ID NO: 2926 - DNA, 529 bp, Chlorella sorokiniana
  Clone ID: LIB3602-027-Q6-K1-C3
gagaagcggaagcacaagctgaagcgcttggtagcctcccccaactcctacttcatggatgtgaagtgccagggctgcttcaccatcacgactgtgttcagccacagccagaccgtggtggtgtgccccagctgcaacaccgtgctgtgcgtgcccaccggtggcaaggcccgcctgaccgagggctgctccttccgccggaagggcgactgagcgcgcccccgctagcggcagtgttggcgctgggcagcggttattgtgatgtccacgggcagcccgtagcagcggcactcgcactcctctcttgttgggatggagcaacaccttgcacgggcgtcggaggagactgatcgcccacagtgaggagcacgcggccgggggcctccgcccctgcagccgcgtgtgaagagccacgagtatagcaccccgcgctgccaggcctcgcggccggcgcgcacaaatgactagcacccgcgcctgcggccggcgctgctggccggtcgcggccgggctggctgtcccaggaagt

SEQ ID NO: 2927 - DNA, 58 bp, Chlorella sorokiniana
  Clone ID: LIB3602-027-Q6-K1-C5
accaccatcactaacagcctctgaaacatatatactataaaaaatatacttaataagc

SEQ ID NO: 2928 - DNA, 540 bp, Chlorella sorokiniana
  Clone ID: LIB3602-027-Q6-K1-C6
aaaaaaaaaaaaaaaaaaaaaaaaaaaaaaaaaaaaaaaaaaaaaaaaaaaaaaaaaaaaaaaaaaaaaaaaaaagaaaaaaaaaaaaaaaaaaaaaaaaaaaaaaaaaaaaaaaaaaaaaaaaaaaaaaaaaaaaaaaaaaaaaaagggggggggggtttttaggggttcaatttttttgttgggggggtgggaagtttttattttttttttgggggaaaaaaatttaatttagggggggggtttttaaaaaggtggggtggggaaaaacttgggggttacaaattttattggtttggaaaaaattccttttttgacggtggggataataaaaaaagggggggaccgttttttttttcaaaaatttttcaaactttaatgggaaatgggacccccctttttaggggctttttaagggggggggggggggggtttaccccatttttaacttttttttttgggagggctttagggccggttttttgggtttttttttttggttttgcggaagggttgggggtttttcccggaaaggtttaa

SEQ ID NO: 2929 - DNA, 470 bp, Chlorella sorokiniana
  Clone ID: LIB3602-027-Q6-K1-C7
ttttttttttttttttttttttttttttttttttttttttttttttttttttttttttttttttttttttttttttttttttttttttttttttttccggggggggggtaaaaccccttttaaaggcccccccggggggcccccccgggaggaatggggcccttttgggggggggggaaaactttaaagaaaaaaacggggcggggggggaactgctttttcttctgggggggggcggggggggttttaccccaacaaattaaccgggcccccaacctttttgatttttttttccgccagttgggtaaaaaattgggggcccaccacccccggtttttggggaagggggcccttgcccaaaaatttaaaaaacccgggcttgggaaagaaaaaaacggggggggcccttttaaaaaaaaaaaatttacctccgggggggtggaaaaaaaaattttttttaaaggggcccc

SEQ ID NO: 2930 - DNA, 524 bp, Chlorella sorokiniana
  Clone ID: LIB3602-027-Q6-K1-C8
gccgacggcgaagtgctgtgcaccaccggcaacaacggcaagactaaagtgaccaagtgccccgctggcaccgtctgcgatgacgctgcgctcaagtgcgtccctgaacagcccgccggcccctgcgacaaccgccccgatggctgctatcacttctcccaccacgacggcatgtgcctcaacggccagcagtccctctgccccaacagcggcagctgcaatgccgacggctccgcctgcgaggcgccccagcctgccggcccctgtgacaaccgcccagatggctgctatcacttctcccaccacgacggcatgtgcgtcaacggtcaacagtcgctctgccccaacagcggcagctgcaacgccgacggctccgcctgcgagacgccccagcctgccggcccttgcgacaaccgccccgatggctgctatcacttctcccaccacgacggcatgtgcctcaacggccagcagtcgctctgccccaacagcggcagctgcaacgccgacggcaccgcctgcga

SEQ ID NO: 2931 - DNA, 525 bp, Chlorella sorokiniana
  Clone ID: LIB3602-027-Q6-K1-C9
gcagccagaaggcgctgtccatccccaccggcctcggcatggtctgcgcctcggacaaggcgctggcggccatgaagacggccaccagccggcgcgtgtactacgactttgccgacatgctgcgcaccaaccccaccggcaacgtgccgtacacccccatcctgccgctgctgtacggcatggaggcgtcgctgaagctgctgcgggacgagggcatggccaacgtggcggcgcgccaccacaggctagcggagggctgccgcaaggccgtggagggctggggcctgcagacgctgtgccgcgacccgcgctggaagagcgacagcctgacggtgatcgaggtgccgcagggcgtggactcgcaaaaggtggtggacgtggcgtacgccaagtacaacctgtccctgggcattgggctggcggacgtgaagggcaaggtgttccgcatcggccacctgggcaacatggacgagctcatgctgtcctccgcgctgtgcggcgcgaagatggcgctcatcgacgccg

SEQ ID NO: 2932 - DNA, 377 bp, Chlorella sorokiniana
  Clone ID: LIB3602-027-Q6-K1-D1
cctgtagtgaaggtaaagtctcaccatgggcaagtgcggcaagggcacgggcagctttggcctgcgccacaccaagacgcacacgctgtgccgccgctgcggccgccgctccttccacatccagaagagcacctgcggctcgtgcggctaccccgcggccaagatccggaagtacaactggagcgtgaaggccatcggccgcaagaccaccggcaccggccgcatgcgccacctgaagaacgtgcagcgccgcttccgcaacggcttccgcgagggctctgctgccaagaagatcgctgcctaaacagctggtgtctgcagctacgcggcagcacgttgagccagctgtgtagcaggatgtaacaccgcgacacaca

SEQ ID NO: 2933 - DNA, 146 bp, Chlorella sorokiniana
  Clone ID: LIB3602-027-Q6-K1-D10
aaaaaaaaaaaaaaaaaaaaaaaaaaaaaaaaaaaaaaaaaaaaaaaaagaaaaaaaaaaaaaaaaaaaaaaaaaaaaaaaaaaaaaaaaaaaaaaaaaaaaaaataaaaaaaaaaaaaaaaaaaaaaaaaataaaatgagggggg

SEQ ID NO: 2934 - DNA, 529 bp, Chlorella sorokiniana
  Clone ID: LIB3602-027-Q6-K1-D11
ggcgaccggctggcgatgccggcgctggaagcgctgcccggcaagctgccggaccgcgctgtgtacgattcctacgtggcgctcgtgcgccgctgctgggcgcaggacgccgccgaccgccccacctttggagacatcatcgcagagctccgcaacatcctcaccacacacctggcggcggccggcggcagcagcaatgcggccgcggcgccgtgaggcgcggcgcgcacgctacgcggcgaaccaaaaccacccgcctgcctgccagcgcgcctcggcccggcggcggcggcgcccattgtacagcagcagcttggctgcgcagccatttttcggagctcccctctcattcttgcctgcggcacgcgcgtgattggaagaagcggtgcccacgccgagaccccccctccttttgcacttttgcttttcccctgcactggacccctcgcgagaacaccccaacccacccaccctccaccttcattgaaccccgaaatcctcaagcgccctcgattcatatcctgtcctg

SEQ ID NO: 2935 - DNA, 345 bp, Chlorella sorokiniana
  Clone ID: LIB3602-027-Q6-K1-D12
tgcttctgtacaagatgctgtgctggtgcctgctcggcaaggcagtctggtggtctctcatggcgtggctggtcatttgtatccttgtttgaattggctgtgcgcttggctgcccgaccgcccactgctggccccgctctcttgcacccaacgcatgcctgcatgtacccaacgctcctgtgccatactgtccgcttctgccacgctgcttgcgcccttgcaagcagtctctgcctgcctgcccttgctgcccctccattgtttcccaacccccctgcctgcccctgcatgcctaccgcaatgcttcgctgccatgcctatctgctgtgacacttggtcgtgccc

SEQ ID NO: 2936 - DNA, 521 bp, Chlorella sorokiniana
  Clone ID: LIB3602-027-Q6-K1-D2
gcagcctggtcggcgaccacggcttcgaccccctgggcctgggctcctcccccgagcagctgtcctggaacgtgcacgccgagatcttccacggccgcctggccatgaccggcgtggcgggcatcctgctgacctcgctgctgcacaagggcggcgctgacgtgcccgagtggttcgaggctggccgcgtgtacctggaccgcaaccccaacgtgaacttcggcgcgctgctgttctccaccattgtcatgtccggctttgtggagttcaagcgcctgaacgacatccgcaaccccggcagccagggctccggcatcctgcccgaggacttcaagggcgtgggcggcccccagggccgcaccgttggcggcccctacgttggcggccgctacttcgaccccatgggcctgtgccgcggctcccccgagcagaccctcaagtacaagtggaacgagatccgcaacggccgcctcgccatgatggccttcctgggctttgctgcgcagtacgccgccaccggc

SEQ ID NO: 2937 - DNA, 537 bp, Chlorella sorokiniana
  Clone ID: LIB3602-027-Q6-K1-D4
atcaggccaagggactgttcaacaagtcggcgcctcaggccgctcacaaggacaagctcgcagccaccaagaagcaggagaaggaggtccacgacgcgctgaagcaggtccagcgcgagaagaaggagcagaaggagcgggaggaggcggagaagaaggcgctgctcaaggaggagcgcatgacccacgacacccggcgggcccacaccgaccagcggcacctgcagaagcgggaggagcacaagcagacggggcagatgtgcgagcatggcgtctggcgctgcaagatctgcttccctcacgagagcaagtgagcctggccgcttaccggcgggcaccagtcgagcagcggcgatgctcggtgctagccgtcctagtgggccaatgctgcctgtaaggcatagtgcaaggcagcatgcaccgccagcatcaatatttgtggtgcggcccgactgccaattcccgctgtcccatgccgcccggcaataatccctccactgctcttccacgctgcattgcacctgcgcaatgtgccct

SEQ ID NO: 2938 - DNA, 457 bp, Chlorella sorokiniana
  unsure (1)..(457): unsure at all n locations; Clone ID: LIB3602-027-Q6-K1-D5
gcagccgctgctggctggcaacgccacggcctaggagccagcaccaagcacagcttgcacattgagcagctgttgacagagtgacctttggggccaccggtgcaaatgcgccacaccattgcgcaacgattggttccatagatgataggtacgcatttcttccattcctcgatctgtccccaacatcatcaattggcgcagctgccctccagtgtatcccccagtacccttcccccacttctctcttcaactgctcacgcattgtcgagcaatctcttcttgcgtgtattcgtgaacaacaacaattctgttacagtacaagtgacanannanaaaannaaaaaaaaaaaaaaaaaaaaaaaaaaaaaaaaaaaaaaaaaaaaaaaaaaaaaaaaaaaaaaaaaaaaaaaaaaaaaaaaaaaaaaaaaaaaaaaaaaaaaaaaaagggggggccgtt

SEQ ID NO: 2939 - DNA, 533 bp, Chlorella sorokiniana
  Clone ID: LIB3602-027-Q6-K1-D6
ctgccgcaggcgatgccgccaagcagacgcccacccctgtttccattggggccaccgatctgaccgccaccgtggctctggagtatgctttcgacaactgagtgagcgagagagctggaatgacaaggcaggcgagcaaccgcccctagccctaaggctacgcgaacacacagcccacaaccacggcttgcaagcggcttgcaagccttcaaccgcccctcggcaactgagcacaagcgcagtacccccagcgacctgagcaagggctctaagcctggtctgaggcgcggctgttgccgccacagtgcatcatcctttttcgccaccttcccgtcacaccaccatcataagcgccgccctaatatcagcctcatgtctgtatgccatcagcactccctcggctgcacctcgcaccttgcacctccgcttggccgctgctacttgcggcctcacacattttgagttttgcaccagtcgcgggcccacactcatgccagagttttgcgggcccctcgtgactcctgattcatccg

SEQ ID NO: 2940 - DNA, 111 bp, Chlorella sorokiniana
  Clone ID: LIB3602-027-Q6-K1-D8
aaaaaaaaaaaaaaaaaaaaaaaaaaaaaaaaaaaaaaaaaaaaaaaaaaaaaaaaaaaaaaaaaaaaaaaaaaaaaaaaaaaaaaaaaaaaaaaaaaaaaaaaaaaaagg

SEQ ID NO: 2941 - DNA, 532 bp, Chlorella sorokiniana
  Clone ID: LIB3602-027-Q6-K1-E1
ggtggagaaggccatccagctgctcaagtccaccaagcgcggcaagctgcccatcgtcaacggcggcggcgagctggtggcgctggccacccgcgcgctgttcaaggaggatgcgcgcatgccctttggcggccccgcctctgtggcgcccgacggccgcctgctggtgggcgcagcagtgggcactcgcgagtcggacaaggagcgtgtgaaggcgctgcgggacattggccacgtggacgtggtggtgctggacagcagccagggcgactccaccttccagatgcaaatggtgcagcacatcaagcgggagcaccccgggctggacgtcatctgcggcaatgtggtggccacctggcaggcgcggcggctcattgaggcgggtgcggacggcctgcgcgtgggcatgggcagcggctccatctgcaccacccaagaggtgtgcgctgtggggcgcggccaggccaccgctgtgtaccacaccgcgcggctggccaactccctgggggtgcccatcattgcggacggcggc

SEQ ID NO: 2942 - DNA, 526 bp, Chlorella sorokiniana
  Clone ID: LIB3602-027-Q6-K1-E10
acgacatcgaccccaagaccaagaagatcctgcaggtgctgcgcctgcgccagatcaacatgggcgtcttcctcaaggtgaacaaggcgaccatgaacatgctgcagcgggtggagccctacgtggcgtacggctaccccaacctgaagaccgtcaaggagctgatctacaagcgcggctttggcaaggtcaacaagcagcgcatcccgctcaccgacaactcggtgatcgagcaggtgctgggcgacaaggacatcatctgcgtggaggacctggtgcacgagatcttcaccgtgggccccaacttcaagcaggccaacaacttcctgtggcccttcaagctgtcctcccccaagggcggcatcgacaagaagcgcctgcactacatcgagggcggccaggccggcaaccgccaggagtacatcaacaacctggtgcgcgccatgaactgagcgctgagccggcgagcacagcgcagcgcgcgcagcacgcacagcgcggcgcgtgcagcagcctggacggagcg

SEQ ID NO: 2943 - DNA, 525 bp, Chlorella sorokiniana
  Clone ID: LIB3602-027-Q6-K1-E11
ggcgcccggcaagagcgtcatgctgcggtatgcctaccccgtgacgtgcacgggcttcagcaaggacgccagcggccgggtgacggaggtgcaggccacctacgaccccgactttgcctccaagaagccgcccaagggcgtgctcaactgggtgggccagccgaaacctggccaggagccgcccacgtttgaggcgcggctgtacgacgtgctattcaagggccagaaccccgcggcgctggacgactggctgggagaccttaaccccgagtcgctggtggcggtgaagggcgcgtacgccacgcccgagctggcaaaggcccagccgggagacaggttccagctggagcggctgggctacttctgtgtggacaccgagtcgaccccgggggccatggtgctcaaccgcacctgcacgctcaaggagagcttccccaagcagacggcagccaagggtggccgcaagtgagagggcagggagcggtggcacactgtgtcactcaagccttcgtttttagtgcagcc

SEQ ID NO: 2944 - DNA, 280 bp, Chlorella sorokiniana
  Clone ID: LIB3602-027-Q6-K1-E12
aaaaaaaaaaaaaaaaaaaaaaaaaaaaaaaaaaaaaaaaaaaaaaaaaaaaaaaaaaaaaaaaaaaaaaaaaaaaaaaaataaagggggtgaagtttttggggtttcaaggttgacgtacttgtgcatgtttttttgtggggtttttttttgtgttatttggtttcctttctctggcttggggtttgcaaattttttggttgggacccccttgattttttcttatttatttgctttgttgccttttgcttttctcctttggggtcatgcgaataggcct

SEQ ID NO: 2945 - DNA, 439 bp, Chlorella sorokiniana
  unsure (1)..(439): unsure at all n locations; Clone ID: LIB3602-027-Q6-K1-E2
gctggttccacaccgtgtgggaccccacctttggctcctccgactccatcaccaccaccggctacaaccagtgagcgcccgctgaggcaatggcgccggcccagccgccagccgccttacgcaccccaacagagcgggccagtggtgcccctaacgcgacccgcacacaccccgcgcacccacgttccggcacaacgcatgatagcgctcctgctcccccctgtttctcctgtctgtttgtaatttttcagtagctctgccctgctgactgctgccgaatttgtttgctagtgtgggcccccttagccttcagacactgtgcgtcaccccctgcccagccgcccagcggcaccccctgtgcttgcgcctcagaactgtcctgcaccgccgccacttcccataacaaatatagcatggtcatgtaaagtgcagtggcnna

SEQ ID NO: 2946 - DNA, 354 bp, Chlorella sorokiniana
  unsure (1)..(354): unsure at all n locations; Clone ID: LIB3602-027-Q6-K1-E3
caacaacaccctcagctttgtgacggtcctcgaggctgggcacaatgcccccaacttcaagccagcaaagatgcgccagctgatgcgggcttttgtgaacaacaacctgaaggtcctgaaatgagccgcctacggcagctgacggctgtgcaaactctatgatacaatccctccctactcggctgcgccattccgcgcccattttgcattttgattgctccatcgggtaggcagcaattgccgccgcaccaatttgtcatccatgctacgatctactgttattttgctgctcgacaattgcttctttgctgtagccacttctcatgtcgattaacggcccggagctgcnnanna

SEQ ID NO: 2947 - DNA, 531 bp, Chlorella sorokiniana
  Clone ID: LIB3602-027-Q6-K1-E4
catcgtttgagggcaatgccttccgtgtgcagttccccaagtcggaaatcagcgtgctggtggacccctggctggtcggcaagctgacgtttggcggcctcgactttgtgtacgccggcagcaagcgcgtggcgcgggaggacacgctggacattgaccagatcgctgcagagacagacttcatcctgctgactcagggcatcgatgaccacgcgcacaggcccacgctgcgccgcctgcccaagacgatcccggtggtggcctcgcccgccggcgctgccgtggcgcgctcctgtggcttccgcaccgtgtacgagcttgcggccgggcagagcctgacgctgctggatggccgcatcaccgtccaaggcaccgcgggcgcgctggtgggcccgccttggagccagcgcgagctgggcgtggtgctgcgcgagaacctgcccgcctcggccggcgggcggggcgccagcctgtactacgagccgcatgcggactttgtgccggagagcgtggcgcgcgtggcgcccgttg

SEQ ID NO: 2948 - DNA, 467 bp, Chlorella sorokiniana
  Clone ID: LIB3602-027-Q6-K1-E5
cacgtgcggaagggcgacaccgtgaaggtgattgccggcggcgacaagggcaaggtgggcacggtgctggacatcaacaccaagcgcggcgaggtggtggtcgagggtgtgaacatcaagaccaagcacgtgaagccggcggcgcagggcgaggagggccagattctgaagaaggagttccctgtgcaccactccaacgtggcggtctactccacggcgcagcagacgcactcccgcgtgggcttcaaggtggtggacggcaagaaggttcgctacctgaagaagacgggcgaggtccttcctgagcggctgcctgagaagaaggctgagtaggggccacgttgggccacacgcgcagggcacattgctcctggctggcccaatcccatcacctgctgccattcttcctttgctcatttgctcctctttcatactctgttcggctcttgtaaaacactggtaccagc

SEQ ID NO: 2949 - DNA, 512 bp, Chlorella sorokiniana
  Clone ID: LIB3602-027-Q6-K1-E6
aaaaaaaaaaaaaaaaaaaaaaaaaaataaaaaaaaaaaaaaaaaaaaaaaaaaaaaaaaaaaaaaaaaaaaaaaaaaaaaaaaaaaaaaaaaaaaaaaaaaaaaaaaaaaaaaaaaaaaaaaaaaaaaaaaaataaaaagattaaaagaattaaattttttagaaggggggggggggtttttttttttttttttttttttttagtttttttggggggtttttttttttttttgggttggttaattttttttgtgggggggtttttttaaattttgggggggtggaaatttttggtttttgattttttttttatttggaaagatgttttttttttttgaagtttgggaaaaaagtgaggggtgaaggggattttttttaaaaaagttttgaaagttttttggggttgggggtttttcttttttggggatattttaagggtgggggtgtgggggttcactccaggggttttttttatttttttaattaacaggagggcggtttttttggtttt

SEQ ID NO: 2950 - DNA, 517 bp, Chlorella sorokiniana
  unsure (1)..(517): unsure at all n locations; Clone ID: LIB3602-027-Q6-K1-E7
aaaaaaaaaaaaaaaaaaaaaaaaaaaaaaaaaaaaaaaaaaaaaaaaaaaaaaaaaaaaaaaaaaaaaaaaaaaaaaaaaaaaaaaaaaaaaaaaaaaaaaaaaaaaaaaaaaaaaaaaaaaaaaaaaaaaaaaaaaaaaaaaaaaaaaaaaaaaagggggggggggttttgggttaagaggttttatttattggttgttgaaaaaaaaattttttttttttggtggagtaaaaaaaaatagggggggggggtttaaaaattttgaattggggaaaaagtttattggttaagaatttaatgatttttgggggaacattaatttttnnttttgggaattttaagaaaaagggtattagttattttgtttttgagtaagaaatgtgttggatgggcaaaagttatcattttttatatgggatggttatgtttaggggggtggttataaaaaaaaaaataaaaaattttttttttaatttgtgtttaacagggacttttttttttgatacttttttttg

SEQ ID NO: 2951 - DNA, 524 bp, Chlorella sorokiniana
  Clone ID: LIB3602-027-Q6-K1-E8
cccgaccgccccaagttcctgggcccctacagcacgaacttcgtgcccagctacctgaccggcgagttccccggtgactacggctgggatacctctggcctgtcggccgaccccgccaccttcgctcgctaccgcgagatcgaggtcatccatgcccgctgggccatgctcggcgccctgggctgcgtcgtgcccgagctgctggacggcaccaaccacattgcctggttcaaggccggcgccgagatcttcggcgacgacggcatccagtacctgggcatccccggcctgatcaacgccaagtccatcgtggcgaccctgatcgtgcaggtggtgctcatgtcgtatgttgagggctaccgcgtcaacggcggcccggccggcaccggcctggacgctgtctaccccggcggcaacttcgaccccctgggcctggctgacgaccccgacaccctggctgagctgaaggtgaaggagatcaagaacggccgccttgccatgctgtccatgttcggcttcttcat

SEQ ID NO: 2952 - DNA, 408 bp, Chlorella sorokiniana
  Clone ID: LIB3602-027-Q6-K1-E9
ccattctttctagccccgctgaaattacccgcccgtctccaaccgtcaacttgttgcactgtggcatctgtcactcccaacggcccacctccgccgcttgcacgccagccccctccacctctcaaactgtgcgatttttggccgcccatcctctgctctcgtgggcgaccctcaaatgtgcgaccttctttgcgcttttccctgaatcaaatacccaagcctaccgcagcactccgtctccccccttcatttcctctgcctgcacccacttgcccgccttgctgttatgtgctttctattacgagtcaaccattggtatgcatgactgagtgtacctcttttccactacttgttgacctgatgcatgcagttgccaccagcgagtgggatgtaatgcaaacatgctgc

SEQ ID NO: 2953 - DNA, 407 bp, Chlorella sorokiniana
  Clone ID: LIB3602-027-Q6-K1-F1
tgctcgtgccggtaaggtgcgcggccagacgcccaaggtgcccaagcaggagaaggcgaagacccccaagggccgcgcccgcaagcggctgcagtacaaccgccgcttcgtgaacgtggtggtgggcttcggcaagaagcgcggccccaacagccagtaagctgactgcggcgccagcagcagcggcaggcatgtgctgaacgcacggagcgcaagcgcgtcccgcgcacagccgccaccgaagcggcctgccagcgtcgacggcagcgaggcagcaaggcgcggcctggcatgctagcagcgcgtactgcgcgccacggcgctagcagccgcaccctggaacagcatcagcagtaattcagcagcccacctgcatgccgaacgctccgctgtaacaggttctcagg

SEQ ID NO: 2954 - DNA, 529 bp, Chlorella sorokiniana
  Clone ID: LIB3602-027-Q6-K1-F10
gcaacctcttcacggcagccaagcagcagtttgagccggatgatgtggacaagtttgagctgctcatctgcctcgactctgccatccaagctgaggtgttgaagcagctgtcggcagcccggccggcccaccccgccagctacacgccgcgcatctgctgcctcacagactttctgatgtactgcccagacgacgtcctgctgcgcatcggcagtaccgccctgctggaccgccagctgcgcggcgcggtacagctggcgctgcccgcgctgcggccctccgcagcacgcatagcagcggcggcggcggcagcagcagagacagccggcggcggcggcggcgcggcagccaccagcagcggcgaggggctgccagcggtggcggtaccagcctacatgctgccaactggcatccctcggccgccgctcagcgctggcagctacgatgcgggagaaggggagtgcggcgaccctgagggatgcacaccagatgagcagtgggagcgaatggcgctgctcacagccgtatg

SEQ ID NO: 2955 - DNA, 447 bp, Chlorella sorokiniana
  Clone ID: LIB3602-027-Q6-K1-F12
gcgggggcagcgccttacataagggcagcacagagagagcttcaactgttggtgaggacaggcgcaaaatcaggggcaggacagctgagccagcaggcgtcggaaaggaacaaacaggggacagtatgaaaacatgcggctgtgtgaggggcggccgggaggacagctggcgctgcaaacccgccccttgactgccgaacacaaaaggattggttttggtgttgcgcccggctgcccaagcagggcccgttggggtcacttcctgccctgcccgagggccctccgggttacttgataaaaggagggccttccgtttaaagggtttttttcctgctccgccttggtaagttaaatcgcctcctcctccgtaagttgaaagaaagggttggccccccccggcattggccgaaaggccaccccggttgcaaaataaaaggccacgggggc

SEQ ID NO: 2956 - DNA, 528 bp, Chlorella sorokiniana
  Clone ID: LIB3602-027-Q6-K1-F2
gggccatgcttgtggcgagccgaagcagcaaatgcagcctgcatgaccttgctgccgccccggggcactggtctgcagtctcatggctgcagtcaagctgccttagattgcttgcctgcagatcggctccatcttcaagtacgccaaccagctcgccgtgttggatgtcatccatttccgcatgcttgcactcaccctgccctaatcactccttgcttgcttgctgcctgcagatcggctccatctttgagtacgccaaccagcacgccattttcgacgtcatccagcccgactcgccgctctacactcccatcctgggcttctttgccctcaccggcctccccaccgccggcttcctcttctacaagtgagggccgttgttcgaatgcccagaagtttgtttaaagagctgtggtgcttttgtggcgctgacagcctccccaccgccggcttcctcttctacaagtgaggcttaggctatgcatgtgcatctagatgctgctgcacagtcactgtcggtttcactgc

SEQ ID NO: 2957 - DNA, 534 bp, Chlorella sorokiniana
  Clone ID: LIB3602-027-Q6-K1-F3
ggtgcacggccagaccgtcaagtacaacatgaagaagcgggctggccgcggcttcaccctggaggagctcaaggaggcgggcatcccctccaagctggcgcgctccatcggcattgccgtggaccaccgccgccgcaaccgcagcctggagagcctgcaggagaacgccaaccggctcaaggcctacaaggccaacctggtggtgttcccccgccgcgccggcaagcccaaggcgggcgacgcctcggccgaggagctggcgaccgtgcagcagctcaagggcaagctgctgcctctggccaagccggcggcggcgctggagaaggtggcgatcactgcggagatgaagaaggagagcgcgtacggcaagctgcgtgtggagcggatgaacgcccgcatggtgggcgtccgcgccaagcgcgccgccgaggctgctgctgccgagaaggacgcgtaagcgccctgcgcgcagccgcgactggcagccgcctgtgcggccgggggcgcggtggcggccggcgacgcggcgggggg

SEQ ID NO: 2958 - DNA, 363 bp, Chlorella sorokiniana
  Clone ID: LIB3602-027-Q6-K1-F6
gtagggcttgggccagatggtgctcaagacccagacctgccgcttcagcggcctcaggatctaccctggcaagggtgtgctgttcatccgcgtggatggccagcaattcctgttcctgaagcagaagtgccgctcgctgttcaaccagcgcaagcggcccgccaagcttgcctggaccaccctgtaccgcaagcagcaccgcaaggacctggaggcgcaggttgcccgcaagaagcggcgcaacgtgaacaaggcggccacccgctccgtggcgggcgccagcctggaggtgatccagaagaagaagagcgagaagcccgaggcgcgcaaggcctcccgcgaggcggcgctgcgtgagatcaa

SEQ ID NO: 2959 - DNA, 408 bp, Chlorella sorokiniana
  unsure (1)..(408): unsure at all n locations; Clone ID: LIB3602-027-Q6-K1-F8
cgtggacatccgcatccgcgtcaagggcggcggccaggtgtcccagatctacgccatccgccaggccatctccaagggcattgtggccttctaccagaagtacgtggatgagcagagcaagaacgagatcaaggacatcctgctgacctacgaccgcacgctgctggtggccgaccctcgccgctgcgagcccaagaagttcggtggccacggtgcccgcgcgcggtttcagaaatcttacaggtgaaggctgccccgtgggacggttgggcgcctctggaggcttcttctgcgccgctggcgtggcggcagcggcgtctgcggcctaggcagctgccctggagcagcatgccctcagcgaaagcaccatgagtacaccttgcgtgtgtaacaaaacgccacacanaa

SEQ ID NO: 2960 - DNA, 439 bp, Chlorella sorokiniana
  unsure (1)..(439): unsure at all n locations; Clone ID: LIB3602-027-Q6-K1-F9
gcggtgtgccatgcagcgcttgccgcccccgccggccctccctgctcttttgcccccttgcgctcacttctcttgtagcttcctttgccgccgcatgtgcgtgctcgctgtatgaacattcacgtttcattgcccataccaacgaatgccgttgcttcccctcagccttcttgaaccctccccccctggccccctgcaccgatttcaaagcttctcctccacctgcccctctctgcgtgccctcaccggcgtgcaacccccctcccagctgcaccctccctgagggtgcgctgggcctctccagttttgctaagccccacgcgagtcgacactcccaacacgtcatgacacacaagtctttgccgtgctgcctgccaggcttttcgcaggcggtgcattgcccctgcttcccgccatgtgtaagtgcagcagcngcnna

SEQ ID NO: 2961 - DNA, 532 bp, Chlorella sorokiniana
  unsure (1)..(532): unsure at all n locations; Clone ID: LIB3602-027-Q6-K1-G1
gctatcaagcctgcccagaagccgggtgtggaggaggccgaggccgcccccatccaccgtatccgcatcaccctgacctccaagaacgtcaagagcctggagaaggtgtgcgcggacctggtgcgcggcgccaaggagaagcagctcaaggtcaagggccccgtgcgcatgcccacccgcgtgctgaagatcaccacccgcaagtccccttgcggtaacggtaccaacacctgggaccgcttcgagatgcgcctgcacaagcgcctgatcgacctgcactcccccgccgaggtggtgaagcagatcacctccatcagcatcgagccgggagtcgaggttgaggtcaccatcgccgacgtgtaagcagccatttcagctgtggaagctggtcgcacggtgcgcccctgaccgccgcttgcgggcgggtcgnnnccttggagccgnggncgncgccgcccgccccgcaccccacttgccccggtccttgccatgcgctgctttgttcttcttggactggctgcttctggcattg

SEQ ID NO: 2962 - DNA, 527 bp, Chlorella sorokiniana
  Clone ID: LIB3602-027-Q6-K1-G10
cggacgcgtgggcggacgcgtgggcggacgcgtgggcagctggcagctaccgccgccgcacgggccaggagtctcgggttggcagcgagcgcacaagcagcggagggcctacaggctctgggcgcgatggcgggcccccagatgcaggccacgcaggaggagatggcggcggccaatgttgacatggtttggcgggacttttgcgcacacgtgctcattaagctgaatgactgccgacggaagagcatgtatgtgccttggaagtgcgagcatgagcggcacgagtatgagaagtgccaatacaaggattacaagaagcgggtggcggcagcaaaggaggccagcgcatgatttgcacactcaagagcccgctgcacagcaccgctcactgccatgcctgcgtagcagctgctcgcggccaccttttggtgcagcactgcactcagtcctgtagcctgtcatgtgcctcgctctagggccgcccctgctgcttctttttccttccctgctgccagttccccacactg

SEQ ID NO: 2963 - DNA, 427 bp, Chlorella sorokiniana
  Clone ID: LIB3602-027-Q6-K1-G11
cttcctctttatcgaagccaagcagaaagccctcaatgctcagcaatctccacctccagccccccacccacctgcgccatcttcttgatctgcttcatgcgcttcttcttgtgggaggagaggtagagctccttcttgtagcaccacagcacgctgggccgcgccttgaccaccgtcttggacagcatgtagtgcaggttgaccacctggggggaagaggggtgtaaattgacgtcggagcggagagcaatccagtgcaaggagagcagtgcttttcgctgtacattatcggcgtggttcagcaagcgagcggcagcacagccaccaggtacttgcagcagctgcaatgtctacgcagccatttgcacctggaacaacgatgctggcatcaccggcagtagcagcagcggctagcggcagcagcagc

SEQ ID NO: 2964 - DNA, 55 bp, Chlorella sorokiniana
  Clone ID: LIB3602-027-Q6-K1-G12
attaactgcatcattgtttcgcccgatgcgtcgtccatgtaattcttgcactgtt

SEQ ID NO: 2965 - DNA, 513 bp, Chlorella sorokiniana
  Clone ID: LIB3602-027-Q6-K1-G3
ctaacatcgtcaccggcccactcgtttgtgccatgcccacctgcctccaacgtcacccttcatcaaccctcacccaacccatccacctgccacccatccactcaccttccctccgccacaacctctgccacccactcaccacccatcacccgctcaacgccctccatgcaccatcctccccatccaccaaatctgccaccccaaacgcacgtccgccgctgcaccacctgccgccccctcacccgcacccatcttccacccgccacctttcctgccgctcaccgccgcacatcctacctcccacacctcactccatgtccacccttcacccgcgcttcacacagcggctgctgccatgcaaagctgctgccaaacccatccatcatgctcgcacacccactcacccacacgtccaacgtatccagacccattttcaaggcccgactgtacagtgcctttttgcgtccttatgccgatctggtaccaggacttaatgtgtaacaaatggtatgt

SEQ ID NO: 2966 - DNA, 415 bp, Chlorella sorokiniana
  Clone ID: LIB3602-027-Q6-K1-G5
tgatggatgacagcacatacttctcggcatgcactcccgacgacaccttcacaaaggtcgaatgcaacttcaacgccagcctggcgctgcccggcacggcctgctttgccagggattgctggggctcatatgacttcaagggcagctcctccgacgacatgaacctggttgtggcgtacacgcgctcaacgatctacctgggtgcaccctgggtgatcaacgccaccgaaacgcctccccagaccgtttccgtaaactttgtggcatctggttgatgccgctatcgacgaaagccgacacgatgcccctaaatccaacaccgacaccgccgcccaaactgaattgcatgccgaccagaccacccctttcaagaatgatcacaacaaccaacactgcatgtaatgtgaccgcatcc

SEQ ID NO: 2967 - DNA, 445 bp, Chlorella sorokiniana
  Clone ID: LIB3602-027-Q6-K1-G6
tgccgctgcatgccttcacataaacgcaggcgcgcagggctgtcggtgccgaccccgctgtcccgcctgctcaccctggtcacaatacaagtgatgggcgggtacctgtggtggcccccaatggagcagctgggccttccggaaaaggccactgcacacacgcttcagacctggcgggccctgcaaaagacgctgctgggggcacgcaccaactgacggccctgcacatagcaaggctggccatggggcacatggcgcatgcctgctgctgcacattcatcatgatagcgttgaccgcaagggctgcgccgcgtgcagttaaccgtaccttttgatcatttcaacctgctgatgcccccctgactgaccaacaaaacgaccgttgcatagctgcaccgaaccatcctgcacatgagcaattgcgcatgttaccaatctcaaggtc

SEQ ID NO: 2968 - DNA, 367 bp, Chlorella sorokiniana
  Clone ID: LIB3602-027-Q6-K1-G7
cgtgaaaccagccaaaatgccgggcatcgccgtgggcctgaacaagggccaccccacgaccaagcgggagaagcaggcccgcccggcggcgcggaagggccggctctccaagcgcgtgaagctggtgcgcgacattgtgcgcgaggtggcgggccaggcgccctatgagaagcgcatcatggagctgctcaaggttggcaaggacaagcgcgccctgaaggtggccaagcggaagctgggcacccacaagcgcggcaaggccaagcgcgaggagatggccggcctgctgcgcaagatggctgccaaggcgcacaagtaaacgcctgtgcagccacagcagcagcccgcagcagcccccatcgtggcg

SEQ ID NO: 2969 - DNA, 530 bp, Chlorella sorokiniana
  Clone ID: LIB3602-027-Q6-K1-G8
cccgctgccaccttgttgcagcgcctgcaggcgcccgcaggcccgccagcccaagcacctgctcagccccagccgccagcggctgcacctgcagacctcagcagcctgtggcagcgcctgcagcagcagcacacgcctgctgaggcggccgtagcagcggcggcagcccctccccctccagccgttcccgcttcgctgctggccccggtaccttctgtgcccacagcggcagccccagcccacgccgcccctccgcagccggtagctgcagccccggctgcacccagcgctggcgccgttcccgcccccagcgacctctgggccatgttgcagaacgcaggccagaagaaatgaaggcagccagccaggactcgttaacgccagctgactcgcgacgtgaccttagcaggatgccacccccaccgcaaccagactgtttttggccgctctcacgctaaatcatgttgccgttcattgctgctctgcgttgattgcctctgctccgcgctgtgtacgactgcccttgccca

SEQ ID NO: 2970 - DNA, 373 bp, Chlorella sorokiniana
  Clone ID: LIB3602-027-Q6-K1-G9
gaccccgacaccctggctgagctgaaggtgaaggagatcaagaacggccgcctcgccatgttctccatgttcggcttcttcgtgcagggcctggtgaccggcaagtcccccctggaaaacctggctgaccaccttgctgagccgtctgtgaacaacggcttcgcgtccgccaccaagttcctgcccctggcctgaacgccgtcgtcaacctggagcgacctgggcatcccatattaacggcggccagccggttttggacaagcacacacaacatatgagattcccaacctccctgcgcactgcttgtaacaatcctggctccctcttgtacccttgacccgcactcgggcgtggatatgtaacgttccgcggg

SEQ ID NO: 2971 - DNA, 516 bp, Chlorella sorokiniana
  Clone ID: LIB3602-027-Q6-K1-H1
gcatgccacatccgctgcacgcaggtgtcgcctgatggcctgcttctgcagagcagcactgtggcggaccgagtgtcgttctgtttcgcgggcggcgagacgcgcctggtgccgggcgcctacatcgagtttgcagagcggcgggtgctgccgcagttcgagcacctgaagcctgaagaggtgacagagcagcaccggcgcgacggctttgagaccgcatcagccaaccgcatctttgagtcgaccacgctggcggcggaaaaggtgcagtgaggcaccatggcatagctgcggtccgcaacggagcaaaccggcaaatctggcgtgccttttcaaccacacttaccaggcccgcgttgaacgaacccacatgttgtgttgcgtgatgtttgtttgttaataccatgtgattgtacggccttgttgttcgcctctgcatgcttgccctcgacgcttgttctcaggtactctttgctggcaagcctttgcataaactgtgtataaacagagtgcatg

SEQ ID NO: 2972 - DNA, 364 bp, Chlorella sorokiniana
  unsure (1)..(364): unsure at all n locations; Clone ID: LIB3602-027-Q6-K1-H10
gaaggtcgggatcgtcggcaagtacggcacccgctatggcgcttcgctgaggaagcagatcaagaagatcgaagttagccagcactccaagtacttctgcagcttctgcggcaagttcgccatgaagcgccaggtggttggcatctggaagtgcaaggcctgcaagaagacccaggctggcggcgcgtacgtgctcaacactgcggcgtccgtgactgtgcggtccaccatccgccgcctgcgggagcagaccgagaagtaagcgagcggccattgaggagtgaagcgggcggcggcggcggcgctgcagcagcgcgctgcagcgtgccgggtggccgctgcttcatgatgtaacgcagaanag

SEQ ID NO: 2973 - DNA, 518 bp, Chlorella sorokiniana
  Clone ID: LIB3602-027-Q6-K1-H11
cgagttcggctcgaccgaacgcgaaacagccaaccagccaccatgctgatctccaagaagaaccggcgcgaggtgtacaagtacctcttcaaggagggcgtgctgtacgcggagaaggacttcaacctgcccaagcaccccgagattgatgtgcccaacctggaggtcatcaagctcatgcagtccttcaagtccaaggagtatgtgaccgagcgctacgcctggcgccacttctactggttcctgaccgactctggcattgagtacctgcgcgagttcctgaacctgccctccgagatcgtgcccgccaccctcaagaagagcacgcgccccctggagcgcgagggcgcgcgcccgccccgccgcgacggccccccccgccgcttcggcgaccgcgagggctaccgctccgagaaggcgggcgcccccggcgagtaccgccccgagttccgcggcggcttcggccgtggcgctgccccccagtaagcgtccgcttcctggagcagcgccccctgggc

SEQ ID NO: 2974 - DNA, 405 bp, Chlorella sorokiniana
  Clone ID: LIB3602-027-Q6-K1-H12
ggtacactctaatgctaaaaagccgcattggaactcaacaagaatggaaaaaaaaaaaaattggggccctccgaatttggcgcaattgccgcctggcttactgtttactgggggttgggagcggggaaaaaacaagtcagggtggggggggaaagaacgttgccattgtccttaagccagccgggctgaatgaactcccgcttaaatttgatgggcgcctcttggaacaagtcctcccctgggcgggccggctgtgccttggtaaacgctggcttgatcgggagcgggatgccgaggaactcctcccagaactggtaaactttaatggggaagggaaccggaagtttgggggacttcaatcccttaagggccggattccaaaaaaggggcaaaaatggggggggg

SEQ ID NO: 2975 - DNA, 531 bp, Chlorella sorokiniana
  Clone ID: LIB3602-027-Q6-K1-H2
cttttgctcccctgctggtcgctgtcggtgacaggcaacacacacacacacaccatgaactacaaggccttcgcgctgctggccatcctggccctgaccggctctgccgccgctgcccgcaagcgggtgaacaagaaggatgtggctgagaccttccccactgttgcggacgccctggtcgcgggcaactacaccgccctgctcggcgccctggagctgaccggcctgactgatgccttcggccccgacttcgagggcaccatctttgcccccagcgacaacggctttgagtccctgactgagctggtcacctcccttggcctggcctcttccctggaggaccccgccatcgtcgccgaggtcctgaagtaccacgtgctgaacaccaccgtgaaggccgctgacctcgaggagggcctgaccgtggagaccctggccggcgtgcccctgaccatcatcaagaagaacggcggctgggctgttgaggacgtgaacggccgctctgccaagatcaacaagcccgacatcgct

SEQ ID NO: 2976 - DNA, 532 bp, Chlorella sorokiniana
  Clone ID: LIB3602-027-Q6-K1-H3
cgaggacaaactgatgcaggtggctcgtgccgcaatcggcctggtcctaatcgcatcctatcccgtggtgcacttccccgctcgggccgcggtgcgcgagctgctgcaacaccttgcctccggcagcagagtcggcgctgcgctggcagacggcggcggcggcaggtttgcagcggtggaagcgctctgcttctttggcgccacgctggcgctggcgctgagctgcacagacctggggagcgtgtttgaggtcgtaggtggcacgtgcggcagcacccttgtgctggccgtgcctggagcgctgctgatcagctatgcttctcagaaggcagcagagtcgaggcagctgctggatggggcgtcgcttgcagggggcgacctgcggcagccactgcttgggtcagcagcggcaggggcaatagcggcagaggatgcagcagaacagggagcaggcggcggcgatagcagtgcgaatacagccaggcagccaccacctgtgcagccacagcggccctacacagtcttgtcctct

SEQ ID NO: 2977 - DNA, 304 bp, Chlorella sorokiniana
  Clone ID: LIB3602-027-Q6-K1-H4
aggaccccagctagatgtacccatgaacattgcgccataactgcgcacacgctattttgatggcagcccaataaatgctgccgcctgcacagctcgataaagcaaccagttgcacagggaaccttctccttttgccgtttaagctcagtcacaactcctgtctgcatgcctgcatgcattgcgccagcctcatctgctgctgcggttctcagccacaccgctgctattctcagcccacaccgagccccgaccctgcttttctcatgtacccctgcctgccaatgactcgtgtaacaaccagcat

SEQ ID NO: 2978 - DNA, 529 bp, Chlorella sorokiniana
  Clone ID: LIB3602-027-Q6-K1-H6
ctcccgctgcccctatgccctgcttgttttctctactgccaccacgtgttcctcattcaccactacttttggcctttgtttacgttgtaatgcgcactagacaaaaaaaaaaaaaaaaaaaaaaaaaaaaaaaaaaaaaaaaaaaaaaaaaaaaaaaaaaaaaaaaaaaaaaaaaaaaaaaaaaaaaaaaaaaaaaaaaaaaaaaaaaaaaaaaaaaaaaaaaaaaaaagggggggggccgtttaaaagaatcaaagttaacttacgcgtgaatgaaaagtaaaagttttttaaaaggggaacaaaaataaaataaacggcccggggtttaaaaacgtgggaactgaaaaaacctgggggtaacaaaattaaaaggctttgaaaaaaatcccctttttgcaagttgggaaaaaaaaaaaaaagcccgaaccaatcgcctttccaaaaaattgccaaacctaaatggaaaaaggaaccccccctttaacggccaataaaaggcggggggggggggggttaccccaaaggg

SEQ ID NO: 2979 - DNA, 530 bp, Chlorella sorokiniana
  Clone ID: LIB3602-027-Q6-K1-H8
agcgagcacaggggcaaccatgaccaagaagcggaggaacggagggcgcaacaagcacggccgcggccacgtcaagcgcgtgcgctgcgagtcgtccgccgccatggtgcccaaggacaaggccatcaagcgcttcatcgtgcgcaacatggtggacgcctcggccatccgcgatctgcaggacgcctgcgccatcgacggctatgcgctgcccaagatctaccgcaaggtctactactgcgtgtctgccgccatccactccaagattgtgcgcgtgcgctccgtcaaggaccgccgcaaccgcgagccgccccgccgccccggctttggcgcccgccccgagcgcaagtgagcgtcggcatggccgcagcagcagcagccgctgaggagcagtgagggcggcgctctgtagccgcgcctcgtcctgcgatgagtcagcaccgcggggccgcccggcgcacggcacgccacccggcaggcagcttatttatgtgcgctgggccgcgcgccggcgccccgtgtaaatcgcg

SEQ ID NO: 2980 - DNA, 411 bp, Chlorella sorokiniana
  Clone ID: LIB3602-030-Q6-K1-A1
aaggagagagaggagaaaaaaaaaaaaaaaaaaaaaaaaaagggggaaaaaaaaaagggagtatgatataagagagtaaagagggtaaaaaaaaatgaatgggggggaataaatttggtggggggggggccgtttttgggtttccgggctgcggtcctcgtccttggggggcttttttttttttgtcgggcccgggatttctggtgcgtgggggggggctctcaagggggggggtggggaaacccttggggtcccaactttttgtccttgggggcccttccccttttcgggtgctggctgataggcgtcggggccggccccgtttgcttttgttaatgtgggggttccggggagggggagggggccgctccctggtacgggggcttcccgcgggggggggggggggggctc

SEQ ID NO: 2981 - DNA, 457 bp, Chlorella sorokiniana
  Clone ID: LIB3602-030-Q6-K1-A10
ctttgacaatggctcgctgacggggctcaccagtgccatgtatcttgatgcggccggccagcccgccacctgcccagacccgggggcaggcctgcacatcaaggaccgagcaggcaacgtggtgcaggtgcagatcccgccaacccacctgggttttcaagtgggcgaggcactgcagattcattcgggcggcctgctgcgaggcacgccgcactgtgtgctggcgccgcggcctgatctgagcggcggcatcagccgggaaacgtttgcagtgttcatgcagccgcactgggactgcccgctggagccgccggcgggggtggcgcctgctgacgtgggcatcggccagtggcagccaggactgagctttggcgagacgagcgagcgcaccatggacgagtattacaaggctgccagcgctggtggtgtgcgggctggggcggcacaagcccgagct

SEQ ID NO: 2982 - DNA, 464 bp, Chlorella sorokiniana
  Clone ID: LIB3602-030-Q6-K1-A11
ggaagaggagaagcttgtcggtcctgctgcgccgctgatgacgggcggggatgcgttccaggcggattatggcacacacctgctgccgggagaggggcaggccatggcggcctatgtgcaggcgggcaagcgtatccctcgccgtggtgaggtgggcctggactcggagcagattgagaagtttgagaacatcggatacgtgatgagcggcagccggcactcgcgcatgaatgccgtgcgcatcaggaaggagaaccaggtgtacacggctgaggagaaggctgcgctggccatgttcaactttgaggagaacaagcgcaaggaggccaagatcctggaggagatgcggcgcctggtggaccgaacgctgggagggccggaggacgaggcgggccccccgccgccgcccgcctgagctgcagcagctgaacgtcgatgcattcgattggcgctgcccgagtcag

SEQ ID NO: 2983 - DNA, 468 bp, Chlorella sorokiniana
  Clone ID: LIB3602-030-Q6-K1-A12
gcaagagggcgacccgctggtggtggtcgaggcaatgaagatggagcacacagtgcgcgcgccctgctccggcactgtcgcagagctgcacagctttgtggatgcacaggtggaggatggccacgtgctggcagtggtggtgcctccccaagcagcagcagccacagcctgagggcccgcctggaactagctgcatggcttgcaagcttgcaaccgcagcgaattcgctgccgtaagcggccgcggccgcggccacagctgagggtgtggcctagatgagcccaccaaccagcaaacagcaaatctacagcctgcaagccagctcaattgtggtggggccatcctgggccattagccgttgcagcctggccttggcacgttccaacccttgacaaaccgacccaaagcttccgtgtacatccctgtacagtagtgcagcctgcggtggttgcgctcagctgaccagtg

SEQ ID NO: 2984 - DNA, 440 bp, Chlorella sorokiniana
  Clone ID: LIB3602-030-Q6-K1-A2
acgcgtccggaacttgctcctgcttgagcctcgactggcggcgggcgtgaccctgtggcagtgcgctcccgcttgcgcccgctgcctgacttgacttcagctccactgttgcaccgaggggatggtgtaacatgtatgctgggaaaaaaaaaaaaaaaaaaaaaaaaaaaataaaaaaagaaaaaaaaaaaaaaaaagtagggataaaaaaaaacattaactaaaacactaacccctctggaaaaaaaaaaacaaattttatattgacaacaaaaaaaaataaaactttctaccgttgggggcgggcggttaaagaaaaaaaacctttcgaccccccgctgaggacccttaatttttatcaatggcccccccaaaagaaaaaaaacgggggaggttttaaaacgttgggcctggaaaaaaccgggggaccccaaaataaa

SEQ ID NO: 2985 - DNA, 413 bp, Chlorella sorokiniana
  Clone ID: LIB3602-030-Q6-K1-A3
ggatccgcagaaaaaaaaaataaaaataaaaaaaaaaaatggaaagaagaaaaaaaaataaaaaaaataaaatacggattgcgaaaaaaaaggtggctgtgcttttgtgtgccgtgttcttcagtttgctttggtgtggcctgacattctttttatttggggtgggtattactctttcgtttcgtcggttttttttcgacgttgtgccttttcacgctccctggggtcttgccctttagttaacggctctgctgttgttgttttagcagagctttttagtctttatgtggaatgttatacgggctttcccattgggttttccccttttggggtcaaacgtgctcggatgttgttgtctttttatgccggggcgcccgagatgcattccctttggtttattgcttttttttttc

SEQ ID NO: 2986 - DNA, 323 bp, Chlorella sorokiniana
  Clone ID: LIB3602-030-Q6-K1-A4
ggcggctgctgccacgcctcctgagcagcccgatgctgctgcacttcctcatgtgcccagcgcgccctgcgcagccaaactagcaatcagcagccaatcattctgcagatcaacttgacctctttttatgctctattctcctgctgcccgctcgaatttttctgctgcccgctcctttattcctgctgcccacttccaccctcccgctgaatgccaagtgtgtgaaccacgctgctgcactacaaactgatgcctgcggttcaacaatgatgtcgcaaagagcacttattcaacttttttttactgtaatcaagtgacctgtt

SEQ ID NO: 2987 - DNA, 62 bp, Chlorella sorokiniana
  Clone ID: LIB3602-030-Q6-K1-A5
aaaaaaaaaaaaaaaaaaaaaaaaagcaaaaaaaaaaaaaaaaaaaaaaaaaaaaaaaaaaa

SEQ ID NO: 2988 - DNA, 417 bp, Chlorella sorokiniana
  Clone ID: LIB3602-030-Q6-K1-A6
cgcacctgtgcacatagccgtccccactcgctcgccccgtacttccaccacgtggtaccctgcacgccccttatgcttccacccacactgccctgccctgtcgctcttcaaaaacttaccaccctgcaaaccttccagatccgcatctacgccctcactcgccgctcatccaaagcgccatcatttgttggtcgatcgacccaaatgctgattcttttgcgtgccagtgtgctctgctctcccacactcggtcgcaagctgcacccatctgttccccgatctgtcatggccccggcacttgatgcaagcctgcctgtgcgaacctctggcaatattccatgctatacctgatggccccagcacccttgtactaacgcttggctgtgtctgtaacaagcagttgttcaagcagttgtt

SEQ ID NO: 2989 - DNA, 458 bp, Chlorella sorokiniana
  Clone ID: LIB3602-030-Q6-K1-A7
cggcaagaagcgtgcacgtgtgccgcaccccgggggcggtgactctgggattctgtcggggctgctcaagcagcgcgcagggctgcaggaggatgcggcggcaaccggcacgcgcgacgccgatcaatttgggcgggagcgcctcagcaatgtggcagacacgtgggcaggccgggagctggacccctcgcgcattctgggcccgcagcgccatggggagtggttccagcagcagagcggccagggcccggcgccggggccggcctggggcgtgactgctctgccgcccggaatggacgagtccaaaatggatccaaagctgctggcaatcatgcgggcgcagcagggcaggtagcggccagcaagatgcctcccgcagcagcaagcccacgcaccactgtatcgtgtgctgccgctgtggcacacatgtaggggctgctgccaggacaaccttaagc

SEQ ID NO: 2990 - DNA, 457 bp, Chlorella sorokiniana
  unsure (1)..(457): unsure at all n locations; Clone ID: LIB3602-030-Q6-K1-A8
ggcagacatccccgtagcacttctttgtatgatagaaggcgccgaccgtgcctgtgtgggcgcgcctggtgcctggcgctgctgttttccagctccctctccccgcctgccgctaccctctcactcgccaaccaaccgcatcagctctttgtccctccctacccatttctgcccactgcttgccccccctgcctctcccgctcaccgtacccttcccctcgccctaacccctctgctcctgttgccgcaacagtgcttgcggggcctgctctcacaccttctcagggggcgcccgagtggcctttcatttttgtgctcagacgtgctcagatgtacatgtactgtaagcaatgcacagcananaaaaaaactaccgaaaaaaaaagcccacacaccactgaataaagagctggcggtgggtaaaaaaagtaagggctgctgacacgacaatgttaag

SEQ ID NO: 2991 - DNA, 462 bp, Chlorella sorokiniana
  Clone ID: LIB3602-030-Q6-K1-A9
gcccgagacaggcgggacagggatcgcgaccgggaccgcgagcgggatcgggactaccgcagcagccgcagccgcgacgaccgcagccggcgcgacgacaggcggtatgatgaccgcgaccggcggcggtacgacgaccgagactaccggcggcgcgagcggtcgccgcccaaggcggacgtggcccccgatgaggatgtggagtttactgtggcattcgatgccaagcgacccgagaaggagctgccgcggctcaacctgccgcctgcaccaggctccgcgccgccgcccgccgccgcgccgctgccgcccacgctgccggtgccaaacgcggcggcggccgcgctgggtgcgggctcggaggccaacttgctgccggtgccggcagggccgcagatgcccactgagcctggtgcctactgagctggcggtggcagacagcttgcacaatgaggagcgcgt

SEQ ID NO: 2992 - DNA, 334 bp, Chlorella sorokiniana
  Clone ID: LIB3602-030-Q6-K1-B1
ccctcaagcaggtcttcatccatcatgcattcactccaacctttctttgcccttctgctgtttgagagtgttgttgtgcgttgccgattccaaatgaagtttgccaccttcaaatgcccatttgcgccgtctttaaacgaaccacctcggtttttcactcgccagccttccacccgaaagacattcttttccgctgccaggacaagcccagccctcgcatgcagcagcgcttgtttcatgctgctgccctgcgttgttgcccctggagccttgcgctggacttctgctggttcgccagcgcgctacagcctcaactgtgtgaaaaccagactgt

SEQ ID NO: 2993 - DNA, 183 bp, Chlorella sorokiniana
  Clone ID: LIB3602-030-Q6-K1-B10
ggcggctgccctgctgccgtcggccggctcgcagcagctcccccgcgtgcgaccagttgcactgctttctggctcttttcaactaatgttttatgcttctttttctctcgcttttggctgctgtaatgtcgtgacaataacaggtggggtcagcagaaagcatgtcaaacggaaacagcggat

SEQ ID NO: 2994 - DNA, 437 bp, Chlorella sorokiniana
  Clone ID: LIB3602-030-Q6-K1-B12
cacgcttgacaatgttgagaagtgggcagggcttgtctacagccccgctgccggcaccttctgcgtcgtgcaagcccaggaccgctccgctgagtgcctgctgtactgcagctccgagtgctctggcaaacccaacctgggctgccccgcatgatatgacacatgcatggatttttgtacaatgcagcaccgcagctccaacagcccttgcacatgtactgttgcaaagctgagcaccctgtctgagcatgtctgtagaactacgtcgtgcatgtttcatgtatttgcttgcaccatccgagtgctgcttttcctacatctgacgactcaactcggcccacccattgcaatgctttcagcatcctgacgctcctctgacctgaacagcaagcatcagttttgaccaaatgcacgtgcttgtaaatgccttctccggc

SEQ ID NO: 2995 - DNA, 467 bp, Chlorella sorokiniana
  Clone ID: LIB3602-030-Q6-K1-B2
cgtcaagcactggatgcagagcaaggcggaggcggtggtgattgacatcctggctgacaaggaccccgaagagaaggtgcttgtctttagcgagtaccccgactgcctcagggccatccagaagctgctgcccgacatcggcctgcagcaccgcagcctcatcggctcgtccagcgcggcctcccgcagcaaggcaatccgcgacttccagaccgacccgcccaccaaggtgttcctgatcacccacagggcgggcggcgcaggcatcacgctgacggctgccacgcacatcatcctgtgcgagcccacgctcaaccccagctttgagcggcaggccattggtcgcagccaccgcatgggccaagacaagccgctgaccgtcacccgcctgctgatgaagggcacggttgaggagcaggtgaaggcgtttgttgcgcgccagctagcggaggagcagcccacctcca

SEQ ID NO: 2996 - DNA, 473 bp, Chlorella sorokiniana
  Clone ID: LIB3602-030-Q6-K1-B3
aaaaaaaaaaaaaaaaaaaaaaaaaaaaaaaaaaaaaaaaaaaaaaaaaaaaaaaaaaaaaaaataaaaaaaaaagaacaaacaaaaaaaaaaaaaaaaaaaaaaaaaaaaaaaaaaaaggggggggcagtttaaaagaaccaaagtttacttccccgtgttggcaaatgaaaattttttttatggggccaccaaaataaaattagggggccgggtttaaaaaccgggggaatgggaaaaacctggggttccccaaattaaatgtcttgaaaaaaaatccccttttagccagggggggaaaaagcaaaaaggcccgcacaaatggcctttcaaaaaggtggccaacccaaaagggaaaagggaaccccccttgaaggggcaaataaagcgggggggggggggggttaaccccaagggagaccgttaaatttgcaagggccaaagcccccgttcttttcctttttttcctttct

SEQ ID NO: 2997 - DNA, 146 bp, Chlorella sorokiniana
  Clone ID: LIB3602-030-Q6-K1-B4
ggtgggcgcggtgcactcgacgcggctgggtgaggacgactcgaaaacgctgaagcagctcaacttccagactggcgacttcctgtcggtggccatctattgagttgtgcagccaggccaggcgacccatgtaacagctgggtggg

SEQ ID NO: 2998 - DNA, 451 bp, Chlorella sorokiniana
  unsure (1)..(451): unsure at all n locations; Clone ID: LIB3602-030-Q6-K1-B5
cgctgagtcatgtgcggccttcagccttcctgccgccctccgtacttgtttgcaccgagttaggtactatgttttgtctttctagaaacctgcgcacttggtcacccgcctttgctgtacatacgtgttacttgccttactatctgccacgtgttaccgtacccccacacccaccctgctgccccttttgaacgtccaactgactgcgcagcttttgttacacgtcgcagcanaaaaaaaaaaaaaaaaaaaaaaaaaaaaaaaaaaaaaaaaaaaaacaaaaaaaataaaaaaaaaaaaaatgtncttacccaaccaaaaaatttaaaaacttttcccccgtgagacataaaataaaattacctaaaaggtcctgtgccgctcgttttatgggaaaaaccctgcaacctcgcgaggttaatgggattgccccttttagcgggtcaccaaa

SEQ ID NO: 2999 - DNA, 398 bp, Chlorella sorokiniana
  Clone ID: LIB3602-030-Q6-K1-B6
gctgttttggacgacctgctaccggctgacgggcaagaagtgcaacccgcacctggtgcgggacagcgtggtgacatacctgcgcggcagcggcgccagcgagcgagagctggaggcgctggcgctgtacatggggcactcgattgagatgcagcgcggcacgtacgaccggcgcaccaagcagcagaaggtggagccggcggtagagctgctggccagcctgaacgcacgtgcactgggtgtgagcggcagcggcagcggcaatggcagcggcaacggcagcggcagcgagcggtagataagacatgtcttatgcagctgggaataggtggcaatgactgcaagtgttgacatcaatatggacatggttatgccctgcatgtaaacgacaacacttc

SEQ ID NO: 3000 - DNA, 462 bp, Chlorella sorokiniana
  Clone ID: LIB3602-030-Q6-K1-B7
cctagactcaccaaagcaccagcaccatgcaggctctgtccgccaagaccgccatcgcttctggcctcaccgccaaggtgcagcggcggcaggctgcggcccccgtggcccgcacccgcaccaccaccaaggcgctggccgacgtgaacctggtggtcggcggctgcaccgtgggcgccctggcgctgggccgctttgtgttcctgcccttccaccgcgcctccctggccaaggcgggcatgcccaagcagaacggcatgacccacctgcaggctggcgatgctcgcgctgaagaggcgtctttcattctaaagaccaacgaccccgccggcttcaccgtcgtggacgtcatggcctggggcgccctgggccacgctgccgccttctacatcctcgcaacctccagcctgggcctcgaccgcaaccccttctaaaccagtccacggccgcagcctgcgccca

SEQ ID NO: 3001 - DNA, 462 bp, Chlorella sorokiniana
  Clone ID: LIB3602-030-Q6-K1-B8
ccaggaggtagcacacactgccgaggagctggcctccaacctgggtaactacaagcgacagcaggcagaggtggaggcgctgctgctagaggatcccgacaacagcgagctgcaggcaatctttgacaacctcacggaagtcatacagctggcgcaggagctgtgccaggctgaaacacaggctgggactgcactgcagcgacaagacaacgaccagttgggcagtccggcacaattggcgccgacgttgcaggggcatgccgcggcccctggtccgtccgcctccactgcagcccctgccgcattgtcaacgctactgcccccccaagtggctgaacagatacgcgctgcacagcagcgtgcagcactgacaggacagggaccgcctgcgtgggcagttggcgctcagtgcagggccgtgtacagcggcgatggcaactggtataacgcggtcgttgaagc

SEQ ID NO: 3002 - DNA, 462 bp, Chlorella sorokiniana
  Clone ID: LIB3602-030-Q6-K1-B9
ctcccgtgacgaaatcgatgagctgctcaggctgcatgatgtcatcgacctcgtcatcccacgcggctccaaccagctggtcagttacatccagcagcacaccaagatcccggtgctgggccacgccgacggcatctgccacatttatgtggatgcagcggctgacatggacaaggcgcgccgcatctgcgtggacgccaaggtcgactaccccgctgcatgcaacgctgtggagaagattctggtgcacgagagcctggcgggggacaagctggactcgctcgtcaaggcgctgcaggaagcgggcgtgacgctgcatggcggcgagcgggcggcagcgacgctggggctgccagccgccccctctgcgcggcacgagtacagcagcctggactgcacgctggagctggtgagcgggctggaccaggccatcgaccacatccacacccacggcagcgggca

SEQ ID NO: 3003 - DNA, 354 bp, Chlorella sorokiniana
  Clone ID: LIB3602-030-Q6-K1-C1
ctggaggcgatgggcctggtggagaagaaccccgcggcccagggcggccgccgcatcactcccgagggccagcgccagatggacctggtggcgggcggcgtgaccgtgacccgcttccactacctgggctgagcagcgcgccgctggcgggccgccgcacagccgcagcgcgcgggctgagcgcggcgccgccgcatgcgccgcggccgtcccccgccggcacgcatgccctcatgtgttggcagccgcaggacgtgtaagaggacttcgcgaaaaaaaaaaaaaatcaaaaaagaagtaaaaagaaaaagaaataaaaataaatagaaaaaaaacggaaagggcgaaaaacta

SEQ ID NO: 3004 - DNA, 446 bp, Chlorella sorokiniana
  Clone ID: LIB3602-030-Q6-K1-C10
cgtaaaccaaaccgttcttgcgtgaacttccatcagaatcaaccttctcaaactcactggggattttgcattcgggcacctgtttgttttttccaattggtttgtaatgcgcctttcaagaaaaaaataaaaaaaatgaaagaaaaaaaaaacaacaaaaaaaaaaaaaaccaaaaataaatagaaataaaaaaaaaaaaaaaaaaaaaaatgcaaaacaatgactataaacctaaacttgggggggggccttttaagagatcaaattttccaaccgcgcttttgccacgaactagtttttttttaggcgaccctaattgaaattacggggcggtgctttaacaacgccgtaatgggaaaaaccttgtgttatcccaatttaacccttttgcactaaatccctttttcccaagttggggtaaaaccaaaaaggccccctcgaactc

SEQ ID NO: 3005 - DNA, 475 bp, Chlorella sorokiniana
  Clone ID: LIB3602-030-Q6-K1-C11
tctccacagaacaagcgaagatgcgcgctaagtggaggaagaagcggatgcggcgcctgaagcgcaagcggcggcggcagcgggccaagtaagcggcctgccccgcagcccagcagcgctgcggcgcctgggcgcagccgcccgctcgcacgcgtgcaacggcgctgcagcggccagccggcgtcacggagtccgggcgcccggcagccgccgatgaaatgtgacggccgagtgtgtaatgctcacgaccgtgaaaaaaaaaaaaaaaaaaaaaaaaaaaaaaaaaaaaaaaaaaaaaaaaaaaaaaaaaaaaaaaaaaaaaaaaaaaaaaaaaaaaaaaaaaaaaaaaaaaaaaaaaaaaaaaaaaaaaaaaaaaaaaaaaaaatggggggggcctttttaaagaaccaaatttaactcccgggggagggaaaggtaaaattttttttatggggcccccaaattcaataatggg

SEQ ID NO: 3006 - DNA, 467 bp, Chlorella sorokiniana
  Clone ID: LIB3602-030-Q6-K1-C12
gcagggctacttccgcctgtctgccaagtccaaggacgaccgcggcgcgtgcggcgtgctcaccaccgcctcctaccccaccaagaagggcaccaccaaccccgaggtcccctccttctgcggctactttggctggaccgagtgccccgtgcactccacctgcacctgcaactggaacctgtttggcctgctctgcctctcctggggctgcgacgccggcgcgcagtgagcaccacgcagctaggcggatgtggcacatgccacacgctctcgactgtgccgctgctgctggcgctgcagcatccacccatgtcccaccatgcacgcacagtcagctaaagcgcatggccgaggcacctttcctgttgcaacatgcaccccacctgccgccgagcttgcctgacacttgctactaagaccgtcagcagcagcctgatatccctttggcgtgccccctttcatcctca

SEQ ID NO: 3007 - DNA, 467 bp, Chlorella sorokiniana
  Clone ID: LIB3602-030-Q6-K1-C2
gcatcccccagccgaccgagtgaggctcacaggcagacatggtctggcggtggactctgatcaaggcgctgaggccctaccgacaggccgagttgaagtatttcaagcccaagccggatttctacccgctgctgactgtggtgggcgtggcggcttccactgtggtctactgctcctaccgagccctggcacacaaccccgacgtgcacctgagcaagatccacaagcacgacgagctgagcgagagcgcggagcacatggagcgcgccgaaaagtactggcacagcatcttccgcaaggcgtggcttagccgcgtgcacgacggggacgtggtggacgcccgcatgatgcgcgtctaggcagtcgagacgcgtctaggcctggaggcagccccccgcctctgtgccacaccatgccaatgttaattgaaccccgccaacatacagcaacttcgagcgagccactca

SEQ ID NO: 3008 - DNA, 465 bp, Chlorella sorokiniana
  Clone ID: LIB3602-030-Q6-K1-C3
gcatcccccagccgaccgagtgaggctcacaggcagacatggtctggcggtggactctgatcaaggcgctgaggccctaccgacaggccgagttgaagtatttcaagcccaagccggatttctacccgctgctgactgtggtgggcgtggcggcttccactgtggtctactgctcctaccgagccctggcacacaaccccgacgtgcacctgagcaagatccacaagcacgacgagctgagcgagagcgcggagcacatggagcgcgccgaaaagtactggcacagcatcttccgcaaggcgtggcttatccgcgtgcacgacggggacgtggtggacgcccgcatgatgcgcgtctaggcagtcgagacgcgtctaggcctggaggcagccccccgcctctgtgccacaccatgccaatgttaattgaaccccgccaacatacaagaacttcgagcgagccact

SEQ ID NO: 3009 - DNA, 90 bp, Chlorella sorokiniana
  Clone ID: LIB3602-030-Q6-K1-C4
aaaaaaaaaaaaaaaaaaaaaaaaaaataaaaaaaaaacataaaaaaaaaaaaaaaaaaaaaaacaaaaaacaaaagaaaaaaacaaaaa

SEQ ID NO: 3010 - DNA, 474 bp, Chlorella sorokiniana
  Clone ID: LIB3602-030-Q6-K1-C5
gcgatcagtctgggagcgccctccgccgcctcgacaccctcagagctctcccaagcagaaagccatggagcaggtccacaagatcgaggaggcgatcaaggaggggttccaggctgcgccaggcagcattgccgccatcatgaacgaggcgaagcacgaggtgctgaatgaccagcccaccaagctgggcgagaacgacgagcctgtgcccggcggcgacaacgatgtgcccaccaaggtgcacgagaacgatatgaatgacatcaagtcctgagtgaagggtcgccgaaagggcagtgcacgagcgaagggtcagcgccgcccaaacacgaaatcgaatgcagcaggctgaacgccgcgcaatgaactggtgatggccgccggctcaagcggcctgacttgcaccaaacatgccagccgctgcccaattgagttgcaattttgctgaagtgccctccacctccttcaatgacg

SEQ ID NO: 3011 - DNA, 404 bp, Chlorella sorokiniana
  Clone ID: LIB3602-030-Q6-K1-C6
aaaaaaaaaaaaaaaaaaaaaaaaaaataaaaaaaaaaaaaaaaaaaaaaaaaaaaaaaaaaaaaaaaaaaaaaaaaaaaaaaaaaaaaaaaaaaaaaaaaaaaaaaaaaaaagggggggccacttttttggggttccaagtttttataccccgtggtggggcggtttttacttttttgggggggccccttaatttaattactttgccggctttttttcaaggggggaattgttatttccttggggtgccccaattttatgggcgggggggattttccccttttgggagttgggaatattggggaggggccccttttttttttttttccaaaaattttttttaccttattgggaattgggaaggccctttacaagggtttttttttcgggggggggggggggtt

SEQ ID NO: 3012 - DNA, 459 bp, Chlorella sorokiniana
  Clone ID: LIB3602-030-Q6-K1-C7
ctcgatcgagctgctcaaacagtcgggcatcgactttgcgcagaacgaggcgcgcggcatcgatgtgcggcactttggagagctgctgatggtgtcgggggtggtgctgaacgaggatgtgcggtggatcaccttccactcgggctacgactttggctacctgctcaagctgctcacctgctcctccctgcccgccaacgaggccgagttcttccagctgcttaagctcttcttcccccagattttcgacatcaagtatctgatgaagttttgcgacaacctgcacggcgggctgaacaagctggcagagacgctcgatgtggcgcgcatcgggccgcagcaccaggccggcagcgactcgctgctgaccagcagcgccttcctcaagctcgcgcagcagcggttccagggcatcaagggagcagagatgcaccgcggcattctgtacggcctagggga

SEQ ID NO: 3013 - DNA, 459 bp, Chlorella sorokiniana
  Clone ID: LIB3602-030-Q6-K1-C8
gtcccctgtagtggagcagcccgccttcagccatgggtaagactcgcggtatgggagctggccgcaagctgcggttgcaccgcaaggacgagcgctgggcggacaaggactacaagaagtcgcacctgggctccgagtggaagaagcccttcgccggcgcttcgcacgccaagggcatcgtgctggagaagatcggcattgaggccaagcagcccaactccgctatccgcaagtgcgcgcgtgtgcagctgatcaagaacggcaagaagattgcggcgttcgtgcccaacgacggctgcctcaacttcatcgaggagaacgacgaggtgctcatcgccggtttcggccgccgcggccacgccgtgggtgatatccccggcgtgcgcttcaaggtggtgaaggtgtccggtgtgtccctgctggcgctcttccgcggcaagaaggagaagccccggaact

SEQ ID NO: 3014 - DNA, 462 bp, Chlorella sorokiniana
  Clone ID: LIB3602-030-Q6-K1-C9
cccagcgcgtgtcaaccatccgcaacgacgtgtccaagaacgagaacagcgtggagctgctgaagctgcgcaagcagatcgactactggaaggagcaggcgggcctgccgccccacaagcgcgactatgtggacctggaggagattgcggacaacaagcagaacggccccgacgctggctcggcgtaagccgccacgcagcagcagcatgcagcacctgtctcccgccctaacttgcccgatggtctcgtgtgagatgagcggcccggcagcacttgcgccgcggccgtgaacgtgtgatccgaccctctttgaccttgccgttttttcctccaccggaccctagaccccttcacctgctcttattaggcggccccacttgtacccttcagccctcgcccccgcgccgccccccgccctgaacgcacccttgccctcggttgttctctgcatgcggcgcccc

SEQ ID NO: 3015 - DNA, 414 bp, Chlorella sorokiniana
  Clone ID: LIB3602-030-Q6-K1-D1
gcatatggtggtgttacgtgccaagcttggggaaaaagatacacaggcgcacaaagcgtgcggatcgcatcagacatcgaacgaatggacaaaacacacacgggaagtggggggaagaaagcacacaggagcaacacgccggcaacgggaccggtggggcgctgcatgcagcaaagcgggagcggcaagacatatctatgcctgcagccattggcaagctcatatgttggtacttgtgcggcggtgcagcgccgcgagcagaggaaaggcaggtgctcagtcggggaaggtgtgccgaaggggtagggaaaacgggaggtgcatgggtgtggcgtggtgtggcgttgcggagatgtgctgtgctgtactgtgtgtgggtgtggggatgagccaaggcgagggagtgtggcagaa

SEQ ID NO: 3016 - DNA, 465 bp, Chlorella sorokiniana
  Clone ID: LIB3602-030-Q6-K1-D10
gcgataccattgagaacgtgaaggccaagatccaggacaaggagggcatcccccctgaccagcagcgcctgatcttcgcgggcaagcagctggaggacggccgcacgctcgccgactacaacatccagaaggagtccacgctgcacctggtgctgcgcctgcgcggcggcatgcagatctttgtcaagacgctgacgggcaagaccatcacgctggaggtggagtcgagcgacacgatcgagaacgtgaaggccaagatccaggacaaggagggcatcccccctgaccagcagcgcctcatctttgccggcaagcagctggaggatggccgcaccctggccgactacaacatccagaaggagtccacgctgcacctggtgctgcgcctgcgcggcggcaactaggcggctggggcacccacccacctgccttcacacccatcgtgtgcggtaggagcggcgcgcg

SEQ ID NO: 3017 - DNA, 422 bp, Chlorella sorokiniana
  Clone ID: LIB3602-030-Q6-K1-D11
actgcggaatgtgttacaaaatgcgtgatatgctgctgcagggcctcaggccacgtgcagccggcatttatgtggggtgaacagagggcagtaaacggagcaggggacggtaccagctggacagttgggggatgaatcagaatgcagagcccagtgacggagatgtgccagggcgaagccagcaagtcagggacaggaggcaatggccacctgagaacctgttgatgactgttagcggtgtgcaaccaggcctgccacatgcactcgccagtgccgctgcgagagcaggctgcagctctcttggcactgcactggcccaagccgtggctgccactggacagcaggctgtcactggaagagggtgtatgggttggccatgtggcgggcaaaggcggccaggaactgggaggccacctcgccgt

SEQ ID NO: 3018 - DNA, 471 bp, Chlorella sorokiniana
  Clone ID: LIB3602-030-Q6-K1-D12
aaaaaaaaaaaaaaaaaaaaaaactaaaaaaaaaaaaaaaaaaaaaaaaaaaaaaaaaaaaaaaaaaaaacaaaaaataaataaaaaaaaaaaaaaaaaaaaaaaatataatataaagtggcgcgtccttttttttgatgccggtttttgctccgggggggcgccccttaagacacttgttgtgggttccccaatgattgctacagggagtgctttttttccccccattacttttaaatccattgggtgaacggacattacttccttgtgcccaatttctgttttaccaagttggttctctaccgagaggtgcgctccacttgctccttctaataataggcaactcctttttcgaggttggtctgcccctatcaggctcccttttaccgccgctgtttggggttttttgcacacaattaacatagcttttgctaggggcttaccccccgttattttcttttttttcctttc

SEQ ID NO: 3019 - DNA, 466 bp, Chlorella sorokiniana
  Clone ID: LIB3602-030-Q6-K1-D2
ggttggaccgcgtttggggagcccaagatggtggcggacaagaaggccagcaaccccatgcgggagatccgcgtgtccaagctggtgctgaactgctgcaccggcgagagcggcgatcgcctgcagaaggccgccaaggtgctggagcagctgactggccagcagccggtgtttggcaaggcgcgctacaccgtgcgccagtggaccattcgccgtaacgagaagatctcggcccacgtgaccgtgcgcggcgagaaggcgatgcagctgctggaggcgtgcctgaatgtgaaggagtacgagctcatccgccgcaacttctgcgactcggtcaactttggctttggcatcaacgagcacatcgacctgggcatcaagtacgacccctccaccggcatctacggcatggacttctacgtggtgctggagcgccccggctaccgcgtggcgcgccgccgcaagcagc

SEQ ID NO: 3020 - DNA, 215 bp, Chlorella sorokiniana
  Clone ID: LIB3602-030-Q6-K1-D3
aaccactgttaaatctggagcggacgttctacatgttccaaatttaccaaccccgcaaaaggacggcaacgcttttaaaaaacacaacctaaagcacccggaatggcccacgtttcacaacttttgtgggcgagaaaaccttggggttacccgacgcaattttaccagcagcagaaccccctaaaaacggcggggaccaaaaaaaaaaaggcctg

SEQ ID NO: 3021 - DNA, 471 bp, Chlorella sorokiniana
  Clone ID: LIB3602-030-Q6-K1-D4
cggccatcttcgggcacgaccccaactggggccgtatcgcagctgcggcaggctactcgggcgtgcagtacaaccaggacgcggtgcgcatcgtgctgggcgacactgtgctgatggacaagggccagccgctgccctttgacgagaaggcggcctccgcgtacctcaagggacgggcagacgtgcacggcaccgtcaacatccaggtcacgatcggcgacgggcccggacgcggcatggcctggggctgcgacctctcttatgactacgtgaagattaacgcagagtataccacgtgatggagcagatgagcggtgcggtggcacgccagacaacagtcgagctgcacaatgggaacaaagccatttctcaggaggctgctgccttcagtggctcggcatgttgcctttgcagcctgtcatgcgttgtgcaacgtgcactcacatgcagcagatgctgtgctcgttcgct

SEQ ID NO: 3022 - DNA, 302 bp, Chlorella sorokiniana
  Clone ID: LIB3602-030-Q6-K1-D5
cgaacaactaaaaaaaaaaaaaaaaaaaaaggcaaaaaaaaaaaaaaaaaaaaaaataaagggcggccgatttgggggtcgcttttttgggtccgcgtttttgcgacgtcttgctcttttataatgtcacatttattgaatttactggccgtcctttggccgcgtctttactgggaaatgcctggctttaccctgcttattcccattttaatccattctcttttcttcagcttttgtgatagtgaagaggtccgaacgggtcgccctccgcaacagttgcccaacctgattgccaattggat

SEQ ID NO: 3023 - DNA, 466 bp, Chlorella sorokiniana
  Clone ID: LIB3602-030-Q6-K1-D6
ggacctgtgcagccgcctagcagcgctggaacagcagtctggcggcgccccgctggtgtgcgtcacgactgccgaggcggcggcagcggcggcggcgtacaactcgctcggagcctcagagtgggagcccgatgagatgagctctggagagctgtcttctgagggagggcccgcttccgagggggaggaggagcaagcagcagaggacgaggcggcagcagcggcggaggacgaagctgcggcggccgaggcggtggcggcggcgagggcggaagcggcggctcggcagcggcagctggaggaagaaccagagattctaaatgtaccgccagctgtcgcagttagcttggctgctgaaggcggcagtgcggcagcggccgcggcaggcagcccaagcagcccgcctgccgtgcacgggccgcagcaggcgacagcggccagcccgcggcaggcatcgctaacgccg

SEQ ID NO: 3024 - DNA, 470 bp, Chlorella sorokiniana
  Clone ID: LIB3602-030-Q6-K1-D7
aaaaaaaaaaaaaaaaaaaaaaaaaaaaaaaaaaaaaaaaaaaaaaaaaaaaaaaaaaaaaaaaaaaaaaaaaaaaaaaaaaaaaaaaaaaaaaaaaaaaaaaaaaaaaaaaaaaaaaaaaaaaaaggggggcggcctttttaggggaccaaatttttcttccgggtgttggcaagtttatattttttttttggggcccccaaatttaatttccggggccgttttttaaaaccgggggaaggggaaaacccttgggttacccaaattaaatcgctttgaaaaaattccctttttcacaggttggattaataaaaaaaaggcccacccggttggtttttccaaaaatttgccccccttaatgggaaaagggaccccccttttaaggggcaattaaagggggggggggggggggtttcccccaagggtgccctttatttttgcaagccccttagcccccttttttttttttt

SEQ ID NO: 3025 - DNA, 458 bp, Chlorella sorokiniana
  Clone ID: LIB3602-030-Q6-K1-D8
ctgagcgggcagcaggatgtggtcgtgtgccgcgcacacttcctcaagaacgcagaggtccgcaccctggcacggctgagctttggggctcccgaccgtgcagccgcagctggtggtgaggcagcggtggcgcctgccggcacagcacgagcggcaggggcacctgcggcggtgcaggtggccctctccagctgccacagcggcctcctgtactgcaccgacaccagcagcccgggagccctgctactgctggactacaccacgcaagacattattaagacgctggtggccccactggctgaccgcggcagcgcactcacagccctggccctgagccccgatgagcgcctgctggcggcaggcaccagtgccggcacggttctgctgctgcgcctggagacagaggcctggacggagctggcggcgcatgcggcgggcgcgccagtcaaggggctggc

SEQ ID NO: 3026 - DNA, 462 bp, Chlorella sorokiniana
  Clone ID: LIB3602-030-Q6-K1-D9
ggcctggcacagcgcgcagtttttggtgtccccggccgcttccagaacgactttgctggcaacatgattgagctggccaccctgaagcgagcgaatgccgacatccaggccgccgcaaacgaagtgcacgaggctacaggcctgctgggccagcagatgccgcgggtggatgagcgcgcgctggcctcctgccgcgcggggctcttccagaacatgctgtttggtggcgccatttcagacgtgatgcagatggctcaagtcaagcgctccatggagttggtgcggggcatgacggcagaggtgcaagccgccgcgcagtgggcctcccagaacgccgccgcgcaccagcagcgcgaggccggggtgcgccagcagctggccaccatgcacggcgagtacgaggcgctccgccgccaggtgggcgcttgaaagggcgggggcagacccatctcaggccgtgcg

SEQ ID NO: 3027 - DNA, 457 bp, Chlorella sorokiniana
  Clone ID: LIB3602-030-Q6-K1-E1
aacgggggtatcgtgtggggcgcccgcagttcaccattggcgaccggcggccggccattgacgaggagggtttggtcacctggcccgcgctcttcttctacccagaggcctccatgcagcacgatgcggtggaccagttttgcgaggaggacacgttcagggaccacctggacctcatgtttgggcccgaggcgccgccgctggactgggactcgcagcgcgagtacagccgggaccggattgaggtgtactaccttttccatgccgccacgccggtcagcctggaccagcttacagaggccttcttcggcagctggcccgaagtgcaagaagagggcccgccgcggtaccgccccaatgccccgggcttggtgcgcctggaccagcggtggacgctgcgtgaggcgctgtcgcggccagaccacgttgtgcccggcgtgcccgccttttttgtgct

SEQ ID NO: 3028 - DNA, 466 bp, Chlorella sorokiniana
  Clone ID: LIB3602-030-Q6-K1-E10
ggaggacgcaagcaagcccgaaaagttccgactgtgaaggaagcggcgacaggcactgctgtgcgactggctgcaaggggcagcagctgcagcagtggcggcagcagcgcggcacaccaaggtggcggcagcggcggcagcggaggcagcggcggcaacgattgcggatccattgctctgaaacggcagcagcaggctgccagcagcacatataggctgccatggcggtatggcgcatgtaccatcacacacctgttgaacagaaagacagctgaagcagatttgatacgactgcgtttaatgaaaccatgcttttttccccagactgttgttcccacctgaaaccattgctggcttttggctggggcctcagcgcatgggcagtgctggtggcagcatttgcttgcaagtacaactcacaaccgttccattaaacacatgcctctccttggtgtaatcgcgctgc

SEQ ID NO: 3029 - DNA, 409 bp, Chlorella sorokiniana
  Clone ID: LIB3602-030-Q6-K1-E11
cccgctcgctgccgcactgcggcgcaccatgctccttccccacaccgaccctgcaccttggccctcgtattgctgccgtccgtcgcctgccgtgccccgccagcccgcctcatggggcgctccatgcagctcacatccccctggcaggctggctgagcacttaggctagacagcagctgcccgttggcctccctgcacccggttttgctcccttcttgcttccacaacccgcttgcagcaacgttgctcgtgcactgctcccagcagccggtggtgctcaacgatggggtcacccggacacccgacctccgctgttgttgtttcattccagcattgcatgcccacgttgtgttgtttccagagccagtcagcctgtggaccaggcccagcctctgtaacccaagcaggc

SEQ ID NO: 3030 - DNA, 203 bp, Chlorella sorokiniana
  Clone ID: LIB3602-030-Q6-K1-E12
gaaaaaaaaataaaaaaaaaaaaaaaaaatactaaaaaaaaaaaaaaaaataaaaaaggcaattggtacaacgtggctgtctctgcatcttcttttttgttctgcaatatttttttgggggcttacatatgtggacccttttttccctttttttcccttttgtccccttttttttcgcgggtgtgtattgctgccctgttctt

SEQ ID NO: 3031 - DNA, 461 bp, Chlorella sorokiniana
  Clone ID: LIB3602-030-Q6-K1-E2
gaagattctggtgcacgagagcctggcgggggacaagctggactcgctcgtcaaggcgctgcaggaagcgggcgtgacgctgcatggcggcgagcgggcggcagcgacgctggggctgccagccgccccctctgcgcggcacgagtacagcagcctggactgcacgctggagctggtgagcgggctggaccaggccatcgaccacatccacacccacggcagcgggcacacggagagcatcatcacggaggaccaggcagcagctgacgacttcctgcggcgggtggacagcgcgtgcgtgttccacaacgccagcacgcgcttcagcgatggctaccgctttgggctgggtgctgaggtgggcatcagcacagcacgcatccatgcccgcggccctgtgggcgtggagggcctgctcaccacgcgctacctcatgcgcggcacgggccagacggtggaga

SEQ ID NO: 3032 - DNA, 294 bp, Chlorella sorokiniana
  Clone ID: LIB3602-030-Q6-K1-E3
caccagcccaattcatgcaagatagccagcccaggcagcgtccctgccgacagatttcatcatcagcccgcccggcacaagcgtggcctcctaacccttcttcgccatgtccttgcttgttctgatttcatcatgattccctttcatccggtaatctttcacccggtaacagcgcctcggcgaaaaaaaaaaaaaaaaaaaaaaaaaaaaaaaaaaaaaaaaaaaaaaaggccggccgctttataaggtcaagaccttgcctccgcgtgcctgctacctgaggcgcctgcactg

SEQ ID NO: 3033 - DNA, 471 bp, Chlorella sorokiniana
  Clone ID: LIB3602-030-Q6-K1-E4
cggaacccagacgccatcatgcgggccctggtcgcgatcctcctgcttgtgctggtcgtcggagcgctggccaggaagtacgaagaccctgtgaccagctgcatcaagaggtcgaagtgcgcgtccaagaagttcaagccggtctgcgctcgcaacgccgccactcaggacacctggggaggtttccccaacgattgctacaggaagtgcgccaatgccgcccatgactttggtgtggattgggtgaagggccactactaccgcgtgcccaagtactgcaagaccaagtggctggcctaccccgtggagtgctccacttgctccggctactactaggcaactagctgagcaaggcagggcagcctgaaacaggctcccatgtgccgacgctgctggcggcatgaggcacagcaccaagaaaggcagctttcaagggcggcgttgtgctggagcaggcatggccgccagtct

SEQ ID NO: 3034 - DNA, 71 bp, Chlorella sorokiniana
  Clone ID: LIB3602-030-Q6-K1-E6
aaaaaaaaaaaaaaaaaaaaaaaaaaaaaaaaaaaaaaaaaaaaaaaataaaaaaaaaaaaaaaaaaaaaa

SEQ ID NO: 3035 - DNA, 56 bp, Chlorella sorokiniana; identical to SEQ ID NO: 645
  Clone ID: LIB3602-030-Q6-K1-E7

SEQ ID NO: 3036 - DNA, 428 bp, Chlorella sorokiniana
  Clone ID: LIB3602-030-Q6-K1-E8
acgatgcctgccgagggctcgccgcccattttgcatgactccctaggctgctggccagccacgcgcccccaagctgcacctgttttccctgtttcctgcccatctgtgtaccccttcagcccccctgccgacccgttttttcctgcccccatcctcacccaacccacaagccacgcggcccacaaacgcatttggttgcaccgccaccctctcagctgcccttcagagtaccatctgaaagctaagcataacgccaagccactgctcgctcctttcggatcgcccatttggttggttgtcggcccctcttccaatcggccccgcctcgacttgatcctcatcacgtccgcttttgtctgcactcctcaggggcgtgccaattgtgcgcgccgccgttgtatcctgccaactgtaacattaatgactac

SEQ ID NO: 3037 - DNA, 77 bp, Chlorella sorokiniana
  Clone ID: LIB3602-030-Q6-K1-E9
aaaaaaaatgacaaagggctagacgaccattgtgcatgaactacataagatgctggtcagtcacgcgcgggcaagct

SEQ ID NO: 3038 - DNA, 464 bp, Chlorella sorokiniana
  Clone ID: LIB3602-030-Q6-K1-F10
agagaaggaggcagagcagcgcaaataccagcccatggccggcagcatggctaagggcgagtcgagtcggccaggctttagcattggcttgcatgcaagtttgttggactacacgttctgccgtctgttcatctgccgtcttgttcccgtgtgctgggttcgcaggtgtgggtgccggcggccagctgggcgccactggtggcacactgcttacgcagcacgtgctgaagcagcagggcggcctggcgaatgcagaagtggatgcgcgtgcagcattcctgcgccacgccagcaaggcagacgacgaaatcagccgcttcaccgccgcgtacaaggccacacagccagcccccatatttgcggaagaggaggatgaagaggaggagcaggccgagcaaaagtagagtggcggcaggcaaacagcaggcaaacagcaaacagctagtccaccgaggagggtggat

SEQ ID NO: 3039 - DNA, 102 bp, Chlorella sorokiniana
  Clone ID: LIB3602-030-Q6-K1-F11
aaaaaaaaaaaaaaaaaaaaaaaaaaaaaaaaaaaaaaaaaaaaaaaaaaaaaaaaaaaaaaaaaaaaaaaaaaaaaaaaaaaaaaaaaaaaaaaaataaaa

SEQ ID NO: 3040 - DNA, 468 bp, Chlorella sorokiniana
  Clone ID: LIB3602-030-Q6-K1-F12
tggccagcaattcctgttcctgaagcagaagtgccgctcgctgttcaaccagcgcaagcggcccgccaagcttgcctggaccaccctgtaccgcaagcagcaccgcaaggacctggaggcgcaggttgcccgcaagaagcggcgcaacgtgaacaaggcggccacccgctccgtggcgggcgccagcctggaggtgatccagaagaagaagagcgagaagcccgaggcgcgcaaggcctcccgcgaggcggcgctgcgtgagatcaaggagcgcgccaagaaggccaaggccgacaaggcggtgcagaaggcgcaggccaaggcctcgggcgccggcaaggctgtcaagaacatgcctaagggcgcgggcaagggcggcgccaagagcaccggccgctaagccagcggcaatgcagcgggcgtagcggcctgctgggccgctgccgttgtaacgcacttcctcggaga

SEQ ID NO: 3041 - DNA, 479 bp, Chlorella sorokiniana
  Clone ID: LIB3602-030-Q6-K1-F2
aaaaaaaaaaataaaaaatgaaaagaaaagaatagtaaataaaaaaaataaaatataaaaaaaaaaaaaaaaaaaagagggtgtataaaatggaaaaagaattttatgttgaagggggtggtgttttttgggcttatgttttttatatctttgtttttgagtgtttggttttttttttttttggtttttggtttttttttttggtttcttttttttttacttattggaatttttttaaatttggggtttttttgttttttttttttattggatgtctttctttttttatttttggaaatagctctaaaggggccctttttttacgtttttttgagttttgcactttcctttgggttgttgctttagccgctttatttaggaacttttaaattgaggtggttgtggttttttttcacactgaagtgtggattttttttttttccttttaaaacgggagttttgttttttttggtggtttt

SEQ ID NO: 3042 - DNA, 464 bp, Chlorella sorokiniana
  Clone ID: LIB3602-030-Q6-K1-F3
gggcaacatggacgagctcatgctgtcctccgcgctgtgcggcgcggagatggcgctcatcgacgccggcgtgcccgtcacgccaggcagcggcgtgtctcgcgccatcgagtactggcagcagaccgccaagcccatccccacccgcgagcacatgctggcctgagagcctgtgtcgccagccggcctcgcaacactccgcactgctatgctagcaaccaggcagccagggcgcacctgtcccagctcgctgcgcactcgagcgtgacgccaaccttgggcgccgctgccccgcataacaaatggctttgcctctctccctgcttcgatccgcagcacgttttggctgctcgctcgccattcctctttcccttcggttaatgcgcccctctgactgctatgctctggtgaatttcgttgagatgcaatgcacccgccccaaccaacacacacacacacacaca

SEQ ID NO: 3043 - DNA, 500 bp, Chlorella sorokiniana
  Clone ID: LIB3602-030-Q6-K1-F4
aggcacggaatcgcaggttccgcccacgcgtccggggcaacatggacaaagactcatgctgtcctccgcgctgtgcggcgcggagatggcgctcatcgacgccggcgtgcccgtgacgccaggcagcggcgtgtctcgcgccatcgagtactgacagcataccgccaagcccatccccacccgcgagcacatgctggcctgagagcctgtgtggccagccggcctcgcaacactccgcactggtatgctagcaaccaggcagccagggcgcacctgtgccagctcgctgcgcactcgagcgtgacgccaaccttgggcgccgctgccccgcataacaaatggctttgcctttctccctgcttcgatccgcagcacgttttggctgctcgctcgccattcctttttcccttaggttaatgcgcccctctgactgctatgctatggtgaatttcgttgagatgcaatgcacccgccccaaccaacacacacacacacacaca

SEQ ID NO: 3044 - DNA, 421 bp, Chlorella sorokiniana
  Clone ID: LIB3602-030-Q6-K1-F5
agcgggctacctgcgggcagcagcggcaccatggatacgcccgtgaagctcgctatcgtgatgaaggttatgggccgcaccggctcccgcggccaggtgacgcaagtgcgcgtcaagttcctggatgatcagaaccgcctgatcatgcgcaacgtcaagggccccgtgcgcgagggtgacatcctgaccctgctggagtctgagcgcgaggcccgccgcctgcgctaagcggcagtgccgcccagccgcgtcgcacgggagagcggcgtgcgccagcatggcagccgcggcagcgagttagccacgtgttgcagctggtggcccgccctgtgggcgtctgcagcagcagcccgggtggcaggtgtcccgtctggggcgaccagcccccgacccattgggatgtaacacatctgaccgctgg

SEQ ID NO: 3045 - DNA, 465 bp, Chlorella sorokiniana
  Clone ID: LIB3602-030-Q6-K1-F6
gccgcggtcaactacatggaccgagcgattgggcagccccaggactacacccagcggggcgaccccctggaagatgccttcacctctgtggagaaggcggtggccgatgcccagaagaaggtcaacggcaactgagcagatgcgagcacccgctgctgaaggccagaagaagtcgagggcaactgagctgagctttgggccaatgcccagccatgtcgagcagcaaactgatcacatttcatccaactgcctttccactggagggcccggtgctgctcaccgcagccccgatgctgcggctcagccgcccacccaccgaggtgctgcccgcccctgcgatgcaacgatccgggtcaccctcccacattttaatcaaatagatatgtttcgggccgggcggcgtggcgggcagatgagccaccataccacgccgcgccgcatgtgtttgctccccctgctttgctt

SEQ ID NO: 3046 - DNA, 461 bp, Chlorella sorokiniana
  Clone ID: LIB3602-030-Q6-K1-F7
gggcatcccccctgaccagcagcgcctgatcttcgctggcaagcagctggaggacggccgtaccctggcagactacaacatccagaaggagtcaacgctgcacttggtgctgcgcctgcgcggcggcatgcagatctttgtcaagacgctgacgggcaagaccatcacgctcgaggtggaatcgtccgacaccatcgagaacgtgaaggccaagatccaggacaaggagggcatcccccctgaccagcagcgcctgatcttcgcgggcaagcagctggaggacggccgcaccctggccgactacaacatccagaaggagtcaacgctgcacttggtgctgcgcctgcgcggcggcatgcagatctttgtcaagacgctgacgggcaagaccatcaccctcgaggtggagtcaagcgataccattgagaacgtgaaggccaagatccaggacaaggagggca

SEQ ID NO: 3047 - DNA, 461 bp, Chlorella sorokiniana
  Clone ID: LIB3602-030-Q6-K1-F8
caaccctcgtagctccaactgtctttccgcgctctctctcccgcaggggcgcctcttaatctgtcctgctctttcctctgctcccgctcttcttctcgtacgggcgcaggcgcgaccccttcctgttgttgtggaggggcgtgcgctgcaccacacacaaacgaatccctcgcagtttggtttgcttacaaacacctttctcggctgcccagccgcgtggcagcatacccttctccttcaacggaccgactagctaacagaccgatcctgccttcaaatgcacagtccgttgctgcgcggcctgctttatcttgcagcataccactacagtgtgttgctctcttccctgcctgcattttctttgcctcgatttttgatgagcggcagctatgcacacattgcacctgcaacgcccccgcaaccgaaccactgaacctgcactgcatttgtttattatgtaa

SEQ ID NO: 3048 - DNA, 472 bp, Chlorella sorokiniana
  Clone ID: LIB3602-030-Q6-K1-F9
cgaaaaaaaaaaatacaactagaaaaaaacaaactctaataataaaaaaaaaagcacatataaatggtcgcctgctctatacatctgctccctatcttactcttgcacgggcgctggtcgctctcctttcctgtcatccagatcgattgcgcgcgcctccattcaccaacgtgtcgcttggaaaaacctttgcttaccccaacttttttgggttgcccaacttccactttttaggacgctgctccttttacggacaggcccgctaacatcgctttcctcccttgggatgcaccttgaatggctaagggcactctctttgtagcggagcatcactcccgtagggtgttgtgttacccgcctgcatgccctttacattgaacagggacgtggggcctgtccgttcactttgcttctgttcctttcttgccacttgaaccggttatcccggactggatttgatattggggctccc

SEQ ID NO: 3049 - DNA, 438 bp, Chlorella sorokiniana
  Clone ID: LIB3602-030-Q6-K1-G1
ggtcaaggagtggcaaccatgaagaacgacgagggcgagattgtcgatctgtacatcccccgcaagtgctcgtggaccaacaagctgatcacggccaaggaccacggcagcgtgcagatcaacattggccacctggacgagagcggcgtgtacaccaactcgttctccaccttcgcgctctgcggccaggtccgcgtcaagggcgaggctgacagcgctctggaccatctgtgggccaagaagcgggctgagatcggccagtgaagcgctgctgagttctagccgccagccggctgggctacacagctgccagccggcggtgggccagccagccttgggtcggccagtgatgcgctgcgaagcaaagtgctgagcgggcgggcgctccggcgcgccgccgccagccacgcagtgcaagctgtaacgcgcctccttgca

SEQ ID NO: 3050 - DNA, 368 bp, Chlorella sorokiniana
  unsure (1)..(368): unsure at all n locations; Clone ID: LIB3602-030-Q6-K1-G10
gcgaggtgattgtgtctggcaagctgcgtgcgcagcgcgccaagagcatgaagttcaaggatgggtacatggtgtcgagcggcaacccggtgcgggagtacatcgactcagccactcgccatgtgctgctgcgtcagggtgtgcttggcatcaaggttcgcatcatgaaggagtgggatccgactggcaaggttggcccccgcacccctctgccggatgtcgtcaccgtgctggcacccaaggaggaggagtatgtcagcgactccaaggaaaagcttgccaaggcttgagagctggtcgcacattagatgtactgctgcatgttaaacacccaaagcaaacaattgtaatctttgcgatgggcanta

SEQ ID NO: 3051 - DNA, 149 bp, Chlorella sorokiniana
  Clone ID: LIB3602-030-Q6-K1-G11
cggacgcgtggggcttggtgcaagttgacatggggtgccgcacccccggaggcggccgccggccaacagccgctgtggcacactgcaactctggtgcgtgttcatcacagtcataggttcaaactggcatcatttggcattgccgagct

SEQ ID NO: 3052 - DNA, 350 bp, Chlorella sorokiniana
  Clone ID: LIB3602-030-Q6-K1-G12
aaaaaaaaaataaaaaaaaaaaaaaaaaaaattaaaaaaaaaaaaaaaaaaaaaaaaaaataataaaattttggaaaggaaaaagtatatgactatttacaggctcccgttatatgtataatttaattgcgttgttttttttgttttttttgcgctctctttgctgggtttttttctggggtattttttttttatctcttttttatttccttttttttttccccatttttttttattggggttttgataattgttgtgcttcctggaattcccgtttggtgccccttttctttttttttggctacttgtaggggccctttaacggcgcttgtggcgcgcttttttgggtg

SEQ ID NO: 3053 - DNA, 477 bp, Chlorella sorokiniana
  Clone ID: LIB3602-030-Q6-K1-G2
aaaaaaagaatgacaacaaatgaagaacgacaagggcgaagatagaagatctgaacatacaaacgaaagaagctcgaggaccagcaaagctgatcacgggcaaggaccacagcagcgtgcagatcaacaattggccacctaggcggggggcggtttttagagcaactagttttcccaccggggggctctgaggtcatgttttttttaagggcgacgctaacagaactctgggccctgtgttttccaagatgcgggctgggaaaacccggggaacccccgattaattctagtcggcagcactctccttttcacagatgggggaaaaaggagagggggccagccttgggtctttcaccaatgggttgcgaagcttaatggtgagggggccccccctttggcgcgccttttacagccggggggtggggggtgttacgcgcgtggttgccgaaaatttggggggccccttggccccgtttc

SEQ ID NO: 3054 - DNA, 432 bp, Chlorella sorokiniana
  Clone ID: LIB3602-030-Q6-K1-G3
cccagggcgtcgcgtgggcggcggtggcgtacatggcgtcgcaagtgtttttccggcagcagagcgagcctgaggacggcccgccgcaacgggagtgcgagtcgtgcggcggcagcggcgtggtgccctgctggtgcaaccggtggagcgacggcgacggcgggtgcagcacgtgccagggcaccggccgcatgatctggagcagctgccgcggcggcggcactgccgtgcccatacaagccaaggtctacatcgacaaccagcgcacctgcaactttcggcagaaccactgaagcagccaggagagttgccgacctggcggatcttgtgagcgattagcagcagccgcggccaccgggggtgcgccaggggggcgggaaccggccaccggctgggcacaacgggggccctgtgtatactacttttggcccc

SEQ ID NO: 3055 - DNA, 440 bp, Chlorella sorokiniana
  Clone ID: LIB3602-030-Q6-K1-G4
catgaaaccaagccccatcacatgtcattgctaccctgctccccctcctcgcctccccgctactacacaggttctgttgctgccgccggcctctgactctcggcccgcctcagattctttttccttttttctgacgcacggttgtactaaagggcacactggccgccacaggcagcccatcttgtaaagtcccacacgacagaaaataaaaaaaaaaaagaaaaacaaaagcacacaaagaccaaagtctaaataaacaacaaaaagaacatacaactttcgacagaaccacctgaatcaaccagaaaaactgcaaggggggggccgttttaaagagccaaaattatcgcccgcgggcacgcgacgaaataccttttttatgggggccccaaaaaaaaatgcccgggccgcggtttaaaaaggtggtgacgggaaaaccc

SEQ ID NO: 3056 - DNA, 458 bp, Chlorella sorokiniana
  Clone ID: LIB3602-030-Q6-K1-G5
ccagctcttcagtgccatgtgcatccgcaagcccgcggacaagttcctggacgagctgcaggtgccctacgaggacgagggctcctttgtggtggtgcgccatgccgccctcatgacctccaccctgctgtccaaggtgctggccgcccccaacatcaagctgttcaacgccaccgccgccgaggacctggtggtgaagcaggacgagaagaacggcaagtacgtggcgggtgcagtgaccaactggacgctggtgtctctcaaccacgacacccagatgtgcatggaccccaatgtgatcgagtccaaggtcatgatctcctcctgcggccacgacggccccatgggcgccgccggcgtgaagcgcctcatgcgcctgggcatggtggagaaggtgccgggcatgggcgcccttgatatgaacaccgccgaggactctgtggtggaccgcacccgcg

SEQ ID NO: 3057 - DNA, 465 bp, Chlorella sorokiniana
  Clone ID: LIB3602-030-Q6-K1-G6
gcgaaaagctagaaggcatgcggcaggtggtggtgcttgcggtggtggtcactggagtgctctactcatgtgtgggcctggcgggatacctggcctttccggccaccgctcgctccgacatcatgttgagctttggagaggacgacctgctcatccaggtggcccgcgccacggtgggcttgattcagattgcagcatacgtcatcaatcacttcccagccagaggagccatcagagacctgatcctccagaccagcggccacacagtgggcggccccgcctttgtggcagtggagacactggtgttcttcttttcaacgctggtgctggcgctcctggtcactgacctggggagcatcttcaaagtagtgggcggcacctgcggcaacgtgctcatcctcttcatgcccggctgcctgctggtgcagtacgctcgcagcaagcatgtggagtcgcgcaagcgcc

SEQ ID NO: 3058 - DNA, 462 bp, Chlorella sorokiniana
  Clone ID: LIB3602-030-Q6-K1-G7
cccctccctgatccacgctcagtccatcgtggccatcctgctgacccagctggtgctcatgggcctgattgagggctaccgcgtcaacggcggcccggccggcgagggcctggatgccctgtaccccggtgaggccttcgaccccctgggcctggctgacgaccccgacaccttcgctgagctgaaggttaaggagctgaagaacggccgcctggccatggtgtccatgctcggcttcggcgtgcagggcctgatcacccgcaagggccccattgagaacctggctgaccacctggcggcccccgacgccaccaacttctgggtggactacgcccccaagtccgccggcatcggctactaagctgtttccgtcgcttgactggcgccgcccgctcgcccgcccgctgagtttacggccactcgcggcaacaggcagcagcggcgtctgtactttctgactcc

SEQ ID NO: 3059 - DNA, 460 bp, Chlorella sorokiniana
  Clone ID: LIB3602-030-Q6-K1-G8
agttcatgaccttcaacttctcgatgcaggccatcgatcagattgtcaactcggcggccaagcaccattacatgagcgcgggccagatcacgtgccccatcgtgttccgtggcgccaacggcgcagcagcgggcgtggcagcgcagcacagccagtgctttgcagcttggtacgccagcgtgcctggcctcaaggtggtggcgccgtacgacagcgaggacgcgcgcgggctgctcaaggcggcggtgcgcgaccctgacccggtggttgtgcttgagaacgagatcctgtacggtgaggccttccccatcagcgaggcggcgctggacaaggacttcacggtgccgctgggcaaggccaagatcatgcgggccggcagcgacgtcacgctgattggctttggcaagatggtgggctacaacctgaaggccgcggagctgctggaggcggagggcatctc

SEQ ID NO: 3060 - DNA, 392 bp, Chlorella sorokiniana
  Clone ID: LIB3602-030-Q6-K1-G9
acgagcggctggcaccatgtctaagcgtactaagaaggtcgggatcgtcggcaagtacggcacccgctatggcgcttcgctgaggaagcagatcaagaagatcgaagttagccagcactccaagtacttctgcagcttctgcggcaagttcgccatgaagcgccaggtggttggcatctggaagtgcaaggcctgcaagaagacccaggctggcggcgcgtacgtgctcaacactgcggcgtccgtgactgtgcggtccaccatccgccgcctgcgggagcagaccgagaagtaagcgagcggccattgaggagtgaagcgggcggcggcggcggcgctgcagcagcgcgctgcagcgtgccgggtggccgctgcttcatgatgtaacgcag

SEQ ID NO: 3061 - DNA, 275 bp, Chlorella sorokiniana
  unsure (1)..(275): unsure at all n locations; Clone ID: LIB3602-030-Q6-K1-H1
cggacgcgtgggcggacgcgtgggaaaaaaaaaaaaaaaaaaaaaatttaaaaataaaaaaaaaaaaaaaaagggggggggtgatataggtagaaagggggcgggtgcgcttgtttttnntggtttttggtgtacttttgttgggtggtgtggggtgttttttggcgtagcctttattgggttcgctgtgggggtgctccgggttggggggggtcgggcttggcttggcgttttccctccttgttctccccggggggggtgcggtttttgggcgg

SEQ ID NO: 3062 - DNA, 465 bp, Chlorella sorokiniana
  Clone ID: LIB3602-030-Q6-K1-H10
acacgatgaagattgcgcaggaggagattttcggccccgtgcagtgcatcctcaagtacagctccaccgaggaggtgattgcgcgcgccaatgcgtgcgagtatggcctggccagcggcatcatctccaacgatgtcaacttcatcaactcagtgtcccgcggcctcaaggccggcaccgtgtgggtcaactgctacaacgtgtacgagtcggcggtgcccttcggcggctacaagacctccggcattggccgcgacaagggcgagtatgccctggagaactacaccgtcaccaaggccgtgtaccagtccctggagtccaaccagtgctggatctaagtagctgcattgcatctgcccaagcggcaattggccggcctcaacctgtccaacgaacggctgcaccaaccaaccagctgaccatctgaagcgtgtgcaccgatttgccgagcaacgcaccccccta

SEQ ID NO: 3063 - DNA, 464 bp, Chlorella sorokiniana
  Clone ID: LIB3602-030-Q6-K1-H11
gcaagatgcgcagcgcgcaggccaacactgagaactcgcgcggcattgtgctgccgctggtgcgcctgctgggcgacctgccgtcggcggtgggcgccaagaacgtggtggtgcccgtcacctccgacaagggcctgtgcggcggcatcaacaccgtggtgtgcaagtacactcgtgccactgtgaagacggtggccgacaccgctggtgatgatcctaacgaggagctgctggtggtcatgggcgagaagggccgctcccagctgcagcgcgacatgcgggagagcatctacgccaccattgcggacaccaacaaggtccgggtgaccttcccggaggccagccagattgcggaggagctgctgaagacggagtttgacaccgcgcgcatcatctacaaccgctttgtgtcggccatctcccagaagcccacgatcgccaccgtgctgtccccggacgcgctg

SEQ ID NO: 3064 - DNA, 463 bp, Chlorella sorokiniana
  Clone ID: LIB3602-030-Q6-K1-H12
cccacgcgtccggaggagtttgagaacctgaagcaggagctgcagtgggagggcagcaaggtggtggtgctgagcaaggaggagaagatgcttctggaggcgcgcatggcgttcgcgcagggccgccccatcatgagcaacgaggagtacgacgccctcaagcgcagcctggcgggcagtagcgtgtacacgctgccgcgggaggggcccgtctgcacgctcggcaagcccggagagcgcggccagaagcagggcgaggctcagactgactacaccaagatgctgctgctgaccgtgccgcccgcgctcattgttggcggcacgctgattggcgccgacctgctggcgggcgctcccctcatgcacctgcccggcaccgtgggcgtggtggtgtggtgcggcctcatcctgccctcggcgtacgtgctggcggcctcgttcgccaacctgctgttcaaggacg

SEQ ID NO: 3065 - DNA, 469 bp, Chlorella sorokiniana
  Clone ID: LIB3602-030-Q6-K1-H2
gtgacatgcgccctgcatgccgtgtgtgggcagcggggctgggacttgccagctacacatgctgctgagcccatgcttacacccacaagtgcgggccatgtgcccagcatgccacgtgtacagagtggcgctcgaacttgcctgcagctgcacatgcccgagcttgccattccggcttctgactggcccatgctcacacacacgagtgcgaggctgcttgcagatctccttctttgagcccatggcgaagcgcgcctacctgatgagcaaccccaaccagtgctggcccatccctgccccgccgcgtgagtaccccaccgcgggcttcaagccgcacacctactgcgtgcactcgactgaggagggcgtgcgggtggagctgcgagacttctcctggtaccctgctggctgcctggacaacagcatgatggctgccgccagctatggccagctgccgaagggagcgcca

SEQ ID NO: 3066 - DNA, 467 bp, Chlorella sorokiniana
  Clone ID: LIB3602-030-Q6-K1-H3
cgcaagatctacatcgaccaagacgacctgcgctccaagcgcctagcgcgcaagtcgcgctgcctggtgctgtttgtggtggatgcatcgggctccatggcgctgaaccgcatggcggcggcaaagggcgccgcgctgcgcctgctgggccagagctacgtcagccgcgactacgtggcagtgctgccattccatggcgaccaggcggaggtgctggtgccaccctcccgcgccatcgccctggccaagcggcggctcgaggtgctgccctgtggcggcggcacgccgctggcacacgcgctgtcgctggcctgccgcatgggcaccaatgcgcagcagaagggcgaggttggtctctgcctcgtggtgctgatcacagacggccgcgccaatgtgagcttggcctgcagcaacaaggagccgggctgtttcgggcctgatgccaccacgcctgagcaggaggtgct

SEQ ID NO: 3067 - DNA, 469 bp, Chlorella sorokiniana
  Clone ID: LIB3602-030-Q6-K1-H4
agcgcaccaccgtctatccagacctggttgccatcactagggagattctgtaccaccacagcctgctggagccagaggagtgacctgcacctgctgagtacggtacctgcacagcctgctggagactacgtagcgaaatgcttcaagtttagtaccaccgcaaatgctttccctgtagcaggagcagtgacgtgttttcacacgccggctgctgcactgtttgatgtttcacccaacttgctctttgccctggcttgagcagccaacgcatggttttactgcttttcctttttgcctggcttaagcagccaacacataaatgtactgctttccctttttgcctggctccaggagccaacacatgactatactgcttgttcagaatactgttaagctgtgccgttgctgtgcaggaaggttcacttgtgttttcatatcggccaaaccacggcagtgcgttttgcaatct

SEQ ID NO: 3068 - DNA, 389 bp, Chlorella sorokiniana
  Clone ID: LIB3602-030-Q6-K1-H5
atcttttttttttttttttattttttttttttttttttttttttatttttttttttttttttttttttttttttttgatttatttttttttttttattttttttattttaatttttttttaaattacttttttatttgttttttgttgagagcaacaaaaaaaaaaaatatggggcagaggggcaaaaaatagtgacacgcctgaaaaaaaaatgaaagatattcacccatatagataataaactgtttttattagaggagacataaataaaatgggttggcccatttttcaaaaattaagggatggaaaaaaaaaggggctgaatacccattatgtatgggaggaagatccatcactagagtatgttgataaaaaaaaaaaatgccaa

SEQ ID NO: 3069 - DNA, 470 bp, Chlorella sorokiniana
  Clone ID: LIB3602-030-Q6-K1-H6
caggcggcctgcaagcagcatggcggcagcagagcaaaagccgctctccaatttgccgcagctgatcccggaggcggtgtttatggaagatgtggagtcctttctgcaaggccgcacagcagaggaggtgctgaacgagctgcgcggtgcacaccagaaatacaagtacattgaggcggagatcgtgcagcgcaagaagcggctctcattcaagcagcctgagattcgcaagtgcttggacgcagtcaccctgctgcttgcgcagcaagaggcgggcgagcagacggtgctggacttcagcctgagcgaccaggtgtacgcgcgggcgcggcttgcagacgtgtcgtccgtcaacctgtggctgggggcgggtgtcatgctggagtactctctagaggatgccaaggagctgctggtgcggcagctggaggggtgccagcagcagctggacgtggtgcagtgggagcacc

SEQ ID NO: 3070 - DNA, 465 bp, Chlorella sorokiniana
  Clone ID: LIB3602-030-Q6-K1-H7
accatctgccccttcgtcaaggagtgccccgtgggccaggcccccgccctgctgctcagcagcgacaacggctgcacctacgccgagtgcggcaaggcctctgctctggagcagcccgccgacggcgccagcggcagcctgcccaccaacgccgccgccatggccgcccccgccatcgtgctgaccctgattgtggtcgcctttgtggaggtgctgatgcacttctgctgagcgcctcatctgaagtgctgaggtgatcctgtcaggcccccatgcagcacagcccaaacagcatctgcctggcgcggcacagcaccgctgctcggccggcacgctgttcttgggctgctgtgcattgcagcatgctgctccggcggcgcggcagggcacctccccttcctctgccgcacacaagtatgcccgcccttccacgcctgcttcccaagcaagttaccctaccctgtc

SEQ ID NO: 3071 - DNA, 453 bp, Chlorella sorokiniana
  Clone ID: LIB3602-030-Q6-K1-H8
accatctgccccttcgtcaaggagtgccccgtggtccaagtccccaccttgatgttctgctgagacaacggttgcacctacaccgagtgcggataggcctatgatgtggagcagccagacgacggctccagcttgcctgtgcctaccaactgccccgccatggcacgtccccgtcatggtgctgaccttcattgaggacgactttgtggaggtgctgatgcacttctgctgagcgccttatctgaagtgctgatgtgatcctgtcaggcccacatgcagcacagccaaaacagcatctgcctggagcgccacagcaccggtgttaggccggcacactgttcttgggctgctgttcattgcagcatgctgctccagctgcgcggaatggcacctacccttgctgtgtcgcacacaagtatgcccgtccttgcacgcctgcttcccaagcaagtt

SEQ ID NO: 3072 - DNA, 466 bp, Chlorella sorokiniana
  Clone ID: LIB3602-030-Q6-K1-H9
gcccgagtggaaggacaagtgcaaggaccactgccctggcgagtgccgcccccgcaagaaggagtacgactgcgatgaggaccgccgcccccgctggcccgagatccccatctggtgtgtgccccccaagcccgagtggggcaacaaggacgacttctgcttccgccccgacccggtgtatgacttcacccccgactacggctgggagggcgagtggaccaagcccgactacgagactggcgatggcaaccactataacggcgacaacggccacggcggcgactgggagaagcaccccgactacaacaacggcaccaagaacggcaccgactccaaccccggcggctgggagcagaaccccgacaacaccaccgacgccaacgtgccccagcagagccccgagcagtcgcctgagcagagcccggagcagtcgcctgagcagaacccggagcagtccccggaacag

SEQ ID NO: 3073 - DNA, 98 bp, Chlorella sorokiniana
  unsure (1)..(98): unsure at all n locations; Clone ID: LIB3602-032-Q6-K1-A1
ntnaaaaaaaaaaaaanaaaaaaaaannaaattaaaaaaaaaaaaaaaagggcggaccgtttaaagggaccaaggttacttacccgtgcatgcgaaca

SEQ ID NO: 3074 - DNA, 422 bp, Chlorella sorokiniana
  Clone ID: LIB3602-032-Q6-K1-A10
gctgcggcagcgggcgggcatccaggccaactccaagctggagatcctggccgccgagaaggacatgtacgtggcccgcatcaacggcaacgtgacagtgaagcttggtccccgctatgacatgggcaacctggtgccccgcaaggaggacggctgggcgatggccgcctctggaaaggactttgcagtgtgggagaagaagtgaggtgggcagccgctcagggctgctgcggtgcggcatgcacgcattgggtgcatgtgctgctgccattttcgctgccgtcagccacagctgtgtgttggaccttcgtgcccctcccttcttgctgctgcctctgctgctgcatgacgcatctccttgcctgctacccgtcttcgatgcaaccttcctagctactgttttttcgcacgggtgcacccac

SEQ ID NO: 3075 - DNA, 472 bp, Chlorella sorokiniana
  unsure (1)..(472): unsure at all n locations; Clone ID: LIB3602-032-Q6-K1-A11
cacgccccaaggcaccagagctaccttgccgcccaactttttgcacccgcgcccacagacctcggcaccggccgccccaccacccaactccgcagcagcagccatgcagcaactaacagcgccccgcgccgccgccgccttcacgcgcgcgcggccggcgacgcgtgcgccgatggcggcccgccgcgtcatggccatggccagcagcatgcagttcatcaagggcatcgatgagcccaccatcccggacgtcaagctgacccgcagccgcgatggctccagcggcaccgccacgtttgtgttccagaaccccgccatctttgaggcgagcagcgagctgggcgacattacggggctgtacatggaggacgacgagggcaccatccagaccgtggatgtgcaggccaagtttgtcaacggcaagcccgacaagattgagtgcaagtacgtgatgcgcagctncttcgagtgg

SEQ ID NO: 3076 - DNA, 398 bp, Chlorella sorokiniana
  Clone ID: LIB3602-032-Q6-K1-A12
agcagtcataagatcagccggcatctatgccaaagcacgctccttataacattcttgggcccaaaaaaaaaaaaaaaaaaaaaaaaaaaaaaaaaaaaaaaaaaaaaaaaaaaaaaaaaaaaaaaaaaaaaaaaaaaaaaaaaaaattaaaaaaaaaaaaaaaaaaaaaaaaaaaaaaaaataaatggggggggcctttttaaaaaataaaattttatttacccttttttaaaaattattatttttttttttttgccacttaatttaatttaattggccggttttttaaaaattggtaattaaaaaaaccttgggtttacaaaatttatttgttttaaaaaaaatccctttttctaaaattgggttaataaaaaaaaagcccaaacaaatcgcttttc

SEQ ID NO: 3077 - DNA, 61 bp, Chlorella sorokiniana
  Clone ID: LIB3602-032-Q6-K1-A2
caaaaaaaaaaaaaaaaaaaaaaaaaaaaaaacaaaaaaaaaaaagataacttgaaaacag

SEQ ID NO: 3078 - DNA, 421 bp, Chlorella sorokiniana
  Clone ID: LIB3602-032-Q6-K1-A3
ctggacgcaatggtgcagggcggctacaagtaccaccagtaccaggtggtgggccgccatgtgcccaccgagaaggagccggagcccaccatctaccgcatgaagctgtgggccaccgacgccgtgcgcgccaagtccaagttctggtacttcctgcgcaagctgcgcaaggtgaagaaggccaacggccagatcctggccatcaacgagatctttgagcgcaaccccaccaccgtgaagaactacggcatctgggtgcgctaccagtctcgtaccggctaccacaacgcctacaaggagtaccgcaacaccaccctgaacggcgctgtggagcagatgtaccaggagatgggcagccgccaccgcgtgcgctccccctgcatccagatcatcaagaccgccacgctcacggcgtcccagt

SEQ ID NO: 3079 - DNA, 377 bp, Chlorella sorokiniana
  Clone ID: LIB3602-032-Q6-K1-A4
gcccaaggtgcccaagcaggagaaggcgaagacccccaagggccgcgcccgcaagcggctgcagtacaaccgccgcttcgtgaacgtggtggtgggcttcggcaagaagcgcggccccaacagccagtaagctgactgcggcgccagcagcagcggcaggcatgtgctgaacgcacggagcgcaagcgcgtcccgcgcacagccgccaccgaagcggcctgccagcgtcgacggcagcgaggcagcaaggcgcggcctggcatgctagcagcgcgtactgcgcgccacggcgctagcagccgcaccctggaacagcatcagcagtaattcagcagcccacctgcatgccgaacgctccgctgtaacaggttctcagg

SEQ ID NO: 3080 - DNA, 454 bp, Chlorella sorokiniana
  Clone ID: LIB3602-032-Q6-K1-A5
caccccttccacgtgctgcgcatcaacaagatgctttcgtgcgccggcgcagacaggctgcagacaggcatgcgcggtgcgttcggcaagccatttggtgtgtgcgcgcgcgtgggcatcggtcagatcctgctgtccattcgctgcaaggacacgcacgctgcggtggcggaggaggccctccgtcgtgccaagttcaagttccccgggcgccagaagatcgtggctagcaggaactggggcttcactccctacctgcgcgacgattacttggagtggaagcgtgagggccgccttgtgaacgacggtgtgaatgccaagctgcttggcaaccacggcccgctggacgcacgggagcccggccagattttcgagggtcctgcccgtctgtggcgtgtgccggtgcatgcctaacatgttgcttgggttctaaagatgtaacgaacatctgagc

SEQ ID NO: 3081 - DNA, 228 bp, Chlorella sorokiniana
  Clone ID: LIB3602-032-Q6-K1-A6
gcatacacgcttcaaacaggcatgcgcggtccattacccaagccatttggtatgtacacacacgtcaccatcagtcagatcctgctgtccattcgctgcaaggacacgcacactgtggcggcagagagaaacctcacatcgtgccaagttcaaattccccgagcaccagaaaatcgtggctagcatgaactagagcttaactccctacctgcacataccattacttga

SEQ ID NO: 3082 - DNA, 469 bp, Chlorella sorokiniana
  Clone ID: LIB3602-032-Q6-K1-A7
gcggtggcccgcgacctgctggagccggtgaagcaaaagttcccctggatctcctactccgacctgtggaccctggcgggcgccaccgccatcgaggccatgggcggcccccacatcccctggcgccccggccgctccgactacgctcccgagcagtttgtggcgctgcccgacggccgcctgcccgacggagacaaggacgccaagcacatccgagacatcttctaccggatgggcttcaacgaccaggagattacggcactgatgggcgcgcacacgctgggccgctgccactccgaccgctccgggttcctggggccctggaccaacgcccccaccaccttctccaacctgtactttgtggagctgaccgagaacaagtggcacaagaagaagtggaaggggcccctgcagtacgaggacaagagtggccagctgatgatgctcaacacggacatgtggatgctct

SEQ ID NO: 3083 - DNA, 390 bp, Chlorella sorokiniana
  Clone ID: LIB3602-032-Q6-K1-A8
ctgggccgctgtgattcatttgcatcggcccatgagcggctgccttgcacgcatggtgcggcacggcctgctctgcggcccttcatacctttgtacctttctgtatcatcttgcagcaatggcagccggctgcatctttctaacatcgtcaccggcccactcgtttgtgccatgcccacctgcctccaacgtcacccttcatcaaccctcacccaacccatccacctgccacccatccactcaccttacctgcgccacaacctgtggcacccactcaccacccatcacccgctcaacgccctccatgcaccatcctgcccattcaccaaatgtgccaccccaaacgcacgtccgccgctgtaccacctgccgccccctcacccgcaccca

SEQ ID NO: 3084 - DNA, 424 bp, Chlorella sorokiniana
  unsure (1)..(424): unsure at all n locations; Clone ID: LIB3602-032-Q6-K1-A9
cccagccagccatcgcccgcggtgcaccttctctagggtgttcaataaatcctatttcatatctgctgctccccggctgccgcacccgccggccgcagctgctgccgcagctgctgcctggctctgcgcagccttggggccctctgtgggtggtgtgggccattgcccccgctgctcgcggttttgctgccctacctgccctgcctcccacactctccgcatgcgctttgcactcccctttgcttaccctccattcctacgtgactggtcgccccgcgccgccctcttgcttaccgtgtacgccctgctatgtgtgcttttgtgagtttgcgggtgtgtatagcgatgggccgcgcttgccctggccgcccgctgncagcccgccccgctgcgcccacgcgcagncctgtgtatagcgcctgac

SEQ ID NO: 3085 - DNA, 244 bp, Chlorella sorokiniana
  unsure (1)..(244): unsure at all n locations; Clone ID: LIB3602-032-Q6-K1-B1
cccgcgcccacggcagcgtcggcaccatccgggccaagttccagaagaacctgccccctgcggccatcggcagcaagatccgcgtgatgctgtacccctcccgcgtgtgagggtcggttgcttcccggagcagcagcggtgcggcacggcgcggcggtgacgagtcgtggcagtgcgaccccgctcggcacggccgcccgggtggcgccgccgtcgcctccatgtaacccttgattagccaant

SEQ ID NO: 3086 - DNA, 426 bp, Chlorella sorokiniana
  Clone ID: LIB3602-032-Q6-K1-B10
caaggccctgaacgacaagaagcgcctggtgtcttcctactccaacttcgcccgcagcacctctgtgtctaacggcagctgcgcactgcccaacaactggttcggctgcgacgtgactgttgtggctcccgacagcatcatcaagcaggacatcaagctggagtgcgagggcaaggagcccggcaagtgcgcctccaacatgaacatccgcaacatcaacaactagatgttaggcagctcgctgcgctgacgtggcgcggcggcagctaggcgtacgccctccggcccgccggctgccgctctgccgcttcacgagaagatcaaacccccctgctccctttttgttgctgtgcgctcccccacccccacctaccgaattgctccacacctctcggcatcactgcggcgtgtaacacgtttcacacg

SEQ ID NO: 3087 - DNA, 543 bp, Chlorella sorokiniana
  unsure (1)..(543): unsure at all n locations; Clone ID: LIB3602-032-Q6-K1-B11
cctgccggcccgcaggcggcaggcacacacgccatatacacatgcatgcatgcgcgccgggcacgcaccgctcggacccttggtcccttgtctcgtgtcgaagcactacggtggcttgccgcaaggcgggcttgccccccccgcctctccccgtccccccgcacctgcggcctgccattttgtgtctcgtctgattcgtccctctccctcctggtgccccgcccagcgggcgccgcagcagcaaccgctgcccaacagcctcttcccgccggtctgcccccgtgccacgcccgtttgccaacacgtgcgcgcgccgncgncaccccgcctttgcacccccgtcgagcaggatccaaacccggccctctcctcccctcttcagtggcccccatccctttcttgaaatctcttctcgcagactgactcgtcttccccctctgccgctgatgccacacagctggcagcctgtacaagggccgcaccttcacgcgcgggagactatgcccgcagtgtgatgtactatttcgcggcatgcgtaatcgt

SEQ ID NO: 3088 - DNA, 372 bp, Chlorella sorokiniana
  unsure (1)..(372): unsure at all n locations; Clone ID: LIB3602-032-Q6-K1-B12
cggacgcgtgggccctgctctgctctgccctgtgcaccgctgctgctccccacccttgcaccatcactccctctccgcgcatatgcggccacgcaacactgccccctcatgcccaccccccgcccctctcccggcgcatgtccccctctaacctctatccactttctccgtccactgactggcccttgtgctgggcaccaggactccattgacagcacgctctcctagcccgcagcctgccactgtgctggcaccatttactgccgctgcccagagggcggcatgccgcgcgcttagtggcgcaaggcaccttgattctagttgcacacgttgtgagcacatgtgggcaaannaaaaaaaaaaaaanaaaaa

SEQ ID NO: 3089 - DNA, 346 bp, Chlorella sorokiniana
  Clone ID: LIB3602-032-Q6-K1-B2
gcttcctgcacttacaaaacgcccacacgcacacatttggttaacgctacacataaaaatcatccatgccaaaatagggtgggacctgctgtgcacgacactttgcaaaaaactggaggggaggccttgtgcgtgccatattttttagaagctgaagcttgattctgtttgggtcggatttcggggagggtggtggcggaacaaacataccccactttgttgggcgggggggaaacacaacggacgtaccgcggttaaaaccgcagtgctaacaccaaagggggggaggggagcaaaacaccacaggctcctgttgcaactcgcaaaacttggggtgccacacgaa

SEQ ID NO: 3090 - DNA, 447 bp, Chlorella sorokiniana
  Clone ID: LIB3602-032-Q6-K1-B3
cgcgcgtgggcatcggtcagatcctgctgtccatccgctgcaaggacacgcacgctgcggtggcggaggaggccctccgtcgtgccaagttcaagttccccgggcgccagaagatcgtggctagcaggaactggggcttcactccctacctgcgcgacgattacttggagtggaagcgtgagggccgccttgtgaacgacggtgtgaatgccaagctgcttggcaaccacggcccgctggacgcacgggagcccggccagattttcgagggtcctgcccgtctgtggcgtgtgccggtgcatgcctaacatgttgcttgggttctaaagatgtaacgaacatctgagcaagacaaagaaaacaacaagagctggattggattgttttctgcatcatcagtttgaggcttttctttccttatacttctctttgtaaaaagcctgccgc

SEQ ID NO: 3091 - DNA, 452 bp, Chlorella sorokiniana
  Clone ID: LIB3602-032-Q6-K1-B4
gaacgaggtgcggcgccagtttgcggagcggccaggcatcatgaattatacagagaagcccgattatgcacgctgcgtggcaattgtggcttcttcggcgctgcgagccatgatcaagcctggcctgctggcagtggcggccccctgcgccgtcggcattgcgttcagagggctgggagtggccactggtcagcctatgctgggcgccaaggccgtggcgggctttctgatgttcaccacagtagcaggcatcctcatggcgctcttcctcaacacctctggcggtgcctgggacaacgccaagaaatatattgagtcgggcgcgcacggcggcaaaggctccgacccacacaaagccgctgttaccggcgacacggttggcgacccagccaaggactgcagcgggccctcgctgcacgtccttatcaagatggtgcaactatctctctagt

SEQ ID NO: 3092 - DNA, 313 bp, Chlorella sorokiniana
  Clone ID: LIB3602-032-Q6-K1-B5
caaaaaaaaaaaaaaaaaaaaaaaaaaaaaaaaaaaaaaaaaaaaaaaaaaaaaaaaaaaaaaaaaaaagggggggccgttttaaaaagatccaagcttggggcgccgtgcatagcaaatccacttttctgaagggggcctcctaaacccaatcttttggctggcgcctcacaatgtgactaccgtgaaaacccttgtataacccaactttttggatacccgtgcccttcccctttttcaccggtggagaaaacataacagttccgccccttgccgcctttccaacaagggcccaccccaaatggctaacaaa

SEQ ID NO: 3093 - DNA, 307 bp, Chlorella sorokiniana
  Clone ID: LIB3602-032-Q6-K1-B6
cttcgagcgagccactcacaacaagacggcagcagctggagcgcgccctgttaggaagccgccgtgcccagctgcatccaactactggcgagatgatgccacaaacgcatcagccgtgtgcttcatgtgaagtgctcccttaatgaatgacacgcacccagtgccccccccctgccacctatgcatggcctttctatgcttcacgtgagcacgttacattgagtagtctatcaacaaagcgagcgcgcctctatgtggaaaaaagcgcacaaaataaaaaaaaaaaaaaaaaaaaataattaataaa

SEQ ID NO: 3094 - DNA, 400 bp, Chlorella sorokiniana
  Clone ID: LIB3602-032-Q6-K1-B7
aaaaaaaaaaaaaaaaaaaaaaaaaaaaaaaaaaaaaaaaaaaaaaaaaaaaaaaaaaaaagaaaaaaaaaaaaaaaaaaaaaaaaaaaaaaaaaaaaaaaaaaaaaaaaaaaaaaaaataaaaaaaaaaaaaaaaaaaaaaggggggggcccttttagaggtccaaattttaggcacccctctttgcaacgtaattttttttttttggggccccttaatttatttccctgggccgtgttttaaaaacgtggggttgggaaaaacctgggcttcccccacttaatgggcttgggaaaaaatcccctttttccagggggggtatataaaaaaaaggcccacccatttcccctttccaaaaattttccaatcttaatggcaaaagggaaccccccttttacc

SEQ ID NO: 3095 - DNA, 506 bp, Chlorella sorokiniana
  Clone ID: LIB3602-032-Q6-K1-B8
ctagttctagatcgcgagcggccgtcgcggcgctctgagcgatccgtacttgtcgtacgccgccggcatggcaggcctggcggggccgctgcatggcctggccaaccaggagacgctgcgctgggtgcacggcgtgcagcaggagctgggcgaaagccccaccaaggagcagctgcgcgactatgtgtgggccacgctcaagggcggcaaggtggtgcccggatttggtcacgcggtgctgcgcaagacagacccccgctacacatgcctgcgtggctttgcccagcggcacatgcccgagtaccctttgttccggctggtcagcattttgtacgaagtagtgcccgacattctgatgcagactggaaaggtgaaaaatccctaccccaacgtggacgcccacagcggcgtgctgctgcagtactatggcatcaccgaggagcgcttctacacagtgctctttggagtgtcgcgcgcgcttggcgtgctgagccagggcatttgga

SEQ ID NO: 3096 - DNA, 317 bp, Chlorella sorokiniana
  Clone ID: LIB3602-032-Q6-K1-B9
ggaaaatcattgggacatgcggtttaagtcatgcagaaatgcaaattggtgggtgcagattggccctcgtttgcccatcgagaggaaataacagaaggcacttcgggctctgaagcgcggtccaaggtgcacttaaaaaagaggcagttttacaaaacacttacacaagcaactgcaagaaaatggtcccgggaatggttgaggtttaacggagaaggaagtgaaaattgcaaacagcacctgccgaggccgaggggcaggaccttgcggtgctcaaagaaaagaattgccaaaaagaattggcgtggggcagcggt

SEQ ID NO: 3097 - DNA, 306 bp, Chlorella sorokiniana
  Clone ID: LIB3602-032-Q6-K1-C1
gaggtggacgagagcggcgtggaggccaaggacattgagctggtgatgacgcaggcgggcgtcagccgcagcaaggcggtcaaggcgctcaaaaacgccgacggcgacatcgtcagcgccatcatggagctcacgatgtgagcggggcacccggaggtgcaggcgcgccgcacggcagggcatgcctggctcgtgcgtcgtgccggcggggcggcggcggcggcgatagcgctgcgcgccacggcccgccacccttgcttcctgctggcttgattcctatgctggctctgtgacaaacgtacacgc

SEQ ID NO: 3098 - DNA, 433 bp, Chlorella sorokiniana
  Clone ID: LIB3602-032-Q6-K1-C10
ggtcatgctgcacgagggctccaccctgctcgtggcactcaactcgctgcgcctgctggcttttggagcgccgccgcgccagtggcagcagcagcccgctgcggccgacgcagcagtccaggcggctgcagacgaggcggcagcagaggcggatgagccaggttgggagcagggtgtgcccgccgctgtggccgcttgagcgtctgctgccctgctggccgcatgagcgctttctgcccaattggctactgtagagcttgctgccgcggccagctcacgggcctgtaccgctgctgactcgcatgcaatgtcttttcgactggtgtctggtattgtttggttgccatcagagcgcattgaatcccccttgttgacattttcgcttgccacaacgttgcttcccaccgctctacgagtttcgcgtacttgcatt

SEQ ID NO: 3099 - DNA, 448 bp, Chlorella sorokiniana
  Clone ID: LIB3602-032-Q6-K1-C11
cccacgcgtccggttcagatctgtttgcgatttcaactacgtgagtgcagaggttcctcggccccaggcttgccgtttgccgccactcgaaccaccagcagcttgggcacaccggcagcctatagcacggcagggcacccgctacagcagcccgcagcacccagccgcggcggcccacgcagccggagcgtggctcgctccccgcagccatggcggcccccgcgacgggcgagggcagcttgctggccatgattgtggacgctgacacagccacggggctgctgctgacgggcgtgggccaggtggacatccgcaagcgcgccaacttcctgatcgtggacgacaagacaagccaggcgcggatagaggaggcgttcaaggagttcaccaaccgggaggacgtggcagtgctgctgatcaaccaggtcattgcgggcatgatcccgca

SEQ ID NO: 3100 - DNA, 317 bp, Chlorella sorokiniana
  unsure (1)..(317): unsure at all n locations; Clone ID: LIB3602-032-Q6-K1-C12
gctgctcgcactggccttcttcctggttttggacaccaaggcgagcgtggaggaggcgtaccttaccgagaagtttggcagcgagtacgaggagctcatcaaaacaaccaagaagttcatccccggcatttactgagctagagctgcacatcatgttcaaggccaactatgctgggctgccccacaatatgcaagcctggtgcggtgctcaaacatcctactttgatcgatagaccaataaaatgttacattccagctcgctctagtctgcattgctactctcaagcaccaaaactgtgtaaaaagaagcagtcnnt

SEQ ID NO: 3101 - DNA, 268 bp, Chlorella sorokiniana
  Clone ID: LIB3602-032-Q6-K1-C2
cggacgcgtgggaaaaaaaaaaaaaaacaaaaacataaaaactgaaaatgacacaaacaaacaaaaagacgcaggaaggcgaacaaggcgctcaaacacattaacaggggccgatccgttagcgccatactcaagcctcacgacgcgtgcttggcacccgttggttcttgtacgccgcaccgtaaaccatgtctgtctcctgcctttttccaccccctcttctggaaaacccatagcgttgcccgccttaacccgtcgcccttactta

SEQ ID NO: 3102 - DNA, 531 bp, Chlorella sorokiniana
  unsure (1)..(531): unsure at all n locations; Clone ID: LIB3602-032-Q6-K1-C3
gggcatcaccaacgcgctcatggccgcccgccagatgctggacccctccttcgtgcccctcaacccgccccaggatgttctggttatgagtgctgcgtatggctcctacatggcctcctcctccaacctgcgctaccagatcctggctggcctgattgaggagcgcggcatcgaggctgtgttcaagtccaaccccgccgcctgcgccatcctctccttcatcgtccgcaccggcaacacgttcctgggctcgctgctctgggtggactacatcaggctgctgggcctgcagaagacgggcggcggccactaagggagccagggcggcagctggctgccgaagagcatgtttttgccgggctgtggggtgggacgagcattgtcgcccacctaactgcccttgccccccacccatcaacgacgtgaagccacctcaacaacgtaccgtgtncccatgtgctagccacagcacagcgcttgatgcgctaagctgctcttgccgcacttctgcttttgggtatgctgttttcc

SEQ ID NO: 3103 - DNA, 297 bp, Chlorella sorokiniana
  Clone ID: LIB3602-032-Q6-K1-C5
ataaatataaaaaaaaaaaaaaaaaaaaaaaaaaaaaaaaaaaaaaataaaaaaaaaaaaaaaaaaaataaaaaagatataaaaaaaaaaaaaaagggagcccgttggggggggccctttttggggtcccatggtttcgtccgcgtgcttcccccttttatggccctttttttgggcccccttgtttcattttttttggccgccttttttcgccgccgctgtgggggaaacccctgccttccccttctaacccctcctcccccccttttgccgctggagtttccttttaggcccttc

SEQ ID NO: 3104 - DNA, 367 bp, Chlorella sorokiniana
  unsure (1)..(367): unsure at all n locations; Clone ID: LIB3602-032-Q6-K1-C6
ctggcgactcctgggtggcggcgcagaccctggtgtacaaccagccgcagtatgcgggcattgacctgcccttcgatatctacaccctggccgtcctcaactccgtgctcatgggcggcgtggagctgttccgcaacagcgagctcgaccccgagcgccgctgctaccccggcggcgccttcgaccccctgaacctggcgtctgacgacagcgagcgcacgcagaagctgcgcgaggcggagatcaagcacgcccgcctggccatggtctccttcctgggctacaccgtgcaggcctggtacaccggcgagggcgccctgngctccctcaacaagttcgccaacggcttctaagcagcccggcatga

SEQ ID NO: 3105 - DNA, 361 bp, Chlorella sorokiniana
  Clone ID: LIB3602-032-Q6-K1-C7
aaaaaaaaaaaaaaaaaaaaaaaaaaaaaaaaaaaaaaaaaaaaaaaaagaaaaaaaagagggaaaggagaggtagagaaaagaggggaaggggacggcagttgcggggtagtgggtatcatgtttgagcgtcttctggcgtttggtttgcccggtggtgcttgggacttgttttggggggggggggttttcgggggctgtttcttcttgccgcgtgtggcggttttagttattgttttttttggacatttttttttttctgtgggggttccgttttgtgtgggtgtgtgggggggccctgggcgccgccccttttttttggttggtgggtgggctccctttgtgggtgacgggttttttg

SEQ ID NO: 3106 - DNA, 233 bp, Chlorella sorokiniana
  Clone ID: LIB3602-032-Q6-K1-C8
gcggcaagggcagcggcaaagcggcggcggcgagcggcaagcgcaaggctccgccgcttcccgacaacatgcggcagacgcggtcgcgccactgagacagtgtggcgcaacgtctggtcgcttgccagattgtgcttgaattgaatgccctgcagcggccacttgacagcttcggaatgagtgcccgttcagctgggcgaaaccctttttttgattgggattgatttacatct

SEQ ID NO: 3107 - DNA, 474 bp, Chlorella sorokiniana
  Clone ID: LIB3602-032-Q6-K1-C9
ccgtcgtcgaggtagccagcacgatggccaaaatcaaggcccatgagctgcgcggcaagggcaaggaggagctgctgcagcagctcaaggagctgaagcaggagctgagcggcctgcgcgtggccaaggtcaccggcggcgcccccaacaagctgtccaagatcaaggtggtgcgcaagggcattgcccgcgtgctgaccgtggtcaaccagaagacccgggacgctctgaaggaggcgtacaagggcaagaagtacgtgcccctggacctgcgcgtcaagaagacccgcgccatccgccgccgcctcaccaaggcgcaggccaacgccaagactgagaaggctgccaagaaggcgcgcgccttcccgcagcggaagtacgcgctcaaggcgtgaaagccttggaagcagcccgctgcagccgtgcaggcacacctctaggcagcggccgctccggccccatgtaactttgacg

SEQ ID NO: 3108 - DNA, 476 bp, Chlorella sorokiniana
  unsure (1)..(476): unsure at all n locations; Clone ID: LIB3602-032-Q6-K1-D1
gcgagcgcggaatgaatgtgctgcgctgcgggcgctgcagggtggctggttattgtggctcggcatgccagcgggaggcattcaggacgcacaagcacggctgcctgcggctgctggagccctaggggctgggcatccaactacaatctgcggctcggcgtgggggcaggcggcgtcaaggcacacaggcatggctgcctgctgctgctgggccccagggggctggctgggcgcctaaccacgatttattgttgatctactgtgctatgattagcccaaatgaaccctggcttgcgcctctgcgtcccgcacccaatgttgaacagtttgctgactgcgacttaaatttcagttgcgggccagccatgtgtgctgggcagctggtgcagctgtgcgcaccagcctccttgtcggctttgattgtatgtttagttgtaactcatgggggcgtttnanaaaaaaaaaannnnnnaaaa

SEQ ID NO: 3109 - DNA, 447 bp, Chlorella sorokiniana
  Clone ID: LIB3602-032-Q6-K1-D10
gcgcccgcctgattctggtgcacgccggcctggctacctacgcctaccgccgccgcgggcagctgcggcagctggagggtatccctggagaggcctggaaggactggtgggccttctgctgctgcccgggcctgacggtgtgccaagaggcggcgcagttgaggcggctcagggagacccgtctgcaagccgcagcagacggctaccatgcggtggtgcaggccccgcagccgcagcacatggcatgagcgccaaatgctagttgctggtggtaatgcatcggcagcccggcgttgctgccagcagtgcgctgactggactagcaatattttggaggctggagctgtccagcagctgctcaatgtgatttacgcaccgtgtagcggtgcgaaagggctctgtgtttgttgttaaggtgcatgcgaccatgcaacccaatcaatgaat

SEQ ID NO: 3110 - DNA, 63 bp, Chlorella sorokiniana; identical to SEQ ID NO: 961
  Clone ID: LIB3602-032-Q6-K1-D11

SEQ ID NO: 3111 - DNA, 339 bp, Chlorella sorokiniana
  Clone ID: LIB3602-032-Q6-K1-D12
gggtgtgtgcacggtgcactacaagggcccgctgcccattggctatggcctacgggcggcgatccgggacaagttcccagatattgtggaggtgctaatgattgatccggacacggaggagcccatcaagtttgaagctatttaggctggaggccgtcgcacagcagagtgtcctcttggcatgcctcggaggagaggtggcccgcgacccgagcacaaacaggcggctggggctgcggcgcctcgcggaggcctggttaggtccgctgcatgcccagctgaggctgcgctttgcagggcctgtcttggcctttgcatttgatgtaaacatgagccaac

SEQ ID NO: 3112 - DNA, 394 bp, Chlorella sorokiniana
  Clone ID: LIB3602-032-Q6-K1-D2
cggcgctcgcccgccatccccacccccaccccatcgtgtgtcgtgcagccgcggactcgccgcggcaatccatgcataccatctcatctcattgcgctaccgcatctccttttccctctggcatgttcccggacacaccacagctaatcaagtgtgggagtgcttttggcagccgtcccaactggctgtcctgtcccacttttgtgttctgcgcaccgactgtgtccttgtctgccacaaccagtgcctcgaaccacccctgtaatccgcagcttgtaaaataaaaccctgacttgagcctctgcgtcccgcacccaatgttgaacagattagctgactgaaaattaaatttcagttgcgggccagccaatgtgtgctgggcaactggtgcaac

SEQ ID NO: 3113 - DNA, 469 bp, Chlorella sorokiniana
  Clone ID: LIB3602-032-Q6-K1-D3
cagcctggatggtaggtttttgcccacctccagttgctacatgcgcagctgcctgccggcgtgcccgagcttgcctcagtcgcgccttcgtgcccctttatttcaagccctgcttaccggttttcccacatgccgcgcttgtttttccggtggctgcggcagtgccaagcagcacacacccttcacctgctgctgatgccgctgccgctgccaacgctttctgtgccaacttattgggctggggccctgatcgccgtcccggcctgaactgtagactgctgactgccgatcgcccttctgtacgttttcaaatgcaccaccccacctcattgcaccgtttcctcacccctcttctgtcgtacgcccgtttgctccgcgctgcccaggtcgtttgcctgccttgcttttatattgcgggagctgcgcaacagttggttggacttctgggaaccttgcaacactcgcacac

SEQ ID NO: 3114 - DNA, 396 bp, Chlorella sorokiniana
  Clone ID: LIB3602-032-Q6-K1-D4
gggcaattcgttcgcgatggtgaacgtcccgaagaccaagaaggccttctgcaagggcaaggagtgccgcaagcacaccatgcacaaggtcactcagtacaagaccggcaaggcgtcgctctacgcgcagggcaagcggcgttacgaccgcaagcagtccggctatggtggccagaccaagcccgtgttccacaagaaggccaagaccaccaagaagattgtgctgcgtctggcctgcaccgtgtgcaaggcccagcacatgcacgccatcaagcgctgcaagcacttcgagatcggcggcgacaagaaggtcaaggggctatactagtaaaaaaaaggagagcggcaggcggagagcatgaccgagaaatggaggcagcggcgcccgctcaccct

SEQ ID NO: 3115 - DNA, 471 bp, Chlorella sorokiniana
  Clone ID: LIB3602-032-Q6-K1-D5
gcacgagctggacgagctgctgcagagccactcccccaagaacgccagcccgattgcggccacacaactgaaatgaccccgcctgcgcctcgagagccacagtgaggccaaaccaatcctgtgccaaccaaccagtgggcagacccttccatgccagccggggctcgtgctgcccccggcggggtcctgcccgcgaggagacaaccccccatgctccagtaccgcccctttcatttgatacacccgtctgcccccttgtttcttcccatccctgcctgccctgagaggccctggctctcagcgcacccccgcctccaacctggtagtagagtgccgcacagcggcagcccacttggtgcaggcagggggttgcgctctggcccaggccgatttttatgtgcccctgtacaaccctgtccatacacacaaaccaaccaggctggaaagcaatttgtccactaggggccccct

SEQ ID NO: 3116 - DNA, 101 bp, Chlorella sorokiniana
  Clone ID: LIB3602-032-Q6-K1-D6
aaaaaaaaaaaaaaaaaaaaataaaaaaacaataaaaaaaaaacgacaaactaaaaaaaaaacaaagatatcaagcgcaagcttcggggcgtcgggtttaa

SEQ ID NO: 3117 - DNA, 456 bp, Chlorella sorokiniana
  Clone ID: LIB3602-032-Q6-K1-D7
gacgcggctgtggtttgctggggaggccacaagcaaggaggatgcttacacagtgcacggcgcctacaagactggcgaggtgcaggcggtgcgcatcaaaaagtggtggaaggcgcaccacgagcagattgagcggctgcttgccgagcaggagcagcagcagcagcagcagcagcagggggagcagcaggcaatagcagcggcggacggcgaggcggcggcaggcggccgccgcccgcgtgctgcggcagccacggccaagcagcgcctcgcctctgctgccgccgacagctgaggctgctccttgacatggtatgaagatgacttgctatctaattggctgctgcatgcgtcctgttgttttttccgctgcgatgactcaactccatgccaggtgcagcggcatggccacccttgacacgccactttccaacatgtgacgaaatgcataccctc

SEQ ID NO: 3118 - DNA, 315 bp, Chlorella sorokiniana
  Clone ID: LIB3602-032-Q6-K1-D8
aaaaaaaaatagagtttagatgaagaggccacaagcaaagaagatgctttcacaagagaacagagcctacaatactgtctaggtgcaagcggtgcgcatcaaaaagtggcggaaggcgcaccacaagctgattgagcggctgtttgacgggctggagcagtttcaacatcagcagcaccaggaaaagcatttggttatagcaccttttgaccgcgaggcagggccacttgttcgccgtccgcgttttaaggaagtcacggcctaaactgttctctgctgtcttgccgatcgcccttttttgctttttcaaaacat

SEQ ID NO: 3119 - DNA, 447 bp, Chlorella sorokiniana
  Clone ID: LIB3602-032-Q6-K1-D9
gtgagcctgatcgtggaaaaccgacgcgcaggcgcagctggcagcgtttcgcttggggtggagctcggctatgctgcggagcgcgctggttcgggcggcgcgccgcgtggcggtgcagcagcagcggggctacgccgatgcagcggtggccaccaaggccaacatctgggatgagctgggcgagctggtgaccagcgacgagggcaagcgcgagctggccaccctgcgcagcacctacgcagacatctcgcaaaagctggccaagctggcggcggacccggagcccatcaactgggcggcctggagcaaggagatcgaccccaagctggtgcaggagttcaagcaggcgtacgagaccatgaagctgcccaagtttgagggcaaccacattgctgaggccaacacccagtttgcggcgctgctcaaggaggcggaagcgctggaggc

SEQ ID NO: 3120 - DNA, 496 bp, Chlorella sorokiniana
  unsure (1)..(496): unsure at all n locations; Clone ID: LIB3602-032-Q6-K1-E1
cagaaggctcggcccatcaccttacgggacagcaaaggcggacgagcaacatggggcggcggccggcgcggtgctaccgccagatcaagggcaagccctaccccaagtcgcgcttctgccgcggcgtgcccgaccccaagatccgcatttatgatgtgggcgccaagaaggcgggcgtggacttcttccctcactgcgtccacctggtcagctgggagaaggagaacatctcgtccgaggcgctggaggcggcccgcatcgcggccaacaagtacatggtgaagaacgcgggcaaggacgccttccacctgcgcgtccgtgtgcaccccttccacgtgctgcgcatcaacaagatgctttcgtgcgccggcgcagacaggctgcagacaggcatgcgcggtgcgttcggcaagccatttggtgtgtgcgcgcgcgtgggcatcggtcagatcctgctgtccatccgctgcaaggacacgcacnctgcggtggcgga

SEQ ID NO: 3121 - DNA, 77 bp, Chlorella sorokiniana; identical to SEQ ID NO: 633
  Clone ID: LIB3602-032-Q6-K1-E10

SEQ ID NO: 3122 - DNA, 153 bp, Chlorella sorokiniana
  Clone ID: LIB3602-032-Q6-K1-E11
cgcctctggggcaactaactattggcggcaggacttgaccgttcgagttgctcgcagccttctcctcgctgatctgtgtgccaatcatcccccagcgcaaatttgattgcgaacacgtccgctcctgtccacgggcgttgtaactgaagtcac

SEQ ID NO: 3123 - DNA, 459 bp, Chlorella sorokiniana
  unsure (1)..(459): unsure at all n locations; Clone ID: LIB3602-032-Q6-K1-E12
agctgaagcgcttggtagcctcccccaactcctacttcatggatgtgaagtgccagggctgcttcaccatcacgactgtgttcagccacagccagaccgtggtggtgtgccccagctgcaacaccgtgctgtgcgtgcccaccggtggcaaggcccgcctgaccgagggctgctccttccgccggaagggcgactgagcgcgcccccgctagcggcagtgttggcgctgggcagcggttattgtgatgtccacgggcagcccgtagcagcggcactcgcactcctctcttgttgggatggagcaacaccttgcacgggcgtcggaggagactgatcgcccacagtgaggagcacgcggccggnggcctccgcccctgcagccgcgtgtgaagagccacgagtatagcaccccgcgctgccaggcctcgcggccggcgcgcacatatgactagcacccgc

SEQ ID NO: 3124 - DNA, 334 bp, Chlorella sorokiniana
  Clone ID: LIB3602-032-Q6-K1-E2
cgtgaaggaccttgagctgctgctgatgcacaaccgcaagtactgcgccgagatcgcgcacaacgtgtccaccctcaagcgcaaggcgattgtggagcgcgcggcggagctgaacattgccctgaccaacggcaacagccggctgcgcagccaggaggacgagtaagctgctcgcccccctgcgtcaccagcagcggcgccagtaccttgggagcatagcagcggcttacattggggtgctactgctcccatgtaaggcaccccaatcaaaaaaaaaaaaaaaaaacaaaaaaaaaagacaaaataaaactaaacaaacaagaacaccccatac

SEQ ID NO: 3125 - DNA, 245 bp, Chlorella sorokiniana
  Clone ID: LIB3602-032-Q6-K1-E3
ccgtgtctctcctgcctttcaacgcaccgcctcgtgttcgctccggcgtctgtctgtgccgtgttgtagccagttgcagctcacgcatgcgcttgaattcatttttttgcccccaccagcctgcatgcgtgccgcttcacagtgcatgcccgtctgtcgtgcagctaaattatccacgactcctgacgcgccccccattccttgccttcaaatgtgctctgacgcatgtgactcgcacagctggc

SEQ ID NO: 3126 - DNA, 62 bp, Chlorella sorokiniana
  Clone ID: LIB3602-032-Q6-K1-E4
aaaaaaaaaaaataaatttataaattaatttttggatttattacctataaatttttaatttt

SEQ ID NO: 3127 - DNA, 378 bp, Chlorella sorokiniana
  Clone ID: LIB3602-032-Q6-K1-E5
aggagctgcgctatgccgacctgtgagaccacagcgcgcacagcatgcacagctcggcgtgacacagcatggcgcagtgtgaagcggcgcagccaggcatgcaggagatgcaccgtcatgcacgggcaatgtatggcaccagccgcaaaccatcttcgtagcctcgccgctgcccctacagcctctgcccacctgtgcttggcagcgggcgcgacacattggtcgcacgccctagccccccattccattgtttcattttgctccgctcctcccctgccattcctacacttggtcttttacacaagtcgcaagctgccggcacacaacccataccaatgaatgctgacccccaggcccaaatgtaatgcctctacctaa

SEQ ID NO: 3128 - DNA, 382 bp, Chlorella sorokiniana
  Clone ID: LIB3602-032-Q6-K1-E6
gggcaagaaggtcgcaggcggcgcccgccgccgtgaagaaggcggcggcccccgccaagcctgtcaacccggtctatgagaagcggcccaagacgttcggcattggcggcgacctgccggccaagcgcgacatgcgccgctttgtgaagtggcccaagtacgtgcgcatccagcggcagcggcgtgtgctgaaccagcgcctgaaggtgccccctgccctcaaccgcttcacccagacgctggacaagaacatggccgagagcctgctcaagctgctgatgaagtaccggcccgaggacaaggcggtcaaaaaggagcggctgctgaaggaggcggaggcccgcgaggctggccaggaaggttgagaagaagaagccctgtg

SEQ ID NO: 3129 - DNA, 390 bp, Chlorella sorokiniana
  Clone ID: LIB3602-032-Q6-K1-E7
gccaccttctacgccctggccaacacctacggcttcctcacccccgacctctggcgcgagaccgtgttcaccaagagcccgctgcaggagtactccgacttcctggccaagccggtggttggcaaggcctactgagcggcctccccatgcccgccgccccgcgcgccgcggcggcaggagcagcagcgtaacagcagcgccctgacgcgaggatagatgagagttgggaccccagtggccgctggggcgctgcgctggcagggcaagccggcgccccggcacacacctcacaccctggtgttgcattgggagacccgtgtaacaccgaccgcgaaaaaaaaaaaaaaatagtatagtgcaccagagcaaaaaaaatgtaaacaaggatgc

SEQ ID NO: 3130 - DNA, 396 bp, Chlorella sorokiniana
  Clone ID: LIB3602-032-Q6-K1-E8
atccttgattctttgtttctatgaccgtgttactcaagagcctcctttttgagtactcccacttcctgaccaatccgttggttggcaaggcctactgagcgtgctacccatgcacggcggcccaggcgccgcgccagcaagaacaacaatgtaacaggcagcggcctgtgcgaggatacaccacaatggggacccgagagggcgctggggcactgcactgccagggaagcccgcaagggggggaacaccccccaccctggtggtggagggggaaacacgtgtggcaccgcccgcgaaaaagaatctctacgggggaggagaccccccccacagggggggggaaaacgggagaaacccctcatttcttttcaaaaaggagaggggggggggcccccc

SEQ ID NO: 3131 - DNA, 475 bp, Chlorella sorokiniana
  Clone ID: LIB3602-032-Q6-K1-F1
gcggagtatgtggcggctgaggcggactgggtggcgcgcgtccctgacaacctgcccctggagcaggcggcgggtgtgccactggtggcactgaccgcgtggcaggcgctggtgcaagccaagccccaggcgggccagcgggtgctgatcaatgccgcctccggcggcgtgggccacattgctgtgcagctggccaaggcgctgggcctgtttgtggtgggcatctgcggcaccaagaacgtggactttgtcaaggggctgggcgcagatgaggtggtggactacagcaaccagaacgtggcagacctgtacaaggacgcgccgtttgacattgctgtggactgcatgggcacccgcagcgccctgctgcaggccatgctgtctgtgaccaagcccagcggccacctgtcccacatcttcaatgcgggcagcgacaactcgctgattgaggaggcgcagaaggcgcatgcggagg

SEQ ID NO: 3132 - DNA, 437 bp, Chlorella sorokiniana
  Clone ID: LIB3602-032-Q6-K1-F10
caaggagggcatcccccctgaccagcagcgcctgatcttcgccggcaagcagctggaggacggccgcaccctggcagactacaacatccagaaggagtcgacgctgcacctggtgctgcgcctgcgcggcggcatcattgagccgtccctgcagatcctggcccgcaagtacaaccaggacaagatgatctgccgcaagtgctacgcccgcctgcacccccgcgctgtgaactgccgcaagaagaagtgcggccacacctcgcagctgcgccccaagaagaaactcaagtaaactactcgcttcggcacgagcggaagcggcatgagcggcagcaaccgcttgcccccccccgccccgccagccgggatgccatgacagcaccggctgctcagctgctgatgtgctgcatgtcaattgctgctgcggaaatgtaacg

SEQ ID NO: 3133 - DNA, 480 bp, Chlorella sorokiniana
  Clone ID: LIB3602-032-Q6-K1-F11
ttcccgtgggagctcaaaatgatcaacaccacagacgactgccccgacgcggactcggcgtacgagctgtttgcggtggtggtgcacatgggggcgcacccaaatcacggtcactacgtggctctggtgcgcacccccagcggccagtgggtgtgcttcgacgacgagcaggtcaatgcggtgaccgagtcgcaggtgcagagcgtgtttgggcacacccaagactggcatccaatgagggaagaccagcaaggcccgcatgcagaccacggctacatcctgatgtaccagcgcgtgcagcagcatgcagcgcccggagcagcagtggcagcagcagcagcggctgggcgggcggcaagaggagcggcggcagcggcaggtgcggccagcggccagccaccgccggcggcgcagcagcacctgcagttttaatgtgctgttgagttaaatgcggtctttactgtaacttttcggcactgc

SEQ ID NO: 3134 - DNA, 444 bp, Chlorella sorokiniana
  Clone ID: LIB3602-032-Q6-K1-F12
ctgattgactcgattgtgggcgacaacatccccatcctgacgggcgaggagaagtacaacgagagcgtgtccagctccgtgtcgcgcgtggtggccaagctgacgggcaaggaggaccccggaccgcccttccgcgccgaggccaaccgccagcgcacgtacaagaccaaggcggagactgatgccaagaagcccgtcacctccaccattgtgctcacgctgctcttcatctcggtggtggtgcccatgctgcagtactggggctacaccaacaaggactgagcgtggcagcctgaggtctgccgaatctcagcttcaaccagataattgcaaatctgttttgttactgttgtatgtaagcggcgtgtgcgcgggcccccgcccgattttctgcccgcgctgaccctagctgttgacctcgatgtgaggcatgtaacttggact

SEQ ID NO: 3135 - DNA, 353 bp, Chlorella sorokiniana
  Clone ID: LIB3602-032-Q6-K1-F2
ctttggccgcgcgctgcaggcgtccgcgctcaaggcgtggagcggcaagaaggagaacttacaggcgagccaggaggccttgctgaagcgcgccatggccaacagcgaggcgaccctggacaagggcgacctggatgccacaggcgagagcctgtacgtggccaactacgcctactgagcgggtggttgcaccagcacccacctggacgattccagactggtgcacccagcgcccaacacccacgtgccgattcagtgacagtgaatgaaagccgccgccggcgcggcagtcgggactgccctgctcacactcaccggggggtttatgaacgtatgcctggtgtcacgcgcgc

SEQ ID NO: 3136 - DNA, 451 bp, Chlorella sorokiniana
  Clone ID: LIB3602-032-Q6-K1-F3
aggaggcccaggccgccattgagcagttcaacggcaccgagctggagggccgcaccctgtctgtgcgcctggacaagtacgcttaaatgccgcgctgagctggcgcctcgtgtcagccagccagcagccgtcgtgccgcagccagcgcgccgccgccagggtgtggggcggcggtgcgagccgcacggtggtaccaaggggcacggcctggccttgccccgcccacccatccctgacgcaacagccgtgcccggcggggcggcagccgcagcgtgcttgccccacagcagccgctcccctgctgggcagacctgcctgccgatgtgattcgtcccattatttggtcgtcccatgctgcccgttgcggacagtctgccacgcgcgggctctctccctcgcctatacttcttgttcatttgctgcccgttctctggctctgcaaactctctgt

SEQ ID NO: 3137 - DNA, 288 bp, Chlorella sorokiniana
  Clone ID: LIB3602-032-Q6-K1-F4
gggccccgtgcagaacctgtccgaccacctggcctccccctccaccgacaacttctactccctgtacgccaagaccctggcgtaagcggcctgcacttgctcctgcttgagcctcgactggcggcgggcgtgaccctgtggcagtgcgctcccgcttgcgcccgctgcctgacttgacttcagctccactgttgcaccgaggggatggtgtaacatgtatgctggggaaaaaaaaaaaaaaaaaaaataaaaaaaaaaaaaaaaaacaaaaaaaaaaaaaaaataaaa

SEQ ID NO: 3138 - DNA, 453 bp, Chlorella sorokiniana
  Clone ID: LIB3602-032-Q6-K1-F5
agaaggccaaggccaagggcgtggagtttgtgctgcccaccgacgtggtggtggccgacaagtttgccgccgacgccgactgcaaggtcgtgcccgtctccgccatccccgacggctggatgggcctggacgtgggccccgagagcagcgagatgatcaagaaggcgctgtccgactgcaagaccatcctgtggaacgggccgatgggcgtgtttgagtttgagaagtttgcggcgggcaccaactccatctcccacctgctggccgacctcacggtcaaccagggcgccaccaccatcatcggcggcggcgactcggttgcggcggtggaggctgcgggcgtggcggacaagatgagccacatctccaccggcggcggcgcgtcgctggagctgctggaggggcaggtgctccccggcgtggcctgcctggacgacgcatgaaacggaggag

SEQ ID NO: 3139 - DNA, 536 bp, Chlorella sorokiniana
  Clone ID: LIB3602-032-Q6-K1-F6
ggagcgcaaggtgctggcccttcagcttgccgtattgtaacttttttgtgaacctttcttactcttttcctgatttacagggccgcgacctggaacgcaccgtgctggccaaggcggtgcgctggcacctgcaggaccgagtgatcgtgcacaacaaccgcaccgtggtgttcgagtgaaggagtgaggggcggacaacaaaccccgctatcggggcagcccctgcactgcacagtgcagcgcgacgctgcgcagcacagtatggcgcatgcgcatgatatagctggctgctggctgcctgcgccggctggcatggagcatccggcgcgtgtacagcccacacaggctcatggcatgtgccgcattggcgcaccctgagccctgcgcgccccgcatgctggcagccccctggcaccacccgctcttttcccagcctcgggctgcaacacctgagcactgaacgatagcggccccgattgggctacgcaaccaaaaccttttcctgtcctccttgcgtcgtttcggttggacactga

SEQ ID NO: 3140 - DNA, 459 bp, Chlorella sorokiniana
  unsure (1)..(459): unsure at all n locations; Clone ID: LIB3602-032-Q6-K1-F8
gcggtgaaggccgaggcggaggacaagcgccgcaagctgagcaagaaggagctggccaagaagctgcgcagcggcaccaccagcaagagcagctaggcggccgcccacggagcggcagcctgcggcggcggttgggggcggcgcctgagcagctgaacgccgccgccacgcggttgcatgaggaaccaacaacacatgtaacgccctagtccttcanaaaaaaaaaaaaaaacaaaaaatgtaaagaaaaaaaaaaaaaaaagaggacatgccaagcacacaaaaaaaagggtgcccccaaacacactgcaagggtgggttgcgccgatggccacccgcttaaataatgagggggggccgttttaaagaaacaaaattactgcaccctggataccaacaaaaaatttttttttaggggcccccaaaattaaatgcgcgggcgggggttacaaaaagggg

SEQ ID NO: 3141 - DNA, 383 bp, Chlorella sorokiniana
  Clone ID: LIB3602-032-Q6-K1-F9
agaccatcacgctcgaggtggaatcgtccgacaccatcgagaacgtgaaggccaagatccaggacaaggagggcatcccccctgaccagcagcgcctgatcttcgcgggcaagcagctggaggacggccgcaccctggccgactacaacatccagaaggagtccacgctgcacctggtgctgcgcctgcgcggcggcaactaggcggctggggcacccacccacctgccttcacacccatcgtgtgcggtaggagcggcgcgcgcgtgcacatgtagcatcctgccctgtaccctcaccctctgtaccccacccctgtaaccgccgcgctctatttattaaaaataaaaaaacaaaaaaaaaaaaaaaaaaaaaaaaaataaa

SEQ ID NO: 3142 - DNA, 442 bp, Chlorella sorokiniana
  Clone ID: LIB3602-032-Q6-K1-G1
cgtacatcgacgagaagctggtcggcgaggtgcccgcacccgcacagacggttggcggcgaggtgcctgcccccgcgcagtaagagcagcacccgttgccactcggcgcacctcagcgcaggcggctgtccctcggtccgcattccgacccccgccctgcgctcgtgtgccggccaaacctgagcgcgcagctgctgagcagccaccgctcgccccagtactatacatacgattgtgctcacccgatgtgcgtgcaacccaactgccgtttcatttgcccagccagctgaaaattgtggcggcaccctcggatggctgacgccgcctgccgccaatcgccgccttggcgctccagaaccaaccccggaatccgcccctgaacccttgcaccctgctcttattttgtttgcacacccggtcctggtgctcccccccccccctc

SEQ ID NO: 3143 - DNA, 491 bp, Chlorella sorokiniana
  Clone ID: LIB3602-032-Q6-K1-G10
aaaaaataataaaaaataagaaaaaaaaaaaaaaaaaaaaaaaaaaaaaaaaaggaaaaacagtaggggagtgaaacaaaattaggtaggggtgcgtgctattaaatatcggggctctggtgccccggtctccgatttcattgtgtgtctttcctcaactttatcttctttacagcggtggtgtttcctatcttttgggcctggctttaccttgccctttcccaagttaccgtggttgttcccaattccccttccttcggctttaccaacttttacccgcccgtgttggtttgttattcgcacattttgttggctctttatgcgaattggccctccctctgtccctttgcttttccccttgtggtggtgattttttcccgcacggtgtctttttttttggcccttgcccccgccccctgtccttgggtttttcccttttgtttttagtttgggtgcttccctttccccccccattttttagtttttccccc

SEQ ID NO: 3144 - DNA, 423 bp, Chlorella sorokiniana
  Clone ID: LIB3602-032-Q6-K1-G11
aaaaaaaaaaaaaaaaaaaaaaaaaaaaaaaaaaaaaaaaaaaaaaaaaaaaaaaaaaaaaaaaaaagggggggggggcggccggtctataggttcctaccttcccttccctgccatgcaatgtctttttttttttatcgcgtaacctaaattcattggactggccgttgcttcacaacggcgggaatggaaatgccctgcccttacctaacttatttgccttgcagccctttcccttttggccaggtggcgtaaaagagaagaggcccgacccgttctcccttcccttcagttgccctacctggatggggaatggcccccgccctgtaccgttactttaaggcggggggggtgtggtggtttcgcgcagcgtgtccttttcccttgccagggcccctacgccccgttccttttggtttcctt

SEQ ID NO: 3145 - DNA, 456 bp, Chlorella sorokiniana
  unsure (1)..(456): unsure at all n locations; Clone ID: LIB3602-032-Q6-K1-G12
tccgctctcgtcctccctgcctacctggtctgcctgccctagtgtgctggactggtagcaccctttgctgccccagcgtctgtctgcctctgcctccttgtgctttcatgcagctttcatgcagcttatgcagcatcgttgcggctgtcccgctgttcacccctttgcctcacctccctgcccctgctagctccttcccctccccacaaatgaacccaacagctggcctcgctcggctgtgaaccagcccctaaccttgccagaacaattcgttcgcttcgcgcgcttgcaccctccatactgcaccgntgccgacccttcttcccttccctcctgcacaccaaaacaccctgctgcacacgtncctgccactcgcccggcgattgatcccgggagggttgaacccttcaacccgctgcgcggntttttccccttcaatttttgcagttgtaacat

SEQ ID NO: 3146 - DNA, 298 bp, Chlorella sorokiniana; identical to SEQ ID NO: 2656
  Clone ID: LIB3602-032-Q6-K1-G2

SEQ ID NO: 3147 - DNA, 448 bp, Chlorella sorokiniana
  unsure (1)..(448): unsure at all n locations; Clone ID: LIB3602-032-Q6-K1-G3
gacctgattgactcgattgtgggcgacaacatccccatcctgacgggcgaggagaagtacaacgagagcgtgtccagctccgtgtcgcgcgtggtggccaagctgacgggcaaggaggaccccggaccgcccttccgcgccgaggccaaccgccagcgcacgtacaagaccaaggcggagactgatgccaagaagcccgtcacctccaccattgtgctcacgctgctcttcatctcggtggtggtgcccatgctgcagtactggggctacaccaacaaggactgagcgtggcagcctgnggtctgccgaatctcagcttcaaccagataattgcaaatctgttttgttactgttgtatgtaagcggcgtgtgcgcgggcccccgcccgattttctgcccgcgctgacccttgctgttgacctcgatgtgaggcatgtaacttggactg

SEQ ID NO: 3148 - DNA, 509 bp, Chlorella sorokiniana
  Clone ID: LIB3602-032-Q6-K1-G4
tgccggcttccagtggatcacagtggatggcctgctgctgcagatgcgcttctgccaccagctgcccacgctgctgacctgcttcctgttcaacgtgggggtgatcccgcagttctgccgccggtaccacagcgaccttgagccgcggtactgcgcagctgtggcggcatggcgcggcttcctgtgcctgctggcaccgctgctggtcatctacctacttgagctgcggatgcggcgagcctggctgctgcagcgccaggagcgagagcgaattgaggagcagcagcgagagcagctgcgggcggagcagcgggaacgatggcaccgtggcaggggagacgctgctaatgctgctgcttggggtggcacttgataaagtacatagccgcatgatctctacttagcgcttgcatgcaatctctgaaatatatattttcccaaaacgctcgagtgatgagagttacaagacccttccgtgcggcaccatgacaatagccaatttgtaatga

SEQ ID NO: 3149 - DNA, 278 bp, Chlorella sorokiniana
  Clone ID: LIB3602-032-Q6-K1-G5
cgaccgcctgcggatcaacggcagcctggcgcgcgccgccatcaaggagctgctgggcaaggggctgattaaggaggtggccaagagccgcgcgcagcagatttacacccgcgcgacggcagccgccagctaagcagccacccagcagtttggcagcatgctagtgcactcgttgtgcttgccaatctggtaacaggtccctcgcaaaaaaaaaaaaaaaaaaaaaaaaaaaaaaaaaaaaaaaaaaaaaaaaaaaaaaaaaaaaatgggcggccgtt

SEQ ID NO: 3150 - DNA, 358 bp, Chlorella sorokiniana
  unsure (1)..(358): unsure at all n locations; Clone ID: LIB3602-032-Q6-K1-G6
gcgcggcgccgccactcagccctctctccctccccttgccccctccagccgttgcctgccttggcccaccgatcccgccaatctctgccctgtgcctcggaccctttcctcccatgcccatgccacagcacaacccaacttccgccacgattccgccaatgcgcttttggccctgccttctttccccgtgcggccccagcgctgcacccaaaacaagccgcgcgttttggggcgctgagagacgctggctgcaaagcgccaagcgggaggcgcccctgcggcgcatgcacagataatgcctgcatgctgaagagacgatctgcccagcagcccaacctgtaatgcctgggactcanat

SEQ ID NO: 3151 - DNA, 400 bp, Chlorella sorokiniana
  Clone ID: LIB3602-032-Q6-K1-G7
cgtccatcaacaagcaactgtgccgcgcggtacccgctcccgcacagacaagaagctgcgctagagggtgccgccgacactaacaatacctccctgtagccctctgcgcacctcaacacacatccgctgcaactccaagcgattccagtggcgcccctccaatctggggatctacaaacctgcaacgcgcagctgatgagcagacacacgctcgccccaggactatacataccattgcgctcacccaatgtgcgtgcaacccaactgcctgttcatttgcccatccagctgaaaattgtggcggcaccctcagatggctgacgccggctgccgccaatcgacgccttggcgcttcagaaccaatccgagaatatggctcttatatattgtcccctaattt

SEQ ID NO: 3152 - DNA, 223 bp, Chlorella sorokiniana
  Clone ID: LIB3602-032-Q6-K1-G8
cgccaagtttgtgagcatgctggcggagaagaagatcaaggaggtcggcggcgcggtgcagctggtggcgtaagcacccccacgcccacccgcagcagcagcagcagtaccccagcagccccgattgactcctgagagcttgcccgcccacgcaaagcggccacatgcctgccgggggcgccccccggcggggccttagcgaggcgtgtaacccgcacctcgg

SEQ ID NO: 3153 - DNA, 61 bp, Chlorella sorokiniana
  unsure (1)..(61): unsure at all n locations; Clone ID: LIB3602-032-Q6-K1-G9
gtaagattgccatgtgtnaaaaaaaaaaaaaaaaaaaaaaaaaaaaaaaaaaaaaaagaag

SEQ ID NO: 3154 - DNA, 216 bp, Chlorella sorokiniana
  Clone ID: LIB3602-032-Q6-K1-H1
gggcgcgccgccgctgcatgcactgacgggcgggattacacgcccccggtgttgcctggcgagcggccgcccgacacgaatctgattctgcttcaaaccccgaccagaccctgtttgagtccagttgttgtcccccattcgccagcctgtcacttcccattcaatcacttcgctgttgcctccccatatccagccacgtgcaacacacccctcagg

SEQ ID NO: 3155 - DNA, 270 bp, Chlorella sorokiniana
  Clone ID: LIB3602-032-Q6-K1-H10
ttttttttttttttttttttttttttttttttttttttttttttttttttttttttttttttttttttttttttttttttttttttttttttttttttttttttttttttttttttttttttttttttttttttttttttttttttttgggggggggaaatttttaaatttatgggtgggggggggggtttttttttttaaaaaaaccctttttgaaaaaaaaatatttccccgtcctttttgaaaaaaaaaaaaaaaatttcccccccc

SEQ ID NO: 3156 - DNA, 390 bp, Chlorella sorokiniana
  Clone ID: LIB3602-032-Q6-K1-H11
cgccagcgcctgctggtgcgcaccgtttatgtgggtgccgtgactctagtggccacggtgctgcccttcttctcagacatcgttggtctggtgggaggactcacctacttcccgctctccatctatttcccatacaagatgtacacagcggtgtaccggctccagaggctgcgccgtgcagccatggtggccgttggggcgctgatgctgatggtggctctcgcagccacagtcggcgcggtgcatggaatcgcacagaacgccagcagctatgaattcgttagttagcggcgcaagctgctcagcagtctccatcgacgccctcacagccatgcagcgtgcagctgggtgtcaccaacagcgcgcacccaacgtgctgcgccgcaacag

SEQ ID NO: 3157 - DNA, 418 bp, Chlorella sorokiniana
  Clone ID: LIB3602-032-Q6-K1-H12
gcaggcagagggcatgcagccgccagcggcagacactccctttgcgggggcggcagcaggggaggagggtagggggctggacctccagcctggcgcagtgcggcagccttcgcgcagcctaccagacacgccctttgctgcgctggccagctttgcgcgcgagccgtcctccacgctggcctcccctccccaagaaccagcggagggcgggagcagcggcagcaagtcgcgcaaggccagcacgtaggcccgcctgcccagattctttcctgcatttccaaatccgtgtgagagtgagatgtgttgtgcccatgagtgctgcgagccaagcaaacgcaatctgcctgaccatgaacccctgttgacctccatgcatgaagtctttgcctgatttgatgaggcatgcaaccagcaactg

SEQ ID NO: 3158 - DNA, 263 bp, Chlorella sorokiniana
  Clone ID: LIB3602-032-Q6-K1-H2
aaaaaaaaaaaaaaaaaaaaaaaataaaaaaaaaaattacaaaaaaaaaagaaataaataaaaagaggaaggaaaaaaaaaatagtaatttggggtggcggcgccttttaaatgagtcctcaattttattcacttgtttttccaaattctttactctttttttgtgcaacctaactttattttattggccggggttttacagcgtcttgccctggcaaaccctctgttttacccaatttaataggtttggagcaattcccctt

SEQ ID NO: 3159 - DNA, 379 bp, Chlorella sorokiniana
  unsure (1)..(379): unsure at all n locations; Clone ID: LIB3602-032-Q6-K1-H3
gactagttctagatcgcgagcggccggcctttnttttttttttttttttttttttttttttttttttttttttttttttttttttttttttttttttttttttccggatggggggggggcccatgaatgggatcctggggatttgtttgttcaaaagtggggtcgtagcgcagtcagcaattgaaagcaggggtggcaggggggcagcgggcaacaaaaacaaacggggagcggaagcagggacgggggaaaaaacactgggcattggacgttggcaaaggcccttggcaacgatggaggcccgggctggccaacaacgagctacaaagctagcttcccagtttggcttcggagcaaggaccgggcaaaaggcttgggc

SEQ ID NO: 3160 - DNA, 462 bp, Chlorella sorokiniana
  unsure (1)..(462): unsure at all n locations; Clone ID: LIB3602-032-Q6-K1-H4
ccttgccgactgcagcagacatctgagcaaccatgggtaaggtgcacggctcccttgctcgtgccggtaaggtgcgcggccagacgcccaaggtgcccaagcaggagaaggcgaagacccccaagggccgcgcccgcaagcggctgcagtacaaccgccgcttcgtgaacgtggtggtgggcttcggcaagaagcgcggccccaacagccagtaagctgactgcggcgccagcagcagcggcaggcatgtgctgaacgcacggagcgcaagcgcgtcccgcgcacagccgccaccgaagcggcctgccagtgtcgacggcagcgaggcagcaaggcgcggcctggcatgctagcagcgcgtactgcgcgccacggcgctagcagccgcaccctggaacagcatcagcagtaattcagcagcccacctgcatgccgaacgctncgctgtaacaggttctcagg

SEQ ID NO: 3161 - DNA, 461 bp, Chlorella sorokiniana
  Clone ID: LIB3602-032-Q6-K1-H5
cgtcaccatgcaggccgctctcgctcagcgtctggctctggtcaagcccacccggggcgcccgcaagcaggtgacccgcgccgccgtcgagttctacggccccgaccgcgccaagtggctgggccccttctccgagggctccgtcccctcctacctgaagggcgagttccccggtgactatggctgggacaccgccggcctgtctgccgaccccgagaccttcgcgcgctaccgcgagattgaggtcatccacgcccgctgggccatgctcggcgccctgggctgcctgacccccgagctgctgcagaacaacggcgccgctgacttcggcgaggcggccgtctggttcaaagccggcgcttcgatcttcaacgaggacggcctgaactacctgggcaacccctccctgatccacgcccagtccatcgtggctgtgcttgtgacccagctagtgatcatgg

SEQ ID NO: 3162 - DNA, 422 bp, Chlorella sorokiniana
  Clone ID: LIB3602-032-Q6-K1-H6
agcgaggcatggaggcagcccggcgccgcctcgactcccaggtgctgcgccttgcagtgctgggcggcaccgacggtggtggcgctgtgctgtggcgccaggagctggccaagacgacacaggagctgctcaggctgtaccagcagctggagagcgtgctgcgccccgtgctgcgtgctggcagcatgcctgggctactagacgacttgcctgggctgctggacgccgacgccggcatgcctgcgctggaggcagattttgatgaggacctctcagactcggacgacgagccgccgcagctggcagctgcgggccgccgggcgcggccgggcgcggccaggcgggcgcaacgcgcatcgggcggcgccggcgctgcttgcgcagcagctggcccccgtcttgccgctctggagcggttggag

SEQ ID NO: 3163 - DNA, 84 bp, Chlorella sorokiniana
  Clone ID: LIB3602-032-Q6-K1-H8
aaaaaaaaaaaaaaaaaaaaaaaaaaaaaaaaaaaaaaaaaaaaaaaaaaaaaaaaaaaaaagaaaagggttgggggggccgtt

SEQ ID NO: 3164 - DNA, 485 bp, Chlorella sorokiniana
  Clone ID: LIB3602-032-Q6-K1-H9
ggactcgcccatcccttgcaccaacgaggaccccgtgctgtttgacactgcggagatcccctggtgggcgtgggtgcgccgcttccacctgcccgaggcggagaagctgaacggccgcgccgccatggttggctacgtgctcgcgctgtttgtggaccagctgacgggcgtgggcctgctggaccagcaaaactcgttcctgggcaaggtgctgctgcacgtcgccgtgtttggcatcctgctcatccgctcctcctctgacattgacaagttccgcggcctgatcgacgaggccaccttctacgacaagcagtggaacgcgacgtgggagggccaggagcggcccagcgagtgagccgcgtgacgaccggtggcggcagcaggcgcaccattctgcgcctctacctgccaggtgccaccttcggcagcagcagcagcagcagcaatgccaacatgaaacgttacacgtcactctcaaagcacta

SEQ ID NO: 3165 - DNA, 449 bp, Chlorella sorokiniana
  unsure (1)..(449): unsure at all n locations; Clone ID: LIB3602-035-Q1-K1-A1
cgcttcgccaacaagtactggcgccaacgtggaaccggctacagacccgatctacacccccgacacctggtccgagtctggcgactcttacaagctgggcaccaagggccttattgcttgggccggcctgattgtggtgctgctgggcgtgggcatcaacctggtgatctccacctctgccctgggccagtaaatggcgacgccccccgcgtcggcagcagcagcagcagccagcagcattcccttgcagctaccccccgagaagacaaaccctcaccctaccctagctggcggcgtcaccatgcgccgctcccttgctttccgtttcactgtccctttcgttcctgcgttcgtttagtggaggaggcccgcctgtgtacctgacctggtggccgcgtttttggttgagcggcttgtagccgcacatctgtattatcagctacgtcnaa

SEQ ID NO: 3166 - DNA, 347 bp, Chlorella sorokiniana
  unsure (1)..(347): unsure at all n locations; Clone ID: LIB3602-035-Q1-K1-A11
cggcgaggcagcagagcgctctgcccgttcatcataagtaagctgccacgcgagccgggttgcccctgtggtgcggccgaccagccgcaggctccgacatgttttgctcccctgtacgtctcccttcgccctgcctctcttccacactctacactctgctctaacctcttcctctcttctctgtcttcccctcttttcactcccgcctccactctctgccctcctcctcagctgaactgcttgagggtgccccactgcatgctcccgagctcatgcattgtgcactgcattgcatcttgcccagcgcctaacaacgcgggcaagccacgtgtggcatttacagccna

SEQ ID NO: 3167 - DNA, 606 bp, Chlorella sorokiniana
  Clone ID: LIB3602-035-Q1-K1-A12
cttctgggaccagtgcaccggcggcagcgcaaaggcacctactgcgagccatctgccattgcgggcacgctctgtgtggagatgcccggcatgaagggctgcgaggcgtggaacgcgctgtgcgccgctggcacggctgtggcgcagtgcagcagcccggggcccgtgccgggcgcgccctccagcagcctatccaaggagggcattgagagcctgtgcaacacgcactgcatggatggctgcggtgattgtgaggctggcaaggacttcaacacgtgcactgacccgctgctcatcctggcgcacatgtgctacgccatgcctggcatgcccgagtgcctgacgccgcccaccggcaccggcatcaatgacatgtgtgccaatgaggaggtggcggccaccttcccgctcacgtgcgtcaacccgcccagccccgccgccaagtgcccatgaccgcatctgagcagctgtggtgtatccatgcgccgcgtccgcctccattaggcggccttccacagcctggccaccaatcggcagctagccgctgccacggactgactgcattgagtgccgctgcggtgccactgctgcaatgctgtgcgctcc

SEQ ID NO: 3168 - DNA, 384 bp, Chlorella sorokiniana
  unsure (1)..(384): unsure at all n locations; Clone ID: LIB3602-035-Q1-K1-A2
ctgcgtaccgtccgnattcccggtcgaccccgcgttctcgcttctctcgctgtcgcctcctcgcctcctgacctgcttgctttgttggcttgaccctgcttttcgcccaccctgtgattgtactacttcttttctcctttagttcgatgtgcccgcggctagcgcctgtcctgcactcatgccccntctgaaaaacaaaacaaaaactgcactgcatgtcactttgcatttccttgcacctcggcatctccttgtgctcacccttggcgctccctcgtccttacgccgtgttgctcgctgacccctgtcgctcgatccctgcctggctgacttttgattctcgctgaactgcacccaacagcaagacgcacacatgtaacgaac

SEQ ID NO: 3169 - DNA, 606 bp, Chlorella sorokiniana
  unsure (1)..(606): unsure at all n locations; Clone ID: LIB3602-035-Q1-K1-A3
gnattgagcagcagttgaacgagnacggcgcnaggggagcaccaggcgggccttacattgctgagcagcacattcgcgaggcggtggcgctgctgcagcggtggggcttcagccaggagcagctgaacagtgtgctggctgacagtcgagtactcactcggacggcggccgacattgaggctgtgctggtctggctgcagcggcagttcgggctgcagcgtgttgaagtggccctagcttgcagccgtcagcctgcaatgctggcacagaagcaggaaacgttgcaggccaactggcgggcgtttgaagcggcataccagcccgcagcatcggcaaggactgcattggcagctgccctgcgggcggggcgagggcatttcctgcggttcaagccaaagacaatcagggagaaagtgcaccagctgcagcagctgttctttgttgacgaccgcagccttccaaagcacatcggcgagatggcagccctcctcgccttggacatccctgggaccatccagccgcgcctggccttcctgcaggccctgacaggtgtgccgaacgataagttggcttcgcggctactgggctatcatggcctgttgcaac

SEQ ID NO: 3170 - DNA, 444 bp, Chlorella sorokiniana
  unsure (1)..(444): unsure at all n locations; Clone ID: LIB3602-035-Q1-K1-A4
cggtcgacccagcgtccgcttcgacccctgggcctggctgacgaccccgncaccctggctgagctgaaggtgaaggagatcaagaacggccgccttgccatgctgtccatgttcggcttcttcatccaggccatcgtgaccggcgagggccccatcaagaacctgaacgaccacctggctgacgcctcggctaacaacttctacgccctgtacgccaagaacctggcgtaagcacttgtcgtacgaacgtacgaggcccgcgcgcgattgtgcgccccttgagaagatcacacgaccctgtcgcaccgcactgccgcctgtacgcacccaccatgtgtatgtgctagagcctatgaagttttgtgtaagcccttgatactcctannaaaaaaaaanaaaaaaaaaannaaaaaaaaaaannnaaaaaaanaaaaaaanaaaaag

SEQ ID NO: 3171 - DNA, 584 bp, Chlorella sorokiniana
  unsure (1)..(584): unsure at all n locations; Clone ID: LIB3602-035-Q1-K1-A5
gctgacggggnatgtggaaaggcggntgcagacaagcaggcggcagcagacgctggggacagtgcggcagcggccaagcggcagaaaaaccgaggcggcggctggcggcgccggcgcagctttgccggcagctggcctgagcgagaacctgctgacggcatgccgcttctatgatcgcgagtgtgctggctacctggcagacgaggacctggaggagattgcttacatggtttccgacagcctgtccaggaagcgcgtgcaaggcctggttgactcggtcgccaagcgcagcaagttcagctacctggagcacgccagcctggtggtgccacccgcggagccgccagcagctgcagccggtggcggcagcggtgtaacgacgagcgagagcggcatggtcatgatcaacggaatggcggtggacgtgcctgcactgcagcagcgcttggccgcagcagacgctgcacggcgcgcggccgaggacggacagcgaactgcggagcaggcaaaggcagacgctctggctgagagncagcgtgcgcaggaagggcatgaggaggctgtgctgggagcttgcaaaggca

SEQ ID NO: 3172 - DNA, 338 bp, Chlorella sorokiniana
  unsure (1)..(338): unsure at all n locations; Clone ID: LIB3602-035-Q1-K1-A6
ggcggctacgggggaggctcctcaggctacggtggcggcggctacggcggtggtggcggcagctacggtggcggtggctatggcggtggcggcggtggcggcggcgcccccagggccccccagtccttccgcgaaggcgactggtactgccccagctgcaacacccacaactttgcctcccgcggccagtgcttcaagtgccaggcgccccgcggcgactgagcgtgacatggcacagcacacgcactgtgcatgccgccgcccggcggcagagttgcagcacagcggcgnggtgcagggctacctgtgcgcatgccggctggagcagccgctgttgc

SEQ ID NO: 3173 - DNA, 604 bp, Chlorella sorokiniana
  Clone ID: LIB3602-035-Q1-K1-A7
agcgcagccacccgcgccacgcccttcgtggcggcggcccgcagcgtggcgccccgcagcagcaggcagcagctccgagcagcagcgacggcagcccccgaggcgccggcagcggccagccgccctgagcccagccacggcactgcagcagagtcgtacgcggtggttgagattggcggccaccagctggtggtggaggagggccggtggtacaccgtcaaccggctcgaggtggcgccgggcagccgcatccagctggggcgcgtgctggcgctgaagcagggcggccagttcagcgtgggccagccgtacgtggagggcgccacggtggaggcggaggtgctggaggagctcaaggggcctaaggtcatcatttacaagatgaaggcgaaaaaacatttccgccggacgaatgggcaccgccagcccctgaccaagatcctggtcaccaagatcacccagtagagagttggccccatctcaggccgtcggcgccgttcggcacgcaattcttgtgccatgccgcaatctctgctcttctcgttttcccctgatctcgttctgcccagtagtgtctgccttagcagcatgtgaacacataagg

SEQ ID NO: 3174 - DNA, 147 bp, Chlorella sorokiniana
  unsure (1)..(147): unsure at all n locations; Clone ID: LIB3602-035-Q1-K1-A8
ccggngtcgacccacgccgtccgnaaaaaaaaaaaaaaaaaaaaaaaaaaaaaaaaaaaaaaaaaaaaaaaaaaaaaaaaaaaaaaaaaaaaaaaaaagaaaaaaaaaaaaaaaaaaaaaaaaaaatggggcggcccgtatctgggg

SEQ ID NO: 3175 - DNA, 576 bp, Chlorella sorokiniana
  unsure (1)..(576): unsure at all n locations; Clone ID: LIB3602-035-Q1-K1-A9
cccttcagtcacccanaagccagcagccatgcagaccgccgctgtgcgcgcccccatcgtggcttcggcccagcagcagaaggccgcccccaagcgaccgtggcggccctgccccgtgtggccaaggccctgggtgccggtgtggcctccctggccctggcgctgagcgccaacgccgccactgtgaagctgggcgctgacaacggcgcgctggtgttcgacccctccaacatcaccatctccaagggcgagtctgtgacctttgtgaacaacgccggcttcccccacaacatcgtgttcgatgaggacgatgtgccctctggcgtgaacgccgaggcgatcagccgcgaggactacctgaacgcccccggcgaggagttcaccgtcaagctggacaccgctggcgagtacggcttctactgcgagccccaccagggcgccggcatggtcggccgcatcaccgtgaactgagcgcagcatgctcagcgccgcggcgtgcactgacccatttttgaagcacttgctgtctctcttcggttgactggcctctattcagggtgtaacgctacacacgcc

SEQ ID NO: 3176 - DNA, 578 bp, Chlorella sorokiniana
  unsure (1)..(578): unsure at all n locations; Clone ID: LIB3602-035-Q1-K1-B1
ggnaaagncagcggctctgcaacctggcggagtccgtccagactttcggccgcaagaagaagcggtggctgtggcctatgtgaagcgcggcaagggcgagatccgcctcaacggcgccccgctggagctggtgcagcccgagacgctgcgctggaaggcgtttgagccggtgctgctgctgggcaagcagcgcttctccaacgtggacatccgcatccgcgtcaagggcggcggccaggtgtcccagatctacgccatccgccaggccatctccaagggcattgtggccttctaccagaagtacgtggatgagcagagcaagaacgagatcaaggacatcctgctgacctacgaccgcacgctgctggtggccgaccctcgccgctgcgagcccaagaagttcggtggccacggtgcccgcgcgcggtttcagaaatcttacaggtgaaggctgccccgtgggacggttgggcgcctctggaggcttcttctgcgccgctggcgtggcggcagcggcgtctgcggcctaggcagctgccctggagcagcatgccctcagcgaaagcaccatgagtaca

SEQ ID NO: 3177 - DNA, 331 bp, Chlorella sorokiniana
  unsure (1)..(331): unsure at all n locations; Clone ID: LIB3602-035-Q1-K1-B10
ggccgccagtctggnacgccagctacagcacgttgccgcgctcgatggccctgccaaccagcctcgacgcacagctgaagcgctgcaacacacccgtgacaaaccgtgcaacagcagccacacactgcgttgcttgaaccccctttccgtgacccaagacccgatccattccgtgatctctcccatctgcaacccagcacactcccccattccctggaccccatgcatgaccctcccccctccctgaccccgaaccattccgatgaatgaaaccacccccccgccgctgtgcttgccccacacatgtgtacagatgtaagcacacagtcca

SEQ ID NO: 3178 - DNA, 618 bp, Chlorella sorokiniana
  unsure (1)..(618): unsure at all n locations; Clone ID: LIB3602-035-Q1-K1-B11
ctcctgcgctattcggcgcagctggcgcaccagcaagcggccagcacctccacggcggtgcaggcagcagcatgcgcgggcagcaggcggtggttcgctaccaacagccatgacatcttcaacacgcaccgccacgaggcgcacaacaactgggacaccgagttcgatttcaccgatgccaactacgagaaggttgcggagatcatgtcgcgctaccccaccaactacaaggccagcgcggtcatcccgctgctggacctggcgcagcagcagaacgagggctggctcagcctggcggccatgaaccgcgtggccaagatcctggacatggcggagatccgggtgtacgaggtggccaccttctacaccatgttcaaccgcagcaagatgggcaagtaccacgtgatggtctgcggcaccacgccctgcatgctgcagggcgccaagggcatctacaaggcgctgaaggagcacctgngcattgactacggccagaccactccggacgggatgttcacgctgggcgagatggagtgcatgggcgcgtgcgtcaacgccccccatgattgccatcgccgactacaccaagggcgtggaggggcttctctacaactacta

SEQ ID NO: 3179 - DNA, 89 bp, Chlorella sorokiniana
  unsure (1)..(89): unsure at all n locations; Clone ID: LIB3602-035-Q1-K1-B12
ccgggtcgnacccacgccgtccgnaaaaaaaaaaaaaaaaaaaaaaaaaaaaaaaaaaaaaaaaaaaaaaaaaaaaaagggcggacgaa

SEQ ID NO: 3180 - DNA, 585 bp, Chlorella sorokiniana
  Clone ID: LIB3602-035-Q1-K1-B2
gggacgtgcacatctctgtggcgctcatggacgagttcatgcgctacgcggtgagtaacacgcgtcggggcatcgagacgtgcggcatcctggctggggagctgagcgcggatgatgcggtgttcaccatcaccaccctcatcgtgcccaagcaggagggcaccaccgacacggtggagatgctgaacgaggaggagatcttcgaggtgcaggacagccgggcgctgtacccgctgggctggatccacacgcaccccacgcagacctgcttcctgtcgtccgtggacgtccacacacactgcggcttccagacgatgctggacgaggctgtggccattgtgatggcgcccaaggacccatccaagcgcgtgggcatcttccgcctcaccacccccggaggaatcaagctggtgcagcgctgcccgcagcgcggcttccatgcacacccgcccaccgacacggggcagcccatctacgagctgtgcggccacgtgtacctcaacccccgggccaagtacgaggtggtggacctgcggtgacgagcggagagggccccccctgccagcatgctgggcggggcggcga

SEQ ID NO: 3181 - DNA, 99 bp, Chlorella sorokiniana
  Clone ID: LIB3602-035-Q1-K1-B3
tccgcaaaaaaaaaaaaaaaaaaaaaaaaaaaaaaaaaaaaaaaaaaaaaaaaaaaaaaaaaaaaaaaaaaaaagaaaaaaaaaaaaaaaagataaaaa

SEQ ID NO: 3182 - DNA, 547 bp, Chlorella sorokiniana
  unsure (1)..(547): unsure at all n locations; Clone ID: LIB3602-035-Q1-K1-B4
aaccccggtcgacccagcgtccggcattatcttgcaggcccccgnattgctgcgaggcggccgcgcctctactgccagcgatgtcttctcgtttggcgtggtgctgtgggagctgctgacgtggcggctgccctgggccggcagcggcctgacgcccttccagatcggcgccaaggtggtggcgggggagcggcttgagctgccacctcgcgaagcactgcccggaccagacacaggcacatttgccggcctggatgcctactgtgcactgatccaagagtgctgggcggcccagccggagcagcggccgggcatggcacaggtggtgcggcggctgcgagggctgctggagcagcacagcagcacagcggcgcagcggcggggcaggcaggcggcggcggctgaatgcagttcgtgcatgcctgctggctgggctcactgaagtgccatcaatattacatcatgagccaacatttaagttatgcggctgcnnnaaaaaaaaaaaaaaannaaaaaaaaaaaaaaannaaaaaaaaaaanaaaaang

SEQ ID NO: 3183 - DNA, 145 bp, Chlorella sorokiniana
  unsure (1)..(145): unsure at all n locations; Clone ID: LIB3602-035-Q1-K1-B5
tccgnaaaaaaaaaaaaaaaaaaaaaaaaaaaaaaaaaaaaaaaaaaataaagaaaaaaaaaataaaaaaaataaaaaaaaaaaaaaaaaaaaaattaaaaaaaaaatataaggggtattagttttaagggattttgattttttt

SEQ ID NO: 3184 - DNA, 347 bp, Chlorella sorokiniana
  unsure (1)..(347): unsure at all n locations; Clone ID: LIB3602-035-Q1-K1-B6
ggggggggggggggagacagggggggggcagggggaagaagaaaaaaaaccggctacacccaaaaggcgaggggggggggggttggagggcacaaataggggggggggggggggggggaaaatttttgggtntaaaaaaaaaaaaaagggagggggcgggggggggaaaaaaaaaccccccggggggggggtnagggggggggggcttctttaaacacccccnaaaaaaaaaggtctcttcaaaagggaaaaaacgggggggggaaaaaaaaaagagggtgcgcccgccccggggcaaaaaatggggagggggggggggaaaaaaaaaaaaaaactagggggggggg

SEQ ID NO: 3185 - DNA, 453 bp, Chlorella sorokiniana
  unsure (1)..(453): unsure at all n locations; Clone ID: LIB3602-035-Q1-K1-B7
cgtacctggngcgccagttcgagtcattcggcggcgcttcgctggacgacctggtcaagcatgcgctgcacgcgctgcaggcctcgctgcaggatggcgagctgactgacaagaactgcagcgtggcggtggtgggcaaggacaccaccttcacgctgctggaggacgaggccctggcgccctacatcacagctgttaaggaggaggagcccgcggcggcgggcatggaggcagagcagccggcggcagaggaagagggagccgctgccgccggcggcgagggcgagcagcagggcggcggcggcggcgacgagggcggcgcggcccccatgcaggaatagagttgcggtggactgttgaatggaagcaggcaaactgcacatcactgccggcccgccctgggcacagcagctgtaaatgtaccgtcgagaaaaaaaaaaaaaaaaanaaaaa

SEQ ID NO: 3186 - DNA, 482 bp, Chlorella sorokiniana
  Clone ID: LIB3602-035-Q1-K1-B8
cgccgctgctgctggcggcgcggcgcgggcacacgcaggcggtgcagctgctgttgcagcatggagctgccaccgacaagcccaacgcgcgggcgtcactccactcatcgccgccacgttgttcggccacgatgagacggtggctgcgctgctggccaggggtgcgggcatcactgtgcgggacgcgactttcaagcgcacgccgctgcactttgctgcgctggccgacgccgagcgtgtggcgcgcctgctactgcagcacggtgccgacgctgctgcggtggacaccagcggagcgacgcccatggacctggctgttgagtacgaatgcaccatggtagtgcgtgtgttcaccagccgcggctgagggccagcaagggagccggggctgctgaggctgcactgcgcacagtgctgtcctccctttccatgctcaaccgtctcagctcagtctgttcgcgccctgtaactggttcatgtgc

SEQ ID NO: 3187 - DNA, 611 bp, Chlorella sorokiniana
  Clone ID: LIB3602-035-Q1-K1-B9
ggagtctgcctcagccggcgctcaaagcagcggccgctgtggatgcgacctcgccccgccggccctccgccttccctgccagccaggcgcgacagctggcgctgatgctgcgcggccaccctgccggcattagcaccaagcccatgctgggcaagcactacgacccgtgcatcgactcggagacggaagcgtacctgaaccgccgggacgtccagctggcgctgcacgccaatgtgtcgggcgagctgccgggaccgtggaaggactgcacccaggacatccagtacaagcggcgcgacgtgctgcgctccatcctgccgctgtatcgcgagctggttgacgcggggctgcgcatcctggtgtacagcggggatgtggacgccatcgtgccagtgattggcacgcgcaactggattcgcaagctggacctgccgatcaccaagccgtggcggccatggacgtccgcgacaggccaggtcggcgggtggacggtggagcaccagggcctcacctttgcctcagtgcgaggcgcagggcacatggtgccctatacgcagccggagagagctctgcacctcttctcctcctacctggaagagctcactctttgg

SEQ ID NO: 3188 - DNA, 548 bp, Chlorella sorokiniana
  unsure (1)..(548): unsure at all n locations; Clone ID: LIB3602-035-Q1-K1-C1
ccttttcaagccaaccctaccccactttccaagcaaacccaaatcttctgaagcgaaagacagttttctcccctcctttcattccagtaccggtgcctagctatcaaccgtctccccagcagggctgtcaagaatttttgttcagttnaacccnnnccccccccnggggggggnnnngngggggggnnnnnnnnncccccccccccccctttttttttttttttcccccccccttttttttttttttttcccccccccgggcggggggggttgtttttttttggggggggggggggggnnnnnnngngggaaaagaagaaagaaaaaaaccccccccccccctctttcttttttggttgtgggggggggnnnnnnnnnnnnnnnggggggggggggggggggggggggggnnnnnnnnncccccccctccccctctttttttttttgtggggggggggggggggggggggggccccccccccccccttctttttttttttttttttttgtggggggggggggggggngngncnccccccccccccccc

SEQ ID NO: 3189 - DNA, 249 bp, Chlorella sorokiniana
  unsure (1)..(249): unsure at all n locations; Clone ID: LIB3602-035-Q1-K1-C10
nganctatcaacccggccagctacgccgcttattacgccccaactaatgcggcagcaggcaccgccgcaggcagcatggtcgttgcaacatccgcagctgccgtcgccctgctggcgctggcatgaccagtttaactatattcttatgcaccgcattgcggcctcatttcattgcactgggcgtgcacaatccattaccccctgcactgcattacaacctgtgcgcctgtgtaatgcattcagttgggc

SEQ ID NO: 3190 - DNA, 439 bp, Chlorella sorokiniana
  Clone ID: LIB3602-035-Q1-K1-C11
gttctttggcagccatgccggcccacattcccatcctgcttttgctgcagacagcatggagggcggctgccgcaccccacatcccccctggtgctgagccgtgtgcgcatcaacagttatagctgcagcgctttgagcaggcgcatgccttctgccgcacatggcgcctcaagctggagcacagttgcatgcctacctggatccttgacgcaagctttgacgaatcgctggctgaggcggacagccaggcactgcctgcttgaaagcccatctgacgccatgctgcccccgtgtatcttgatgcctgctcctgggaggttgccgttctacgcgcctgttgaatgaggcgcgctgagcacaaccactcctctcttctgctgcctacgctttatgtgttagattgtcatgccttcctttacccccacgtgggccggttttc

SEQ ID NO: 3191 - DNA, 88 bp, Chlorella sorokiniana
  Clone ID: LIB3602-035-Q1-K1-C12
ccgtccgaaaaaaaaaaaaaaaaaaaaaaaaaaaaaaaaaaaaaaaaaaaaaaaaaaaaagggcggaacgggggtgggggcgttcaag

SEQ ID NO: 3192 - DNA, 320 bp, Chlorella sorokiniana
  unsure (1)..(320): unsure at all n locations; Clone ID: LIB3602-035-Q1-K1-C2
cacanacctgctgccgcccatnatgaccaacaacgagtggcttcgctcgcagcactgggtcatgcaggtgctggcatttgcggcattctattccggcgcggcagtcatggctctcatcggccggtggctgtgatgccgccgtgctgctctcctgtgcatgtcgcgcgcggcccctgcgttccatttgtggcagggagtcgcctttgttgtatgctcaactgttgtatgctctgcgttgccacaatgtatgactctccttctttgtttctttatcctcctcactttgtatgctaccttgtatgctgcaagacatttaactc

SEQ ID NO: 3193 - DNA, 398 bp, Chlorella sorokiniana
  unsure (1)..(398): unsure at all n locations; Clone ID: LIB3602-035-Q1-K1-C3
naaaaaaaaaaaaaaaaaaaaaaaaaaaaaaaaaaaaaaaaaaaaaaggcagaaacaaaaaaaaaaaaaaaaaaagaaacgcccaacgtgcaagcacaaaaaataacatcttctatggaggcgcccaaaaaaaaatttcctgggccgccagcttaacaacaattagaagtggggaaaacctctgaacttacccaactggataaaacccggggcacatcccccctttatgccagttgtgcggaaaaaccccttaggcccgccccgcgtcgcccttccaaaaaccggcacagactgaatgggcaatgggacaccccctgtggcggcgcattaagacccgcgctggtggggggtacacacaccgggaccgttgcagttgccatccccccagaccccccccc

SEQ ID NO: 3194 - DNA, 72 bp, Chlorella sorokiniana
  unsure (1)..(72): unsure at all n locations; Clone ID: LIB3602-035-Q1-K1-C4
naaaaaaaaaaaaaaaaaaaaaaaaaagaaaagaaaaaaaaaaaagaaaaaaaaaaaaaaaaaaaaaaaaaa

SEQ ID NO: 3195 - DNA, 432 bp, Chlorella sorokiniana
  unsure (1)..(432): unsure at all n locations; Clone ID: LIB3602-035-Q1-K1-C6
tgatcagcatacggagccaaagcgcctgggatagcgaaagccgacggccagcgaagaacagccgccatggctgcctcccacaagaagtgggtgcctctggagtccaacccggatgtgctgaacgagtacgctgccaagctgggtgctgacctgtcccagtaccagttctgcgatgtctttggcctggacgaggagctgctggccatggtgcctaagccggtggcggccgtgctgctgctgttcccggtgacggagggcaccgaggcggctcgcaaggcggagcaggaggagattgaggccaaggggcaggaggtcagcccctccctattctacatgaagcaaacgataggcaacgcgtgcggcaccatcggcctgctgcatgcactggccaacagncgtgacaggctgcacattgccgacggctcctttctg

SEQ ID NO: 3196 - DNA, 480 bp, Chlorella sorokiniana
  unsure (1)..(480): unsure at all n locations; Clone ID: LIB3602-035-Q1-K1-C7
ctgcccttcagnacatgaagagcgacgaggatgtgcgcatgatcagcgccgaggcgcccgtcctgtttgcccgcgcctgcgagttcttcattcaggagctgacgctgcgcagctgggccgcggctcaggagtacaagcggcgcaccattcagcgcagcgacgtggccacagcaatcacgcgcacagacgtgtttgacttcctcattgacattgtgccgcgggaggaggccaatgaaccgcccggcactgacggcgcagccgccgcggcacagctggtgggcgtgcctcccccgccggtgccaatgcctggcggtggtgcgccgcanatgggcatgctgtcaccagcccagcagcagcagnagcagcagccgcagcaacagcagtttcagggagaggggaagcagcagcancagcagcagcagnagcagcagcagcagcagcagcagcaggggcagagggaccggcagcaaatggggcctg

SEQ ID NO: 3197 - DNA, 577 bp, Chlorella sorokiniana
  unsure (1)..(577): unsure at all n locations; Clone ID: LIB3602-035-Q1-K1-C8
ccggcgagggcggcgatcgcctgcagaagccgccaggtgctggagcagctgactggccagcagccggtgtttggcaaggcgcgctacaccgtgcgccagtggaccattcgccgtaacgagaagatctcggcccacgtgaccgtgcgcggcgagaaggcgatgcagctgctggaggcgggcctgaaggtgaaggagtacgagctcatccgccgcaacttctccgactcgggcaactttggctttggcatcaacgagcacatcgacctgggcatcaagtacgacccctccaccggcatctacggcatggacttctacgtggtgctggagcgccccggctaccgcgtggcgcgccgccgcaagcagctggccaaggtgggcgtgcagcaccgcgtgacgaaggaggacgcaattaagtggttccagcagaagttcgagggtgtggtgctcaacaaggcccacgccgcctaagcggcaggacggccaccgcctcggcgcgccggcacctctcagacgacaggcagacagcacacnccctgcaccacggcgctgcgctgcactggcccgctggcttgttgct

SEQ ID NO: 3198 - DNA, 415 bp, Chlorella sorokiniana
  Clone ID: LIB3602-035-Q1-K1-C9
ccgcagcacacccaacatcttccctccttgcttttcctctcctccatcccccagctcccctgaccactccgctgccggcattctgccttcctgaccctgcctcttctcttattcattgcccgcacagctgtccgccccaccttgatgtgccatgggtgctgccaaccaaaccgcttggcgcgcccacctgtgaacaaaaacaaaatacgcagttgccctcccttgatccctgtaacaatcccccttttttgagccgatacccgtccgtcttgctagccttgcgcccgtccaatggcgtccctgtcccagccccacatttttgccgcttcctgggacgcctgcatattcctggccgccccctttcctaatctagctttatcctgttacgagcacacttgtaaacgagcagcttgtc

SEQ ID NO: 3199 - DNA, 388 bp, Chlorella sorokiniana
  Clone ID: LIB3602-035-Q1-K1-D10
ggtcacaaaccgggtcgtttgcaacaaacaaatcaacgggggggggggggcccccccctccggggagcagttgcccccgagtcaaaactggggccctccttgggcaacccttgcgtgaaagggggcccggcaacccaatgcccgctggccggggaaacaacaaagggcaaagctgaacaaactggcgcatcaccaaaaagacaagtcatggggggcaaaagaacaggggggggggcatgccaagcgcccaacagttgggatgcccccaggcccactgcagggggggcttgcccccctggccacccccttaggggaaaaccgggggcttgtcccggcccgggaaatgcttcaacttggacacccccagcgcggtgcccatgatggactt

SEQ ID NO: 3200 - DNA, 129 bp, Chlorella sorokiniana
  unsure (1)..(129): unsure at all n locations; Clone ID: LIB3602-035-Q1-K1-D11
ngaaaaatatttttttttttattaaaaaaaaaaaaaaaaaaaaaaaggaaaggacaaaaaaaaaggaaacaaaagactaaaaaaacacaagcatgcaaagaaaaaaagggctgctatggtgtaacggta

SEQ ID NO: 3201 - DNA, 594 bp, Chlorella sorokiniana
  Clone ID: LIB3602-035-Q1-K1-D12
gcctagttctatatcgcgacggccgccctttttttttttttttttttttttttttttttttttttttttttttttttttttttttttttttttttttttttttttttttttttttttttttttttttttttttttttttattttttttgtggggtttttgggggggggggggggaaaaagggccaaaaaaaaagctttgatcaaaaaaagggcccccctgccgctggggggggggggggggcgcgggggaaaaaaaaaggggctaaaaaaaacccccccaaaaaaaggggggggtctccccccccggggggggggcccaaaaccccgggaaaggaaacctctggggggcccccccccccaacggggtaaaaaaaaaaaagtttaaagggcccccggggggcggcccttaaaaaaaaaaaaatttaaccccgggggacggggaaaataaaattttttttagggggcacaaaaaaaaaattgggggggcggggttaaaaacggggagggggaaaaaaccgggcggcccaaaaaaaaaaaacggggaaaaaaaaccccctttcgccaggggggaaaaaaaaaaaaaggccccccccc

SEQ ID NO: 3202 - DNA, 588 bp, Chlorella sorokiniana
  unsure (1)..(588): unsure at all n locations; Clone ID: LIB3602-035-Q1-K1-D3
ctgcagtaagcggtgtggaggcttgacgctggggngaaaccagccagcagccatggcgttcttccagcgagtgatgaactacctcctgaacgaggtgctggtcaacagcctggccaacagccgcaccttccagcggtttgccatccgcagcaacgccatgatgcaggacatggccaagaagtcggcggagcagaaggcgcagctggggcagacggcggtggagaagggcggccacttctggaaggtcttcagcgaagagctgacaaaggggatgaaggacatcaacagcaaagtgaagtgacgctgagaacgatgtggcgttgagcctgggtggctgggcagtcgacaggcagagctgctgccgtcgcattcttcatcaccccaacttgccactgccgcctcgttcttatcgcgctgttgcccctctttgatcgtgcttgcttttgtctgctccagcctccccttgcgcctcttgctcaacaaccctcacttgctcgccatgcctttgttcctttacccagtggccccaggcatccacgccttgattgtattgcagccagctcgctctctggccacagcattttccca

SEQ ID NO: 3203 - DNA, 538 bp, Chlorella sorokiniana
  unsure (1)..(538): unsure at all n locations; Clone ID: LIB3602-035-Q1-K1-D4
ccgcttcctcaaggtgaacaagcgaccatgaacatgctgcagcgggtggagccctacgtggcgtacggctaccccaacctgaagaccgtcaagnagctgatctacaagcgcggctttggcaaggtcaacaagcagcgcatcccgctcaccgacaactcggtgatcgagcaggtgctgggcgacaaggacatcatctgcgtggaggacctggtgcacgagatcttcaccgtgggccccaacttcaagcaggccaacaacttcctgtggcccttcaagctgtcctcccccaagggcggcatcgacaagaagcgcctgcactacatcgagggcggccaggccggcaaccgccaggagtacatcaacaacctggtgcgcgccatgaactgagcgctgagccggcgagcacagcgcagcgcgcgcagcacgcacagcgcggcgcgtgcagcagcctggacggagcggccccctgatgcctgctagccacggcactgttggccgggccagtcgtgaggccccgagcgcacccgaatgccaagga

SEQ ID NO: 3204 - DNA, 520 bp, Chlorella sorokiniana
  unsure (1)..(520): unsure at all n locations; Clone ID: LIB3602-035-Q1-K1-D5
gcgcacggtgccgccaacttcggcgaggctgtgtggttcaaggctggcgcccagatcttccaggagggcggcctcgactacctgggcaaccccaacctggtgcacgctcagtccatcgtggccatcctgctgacccaggttgtgctcatgggcctgattgagggctaccgcgtcaacggcggcccggccggcgaggtggtggaccccatctaccccggtgaggcctttgaccccctgggcctggctgacgaccccgacaccctggctgagctcaaggtgaaggagatcaagaacggccgcctcgccatggtgtccatgtttggcttcttcatccaggccattgtgaccggcaagggccccgtgcagaacctgtccgaccacctggnctcccccttcaccgacaactttntactccctgtacgccaagacccttggcgtaaggcggcctgcactttgctcctgcttgagcctcgactggcgggggggcgtggaccctgtgggcagtgccgcttcccgcttt

SEQ ID NO: 3205 - DNA, 388 bp, Chlorella sorokiniana
  unsure (1)..(388): unsure at all n locations; Clone ID: LIB3602-035-Q1-K1-D7
tccgcggnagggccggctctccagcgcgtgaagctggtgcgcgacattgtgcgcgaggtggcgggccaggcgccctatgagaagcgcatcatggagctgctcaaggttggcaaggacaagcgcgccctgaaggtggccaagcggaagctgggcacccacaagcgcggcaaggccaagcgcgaggagatggccggcctgctgcgcaagatggctgccaaggcgcacaagtaaacgcctgtgcagccacagcagcagcccgcagcagcccccatcgtggcggggcggccgcagcgcagcacggcacagcacagcgcagcgcgcggcgccgcccgccttgcagcagcagcatcactgtgcctagcacctgtgatgtaacacagcacccggc

SEQ ID NO: 3206 - DNA, 515 bp, Chlorella sorokiniana
  Clone ID: LIB3602-035-Q1-K1-D8
gtccggacaccccggtcgcaccagcgtccggctgcgcctgctgcgcccgctgtcagcctggtggcgcatccgcagattagcccgcacgagttccacccgagctgggctgcttgagaaccccggggcgctctctttccaagctgagctgtctccctcggctgcagccagcgtggaggcaaatgcataccgggacttcacgggccacatcgggcaggcccacatggccaacttgagcgacgccgcgcgagggctccgctgcaccctaccgattcctgttccatgcccaggcagcaagcagcgggtcacacgtgctggtgcagatcaccgtcagcaaggcaccaccggcagcagccgtggtgatcaagagcggtgacgcagcggcggctgcacatgtccaggagctgctgcagacgctgctgcttacgctgtgaggcagcggcagcagctcgcgcttgcatgttgacagcagtcggcgtccccaagcatgtgaatgcgacttgtaattgtactggctc

SEQ ID NO: 3207 - DNA, 546 bp, Chlorella sorokiniana
  Clone ID: LIB3602-035-Q1-K1-D9
ggctcagtcattctgcagctgagcactcagcatggccatcgctgagccgtgaagcaaggccaaacaagcccgccacgagcggaggacagtagagaaccaaaataaccagcagccctttgctgcctattgtactgatgtgcctgtcaatttatgtgatgcagcccctacctgtccctgcaaagcgatcgctataaaaaaaaaaaaaaaaaaaaaaaaaaaaaaaaaaaaaaaaaaaaaaaaaaaaaaaaaaaaaaaaaaaaaaaaaaaaaaaaaaaaaaaaaaaaaaaaaaaaaaaaaaaaaaaaaaaaaaaaaaaaaaaaaaaaagggggcgggcccttttaaaagaaccaaattttactacccgggggttgaaaagaaaaattttttttttggggcccccaaaataaaattaacgggccggggtttaaaaacgggggaaggggaaaaacccgggggtacccaaattaaaaggcttggaaaaaaatcccctttttcccggtgggggaaaaaaaaaaaaggccccccccaatcccctttccaaaaat

SEQ ID NO: 3208 - DNA, 405 bp, Chlorella sorokiniana
  Clone ID: LIB3602-035-Q1-K1-E1
ggctgcttgggtggagcacagcggctggcaccatgtcgaacgtctaagaggtcgggatcgtcggcaagtacggcacccgctatggcgcttcgctgaggaagcagatcaagaagatcgaagttagccagcactccaagtacttctgcagcttctgcggcaagttcgccatgaagcgccaggtggttggcatctggaagtgcaaggcctgcaagaagacccaggctggcggcgcgtacgtgctcaacactgcggcgtccgtgactgtgcggtccaccatccgccgcctgcgggagcagaccgagaagtaagcgagcggccattgaggagtgaagcgggcggcggcggcggcgctgcagcagcgcgctgcagcgtgccgggtggccgctgcttcatgatgtaacgcag

SEQ ID NO: 3209 - DNA, 571 bp, Chlorella sorokiniana
  unsure (1)..(571): unsure at all n locations; Clone ID: LIB3602-035-Q1-K1-E10
caaccagnaccaagctcagccgcaaacgatatgccacgcacaacacctcccctccaggctttgcaaagcgtcgtgcgcagcaggtcccaccctattttcgcatggatgatgatgatgtgtagcgttagccatatgtgtgcgtgtgggcgttttgtaagtgcaggaagcaaaaaaaaaaaaaaaaaaaaaaaaaaaaaaaaaaaaaaaaaaaaaaaaaaaaaaaaaaaaaaaaaaaaaaaaaaaaaaaaaaaaaaaaaaaaaaaaaaaaaaaaaaaaaaaaaaaaaaaaaaaaaaaaaaaaaaaaaaaaaaaaaaaaaaangggggggcgccctttaaaaaacccaaattttttgcccggggcttgggaaattataattttttttttggggcccccaaaataaaatcccggggcggggttttaaaaccggggggggggaaaaaaccgggggtgacccaaattaaaccctttggaaaaaaacccctttttccccaggggggataaaaaaaaaaggcccccccccaatcccctttaaaaaaagtgccccccccaaaagggaaaggggccccccc

SEQ ID NO: 3210 - DNA, 86 bp, Chlorella sorokiniana
  unsure (1)..(86): unsure at all n locations; Clone ID: LIB3602-035-Q1-K1-E11
cccacgccgtccgnaaaaaaaaaaaaaaaaaaaaaaaaaaaaaaaaaaaaaaaaaaaaaaaaaaaaaaaaaaaaaaaaaaggggcg

SEQ ID NO: 3211 - DNA, 460 bp, Chlorella sorokiniana
  Clone ID: LIB3602-035-Q1-K1-E12
ctcctgctctaaggccctcaggcttcaggtctacgggcgccctttgacctcatttcattccatcgttgctaccctgtccaagcctgtcctacccccttttgtacctgccaccccgtgtaccctcccgttttggttctgtagctcctcttcactgcgtcaaaaaaaaaaaaaaaaaaaaaaaaaaaaaaaaaaaaaaaaaaaaaaaaaaaaaaaaaaaaaaaaaaaaaaaaaaaaaaaaaaaaaaaaaaaaaaaaaaaaaaaaaaaaaaaaaaaaaaaaaaaaaagaaaagaaaaaaaaaaaaaaataaaaaaatttaaaaaaaaaaaaaaaagagggaaaaacttaaattaaaggggaggggaaaaaaccttgccctaacccaccttatccaaattggagaaaagaaaaattttttctctcctcccctaaaatttaaaaaaccgaaaacagtctttctcc

SEQ ID NO: 3212 - DNA, 492 bp, Chlorella sorokiniana
  unsure (1)..(492): unsure at all n locations; Clone ID: LIB3602-035-Q1-K1-E3
caccacccacaattccatttgcaccgtgctgctgctgcttgcatagtcgttgctgcaccactaccacccccatttgctaagggacgcatgtgcccactggtcgctgcattaccctgcacccgcccgccgaccgtacccgcacgccccatttgattgcttgccagcactgaaccgtactgccccccctccagaccgtatcgctttgccgcacacgcagccgcatgcgcgctgcgcgccgccgtccccgctggcggctgctgcgcgtgctgtgcgtgcttcgtgtgcatgaggccgctgccacccaaccccgtacagaagcacaaaacaaccaccacaacaactggcaccctcttgatgacatatcgacttgcggcgggcccgctgcccgcccctcagacgcaagcatgatgaatgtaaacagcctcgcatatnnaaaaaaaaaaaaannaaaaacnaaaaaannaaaaaacaaaaaaaaaaaatatatnatag

SEQ ID NO: 3213 - DNA, 563 bp, Chlorella sorokiniana
  Clone ID: LIB3602-035-Q1-K1-E4
gccaagcgtctggactgaggccgcacgagctgcgccgccaggtgggcaccctgcgcttcgacctgaacgcggtggccgacaccctgcccaagccgccaagaaggaggcgcaggccgccaagaacgagttcctggccgccgtggaggcgctggacctccagctgcgcaagaagaacggggacaaggccgccgctgccctggctgacaccaaggccaagctggacgccgtgatcgccaagctggcgtaagcacccgccagccaggcggctggccggtaccacccggacggccgccgcggcaccccgcagcagcccccttgccagctggcgccccacgcgccggcgcaacgttttgactccctctcgcaccctggtggggtttgtccaccggcggggcccccgcgccccagcccgcagcagctgcagcagcattcctctgctctacaccagtcccgctagttccctccagctttgattcccggccccgcccgacgcggcgggcgcccccgcactctagagcgcctgttcactttgtactgccacccccctaccacccgcgcttgcc

SEQ ID NO: 3214 - DNA, 461 bp, Chlorella sorokiniana
  Clone ID: LIB3602-035-Q1-K1-E5
ggggctggagacctgcttcagggacgaacccatctgtggctaccccatcttcttgctgcgcatggtcaccgcctgtgagatcaagcggcgcgccgacttctttgcgcccttcatcatgggcctgtccgacctggatgtggccaccttctgccagaagtgcgtggagcccatgggcgaggagaacgaccacgtgcacctggtggcactcaccgacgcgctgtaggtgccggtgcgtgtcgtgtacctggaccgcagcctggcgcccggcggcggtgtcggcggcgacggcaatggcgaggtgcacgtggacatgcacgacttcatcccagaaggctgccctgcccccgcccagccacgcgtacacctgctgtaccggcctggccactacgacctgctgtacccgctggccagctgatttgaggggccaccagctgcactgcgcatggcagccatggcatggc

SEQ ID NO: 3215 - DNA, 434 bp, Chlorella sorokiniana
  unsure (1)..(434): unsure at all n locations; Clone ID: LIB3602-035-Q1-K1-E6
naaatttaaaaaaaaaaaaaaaaaaaaaaaaaaaaaaaaaaaaaaaaaaaaaaaaaaaaaaaaaaaaaaaaaaaaaaaaaaaaaaaaaaaaaaaggaaaaaaaaaaaagggggggcgggtttttggggttccaaggtttcctgaacgctcttcctgcggactttaaggcgtttttttttgggttcccgctaaatccattgttttggaccgtggtttttcaccttgcccctgtgggaaaccccttggaagttgcctattttaatattctttgtagccacatcccctttttcccttttgggggtctggcctaaaaggcctttgccaaccgcctttcccacttgtttgccaatccggaagggcgattgggacgcgccttgagcgggggctttaatcgcgttgcccgaagggttaccccttaacgtgcccgttccatt

SEQ ID NO: 3216 - DNA, 506 bp, Chlorella sorokiniana
  unsure (1)..(506): unsure at all n locations; Clone ID: LIB3602-035-Q1-K1-E7
tgtacctcagtgggagtggctcgaggcggtgctggcgcgcattgcggcgctcaacggcaacgtcaccgcctggcgccagcttgcagtcgaggagtacatcctgcacgttggctagttgggcagtgcgcaacactcctgcccttccactgcgccaaggcagcggcaacggccagggcaggcagcgggggtggcacaggagctgcgccgcagcagggcagcaaccaggacagcacctcagcagccacagcgctgcatgtggcggggccatcaccaccggcggctgctcgctctgccgcggctggacggcgccactggtggcatgcggcctgacaactggcatgcagtgcatctgtggtttggctgcgggccggcacaggcagcgcaccacctgcctcctggtgctaccacgtactacctgccctggtggtcaagccatgcatgcaccatgtgtttgctgcttagtgccaagcgcaccacaacctgccattgccaacaccatcactgng

SEQ ID NO: 3217 - DNA, 554 bp, Chlorella sorokiniana
  Clone ID: LIB3602-035-Q1-K1-E8
ggcgcatcgtcattggcagcagccgcgcgggtgtgcccgtcaccgcagaagacctgggcgtgggcggcgcgctcaccgtgctgatgaaggacgcgatccagcccacgctgatgcagacgctggaggagaagccggtgctggtgcacgccggcccctttgccaacatcgccaccggcaactcgtccatcgtggccgaccagatcgcgctcaagctggcgggagcggagggatacgtggtcaccgaggcgggctttggcgctgacattggtgctgagaagttctgcaacatcaagtgccgctatagcggcctgagccccgactgcatggtcatcgttgccactgtgcgtgcgctcaagatgcatggcggtggcccgcccgtggtggccggcaagccgctggaccacgcctacaagacggagaaccttgacctggtgcgcgccggctgcgtcaacctggcccgccacatcgccaacgcacgcgcgtttggcatccctgtgggtggtggccatcaaccgcttcgccacggacaccgacgcggagctgggaagtggtgc

SEQ ID NO: 3218 - DNA, 547 bp, Chlorella sorokiniana
  unsure (1)..(547): unsure at all n locations; Clone ID: LIB3602-035-Q1-K1-E9
ncgttccgnaaaaaaaaaaaaaaaaaaaaaaaaaaaaaaaaaaaaaaaaaaaaaaaaaaaaaaaaaaaaaaaaaaaaaaaaaaaaaaaaaaaaaaagaaaaactattatagaaaaaaaaaatttaaaattaaatataaaaacgggggggcgccttttttttggttcagtttttatttcctcttttttgggccttttttttttttttttttggggtgaataaattttttttcttgcgcctttttttctcctggggcgacttgggaaaccctgggggtgccccattttaaatgtttgggaaaaattcccttttttaaaaatggggctttttctgaaagggctcggcccctcttctttttccaaatttttgccccctttttttgtgttttgacccccctttttgggcgtttttttacccggggggggggggggttttccccccggtttctcttttttttttggcggccttttgggggcgtttttttgggttttttcccttttttttcccccaagggtggggtttttccccttttgggcttttttgggggg

SEQ ID NO: 3219 - DNA, 191 bp, Chlorella sorokiniana
  Clone ID: LIB3602-035-Q1-K1-F1
gtggcgcaagctcatttcgttgccagaagcgtatatgctcgcaagcatgcggcccacggccacctgaacccctgaacgcttcactttctcttttttgcagcatttcatttagtttgaccccctcggtattctgcttgccttttgttgcgcgtgccacattgggcacccgcacgctttgttaacgaagcatt

SEQ ID NO: 3220 - DNA, 269 bp, Chlorella sorokiniana
  Clone ID: LIB3602-035-Q1-K1-F10
tccgggcggcgtcaccatgcgccgctcccttgctttccgtttcactgtccctttcgttcctgcgttcgtttagtggaggaggcccgcctgtgtacctgacctggtggccgcgtttttggttgagcggcttgtagccgcacatctgtattatcagctacgtaaaaaaaaaaaaaaaaaaaaaaaaaaaaaaaaaaaaaaaaaaaaaaaaaaaaaaaaaaaaaaaaaaaaaaaaaaaaaaaaaaaaaaaaaaaaaaaaaaaaaagggggcg

SEQ ID NO: 3221 - DNA, 427 bp, Chlorella sorokiniana
  unsure (1)..(427): unsure at all n locations; Clone ID: LIB3602-035-Q1-K1-F11
cggnagcgtggggtgaaggtggtgtcccccccaacaccgtggagcggcggtgcagcgtgtggatcggcggctccatcctcgcctccctgggcaccttccagcagatgtggatgtccaaggcggagtatcgcgagtatggcgccggcctggtgcacaaaaggcgccctgaagggccgcagcctctctgtgtgcacactcacacgtggagcatggcgtccctgggggccagctgcagccgcacaaggaatgatggctgctcaacggctctcctgctgcaacgctagccgtccagaggatgcactggctgcagcagtgtcggcctgcggctgcggacttggcagcatgcgccagaccagcctccttgtttgctccccagtgctgctgctgtccaatggctatcattcggctgtgtaacatggagcgccga

SEQ ID NO: 3222 - DNA, 506 bp, Chlorella sorokiniana
  unsure (1)..(506): unsure at all n locations; Clone ID: LIB3602-035-Q1-K1-F12
cagtacatggtgaagaagcgggcaagnacgccttccacctgcgcgtccgtgtgcaccccttccagtgctgcgcatcaacaagatgctttcgtgcgccggcgcagacaggctgcagacaggcatgcgcggtgcgttcggcaagccatttggtgtgtgcgcgcgcgtgggcatcggtcagatcctgctgtccatccgctgcaaggacacgcacgctgcggtggcggaggaggccctccgtcgtgccaagttcaagttccccgggcgccagaagatcgtggctagcaggaactggggcttcactccctacctgcgcgacgattacttggagtggaagcgtgagggccgccttgtgaacgacggtgtgaatgccaagctgcttggcaaccacggcccgctggacgcacgggagcccggccagattttcgagggtcctgcccgtctgtggcgtgtgccggtgcatgcctaacatgttgcttgggttctaaagatgtaacgaacatctgngc

SEQ ID NO: 3223 - DNA, 104 bp, Chlorella sorokiniana
  Clone ID: LIB3602-035-Q1-K1-F2
caccacgcgtcccgaaaaaaaaaaaaaaaaaaaaaaaaaaaaaaaaaaaaaaaaaaaaaaaaaaaaaaaaaaaaaaaaggccaaccaaatcaaaaaaatccaaa

SEQ ID NO: 3224 - DNA, 463 bp, Chlorella sorokiniana
  unsure (1)..(463): unsure at all n locations; Clone ID: LIB3602-035-Q1-K1-F3
gtcccaccctgggacctgcagccacgattgctgatgcaccaccactgcaccaccactgcccttgatacgtgaagtgaataccgcccgctcgcacccgccgctcactggccgccgccacaacttttttgccgcgctcttgctctttgctgagtaggctcctcgcggctgtgctaccatgccaactgaaaccctacaactgcactgaagccgggagtttccaacccgactgtcacccccatgccatagccttttttgcgtcgagatgcagacgccgtgccttgtaacattaggaggggtaaaaaaaaaaaaaaaaanaaaaaaaaaaaaaaaaaaaaaaaanaaaaaaaaaannaaaaataaaaaaaaaaaaataaaaaaanaaaaaaaaaannaaaaaaaaaannaaaaaaaaaaannnaaaaaaaaaaaaaaggggggggccgtttttaagagatccaaattt

SEQ ID NO: 3225 - DNA, 414 bp, Chlorella sorokiniana
  unsure (1)..(414): unsure at all n locations; Clone ID: LIB3602-035-Q1-K1-F4
caacgctgnagtggccttctccgagtgtggagctggagtttgaaaaggcggctaccgcaccgcctccctggcggagacctctgcaaccagcacagagagcaatgcagttcagctgtggagccatgccttcatcgctgttcccggtcccagcggcggtacactgctggagctttgatgtggccactggcggctggggatcccacacgctagcaagcttgcaaggattgcctctggcgagtgcacatagacttactgggaacgagcaaagcagtcgggacctcgccgctgttgagccgagtgggtgggtgcacagcatgctagcagctgcggcagtgacatgcctcccattcattcaagtgtagccatttcttgctgtcaccagtttgccaggagcgtgtaaatgtgaccattgcc

SEQ ID NO: 3226 - DNA, 578 bp, Chlorella sorokiniana
  unsure (1)..(578): unsure at all n locations; Clone ID: LIB3602-035-Q1-K1-F5
gttagaatcggctttggcacgcgcatgctgctcacctccatcaatggcatcctgctgcaccagccgcccgaggtgctgctagcccagcaaatattcgtcatgctgttagtgcgggcagaatactgcagctgtgccatattccatagaccccgtgtcaaaaactgcgcatcgctgcggcatgggaagtgctggagctggcgtccgtgtttgtgccaagccgtgggggcacacatttgcaggccggcgccctgaaccgcacctgcagtgcgcggcggtgctgacgttcaacaagctggctgctggcattctactgcccgtgctgctggcattgcgcctccggcgngaaatctacatggatgggcgtcgatagggttgaccctgtgcccctgcccgagcctgcacagcagcagcatgcacagccgcgagcagagcgcggcaggcggcagcccagccgcttcaacatagcaatgactgtccagctgtgcgggcaacgggcagatgcggccctgcaaaagcgctgcatgcagctgggacgacacccagcagcagcatgcctggctgcgtggggtggtgctagg

SEQ ID NO: 3227 - DNA, 567 bp, Chlorella sorokiniana
  unsure (1)..(567): unsure at all n locations; Clone ID: LIB3602-035-Q1-K1-F6
cgccgnggggngtagcacgatgcagatcttcgtgaatccctcacgggcaagaccatcaccctcgaggtggagtcttcggacaccatcgagaatgtgaaggccaagatccaggacaaggagggcatcccccctgaccagcagcgcctgatcttcgccggcaagcagctggaggacggccgcaccctggcagactacaacatccagaaggagtcgacgctgcacctggtgctgcgcctgcgcggcggcatcattgagccgtccctgcagatcctggcccgcaagtacaaccaggacaagatgatctgccgcaagtgctacgcccgcctgcacccccgcgctgtgaactgccgcaagaagaagtgcggccacacctcgcagctgcgccccaagaagaaactcaagtaaactactcgcttcggcacgagcggaagcggcatgagcggcagcaaccgctgcccctcccccgccccgccagccgggatgccatgacagcaccggctgctcagctgctgatgtgctgcatgtcaattgctgctgcggaaatgtaacggtggtaggcgatcaana

SEQ ID NO: 3228 - DNA, 591 bp, Chlorella sorokiniana
  unsure (1)..(591): unsure at all n locations; Clone ID: LIB3602-035-Q1-K1-F7
cgnaaccttcgtccagtgactgatctgtccggcaaggagacgctggtgcgcgtgactggtggcatgaaggtgaaggccgaccgcgacgagtcgtccccctacgccgccatgcttgccgcccaggacgtggccacccgctgcaaggagctgggcgtgaacgcgctgcacatcaagctgcgcgccaccggcggcaaccgcaccaagacccccggccccggcgcccagtccgcgctgcgcgccctggcccgctccggcatcaagatcggccgcattgaggatgtgacccccatccccaccgactccacccgccggaagggtggccgccgcggtcgccgcctgtgaggcgggcgcgctatgcgcgctccggccacagcccggatgctctgcctggcctgccgcgcccggctgccgcgcccgcggcctgatggcggcccctgccgcctgatgggcctgtggtgcagcagcggcgccggcacagcccaagcagcggcgcgcccccgcctgccgcacacggcggcagctgcgctggcggcccccgctgcctgaggctggaggtttgagcaccccctaatgcgatgtgccactgactgc

SEQ ID NO: 3229 - DNA, 554 bp, Chlorella sorokiniana
  unsure (1)..(554): unsure at all n locations; Clone ID: LIB3602-035-Q1-K1-F8
gccttcccctgcaaccagtttggcgcccaggagcccggcagcaactcggagatcaagtcctttgccgagcgcaagggcttcaagggtcccatgtttgccaagtcggatgtgaacggccccgacgcgctgccgctgtttggctacctcaagtcggcgcagggcggcctgctgaccgctgacatcaagtggaacttcaccaagttcctggttgaccgcagcggcaacgtggtcaagcgctacggcagcaccaccagccccatgcagattgagagcgacatcaagggcctgctctgagcggtgtgagggcaggtgccagccgctgctgggaccgctgtgctgggcaacaggccgtgcacccgacagccgccacagttggcggctgcgctttgctgccgcaccttgtgtgctcgccccgatttgaatgtaccctggacccacccccacgccatttgattgattcctgtcagactgtctgccaaacttgaggagctgattgctgtgtgacaactagcagcaaaaaaaaaaaaaaannaanaaaaaaaaggggcggccgc

SEQ ID NO: 3230 - DNA, 609 bp, Chlorella sorokiniana
  unsure (1)..(609): unsure at all n locations; Clone ID: LIB3602-035-Q1-K1-F9
nacggntttcccaacggtgctactttgcttgcgtcaacttccacgccggtgacacctgggagatcgaccactggtaccaccccagccacaagtgctacaccaagcactggactgcacgctgctcccgctgctaagctatcagcttggcactatttacgcctgctgagcaagcagcgctccctcgcaagcgcctgctgagcaagcagcgcgccacgccctgactgtgcaccggtgcctcgcaccgctgctcctcttgtacgcctccgcctctgctgctcctaggagcacgaaggcaaggcgtgcaagaggcatcgctacaagagctccccgattggaagtgcaccctcggagcactgccacctgctaacctacgtgaactccccaacgtgaaaacatcgcaacccatgccgtgaccccccgcccctgcctgaccatatgcccgtgatcccctcacgtcttttccctgctgtgacccaagccccaattttttgtgccccctgccccggatgccctgcccatctgtcgtggtgtcccgacattcgggatgcaacccgccccctgatccccactccccatctgtccatcccccctccatcccctttgcgctgt

SEQ ID NO: 3231 - DNA, 218 bp, Chlorella sorokiniana
  Clone ID: LIB3602-035-Q1-K1-G1
gtttaacaggaggtaaaccagttgcaaaaaaaaaaaaaaaaaaaaaaaaaaaaaaaaaaaaaaaaaaaaaaaaaaaaaaaaaaaaaaaaaaaaaaaaaaaaaaaaaaaaaagggggcgggccccttctgggaggacccaggctttcgctccgcggggcttgcgccttttttagcttctttttttggcccccccttaatttcatttctggggccctttt

SEQ ID NO: 3232 - DNA, 438 bp, Chlorella sorokiniana
  Clone ID: LIB3602-035-Q1-K1-G10
ggtgatgcgtgttacatcgttaccgggcagcattgccgtagcaagtgagcaagggggctcccgacgagcagcagatgaccaacgagagtaaaaacgggggtacaggggagcggaggaaaaagtacaggggataaagagcccgatgtgccgtctaaaattgccgcgatgcccgctcccgctggtccttttcgcgctttgcatacagccgctttagcgcgcggggcgccttgccggcggggaagttggacatgtcaaagtagtggggggccaggtccaccagccactcccccttgatgtccgtcacggtgcggatgtagttcttgctggtcagcacaaactcctggtacagcgcccactcgggcttgtggtccaggcaggtggaagggtgcaggtacaccacctggttgtccttggcggtcaggtagtggcccgtgcgct

SEQ ID NO: 3233 - DNA, 413 bp, Chlorella sorokiniana
  unsure (1)..(413): unsure at all n locations; Clone ID: LIB3602-035-Q1-K1-G11
ggnatctggnacacatcctgnagcacagccccagcctgcagctgctgcagaccgcatggcggccgcctgccgcaccccacatccccgctggtgctgagccgggtgcgcagcaacagcaagagctgcagcgctttgagcaggcgcatgccttctgccgcacatggcgcctcaagctgcagcacagtttcatgcctacctggatccttgacgcaagctttgaggaagcgctggctgaggcggccagccaggcactgcctgcttgaaagcagagctgccgccatgctgcccccctgaatcttgatgcctgctgctgggtggttgcggctctacgcgcctgttgaagaggcgggctgagcacagccacgcctcccttctgctgcctccgctttatgtgtaagatggccatgtncnna

SEQ ID NO: 3234 - DNA, 223 bp, Chlorella sorokiniana
  Clone ID: LIB3602-035-Q1-K1-G12
accgtcctgctacttattagccatttttcgcaattctggctgcaagctgtatcacgccagcttgtcaattgcttctgcttagctcaatgcagcacgccctgcacttggcttaccgcgtccctgccgtcgcaatctttcatcccacacttaacggatgcccgcgggctccactcccatcctatgctcaacctcccctgccgctgagcatgtaagcagtgcggtc

SEQ ID NO: 3235 - DNA, 586 bp, Chlorella sorokiniana
  unsure (1)..(586): unsure at all n locations; Clone ID: LIB3602-035-Q1-K1-G2
cccanaccgacctgtgccagtgcgacggctgctcagnatggctgcacccagagtgctgcggcacgacgctgcaggcggtggaggcgctgcccagttggttttgccccaactgcctgcggaagcaggctgcatcatataccagcagcggcagcgcgggggcgccgccagccccgcaccagggcagcaccgcctggctgctgggttctgcggcaccgagtgcggcagaatcgccgctgccacctcttcaattggacccagcagcagcagcggcagcggcaatagggggcgggctaggcggtggcgcagtagcgggcggctcagggcagacctggagccgggagccgctgccactgtctgggacgaatggcgctgtgcagccagcgcaggtgccggcatcggatgcgctgttgggggccctgcgtgcccagctggcgcagcagcagcagccaccgctggggcagccgcccccgctgccgcagcaggagcagccgctgtatggctcattgcagggcgggtggacgtgctgagggcctggcttcctaggtctgtgcccgctgctatgcatgtcctcgcctgcccgcctgct

SEQ ID NO: 3236 - DNA, 562 bp, Chlorella sorokiniana
  unsure (1)..(562): unsure at all n locations; Clone ID: LIB3602-035-Q1-K1-G3
gccgcagccgacggcagcagcagtagcggcgacggggcagcgcaggagctggccagctgccacagcgccttgcagcacctgtgctcgcttgcaaccgccgaggaggagcatgcggctgaggagcaggaagcggctgcagcggcaggtgcagggggagcaggggatgtgcctccgccgctgctgctggagcggcagccagtggcagcgactgagttccttcggcgactggggcagcagcggtggggctgggaaccagacgcagcgggcagcgcagccgccttgcagcagctgagggcggcgctgcagcgggaacctggagcggcaggggcacatgccgctgccgccatagcggcagaagcaccagcagcagcagaggccacagggacagcggctgtgattgcgccggtcactcctgcagacgaaccaatgcagcccgcaggcacggtggcaggccagcctggggcggatgcagctgacagggtgatgcgggatgggcaggtggaagagctctgaagaacagcaacgcacaggcacacaacgcacaacatnctgcttgactgac

SEQ ID NO: 3237 - DNA, 343 bp, Chlorella sorokiniana
  unsure (1)..(343): unsure at all n locations; Clone ID: LIB3602-035-Q1-K1-G4
gcggtgaacaaccgacaccaccggcgttggcgccggcgcggcccgcactgagttccgctccgtggccgccaccaccgcctaaagcgcctctcaacaagccttccgacctggcactcaggccccggcacacgggcgcagcacgacggtgcttgcgcccgttgagcgggggccgggagtgccaggtcggaaggctgnngagaggcgcttaggcggtggaggcggccacggagcggaactcagtgcgggccgagccgaagcactcgccgggggtgttgaagccagcgtccaacccctgaggcgacaagataaaccagcaaccctacatgctggtgccccacctcaa

SEQ ID NO: 3238 - DNA, 473 bp, Chlorella sorokiniana
  unsure (1)..(473): unsure at all n locations; Clone ID: LIB3602-035-Q1-K1-G5
ggcatggcgcagaccggcagctgtggctagnacccttggcatcagctgtgctggtcctacctgcgagtgcagcagtacacggcgtcccattgccagctgaactgttgtcacagctgccgctgtgccagcaggcggcaatgttggagctgctgttgcccaagtgcagcccagcggcggctgaggcagcagtggcgatggcgaagactggcttatggcgctgcaacagatggcaggcatgtggaggcgcagcagtcgctgtggcgccatccgctgctgagctggattctgccagcagcagccactgcactggcgagcagcattcctgatgcggcacctcagctttggcaccagacagtggccatggtggcaggcgttgtcgtcgcacgcgnggcatgtgaactggcagcagcggcgaccagtgcaccatccgtactgccntggccctgtgggcagcaaacggcaccagcttgtgc

SEQ ID NO: 3239 - DNA, 266 bp, Chlorella sorokiniana
  unsure (1)..(266): unsure at all n locations; Clone ID: LIB3602-035-Q1-K1-G6
cagctggctagacacttaggctagacagcagctgcccgttggcctccctgcacccggttttgctcccttcttgcttccacaacccgcttgcagcaaccgttgctcgtgcacctgctcccagcagccggtggtgctcaacgatggggtcacccgngaacccgacctccgctgttgttgtttcattccagcattgcatgcccacgttgtgttgtttccagagccagtcagcctgtggaccaggcccagcctctgtaacccaagcaagc

SEQ ID NO: 3240 - DNA, 207 bp, Chlorella sorokiniana
  unsure (1)..(207): unsure at all n locations; Clone ID: LIB3602-035-Q1-K1-G7
cgaccgctccttctccctgtttgccggcggcgttgtgccgggccaggtctgccgctccgtgcccctgcctttccctgccgcgtcgggggccgtccgctttcgcatcgtcttttcttttccttctgtcgccttatctcatcggggggggggggggggacccctccgtcggcgctttctcccncgcctcgggcgtgctgcgcgtccctc

SEQ ID NO: 3241 - DNA, 118 bp, Chlorella sorokiniana
  unsure (1)..(118): unsure at all n locations; Clone ID: LIB3602-035-Q1-K1-G8
cccacagcgtccgnaaaaaaaaaaaaaaaaaaaaaaaaaaaaaaaaaaaaaaaaaaagagaaaacacaaaaaaaaaaaaaaaaaatgggaggcccactaaaaaggaaccaaataatgg

SEQ ID NO: 3242 - DNA, 620 bp, Chlorella sorokiniana
  unsure (1)..(620): unsure at all n locations; Clone ID: LIB3602-035-Q1-K1-G9
caccacaacagnactagttgcccngagccgctcatcgcgcgccctgcacaacccttgaagtgcccagcggagcggcaggggcgcaccgcggcttcccaacgcatccaggagttaggaggaagctctagtagcaggccccaggatgtgcttcatacccatcttctttgtgtgcggcgacatggagcggacgcgggcgctgggcgaggcgcgcttctgcgccaactgccaaaccaaggacggcgcacagctgtacgagtcttacacgcgcttccacttctgcttcatcccactctgcaagaccggcaaccagcggcgctactaccgctgcaccacatgcggagcgatgtaccctgcttgagtgcagcggccaagcttgcacggcaaccgagctgccccagccagctgcagccaaattgcaaggctggctcagcgcatcagggcacaactgctgccgtgccgcccttcgctgctgtgcttgcagtacgttgccatgtaccatatcagttgactgcatcctgtgcagcagcagtcctgtacaggaaatcgctatgctttgtgggctcgtgctaatttgagccggcctggctaccagttgctacccacttgcctctgctttctgc

SEQ ID NO: 3243 - DNA, 592 bp, Chlorella sorokiniana
  Clone ID: LIB3602-035-Q1-K1-H1
gctttgtcatccacaacagcacgggagaaacggcgcagctgcccgagggagtgccgcaaattgtgggccaggaggtggacggagatgcctgggtcgtgtatccgtgggacgcggaagacattgacgagcataacgagctgggccagcagtgaggcaggcagcggtagctagtttttccttgccgccctccctgactgttgggcagcctcctctttccgcgttcatctccctgtcgccgcgctgtgagaagcaggctcttgctgtctgctcttgcagcgaggcattgtcatgcacgtctgtcatgtgtttccccagttcgacgctgttccctttcctaagcaggcgccgcggtcgtggccgccggcgtgctgcgccattcaattttacccatgaaagggtgcctgcacccgctctcatgctgtgcactgccctgtttgtttgctcctccccattttctcacttcttttccacccttgtagtcactagtcagtacgcctctctgccccggtcttctttgctatttgttccgcacaagccctcctcttgagcgccccttgtcgctcacccgcacactgctctcacggttgacatg

SEQ ID NO: 3244 - DNA, 573 bp, Chlorella sorokiniana
  unsure (1)..(573): unsure at all n locations; Clone ID: LIB3602-035-Q1-K1-H10
atttggggagctgctgctgcaccccatcatcaacgcgctcaaggagggcggctacggctggctgcacgagatgctcgagtgcttcaactcgggcgacatccaccgctacgacgagctgtgcaccaagcacgcggccatgctgaacgggcagcccgcactggtggcgcacgagcggcggctgcgcgagaagaacaccatcctctgcctcatggagctcatctccagcctgccgcccgaccagcgcaccatcgcgctgtccaccatcgcggaccgcaccaagctgccgctggacggggtggagttcctgctcatgaagacgctggcgctgcatctgattgagggcgtgattgaccaggtggacggcagcgtgcaggtgtcgtgggtgcagccgcgcatcctcaccctgccccagattgaggtgctgcgggcgcggctggacggctgggtggacaaggtcagcaacgcggccatcacgctggaggacgaggcggtgggcgtggcaatgcagcccatggtcagctngagcacctgtcaagggctgagctctcactgcagcatgtaatcgcacatttt

SEQ ID NO: 3245 - DNA, 584 bp, Chlorella sorokiniana
  unsure (1)..(584): unsure at all n locations; Clone ID: LIB3602-035-Q1-K1-H12
gctctgcggcccttcatacctttgtacctttctgtatcatcttgcagcaatggcagccggctgcatctttctaacatcgtcaccggcccactcgtttgtgccatgcccacctgcctccaacgtcacccttcatcaaccctcacccaacccatccacctgccacccatccactcaccttccctccgccacaacctctgccacccactcaccacccatcacccgctcaacgccctccatgcaccatcctccccatccaccaaatctgccaccccaaacgcacgtccgccgctgcaccacctgccgccccctcacccgcacccatcttccacccgccacctttcctgccgctcaccgccgcacatcctacctcccacacctcactccatgtccacccttcacccgcgcttcacacagcggctgctgccatgcaaagctgctgccaaacccatccatcatgctcgcacacccactcacccacacgtncaacgtatccagacccattttcaaggcccgactgtacagtgcctttttgcgtccttatgccgatctggtaccaggacttaatgtgtaacaaatggtatgtt

SEQ ID NO: 3246 - DNA, 582 bp, Chlorella sorokiniana
  Clone ID: LIB3602-035-Q1-K1-H2
cggccgcgtgggcaactacaccgcatgggccgctccgtgggcttcttccagatccagcccatcaactccacccccagctggctgctggccatggtgggcgtgttcagctgcatcggccccctcaccctcgcgggcttcttcacctgggagaaggtgatcaagaaggactaagcctgagcttcagcacaaaccgagcctgaaggtggccgagaaggcctgagcctggcggagcagctttgtctggtcagctgagcagccgcgagcagcccgctggattgaggcagcctcgcctgggctccgttctcagcatccctgggcggctccgccccctcgcaatatttctctcccgtgcctcacccctgtggccctccctgccccagcccctgcaccctcccttcactttgcccgcccacacctgccccctctgtagcttgccgcttcatttagcacttgcatcgcccccgaaactcggcctgaacattcataccacaccatttcgttgtttgctgcgtaacccccttgctttgcaccgttgacaaacatgtactctagcctttctctgcccccacaccgccggcctgc

SEQ ID NO: 3247 - DNA, 151 bp, Chlorella sorokiniana
  Clone ID: LIB3602-035-Q1-K1-H3
cgtcgaagaactcagtaactactcgcttcggcacgagcggaagcggcatgagcggcagcaaccgctgccccccccccgccccgccagccgggatgccatgacagcaccggctgctcagctgctgatgtgctgcatgtcaattgctgctgcg

SEQ ID NO: 3248 - DNA, 592 bp, Chlorella sorokiniana
  Clone ID: LIB3602-035-Q1-K1-H4
gcacagcaaaggctggactttggcggcaaggatgggaacgcttggctggagtaccgcctgccggcggagcagccgcgctacgtgctggacagctatgcgctcacctcggccaatgatgagccggcacgtgacccgcggcacgtggcgctggaagcattctctgacggcactggcgagtgggtggtgctggatgagcggcgagacctgcgcttcacgcagcgccaccagcgcgtggtcctgcagatcagcgctgcaggcagcagcagcagcggcggtggcaacgccggtgtaagagcaggggcagcagcgggtgcagcagctggcgcagcaccgcttgcttcgcgccgattccgcctgcgtgtggtgtgcgtaaccgacccggctgctgccaactcggtgcagctagcctgtctggacttgtatgggcagccggagcagcaggcacaacagcttggacagcaggaggagcagctgcagccgcagccggctgaggaggccaaagccgctgccccaccaacctccgagctggcggcgctagaggtgcaaggcagcgatgcggagcatgagagcagggagcagcaagctgacaatc

SEQ ID NO: 3249 - DNA, 296 bp, Chlorella sorokiniana
  unsure (1)..(296): unsure at all n locations; Clone ID: LIB3602-035-Q1-K1-H6
naaaaaaaaaaaaaaaaaaaaaaaaaaaaaaaaaaaaaaaaaaaaaaaaaaaaaaaaaaaaaaaaaaaaaaaaaaaaaaaaaaaaaaaaaaaaaaaaaaaaaaaaaaaataaaaaacaaaaaaaaaaaaaaaaaaaaaaaaaataggggggggccttttaaaatggactcaaattgtaccgtcccctttccttcggaaggatttggttttttttttggggtccccaaatttaattccctgggccggggttttaaatttcnggggttggggaaaatccgggggttgcccaaattttt

SEQ ID NO: 3250 - DNA, 575 bp, Chlorella sorokiniana
  unsure (1)..(575): unsure at all n locations; Clone ID: LIB3602-035-Q1-K1-H8
tccgcggnagcgtgggcgagcggcttgngacacaggggcaccatgaagttctccagcaccgtgaccagcagccgcaggaagtgcaggaaggcgcacttcacggcgccctccagcgcgcgccggaagctgatgagcgcgccgctgtccactgagctgcgcaacaaatacggagtgcgctcggtgcccatccgcaaggacgacgaggtgtctgtcgtgcgcggcacctacaagggccgcgagggcaaggtggtccaggtgtaccgcaagaagtgggtgatccacatcgagcgcatcacccgcgagaaggtcaacggcgccaccgtgaacgtgggcgtggacccctccaaggtggtggtcaccaagctgaagctggacaaggaccggcgccagctgctggagcgcaagcgcgcgggcaagggcctggccgacaagggcaagttcacgngaggcggaggtggcggccatggnagaacgtggactaagcgccacgcccaccccgcagcagccagcagcagcagcagtgtttgaggccgcgggcgggccaccgacgccagtgcgngctcgggtggcggcgg

SEQ ID NO: 3251 - DNA, 570 bp, Chlorella sorokiniana
  unsure (1)..(570): unsure at all n locations; Clone ID: LIB3602-035-Q1-K1-H9
gnagctgtcacggcggccatgcacgatcgggagtacgaggagcagtagaaggcgcgcaaggagatgggcacggtgtgcgccgacctcgagtttgagctggaccgggacgaaccctgagccatggatcccaaggaggtgtgggcggagatgaaggctgcggggtgcccgccacctgaggtggatctcgacaccgagttcgaccgcgatgaccccatgctggcggacaagaaccacctgcgggacgcgccggagccgccccagcccgccgacgtcagcggagagatggacctgatggcggatgccgaggacgtgcctgcccagaagcaccagaagatgggagcttgagcagcagcgcacggcggcggcgagcagcagcctccgccaagcagtggagcaactgctagcgcagcatgctgctgcacagccggtagcacggcccaggctgcgttgaccagctaccaagcactgccgctgatgcggcagccccctatgaacacagcagttgatggcgcagcatgagccctgcagttgcgattttccctccgcttcttgccactgcttgcatgaatg

SEQ ID NO: 3252 - DNA, 192 bp, Chlorella sorokiniana
  Clone ID: LIB3602-036-Q6-K1-A1
ccgggtcgcccacgcgcttacccaccaaccgcctttctcactcacagcatgcgcactgcacgccgatgctgtcctgctttcaactagttgccttgtgcattttgcccccatcttaaccctgtgctcattgtttacggtcttggtgtggacctagcagcggccccattgtcatacgaagtacatgcaacacac

SEQ ID NO: 3253 - DNA, 471 bp, Chlorella sorokiniana
  unsure (1)..(471): unsure at all n locations; Clone ID: LIB3602-036-Q6-K1-A10
ctgactgacctgcgccagnagctggaggagaagtaccgcattgccaacaactgagcaggaccatgacgacgtcctgcagtactaggcactgcaccattgttttggcacccccagccgccaaacccaagcctcagcgcgtgccattgcagcagcggcggcggcccgcctgctgaccgctgcgcgcgattgtcttgttcaccgcccgctgagcagccattccttgacgcctgtgtcattttgtcccctcacccataaacatgcccgagaattgaactgccccgccgctatcacagcctgtccctcttctccccgatttcatcgccccacgccgcgccgtgggcgagttttccgatgccctttgcctttcatgctaccacatccgccactggcagccctacctatatgaatgacgccggtccgtcctactgtacaacatgccgcaacatcccgtgtaaccaggcatgcancana

SEQ ID NO: 3254 - DNA, 432 bp, Chlorella sorokiniana
  unsure (1)..(432): unsure at all n locations; Clone ID: LIB3602-036-Q6-K1-A11
cggccgcgtgggctctggccgctgccgtccccttgcctgctttgtccctgcaatgtttcccgctcccgctccctgctccccctgttccaatctgctgctgcactgctccgctccatgctgccttaatcaaccggggcctgagcagggcctgaggcccgctggctccgaagcagcatgagcagcttccctgtacactggaggcccctctcctactgcctcatgtaacctcacaagccaaaaaaaaaaaaaaaaaaaaaaaaaaaaaaaaaaaaaaaaaaaaaaaaaaaaaaaaaaaaaaaaaaaaaaaaaaaaaaaaaaaaaaaaaaaaaaaaaaaaaaaaaaaaaaaaaaaaaaaaaaaanggggngnnaaaataaaaaagaaaaaanntatacaagcgggggatgtaaaagaaattatttttttttttagg

SEQ ID NO: 3255 - DNA, 482 bp, Chlorella sorokiniana
  unsure (1)..(482): unsure at all n locations; Clone ID: LIB3602-036-Q6-K1-A12
cggcctgctttgaaaaccctnctacctgggggccgttctgtatcatcttgcagcaatggcagccggctgcatctttctaacatcgtcaccggcccactcgtttgtgccatgcccacctgcctccaacgtcacccttcatcaaccctcacccaacccatccacctgccacccatgcggggggggtcccttcgccacaacctctgccacccactcaccacccattacccgctcaacgcccttcatgcaccattcttcccatccaccaaatctgccaccccaaacgcacgttcgccggtggaccacctggcggccccttacccggacccatttttcacccggcaccttttctggcggttaccggcggacattctaccttccacaccttacttcatgttcacccttcacccgcgctttacacagggggtggtgccatgcaaagctgctggcaaacccattcattatggttggacacccacttaccc

SEQ ID NO: 3256 - DNA, 484 bp, Chlorella sorokiniana
  Clone ID: LIB3602-036-Q6-K1-A2
gcagaggtgcgccaaagccggcggcgaggcctgccgctgccctgtttgccgggctgaggtgaccggcagcctgcgagtcttcgactgctagccgcaggcatgatgcctgtgtctggcctccagcagcaaagtcatgcagttcagcaatgcaatttgtgtccaagtccgcagtaccaagcattccataccacagcagcctgctactatgtgtctgcgttcaagcccttctatcagcccctctccgctcctaccctgttttcccagctgaaaccactcagccttttgtgagccgcactaatgcatgccgcagcgctctgcaacgttccaggattcaagactccctgttgcacaacctgtgtgccttctgcctgtgtttacaatacaaacctggctgtgaccgccggctggcctgcgtctctgtgcctgccctgcaactcgagccatgcctgtattacctcctctgttcctgttaaacctcctctgc

SEQ ID NO: 3257 - DNA, 199 bp, Chlorella sorokiniana
  unsure (1)..(199): unsure at all n locations; Clone ID: LIB3602-036-Q6-K1-A3
gccgctcgacctggcggccgagcagcggnacagcaggggcgccgtcccgccgttccctagcaggccctgcctcccttccgggggcggcgggccggcgcatgtgtgtgtgtcaaacctgtgttacctagttcaaccctgagaagattcaaacacccctcacgaatcacatatgcttttttgtgtgtaaacgcaagccgcc

SEQ ID NO: 3258 - DNA, 575 bp, Chlorella sorokiniana
  unsure (1)..(575): unsure at all n locations; Clone ID: LIB3602-036-Q6-K1-A4
ccttcatacctttgtacctttctgtatcatcttgcagcaatggcagccggctgcatctttctaacatcgtcaccggcccactcgtttgtgccatgcccacctgcctccaacgtcacccttcatcaaccctcacccaacccatccacctgccacccatccactcaccttccctccgccacaacctctgccacccactcaccacccatcacccgctcaacgccctccatgcaccatcctccccatccaccaaatctgccaccccaaacgcacgtccgccgctgcaccacctgccgccccctcacccgcacccatcttccacccgccacctttcctgccgctcaccgccgcacatcctacctcccacacctcactccatgtccacccttcacccgcgcttcacacagcggctgctgccatgcaaagctgctgccaaacccatccatcatgctcgcacacccactcacccacacgtccaacgtatccagacccattttcaaggcccgactgtacagtgcctttttgcgtccttatgccgatctggtaccaggnacttaatgtgtaacaaatggtatgtt

SEQ ID NO: 3259 - DNA, 168 bp, Chlorella sorokiniana
  Clone ID: LIB3602-036-Q6-K1-A5
aaaaaaaaaaaaaaaaaaaaaaaaaaaaaaaaaaaaaaaaaaaaaaaaaaaaaaaaaaaaaaaaaaaaaaaaaaaaaaaaaaaaaaaaaaaaagggggggccgttcttaggggtcccaattttccgtcgcccgtgcttgcaaccttgttccctttttttttggggccc

SEQ ID NO: 3260 - DNA, 73 bp, Chlorella sorokiniana
  unsure (1)..(73): unsure at all n locations; Clone ID: LIB3602-036-Q6-K1-A6
naaaaaaaaaaaaaaaaaaaaaaaaaaaaaaaaaaaaaaaaaaaaaaaaaaaaaaaaaaaaaaaaaaaaaaaa

SEQ ID NO: 3261 - DNA, 598 bp, Chlorella sorokiniana
  Clone ID: LIB3602-036-Q6-K1-A7
gccttatcaccacttgatcggcagcacacccagcgccgctgctcagcaggcacagcaggcgcagcaggtgtcgggcgcagctgtggtgcgcgcgctgcttgcaactgaggatgatggcagcagcgatgggcagccagggcggcctgcctcctctcccagaggcggcgcagcaggcgcagcaggcgcaggcggtgtaggtgcggcagcggcgtcaaggcccgcggcggttgcggccatcctgaccgcggcgccacagtgtgtgccttttgaggagcgggtgtccgtttttcgggcgctgattgatgcagacaaggagcgctgcggctaccacttggccccagtggacggcggcgctcgcccgatgccgctgaccatccggcgtggctatgtgttggaggatgctgcagcgcagctggggcggatgggctgtgcggtcaagtctcggctggccatcacctttatcaaccagcagggcctgcaggaggcgggcatcgacatgggcggcctgatgaaggagtttctggagagtgtggtgtcccgctgggttcgaccccaaccgagggctgttttgccgccacgcccgacgggcaggcgttac

SEQ ID NO: 3262 - DNA, 576 bp, Chlorella sorokiniana
  Clone ID: LIB3602-036-Q6-K1-A8
ggccgtgtggttccgcagcggcgtgatcccccctgccggccagtacggcaagtactggatggacccctacagcctgttctggattgaggccatcctcatgaacttcgcggagctcaagcgctggcaggacttcaaggagcccggcagccagagcaagcagtacttcctgggcctcgaggccgtgttcggcggctccggcaaccctgcctaccccggcggccagtggttcaacatgctgaacctgggcaagacccccgaggagatgaagaagctgcagacaaacgagatccgcaacggccgcctggccatgattgcgtgcctgggctgcgcggcgcagggcgtcatgacgcagaagggccccttcgccaacctgctggagcacctggccgaccccgtgtccaacaacctgctgggcaacctggccaccatcctgaagcagtaagcgtgctgccccaagccccggcctgggtgtgagggctgccagggcggcggccagccacatctagagcctttgcattccttggctcggggcggcgactggtggcgggccctccggccgtgcctgcctgccgcccc

SEQ ID NO: 3263 - DNA, 600 bp, Chlorella sorokiniana
  Clone ID: LIB3602-036-Q6-K1-A9
gcccgtcacctccgacagggcctgtgcggcggcatcaacaccgtggtgtgcaagtacactcgtgccactgtgaagacggtggccgacaccgctggtgatgatcctaacgaggagctgctggtggtcatgggcgagaagggccgctcccagctgcagcgcgacatgcgggagagcatctacgccaccattgcggacaccaacaaggtccgggtgaccttcccggaggccagccagattgcggaggagctgctgaagacggagtttgacaccgcgcgtatcatctacaaccgctttgtgtcggccatctcccagaagcccacgatcgccaccgtgctgtccccggacgcgctggagaagacggcggcggagggcgcgcccatcgagcagtacgagattgaggggcccgaccgcgcggagctgctcatggacctggccgagttccagctggccaccacgctgtacaactgcatgctgggagaacaactgctcggagcagtcgtcgcgcatgagcgcgatggagaactcgaccaagaacgcgggagaaatgctgggcaagctgacgctgacctacaaccgcacccgccaggcttccattacaac

SEQ ID NO: 3264 - DNA, 504 bp, Chlorella sorokiniana
  unsure (1)..(504): unsure at all n locations; Clone ID: LIB3602-036-Q6-K1-B10
cgccaccccacccctcccaacccgacattttttgtttggtccgcaggcggttctcctgtgtctgtgtctgtccgtccagagaagagctcccctctattcatcgttacagtctttaattccgtccctggcacgcctgcatttcccctgctccctccctcccccccctgtattcacaaattgtttcgtcataggacgccggcgtctagccggagcgcgctccttgtaacattcttgggcccaaaaaaaaaaaaaaaaaaaaaaaaaaaaaaaaaaaaaaaaaaaaaaaaggnnggaacggtcgcaaactaggcctagagccattttgtcccctcacccataaacatgcccaaaaaattgaactgccccgccattatgacagcctgttcctcttctccccgatttcatcgccccacgccaaaccgtgggcttatttttccgaggccctttgccttatatgctgccccctccgccactgggagccctccgtataaaaatgacgccggc

SEQ ID NO: 3265 - DNA, 583 bp, Chlorella sorokiniana
  unsure (1)..(583): unsure at all n locations; Clone ID: LIB3602-036-Q6-K1-B2
ccagttttagggctagcaagccgtcgcggttccagcccctttcgcaactccaccagctccccctgtctgcacacgccatggctcccaaggttttcagttggaacttccccggcgcttacgccgtgcagttcatgaccgtggtgtcgtgcaccgcctgcgtgtacacttgctaccacttcctggtcaagaacccggatgtgcactttgtcaaggagctgaagcaggacgagctggcggagagcgcgcggtggtcccagcaggccaaggccgtccagggcaacgtgttccgctggctggcgcagacgcgcgacaccgccgcgggcgagcagaaggacacccgcatcttccgcgtttgagcgcccgccaggctgctgcgctaaatcggcgcgcaataccagccgntcaccgccactcgccgccgctgcgcccccctgtgcttgctctcagggcctgaggccctctgccagtcagccacctggggccggcacccccttgccgctatgatatgcgtccccaaagctggagtgaggcattgcggaacccaatgctgnttttccaccgccctgctttttatatatctgcc

SEQ ID NO: 3266 - DNA, 614 bp, Chlorella sorokiniana
  unsure (1)..(614): unsure at all n locations; Clone ID: LIB3602-036-Q6-K1-B3
cgtccgagagctgctgcgcaccaacttcgacttcagctacaacggcaaccgtgctccatttggcctgtatgtgcacacgccttggttcaccaaggacaccattgagggcaccaaccgcttcttggagtacgcgctgcagctggacggcgtgtacgctgtgactgtgcgccaagtgatcgagtggctgcaggacccggtgcccgtcagcgagatggacgcctggcttcagtgcaaggacgtgaacgtgaccatcgtcgagtcgctagctggcaagaagtgccaggtgcacacggtgaagagcggcgagacgggcggcgtcattgccggcatctacggcgtcagcctggctgacctggccgncgccaacaacggcacagacctgaacgtcatcggggttggggagaagctcaacatcccgcctttcgacgactcctgcaagcagcagggcggcagcacaaatgacagctgaccaagcagtgtacccgctaaccaacccgccacgcccgggttaaacatttgccgccagattggccaccaccttcccacatcagtttgcgacagcacatgcaatcccgtgcatccccttattcgtcatgatgccctgctctccctgc

SEQ ID NO: 3267 - DNA, 312 bp, Chlorella sorokiniana
  unsure (1)..(312): unsure at all n locations; Clone ID: LIB3602-036-Q6-K1-B4
ccacccgctctcccgacgttcgctccattctttttnaccctcctcacaattgaaccttcacacgctctgcttttccggcaccgttcctccagctcctccccctcccgcctgctcttgaactgctgcagtgccgctgcaaacgcgcctgtacatgtaagtcacaggagcaaaaaaaaaaaaaaaaaaaaaaaaaaaaaaaaaaaaaaaaaaaaaaaaaaaaaaaaaaaaaaaaaaaaaaaaaaaaaaaaaaaaaaaaaaaaagaaaccaggaaaaggaaaaaaaaaaaaacaaaaggaaaaaaaaaataaaat

SEQ ID NO: 3268 - DNA, 610 bp, Chlorella sorokiniana
  unsure (1)..(610): unsure at all n locations; Clone ID: LIB3602-036-Q6-K1-B6
gtcgcccacctccgtgactggcacaaatcggagtgcgctcggtgcccatccgcaagnacgacgaggtgtctgtcgtgcgcggcacctacaagggccgcgagggcaaggtggtccaggtgtaccgcaagaagtgggtgatccacatcgagcgcatcacccgcgagaaggtcaacggcgccaccgtgaacgtgggcgtggacccctccaagtggtggtcaccaagctgaagctggacaaggaccggcgccagctgctggagcgcaagcgcgcgggcaagggcctggccgacaagggcaagttcacggaggcggaggtggcggccatggagaacgtggactaagcgccacgcccaccccgcagcagccagcagcagcagcagtgttgaggccgcgggcgggccaccgacgccagtgcggctcgggtggcggcggcccgacggccccggtgggggcagcctctccgtgtggctgtgcgctccaccggcagcggcgcagcctcggcagcgcttggaagcatggaggctcgagaggcccttgctcccgcgcggcccagcggcgcttgctttcatgcagcggntctgccgcagcgcgtcacacggcgggcgctggcg

SEQ ID NO: 3269 - DNA, 305 bp, Chlorella sorokiniana
  unsure (1)..(305): unsure at all n locations; Clone ID: LIB3602-036-Q6-K1-B7
gcatgtgtccctacgcgcctgccccgtgctgtggttttgttacgctgtgcactcctttgttctttactcggcagggattgattcccggccccacgctagttctcctgtgcttcaaaccctgcgcgcctgtaaacaggcaacatcaaaaaaaaaaaaaaaaaaaaaaaaaaaaaaaaaaaaaaaaaaaaaaaaaaaaaaaaaaaaaaaaaaaaaaaaaaaaaaacaaataaaaaaaaaaaaaaaaaaaaataaaatagagttaaaagaaaaaaanaaaaataatacgggggaggaaaaaaaagaaa

SEQ ID NO: 3270 - DNA, 406 bp, Chlorella sorokiniana
  Clone ID: LIB3602-036-Q6-K1-B8
cctgctgggcctgctgaccaacgcgaggcacgccggggcagggcctggacgtggatgcgctgtacgtgagccacatccaggtcaacaaggcgcagaagggccgccgccggacttaccgcgcgcacggccgcatcaacgcctacatgtccagcccctgccacattgagctgatcctggcggagcgcgggcaggcggtgaaggccgaggcggaggacaagcgccgcaagctgagcaagaaggagctggccaagaagctgcgcagcggcaccaccagcaagagcagctaggcggccgcccacggagcggcagcctgcggcggcggttgggggcggcgcctgagcgctgcaacgccgccgccacgcggttgcatgaggaaccaacaacacatgtaacgccctagtccttc

SEQ ID NO: 3271 - DNA, 530 bp, Chlorella sorokiniana
  unsure (1)..(530): unsure at all n locations; Clone ID: LIB3602-036-Q6-K1-B9
gtacgatccggcaaccgtgctggtggcggccaacaggcggttcgcttcggcgacccagccgggctgctgcagcagttgggcggcgcggggctggcggatgggcgggcagggggcattgaagtcgactactacctgccggcgcacctttggtggaaggcgctgctggagctgccgctgcccatccagcccgcccttgcaaaggcccaggcgcagcgcccggacgatgatgtgtttgaggagggccgcctcaagatgctggaaatggcaaggcagcagggctggctgacggacggcggcgacctgcactgcaaggacaacggctgctggtttgtcactgcacggaagcctgctgcctgaacacgatgctgggacggctgctcctgcctttgtccccacagccttatgtcccagcgcgtctgctttgtctgcccgatttgacaactgactgaccaaatgttttgttacaaccgcgagacatttctgggttgaacgacttgagcgtggaagaatgtgagacgtgctgtccccna

SEQ ID NO: 3272 - DNA, 148 bp, Chlorella sorokiniana
  unsure (1)..(148): unsure at all n locations; Clone ID: LIB3602-036-Q6-K1-C1
cggncgcgtgggctgctactgctacttcgcctccagcacaccctcggccccagtgcgccacccagcagtcgcctcacttagcgcccacacgtatggctgatcaggcgtccctgctgctgcgccggcagctcaaggagctgaccaagaa

SEQ ID NO: 3273 - DNA, 573 bp, Chlorella sorokiniana
  Clone ID: LIB3602-036-Q6-K1-C10
ggctggcacttccccgaaagaccaagatgtggccgacaacatcgcgtacgccaagaccgtcaagctgatgggcacgcgcgacaaggccgctgacattgacttctccgacttcctggaggaggaggcggagagccagctcaaggaggcggccgtggtgagcatgggcacagagatcagcgaggacgacgtggccaacatcctcaacctctgcgaccaggtcatcgcgctgagcgagtaccgcgcacagctgtacgattacctcaagtcgcgcatgatggctgtggcccccaacctgactgtgctggtgggcgagctggtgggcgcccgcctcatcgcccacgtcggctccctggtcaacctggccaaggcgcccgcctccaccatccagatcctgggcgcggagaaggcgctgttccgcgcgctcaagaccaagcacgagactcccaagtacggcctcatctaccacgcctccctcatcggccaggcgccgcccaagctcaagggcaagatctcgcgcgtgctggcggccaagtgcgcgctgggcgtgcgcgtggacgctctgggcgaggtgtc

SEQ ID NO: 3274 - DNA, 590 bp, Chlorella sorokiniana
  Clone ID: LIB3602-036-Q6-K1-C11
cacggtggtggtgtggcctcccgtgctaccatccgccgcgtcacccccggcttcctcccccagttctactggtccctgggccgtgccctgctcaagcggctgcgcgagccgctcagcatcttcacagactatgccatcttcgctctgacaggcatgacgctggggctgatctccgaccgggggcgcgagaccatcatgcactttgcggtgtccatcacctactcggtggtggcgctgggcctcatgtccaccgtgggcgcgctgcccacctttggccgcgaccgagtcgtcttcttccgggagtctgcttcgggcctgaaccggctggcacacttcctcgccctggacacattcgaccatgcgggcacagtgctgcgctctgcagtgtacttcatcatgtattacagctttgcgtcgccacgggcggtcatctggcagatgctgctcgtcagcatcttcatcacttactgctgcacgggcatggcgtacgtgctgtcgcaggcgctggacccctcggcagcgcagctgtcggcggccaccctggcgctcatcaacactctgatcgcgcggcagggccatgcccggggcct

SEQ ID NO: 3275 - DNA, 608 bp, Chlorella sorokiniana
  Clone ID: LIB3602-036-Q6-K1-C12
tccgcccgccgcaatgagctgtcgggcgtggcgttccccggcatgaacggcaactcggctgacggcaagagcttcaaccagcccgacagcccgcacgtgcccagcgacatggcttgagcctccgcctcaaagctgcatggctgagctccaaacctccgcctgacagcacacctgcgccggcggcacgagggctgctgctgtgcacccgccaaggcgggaagtgcaccatgccgccgcctgtgccgtttgccggccagtgactgagcgatgtgtgcggcgtgaaccgttgactatgcgaccttgcatgctccatgcaccctggaattagcacgctattgctgcacttgcccgccaagcagcgggcgcgcgacacccctgccccatcgcatgcagcattccacttgcattttgcactacgaacccttcccgtaaggctgctgggctgcggtacggcaagcagcccgcctgctggccatgcggctttgatacgaccccaccccccaaacccaacgacagcttcattcccgccaaagtttttcaaaccccttccggagccgttggacggcgttcctttggttttgcaaacacaacccgctcactttgcatgg

SEQ ID NO: 3276 - DNA, 378 bp, Chlorella sorokiniana
  unsure (1)..(378): unsure at all n locations; Clone ID: LIB3602-036-Q6-K1-C2
gcgtngacaagccggnactgctgccccgggcgagttcacccctgtcatcgacgtggctggattcctcaccgagggcgaggagcggcggatacgggaccgggtggaggcgctggaggctgacaccggcgtgaagctgcgggtgctggcacaaaactacccgcagacgcccggcctggccatcaaggactactgggtgagccgcggtagtgtagcattctctaccaactgtagcattggcttgcaatgccttgcagccgccatgccattgcaaccttcgtgcggcagtggctggcacctgcagcctgcttctggttggggttgctgctctggtattccagctcattcaggtgccactcgagctggctcaacaattgctgc

SEQ ID NO: 3277 - DNA, 594 bp, Chlorella sorokiniana
  Clone ID: LIB3602-036-Q6-K1-C3
ctgccacctgccgcgcggcatgcactgctgctgccgccgctggatggtgaacatggcaacaactacagcagggctgacccacgcctgccgaccatcccgccacctatgatccccggcaacactgacaagcgcacattgatgtgtgtgttagaggcgaggcacactggacctgggtggcgcttgctccactgccaccaatggccatattgtgctacgtcgactttaacgcttatagcggaagcatgtgctgttcctgttgcaggaggacttgacgagcattgttgccgatagccatggattcaaacatcgagcggaacgccctaacgctacaggccatgcccgtcaaaagtggggctggtcagccttcaagccaggtgctgatcagctgactgcttgcttgctggagtgcgacttgcatgttgccttgctgagacattgccagccgtaatgcccacaggcgactggttggagctacttttggacacacgggtgaatcaaggcagcagaaacgctactgaccagccagtggcagtgtcaatcagcttcctgcacagctaccaagcacatgggagtggccgaagctaagtgcctttc

SEQ ID NO: 3278 - DNA, 371 bp, Chlorella sorokiniana
  unsure (1)..(371): unsure at all n locations; Clone ID: LIB3602-036-Q6-K1-C4
ggnagctgtgnagcttcaacacaatttctgacaccttttgtgtttgatgcgttgcacaactgatgggaacaatgagcaggacgcccaggcatgtggagacgggggctaaagggcagttgggggatgccgagctgcagcaggaggcagctggcggacagcaaacagcctgactctgaatgatttttgtgcacagcagggacgaggcgcttgtgcatcgccctgccctggcacacgctcctgacgcccttttggctttgatccgttgcatagcgcaaattcgactagcgttgctgtactgtaatcgtatggacacanaaaaaaannaaaaaaaaaaanaannaaaaaaaaaaaaaaaaaaaaaaaaaannaaa

SEQ ID NO: 3279 - DNA, 582 bp, Chlorella sorokiniana
  unsure (1)..(582): unsure at all n locations; Clone ID: LIB3602-036-Q6-K1-C5
ggcaacaaaaccgagcccaccaaacagccagcggcctatgccggcagccctcgtggccgtgccggcggccggcactgccgcagctagccgtcggcgccagcagcccagctgaacgactcatctgtgcggccgctgggccgctgtgattcatttgcatcggcccatgagcggctgccttgcacgcatggtgcggcacggcctgctctgcggcccttcatacctttgtacctttctgtatcatcttgcagcaatggcagccggctgcatctttctaacatcgtcaccggcccactcgtttgtgccatgcccacctgcctccaacgtcacccttcatcaaccctcacccaacccatccacctgccacccatccactcaccttcccttcgccacaacctntgccacccactcaccacccatcacccgctcaacgccctccatgcaccatcctccccatccaccaaatctgccaccccaaacgcacgttcgccgctgcaccacctgccgccccctcacccgcacccatcttccacccgccaccttttcctgcccgctcaccgccgcacatcctacctcccacacctc

SEQ ID NO: 3280 - DNA, 561 bp, Chlorella sorokiniana
  Clone ID: LIB3602-036-Q6-K1-C6
tccggcctcctccacaggccggcgactgccgcccgcagacgccccccattgcccctcccgtcaaggaggagggctgctccgccaacgtctgcttcctgctggacggctccaagtccctcatcaacgtggatgcctggaacgacgtggtggcctctgcccgctccatcatgtactccatcgccgaccccgccgccgtgtttgacgtcttctggttctccaacgacgtggagcgcatcggcgagcaggtgaccggcgctgaggtggcctcctccaacaagttcatcaaggaggtgatgaacacggtgcccaacgcgcacggcaccttcatggcccaggccatccagacctgccaggatgtgctgaccaaggacaccgatggcccctccaagaccatcgtcctcatcaccgacggcaagcccaccgaccagccagacgctctggctgctgcggcggcggcacgcaagcgcggcatcaagatggtgaccgtgggggcaggagagattgactacgacattctgaagcagctgtcctcgggcccctcctacgtgtttgccaactttg

SEQ ID NO: 3281 - DNA, 372 bp, Chlorella sorokiniana
  unsure (1)..(372): unsure at all n locations; Clone ID: LIB3602-036-Q6-K1-C7
gcagcgctggccggcagtgcagcctcgcggccagctggcgggggctgcactgcagcaaacttctcgcactcacccaacgctggcgttgctcccgccttgtttcgacttgaccttcttcctcttgacctcctgaaccaaccccgcttgtacaaaactatttgattgcatcctgccccgtgtaccctttccgccctccctctccactcagccctgtatggcatcacaactgaaaccctgtaatgcactcctgtttgcgaaaaaaaaaaaanaaaaaaaaaaaaaaaaaaaaaaaaaaaaaaaaaaanaaaaaaaaaaaaaaaaanaaaaaaaaaaaaaaaanaaaaaaaaaaaaaaaaaaaaaaaaaaannaaa

SEQ ID NO: 3282 - DNA, 507 bp, Chlorella sorokiniana
  unsure (1)..(507): unsure at all n locations; Clone ID: LIB3602-036-Q6-K1-C8
cggccgcgtgggcgcngagcgcaggagtatgagaaaagttcaagcgctgggcgccgggctcgctggtccgcatgtaccaggggagcgctgtccaagcaaagcagcagctggacagcgcgcaagagcgaggcttcactatggacgacatgattgaacccaagacagccggcctgctgcagcagtcgcaggaggactggcacgaggtgcaccaagctgcgctggaccgcgcacgctgcgccgcctgcacccgcgtcggcatcggcctcatgcgctgctcagcctgcaagtcggtcaagtattgcagcagcgcctgtcaaaaagccgattggaaagcccacaaggaagtgtgcgcctcgttggccgcagcgcacgccgaccgccgcaaccggcagcgcggctgagctcgttgcctgtaccattgccagagcttgggtttgcgctgcgagtgcgtgttttggcgagtgttacgataccatgtgtctagtagttgtaatgtgtggacacccc

SEQ ID NO: 3283 - DNA, 620 bp, Chlorella sorokiniana
  unsure (1)..(620): unsure at all n locations; Clone ID: LIB3602-036-Q6-K1-C9
gcgctttggccatacctgcacgcgtcctgggacggtcagcttgggtcgccgcccacaggcattgctccgcatcaaggcttgtagccagagcgcaccgccagcagtggcgccgacggcagcaggaggcagcggcaggcaggcagcggcagatggcgggctacaattggaagcgggcagaggcgtggcgggcgcacccgctgctgaacaacaccatgcggcactccatgcccggccttggcctcggcctggcggcctttgcggtttatgtggcctatgaccagcttgttgtgaagggccagagcggcgccaaggggcaccactgagctttcggcttagctgcccaggcacgccaagctgcggcatgctgttgtagcagcaccctgctgcgctgatgctcggttctttccattgtggcatgcttgatgagtagcacccgcaccacccctccctcgcatgagcttccccctcgtccccgcttccttcactgcgcttcccactgatggcctgaggccaccctgcaagctttccccgcttcctttgcgctgcatctcacgcaatgcggatattgttacagagctgggccgcagcagcaggacgtgctgtaactgccgnctttgcaa

SEQ ID NO: 3284 - DNA, 429 bp, Chlorella sorokiniana
  unsure (1)..(429): unsure at all n locations; Clone ID: LIB3602-036-Q6-K1-D1
ngtcgnaccccggctgtccggaaaaaaaaaaaaaaaaaaaaaaaaaaaaaaaaaaaaaaaaaaaaaaaaaaaaaaaaaaaaaaaaaaaaaaaaaaaaaaaaaaaaaaaaaaaaaaaaaaaaaaaaaaaaatttttttggaaaaaaaaattaaaaaataaatatattaaaaaaaagggggggtcgggttggggggggcctttttttttggtgcccttttttggcgcngtttttggcttttttttttggtgtttttttttgggggatcctttgaccttgttttcccccggggttttctggggaaacccttgggggttccccccttttgtccccctttcgtaaatttccccttttttaaaccttttttttttttggtggggggtttcccacgggccggccttncccctttttccccccccttggggggcctt

SEQ ID NO: 3285 - DNA, 297 bp, Chlorella sorokiniana
  Clone ID: LIB3602-036-Q6-K1-D10
caggccaacaacttcctgtggcccttcaagctgtcctcccccaaggcggcatcgacaagaagcgcctgcactacatcgagggcggccaggccggcaaccgccaggagtacatcaacaacctggtgcgcgccatgaactgagcgctgagccggcgagcacagcgcagcgcgcgcagcacgcacagcgcggcgcgtgcagcagcctggacggagcggccccctgatgcctgctagccacggcactgttggccgggccagtcgtgaggccccgagcgcacccgaatgtccaagggagtgc

SEQ ID NO: 3286 - DNA, 318 bp, Chlorella sorokiniana
  Clone ID: LIB3602-036-Q6-K1-D11
ggcccagcaccgccggcgtgtatcacgctgcctgcaaccctcagcacagcaccagcgtccagcctggtccccagaggctgcgcagcaaccaaatttaccatcatgacgggcggcaggccgccacagcggcgctacaaccaagcagtatgcgcatgcaaacaggcggtggcggcagcagcaccacctcaaccgtcgcatccctcacacagacagcatgacttctcgttatttgcacagggctgttccgctttgtattcagtttttgtgcgttccacaccattgctccacacctcactgaccctgtgaccaccacccggc

SEQ ID NO: 3287 - DNA, 435 bp, Chlorella sorokiniana
  unsure (1)..(435): unsure at all n locations; Clone ID: LIB3602-036-Q6-K1-D12
ggcggccatccgcgtggcgcagcggccggngaacagggcaagatggtggtggtggtgctgccgtcctttggcgagcggtacctgtcgacagtgctgttcaaccacatctggggccgggacgctgacgtggacgacgcgctgcccaacagctggaaggagcgcagcggacaggagaagcctgccacgcaggaggccaagctctagctgcggatgagacgcatgagcaatttcaggacgacgcactagctggctaccctcttttcggcgccgcacctgcggggatgccaaccgccgtcccctccctctctcgcctctgccccgctgcatgcgctgcgctgcccagcgcgtgctcgattactctgtatctgtcccgcggggctgcggcgctctgatgactgtgcattgactagctatggtaatgagtgctccgacnna

SEQ ID NO: 3288 - DNA, 246 bp, Chlorella sorokiniana
  unsure (1)..(246): unsure at all n locations; Clone ID: LIB3602-036-Q6-K1-D2
atagttctagatcgcgagggccgccctttttttttttttttttttttttttttttttttttttttttttttttttttttttttttttttttttttttttttttttttttttttttttttttttttttttttttttttttttttttttttttttttttttnataaaaatttaaggataaggggggaagggggagggggtagggggggagggggggaaggggagagggagggggggggggggcaagag

SEQ ID NO: 3289 - DNA, 593 bp, Chlorella sorokiniana
  unsure (1)..(593): unsure at all n locations; Clone ID: LIB3602-036-Q6-K1-D3
tctggntgtgctgccgcagcctatccatcgcttccgatcaaacggcgacggccagagcgcagacctgctgcaggatgtgatctacaaanaagaggtcagccactgcgcagcaggcgtgcgctggctgaagcacttgcatgctctggcccgcagcatgggccagcaggcaggcggcaatgcggcggcgggcgaggcgtcatcacatcggcaggcgcagcagcagctggagacagcggcagagccgcagcagcagggggacagcgaggctggggctgcgggggagcagcggctgcaggcatgggcagaggaggctcagaagtatcccacagttgaggagtggttccattgcctggtgcgggcgcacttccgtggccccctcaagccacccttcaacgaggaggcacgtgcagcggctggctttggtcccgagtggtacctgccgctatcagcagacgtcatggatgctgcagaggcagcaaaggcggcagcagaggcagcagcagcagccccaacagccgcaaaggcgacggcagcgggagccagtgttgacgcatgannactgtgctgaacggtgtgatagntatctacatttt

SEQ ID NO: 3290 - DNA, 234 bp, Chlorella sorokiniana
  unsure (1)..(234): unsure at all n locations; Clone ID: LIB3602-036-Q6-K1-D5
ggnatagttctccctggtgaccctgngctgagnccagnaacaccaagaaggcgtggttgtgctggaggcgtaagcgcctgccgcacgccgcagcaccaaattgacgtcacctcccaccgcagcagccgcactctcccgacttccctgcacgcgttgcagcagcatgtaacgcgcgcgctagcaaaaaaaaaaaaaaaaanaaaaaaaaaaaaaaaaaaaaaaaaaaaanaaaaa

SEQ ID NO: 3291 - DNA, 599 bp, Chlorella sorokiniana
  unsure (1)..(599): unsure at all n locations; Clone ID: LIB3602-036-Q6-K1-D6
cagaagctggcacggggggtgtggtggagcgtgtgcaagaggcggccacctcggccacccagaccgccaaggaatatgtgcagtccgccaaggagatgctgggcctggccagcgagaagtgagccgagcacaatgaacgagcctgcctgatggcctggaggaaatccagcgagcagagtaaagtgaggatggcacaccagcgagcgttttgaggagcggttgccacaagtttcatccttctgcgctcctgagcgctctgttttgagagtcgtgtttcatcgtatgtggtgccccgtgatttcaacatcgatgccggggacaacccctttacataaaaccgccacatgctgccgcccgctggcagcttgctgttggcgacgttccattttcatctcggaaccaagtttcctgcgcgatgcacccgctttcatctagcgtctgccaccacttttgattctgcacatctcagctgcatgccgccccatatgctctgcaacatatgcgcttgcatgtaatttgctagcaccattcacacttttccacgttgaagaggttncgcggttacattctgtcttcacatgtaaggtgctacacgtcat

SEQ ID NO: 3292 - DNA, 591 bp, Chlorella sorokiniana
  Clone ID: LIB3602-036-Q6-K1-D7
gccgccaccacagcccagctggtgcagctggtcattgatgcggtgaagagcggcaagaagaaggtcaagattgaggtggaggttgaggtgcgttgacagcgggggcagcgcagtgtgtaggatgtgttgatgcagtgatggtgtgtggccgcgcggcgtgcggactgtatagatgtgtcgactgcgtgggcagcacaggctgatgcagcgtgctgcaggcggctcgcaatgcacaagcggctgataaacattgcttttgctgcagggcaagctgtccgaggatggcaagtctgttgagctggagatcgagatcgaggccaaggagggcgaccgcaaggagagccgcgagctggagtactcggtgcccctgtgataaaccactgaaccagcctcaaatctgtacagctgctgcataacacctgctggccatttgtagttgggcgtttgccactccacttgctgcaactggatcaggctgcactgcctgctgttgtgcgtgctgctcaaatgttgcctctcttccatgtgctggcatgccatgtcttcgtgttgctttgctgctgtgttgggtttaggtgcatacgttatggc

SEQ ID NO: 3293 - DNA, 100 bp, Chlorella sorokiniana
  unsure (1)..(100): unsure at all n locations; Clone ID: LIB3602-036-Q6-K1-D8
naaaaaaaaaaaaaaaaaaaaaaaaaaaaaaaaaaaaaaaaaaaaaaaaaaaaaaaaaaaaaaaaaaaaaaaaaaaaaaaaaaaaaaaaaaaaaaaaaaa

SEQ ID NO: 3294 - DNA, 169 bp, Chlorella sorokiniana
  unsure (1)..(169): unsure at all n locations; Clone ID: LIB3602-036-Q6-K1-E1
naaaaaaaaaaaaaaaaaaaaaaaaaaaaaaaaaaaaaaaaaaaaaaaaaaaaaaaaaaaaaaaaaaaaaaaaaaaaaaaaaaaaaaaaaggggcgggccgttttagaaggaacccaagctttaacgtaccgcgtgcatggcgaacgtaataagtttttttttggttgg

SEQ ID NO: 3295 - DNA, 531 bp, Chlorella sorokiniana
  Clone ID: LIB3602-036-Q6-K1-E10
gcaagaagcacctgcccggttatgtggcggatgctgagaagctgaaggctgcgggtgccgaggtcgtggtgtgcgtggcggtgaacgacgcgtttgcgatggacgcctggggccaggccaacaacacggagggcaaggtggtcatgctggccgatgcgcgcgctgagctgaccaaggcgctgggcatcgagcttgatgcccccgctgtgctgggcaacacccgctgccgccgcttctctgccgtgattgaggacggcaagttcaagacggtgaacctggagcagggcggcgagctgacctgctccctgtccaacgtcatcgtggaccagctgaagcagtgagtgagttatggtggcacgagcggcacgagcagcagcaagcggcagagcctggcgtgtttgacgtcatgcggcggcactggggcttctaacacccactgctgctttgttggttgtcgcgcactgctgcctgctcgcgctgtatgcatacatcccccatttcatctcgctctgcccttgaataatgtgagag

SEQ ID NO: 3296 - DNA, 593 bp, Chlorella sorokiniana
  unsure (1)..(593): unsure at all n locations; Clone ID: LIB3602-036-Q6-K1-E11
naaaaaaaaaaaaaaaaaaaaaaaaaaaaaaaaaaaaaaaaaaaaaaaaaaaaaaaaaaaaaaaaaaaaaaaaaaaaaaaaaaaaaaaaaaaaaaaaaaaaaaaaaaaaaaaaaaaaaaaaaaaaaaggggggggcccgttttaggaggaccaaattttccttccccgtgcttgcaaggttttattttttttttggggcccccaaatttaatttaatgggccgggtttttaaaacgccgggatgggaaaaaccttggggttccccaatttattccctttgaaaaaattcccctttttcccagttgggttattagcaaaaaggccccccccgttcgcctttccaaaaatttgcccaccctgattgggaatggggcccccccttttaccggccctttaagcgcggggggtggggggtttccccccagggggccctttacatttgcaagccccttaagccccgttcttttggtttttttcctttcttttttggccactttggcgggttttccccgtaaagttttaaatggggggctccttttagggtcccaattatatgttttacggcccttcccccccaaaaaatttgttggggg

SEQ ID NO: 3297 - DNA, 572 bp, Chlorella sorokiniana
  unsure (1)..(572): unsure at all n locations; Clone ID: LIB3602-036-Q6-K1-E12
naaaaaaaaaaaaaaaaaaaaaaaaaaaaaaaaaaaaaaaaaaaaaaaaaaaaaaaaaaaaaaaaaaaaaaaaaaaaaaaaaaaaaaaaaaacaaatttaaaaaaacaaaatataacatacaataaaaaaacataaaaaaaaaaaatattggcggggccctttttaatgggattcccttttccctcccctttccttccccccttttttttttttttttttgggtccccctaatttaatttcctttgccccccttttttacatccccgcggttggggaaaaccccctggctgtccccccctttttcccctttgcccaaaatcccccttttcccatttcttttttttcggaaatttcccccccctcttcctttttcccccgtttgctcccccctttcttggaaaccgcccccccccttttcccccttttttcccccccttggtttgtgttctctccctttgggcccctttcctttgccctccccttaaccccccatttttggggtttcttcccctttttccgccccaagtttcccgtttttcccccctcagtttttttttcgggcccccttttt

SEQ ID NO: 3298 - DNA, 601 bp, Chlorella sorokiniana
  Clone ID: LIB3602-036-Q6-K1-E2
ccgaccatggccgcccctcctaccgctttggccggcgggcagcgatggcccacttcctcaagcgccactggttccggttcaaggcccacactatgcccttcaactccggcctgctggctggcgaagcgctggtgcacccgctcttccgctcgtatcgcagctgccagccgccccatgcagagacgcccgtgcccctggctaagctgttccctggtgcggcccccgcaaaggcgcgcgatccagcagcagcggcggcggcgcggcccggccgcaccggagcggcggcggcagaggcagcgggggcagtggcgtgatgacacccagttggggagcaggccggcggtgttttcgcaccggcctgctgcccggacctggaacaaaactcaacaccccgtcctggttgcacacttctcggctcggcctgctgcccaacctcggaacgtacagaaactcaacatcccgtcctggttgcatacttctcagctcaccaccccacaatcgggccaagaaatgggtttgtgaccctgctgcgacgctctatacgcatgccccccctacctgcataaagctgctgtgcacgtacacagacttgactgtaagc

SEQ ID NO: 3299 - DNA, 507 bp, Chlorella sorokiniana
  unsure (1)..(507): unsure at all n locations; Clone ID: LIB3602-036-Q6-K1-E3
gcggcggcggcggcggcgcctaccagcagcctgctgcgagggatgagtgggggtctggctgggacgatgctcctgccggcggcggcggcgcgcgcggcggtgctagcgcgggcagccggcagcagcaggcggcggatgcgcagtggagcggctgggatgagggggcggcttcgccctcccacgcggtgcctgccaatggcaaggcagctgatgccgatgactggggcaagtggtaggcagtgtgcccaagtgccaagtgtgagcgcgacaggctgcactgcacgctgtgctgttggtgtgcagtctcgtctagcagtggcgcaggcggccccgcggctgcaggctggcggcgcgcctgccccgctcccagcgcctgcgacccagatatgatttgctttgatccccttgctgctccctgccccgaatcaactgcctctattcactgctccctgctgcgacctcctgcggagcttttgccgcttcaccctcctgtgaacctgacctcnc

SEQ ID NO: 3300 - DNA, 588 bp, Chlorella sorokiniana
  Clone ID: LIB3602-036-Q6-K1-E4
gccgtttcgcagcaatgcagggctccaggcctcccgagctgcgggagctgctgatgggccacggccaggggcagctgcaccttgcggcggtcagggcgcgggccgaggagctgaagcggtcactggatcagatcgtccagagcctgcagtatgcggcggacagggtgcagtggtcggaggcgctggaccgctttgcggtgatcaatgtgcagtaccagcacctggtggatgcgctgcgcccgctgctgcgccagtttgccgcctaccctcgctccgtgaaccagaccaacgcccccatcctgcccatcatgctggccaccaagctgctgccagagatggaggcggaggaggcgagcctgctggcacagctgacggcggcacagcagccaggcggcggcgcaggcgccgaccccggccagctgcgcgccctgccggtggcggagcagtttgcttgggttcaggaccaggagcggcagctgaatcacctggtagaccaactgctgcgagaggagggtggcccgctgggcgccaagagcgagcggcggcgccagctggcacccgcagtgacaccagcagcagcggcgggcg

SEQ ID NO: 3301 - DNA, 610 bp, Chlorella sorokiniana
  Clone ID: LIB3602-036-Q6-K1-E5
tccgcccagcgtccgcaggccttcatcgaggcgtcctggggcccgctgctgtcgctgctgcgccaggatgcccggcaggcggtgccggccaaccttgcaggcgacaaggcggcgcgccagagcatcaaagacaagtggacaagcgtaaacaaggccctgggcgaggcgcaagcgcagcagggctgggctgtgcccgacgccgacctgcggtttgcactgaaagacgccgtgggcgaggcgctggtgcccacctatgaggccttcttctccaagtacagcggcaagccctacacctcagaccaccgcaagcacgagcgctacagcccagccgacgtgcaggcgctggttggcgacttgttcgagggtgcagacggcgcgggggcaggcggcttggtaggccgctctccgagcaagtcccccggcagcatgtcaggcggctctctggcccggcggctcagcgggcgcggcttcacaccctgatgcaatgccgggctgcggtgcaatgcccgtttcgcgtgcaatgccacaatgcgatgccgctatgcgcaacgttgccccgtctttgccccttgccaaacacacattgcacttacaggggaagctggggcat

SEQ ID NO: 3302 - DNA, 590 bp, Chlorella sorokiniana
  Clone ID: LIB3602-036-Q6-K1-E6
cggcaagaagccttttgtcgagtacctctctcgccactacgcgctcagccaccgcatgccgaccatgatcctgcagcgaggcggcggcacggtggacgaaacggtgatgctgcagcacctgctggaggggctgccgatagtggtcagcgaccgggcgacttcgtcagcagaagcgcgggagtacctcagagagaacccagagacgcggctggtgctgctagatgacggcctgcagcacctgccgctggtcagggactttgagatagtgatggtgaacagcctcaacccctttggcaacggccacctgctgccgcggggtacgctgcgggagcagccaaaggatgctctgcgacgagcggacgcgctggtgctgcacaacgtggacttgcttgggccggagcggcgagaagcccttgcttgccagatgaccagcctggcgccgcggcacaccatcctgttccagactcagatggagcctgcggggcttgcgatcactcatccccgcagccagcagcctaggtgcacggcagggtctgccggcagccaggcagcacacccgtttgcatgccgcctgcctgcatgttgaggcg

SEQ ID NO: 3303 - DNA, 263 bp, Chlorella sorokiniana
  unsure (1)..(263): unsure at all n locations; Clone ID: LIB3602-036-Q6-K1-E7
gcggccctgnanggcgtgtgagcagttggagacacggcagtttgatctcacagccaatcacagccaaacagcacgttgtgcagggtgcatttcccgcagtcagtcagttgcaccttctgtccagcgcaaatcctttctcagcgatctgatccatcttcagcccagtgaaagaagcaattacatgtgttgaatgtgatgtgctgtctatgtacaaaaaaaaaaaaaaaaaaaaaaaaaaaaaaaaaaaagggcaaacgttataa

SEQ ID NO: 3304 - DNA, 272 bp, Chlorella sorokiniana
  unsure (1)..(272): unsure at all n locations; Clone ID: LIB3602-036-Q6-K1-E8
accccgggtctgaccagcgttctagccgcttggggcggggctgcccgggggggggggggtctcgccctggccttgggcgcgcgcttctttccgctgcgcgcctggcagcagcttttctttccgcttgcttgtcctcttggcgggctgcgctggcgcctgggtcggggggcgccctcttgccctgcccccggggggggggggggtgttgttcntcgtgctctcgtgtntgtgttggttgctctgttgtctgcggctcccgtcgttgtgaaatg

SEQ ID NO: 3305 - DNA, 326 bp, Chlorella sorokiniana
  Clone ID: LIB3602-036-Q6-K1-E9
gcgcgtcaatcatttacagcaacactggatgaatttgcctcatatcagacaccaaaacatggctggcttgcaggatagcatgtgtaggcagcaacagataacagagtcgacctttggaccaagcagcggttgcaaaacaagtctctgaggcatgatgggcagcctggcaaacacgctgcatagaaaacatcccaagcaatggagccgtccagtccgggcgggccccaagcccaactgaacaaccaaatgagcccggttgcagcgttcgccccgtcgtggcaccgggcctgccgcgttatgcggcccaggccggtcattcccagcgc

SEQ ID NO: 3306 - DNA, 347 bp, Chlorella sorokiniana
  unsure (1)..(347): unsure at all n locations; Clone ID: LIB3602-036-Q6-K1-F1
ccccgctggnaggagccgcccactcgctccaaatgaattgatggagggtctaccgccacccgtgtagcaaacaacaccagcgcttccaggacgaatctgctttgcctgaaccgaccagccagccagcaaccagcgctctgccttcccgcggcagccagcacgcagcggcctgcaagccctgtaatttatgcgcttgcccagctcggttttgtgggggtgcagcacaggcttgatgcctcgctgcttttccaaagggtcaacgatgtgtaaatgtagtgtgcgaaaaaaaaaaaaaaaaaaaaaaaaanaaaaaaannnaaaaaaannaaaaaaaaaaaaaanaaaaa

SEQ ID NO: 3307 - DNA, 152 bp, Chlorella sorokiniana
  unsure (1)..(152): unsure at all n locations; Clone ID: LIB3602-036-Q6-K1-F10
ctccactggcagcggcggtgacagcggcgccagccgcggcagcagagaacgccggcggagttgatgcagcgaccagcccactgattcaaggcgagttgctcccagactgagccgacatgctttgtcgcgaatgttcatnctgttgccatgcc

SEQ ID NO: 3308 - DNA, 597 bp, Chlorella sorokiniana
  unsure (1)..(597): unsure at all n locations; Clone ID: LIB3602-036-Q6-K1-F11
gncggctacgaggacgtgcccgccacgacgccgactcgctgcacaggcactggcccaccagcccgtggcggtggccgtctgcgcctcccccgccatgcagttctactcgagcggcgtgatcggcgacgaccagtgctgccaggacctgaaccacggcgtgctggcggtgggctacgacaacagcggcgaccacccccactacattgtgaagaactcgtggggcgacagctggggcgagcagggctacttccgcctgtctgccaagtccaaggacgaccgcggcgcgtgcggcgtgctcaccaccgcctcctaccccaccaagaagggcaccaccaaccccgaggtcccctccttctgcggctactttggctggaccgagtgccccgtgcactccacctgcacctgcaactggaacctgtttggcctgctctgcctctcctggggctgcgacgccggcgcgcagtgagcaccacgcagctaggcggatgtggcacatgccacacgctctcgactgtgccgctgctgctggcgctgcagcatccacccatgtcccaccatgcacgcacagtcagctaaagcgcatggccgaggcacctt

SEQ ID NO: 3309 - DNA, 436 bp, Chlorella sorokiniana
  unsure (1)..(436): unsure at all n locations; Clone ID: LIB3602-036-Q6-K1-F12
tggcacgctgcggcccagcacctggnctttgcgggcanaccacatcatgaaactgcccactgaagtgtcacccggcatggtggcctggctggctgacccgaaccattgcgtgccacccccgctgcataccgcgcaatgccacgctggaaaacggcgccttcagcccatttgtgcgggcccgcggcattgtcgtggacggcgtggttgccagcccgcatgtgcgctggggctacgtgtggggccgcctgtggctgcccgccgccgtcaacccctacgtgccagctgtcatggaggcgctgctcacccccttctggctggcttacaaggtgttgggcccccgtctgacctggcgcatcctgcagcacccaatctttggcagctgggacatgggcaatatcattgtgggcaacctggcagtctggggtcaggcagccgc

SEQ ID NO: 3310 - DNA, 198 bp, Chlorella sorokiniana
  Clone ID: LIB3602-036-Q6-K1-F2
cggttccgcaccaacaacaccatccgctacaacgccaagcgccgccactggcgccgcaccaagctgggcatctaagcgcctcccacgaggagcagctgacggcagcagccccggcacggcaggcagtgcgctggccgcgcttgcaaggcagcccgtcagtggcatgatgacagcttaagcttgtaacgatggcctagc

SEQ ID NO: 3311 - DNA, 143 bp, Chlorella sorokiniana
  Clone ID: LIB3602-036-Q6-K1-F3
cggccgcgtgggcactggcacccgccccgctcctcgcacacctccaaaacatctgatgcgctcatggctgaagctgatgctgctccggttctttttattcgttcgattctgccatgccccctgcctgtgtaatgaatccacat

SEQ ID NO: 3312 - DNA, 98 bp, Chlorella sorokiniana
  Clone ID: LIB3602-036-Q6-K1-F4
ctgcctctctaaaaaaaaaaaaaaaaaaaaaaaaaaaaaaaaaaaaaaaaaaaaaaaaaaaaaaaaaaggggcgggcggttctagaagaacccagagt

SEQ ID NO: 3313 - DNA, 453 bp, Chlorella sorokiniana
  unsure (1)..(453): unsure at all n locations; Clone ID: LIB3602-036-Q6-K1-F5
gtcgacccagcgtccgggtatggggcggtctgctgcgcattgccccacccgcttatgccgctgtacggcatttcagtggagggacacctgagcatgctggccatgaagcacatgggagggcggctgcatgcgagacgtgctgtgccagccagacgccgccagcaccttgagctggcataactggggtgggcagctggcgctggacattgctgacggcatcgcgttcttgcacaacaacatgaagagcctgcatgccgacctgaaagccagcaatgtactgattgattaggaggggcgcgcctgcctggcggacctgacgctcgccaaggtgctggtcagccagccggcccgcacagtacgatggtgccacctacacatatgctgcgccggagcaactgatgggccagcgctggacgctcgcggcnnatatgttcagcctgggcgtgctgctga

SEQ ID NO: 3314 - DNA, 316 bp, Chlorella sorokiniana
  unsure (1)..(316): unsure at all n locations; Clone ID: LIB3602-036-Q6-K1-F6
gggggctgagcccccggccgccgccggcgctgcgccccctcctccaattgcacccagnaattccccgggcatccctgtacatttttgccccgcgcccgctattgcttccggccttgcttctgcccctgtacctttgccccgagcgtgcgccgccgtccccgcccgcctccttgcaccccgtctttgctaggcaggcccctctttgccggcgggcgggccggcggcggccaacctaggtaggctgttccttgactggcagctcacaacaggctgccacggacccaggcagcgtgctccctgtaacacatgcccctgg

SEQ ID NO: 3315 - DNA, 401 bp, Chlorella sorokiniana
  unsure (1)..(401): unsure at all n locations; Clone ID: LIB3602-036-Q6-K1-F7
ccacgccgtccgnaaaaaaaaaaaaaaaaaaaaaaaaaaaaaaaaaaaaaaaaaaaaaaaaaaaaaaaaaaaaaaaaaaaaaaaaaaaaaaaaaaaaaaaaaaaaaaaaaaaaaattaaaaaaaaagggggggcgcccccttttttggaatccctcctttcttcaccccccgccttcttgccgtgttcctttttttttttgtggcgccccaatgtaaattactttggcgccccgttttttaacaccgggggtgggggaaaaccccggtggcccccccctttttaacctggggggacctccccctttttcctccggggggtttacccaaaagggcgcccccgatgaccctccttacagaggggggcccctcttggggggtgggggggcccccccttgggggg

SEQ ID NO: 3316 - DNA, 272 bp, Chlorella sorokiniana
  unsure (1)..(272): unsure at all n locations; Clone ID: LIB3602-036-Q6-K1-F9
cggncgcgtggggtcggccggcgcaatgaaggccaggcagtgttctccttgccaagtggtgctgccccggcgagatgctggcgtgtttgagtctgtgcagccttccgacactgacctgggagccaaggcccccaaggacgtcaagatcactggcctctggtatgctcagctttcgtaagcgctgccagcgcccgtcgtttggagaagagattacagctttgtcgctcgacctgtttgtcagacgtagaactgctcatgtaacataagcgcgc

SEQ ID NO: 3317 - DNA, 445 bp, Chlorella sorokiniana
  Clone ID: LIB3602-036-Q6-K1-G10
gcgcggtggctcatctgacggcacaaacgcatgtggaccagtgtccgacgcccaggaggctgcagaaagcaagctggagtggcctgcacttggtggggtggcggtgctgggctggcacctgccggttggcgacgcagctgtggagctggtgcagcgctccaacgcatgcagcctggcaacttccgagcgcctggccctgccggccagtgcagccgctgctcgccccgagggcctgcacatcgatctgtccagcctgaaccaccagctcaagtgcggcgtgggtgtgcgcgtgcgctggagcagcggcgcagcggcaagcaacggcggcggcgcagcggcgagcgcctgattggggctcaacttgtcggtccatgctgtatgcatagctaagatacatagatcctcactttgtgcaatacgtatgctcttgtaaatgcagttggat

SEQ ID NO: 3318 - DNA, 605 bp, Chlorella sorokiniana
  unsure (1)..(605): unsure at all n locations; Clone ID: LIB3602-036-Q6-K1-G11
cacccctgnaaaaaaaaaaaaaaaaaaaaaaaaaaaaaaaaaaaaaaaaaaaaaaaaaaaaaaaaaaaaaaaaaaaaaaaaaaaaaaaaaaaaaaaaaaaaaaaaaaaaaaaaaaaaaaaaaaaaaaaaaaaaagggggggcccgttttaagaggaccaaattttacttccccggccttgcaacgtaatattttttttttggggcccccaaattaaatttccggggccgggttttaaaaacggggggccgggaaaaccccggggttccccaaattaaatcccttggaaaaaaacccccttttccccggtggggttaatacaaaaaggccccccccggttcccctttccaaaaatttccccaccctaattggcaaagggacccccccttttagcggcccttaaagcgcgggggggggggggtttccccccaggggaccctttacttttgcaagccccttagcccccgttcttttggttttttccctttcttttttcccccctttcccggtttttccccgaaaagtttaaaatgggggccccctttaggggtcccatttaagggtttaagggcccttcaccccaaaaaattggtttagggggagggt

SEQ ID NO: 3319 - DNA, 481 bp, Chlorella sorokiniana
  unsure (1)..(481): unsure at all n locations; Clone ID: LIB3602-036-Q6-K1-G12
ccgatagtggctctgccgactgacatgaggtgaacatgcccaagcggcatgcgggacccctagatgctgggcaccatgaacaacatgctgtagatcttgggcccccactgcctgccggcggagatgacaaaaagcggactctaatgcgaaccccatggacaagcagcgcgctcatgggcagaacacagcgtggacagtcgtgtaagcacaagcacctggcagctgctggcgcggctcatgacctgggtgaacgacctcatatactcttaccggcttgccaaggagtgggtgctcagacagagcgccctgaccctggccatactggggttggtcgtcaccctgctgttgagctggctgggctgggtgtgaggctcggtcccaccagcagcatcctgtggtgcatgcacaacacaatcaaacaaaggtgcttgtaatgcaaccaatggngaaaaaaaaaaaaaaaaaaaaggggggccatttt

SEQ ID NO: 3320 - DNA, 516 bp, Chlorella sorokiniana
  unsure (1)..(516): unsure at all n locations; Clone ID: LIB3602-036-Q6-K1-G2
anagaactcctgccccgaccaggacgccgggcagtgctacctggaagtgaagatccagaccgcggatggcgagtcaacaactgtgtacgtggccgaccaccagtgcggagccagcggctcgtacctgggagacccctcagattcctgctcctcgtgaacgggcccggattcgcggcctcaaatgtgtgttttaattgtccgtgtttgtgactccaccatcagctacagcatgtgcagcagcggcagaagctgccgccggctgcgcagtttgccatgcgtcggcagcgccctcactccacaaccatctcagctccatcaagctctgacttttacgtggtcaccctaccgtgctttgtttacccgatcgtgacatgattcatgcatgctctgtccaccctctggagaaccgcctggcattttcggttgacctgcaagacgcccatgttaaagtattgtccaaanaaaaaaaaannaaaaaaaaaaaaaaaaaaaaaannnaaaaaaaaaaaanaaaaa

SEQ ID NO: 3321 - DNA, 401 bp, Chlorella sorokiniana
  unsure (1)..(401): unsure at all n locations; Clone ID: LIB3602-036-Q6-K1-G4
naaaaaaaaaaaaaaaaaaaaaaaaaaaaaaaaaaaggacggacagatataaaagaaaacaaaattacataaaaaaaaaataaaaaaaaaaaaaaatataatataaggggcgcgccgttttcaatggacctggccttccgtttcacaacgttggcgactgggtaaaaccttgttttggcccacctaaattaatttgatgggcctccctttttcaccagctggcgtgataaaaaataggcccgccccaattgaccttcctaacagttgctccccctttatggcgttggggacatgccctgaaggcccgcattaatcgcctttccaaacatgggtccaccctgattggccattggacttgcccttgccctagcgccttatccttggggtttgttgggtttctt

SEQ ID NO: 3322 - DNA, 594 bp, Chlorella sorokiniana
  unsure (1)..(594): unsure at all n locations; Clone ID: LIB3602-036-Q6-K1-G5
cngagtggtcggtaatgagccgctgctgctggaggcgcttcgtgccggcgacgatgcgggctcaactgaaattgtggcagccgctgccgccgccgttggcgcctcacctggcagccctgggagcggccgtggcgggcgggcggtgctggcacgtgccgccgctacctccagcgcacagctgggcaagctgctgtacctgactgagcacctgctggccattctatacacccacctgcggttgtgcctgccggcgccggcgcttggtgcggccagcccggataaaggcatgctggcggtggcagccaacggcggggcggcggcggagggagggcccacgctggcggccctgggcagcgagcgggacctggaccagctgcgccgcctgatggagccggtggtgatgcacctggaggccctgaccgcagcgccctccctggccggcagcagccggcgcgacgccgcctcgctgcagctgctggtgcggcgcaccaaggagtacctcagcatgctgtgagggggcacagcatgcgcagcaagcgcagcatgcaggaagcagtgctgtgaggcgctcccggcaggctgtgtttcagctca

SEQ ID NO: 3323 - DNA, 145 bp, Chlorella sorokiniana
  Clone ID: LIB3602-036-Q6-K1-G6
gtgtgcaaacctcctcatgctcgcacacccactcacccacacgtccaacgtatccagacccattttcaaggcccgactgtacagtgcctttttgcgtccttatgccgatctggtaccaggacttaatgtgtaacaaatggtatgt

SEQ ID NO: 3324 - DNA, 410 bp, Chlorella sorokiniana
  unsure (1)..(410): unsure at all n locations; Clone ID: LIB3602-036-Q6-K1-G7
cgctgcagctcaaagcagcaagcacacacctgttggacgtaccggcgccctcttttcgcatcgagtgctagtggcatcggcatcacgctccgggcccatgccattacctgcgccatcgtgacttctgcatattctcatcaacgtgacttttgcgtgttgtcattttcggttccgcttctgcgcatttgacctctacatatcagcattattgcgccgcgcgagcggcctgcatatccttccttgagctggcagctgtggcggcaccgccgacggtagtgctgcttggcctctgcgctgctctgcaacccgtaacatggcttgcgcagctagcgtgcatgtatccatacggcggcatttacaatacagggtgtaagaccgcttattgaaaaaaaaanaaaaaaaaaaaanna

SEQ ID NO: 3325 - DNA, 564 bp, Chlorella sorokiniana
  unsure (1)..(564): unsure at all n locations; Clone ID: LIB3602-036-Q6-K1-G8
agcacagcttggggcggggctgagccgccgctgcagcgcatcacgccctgccctcatggcgccagcttcattccgctgcgcgcctagcagcagcttttctttccgcttgcttttcctcttggcgtgctgcgctggcgcctgggtcggggggcgccctcttgcccagcagccagcctgccgccgcctgttcttcagcgtcccctcgtgtctttattgattgctctcttctctggaactccaatcattgtgaaatgcatcatgcaaaaaaaaaaaaaaaaaaaaaaaaaaaaaaaaaaaaaaaaaaaaaaaaaaaaaaaaaaaaaaaaaaanaaaaaaaaaaaaaaaaaaaaaaaaaaaaaaaaaaaaaaaaaaaaaaaaaaaaaaaanaaaaggggggggccgcttttaaaaaaaccaaatttaacacccccgggaatgcaaaaaaaaattttttttatggggcccccaaaaaaaaaacaaggggccgggttttaaaaacgcggggacgggaaaaacccgggggtccccaaaataaatcccttggaaaaaaatccccttttcccc

SEQ ID NO: 3326 - DNA, 520 bp, Chlorella sorokiniana
  Clone ID: LIB3602-036-Q6-K1-G9
gtgcgaggcccgcttggccagcttctgcctgtgggtggtggccggtgcggcggagcgcgcggctgtgctcagcagcggcgagaccagcccggtggagcccacggcagcagctgccagcttggcagcagcagacgttgcggccagcccgggccctgcggctggtttggtggctgggcgagcggccatcaacccagcagaccagccatgggaggacgcagtcagggcgccgctggtggatgctgcacttcacgcatacgccggcctcagctctgcagcctgggcgcgtcagcaggctgctgccttcccccacctggcccagttggtgtgctcgcccagcaaaggtgtgcgtcgcgccctgcgatccctgctccagcagcaggtgccgtctgtgattgcggcgatgcaggccagcgccgccagcggcaccggaggcctgcagtgactgtggcagttcagtgcctgtggcacagcccaagcacagaatagacctcgtttggtacatcaatgtgacaatcgggtg

SEQ ID NO: 3327 - DNA, 315 bp, Chlorella sorokiniana
  unsure (1)..(315): unsure at all n locations; Clone ID: LIB3602-036-Q6-K1-H1
cgcgtacccgctgtccactgggtgcgtngatgagcagggctgtagctgccgcaggttgcctgcgcttgaggctcctgccacatgtttgctttgggttgtcaatcttttgtaccaccctcaccttgggctgcaattttgtaccctggtaacttgagccctccctaaacttatgtcctctagctttgatgtattccgttgctggcacctttggttcacctgctgctctgctgttgctattggccgtgcctgcttccgcaaaggagcactgcgttgcttgctttctgtgtaccctccctgagttgtaacaattttgat

SEQ ID NO: 3328 - DNA, 599 bp, Chlorella sorokiniana
  Clone ID: LIB3602-036-Q6-K1-H10
ccaagtggctgagcgcaccatcagcgacgacctggagttcctgatctcccaggccgtggaccccaagaaggccgactacgcagtgatcactggcgtgcagatccacaactgggccaacaactttgaggatgactcccccaacctggagtttgtggctcccactgccgcctacgtggtggtcaacggcgtgaagacccacattgacctgaccgccgtgccgcctctgacgccgcgccagacgcgcctgctcaacggcacccccgagctgagcgccaaccagggcggcgctggcgtgctgatggaggagtcgcccgacttcagctacgactccaaggacgcgcgccgcgcgcagcgcgagcgcctgcagaagtacatgcgcatcctgaaggccgacagcctggagagctctgccgccctgaccacgccgacctggcaggcgggcatcacctcgggcccggctcgccccgagaaggacaactccaccatcatcgaccagaagtatgcttccgcggccgccaccgagctcaagcagctgcgtgacaagctgcagcaaaagtaccagaagcagcgtgcgtaaaagccggcgcttcagcgctgac

SEQ ID NO: 3329 - DNA, 572 bp, Chlorella sorokiniana
  unsure (1)..(572): unsure at all n locations; Clone ID: LIB3602-036-Q6-K1-H11
gcagnaggtaaagacaaagagccggcgggccagggctaccgcgcgcgtacgcgccacatgttcagccgcggcttcaggcagaagggcttcatcccgctgtccacctacctgaccaactacaagctgggtgactatgtggacatcaaggtcaacgccgcggtgcacaagggcatgccccacaagttctaccacggcaagactggctgcgtgtggaatgtgaccaagcgcgccgtgggcgtggagctgctcaagcaggtcaacgggcggtacatcaagaagcgcatccacgtgcgcatcgagcacgtgacccccagccgctgccacgaggagttcctgcgccgctgcaaggagaacgacgcggcgcggcacgcggccaaggtggagggcaagccgctgccggtgctcaagcgccagcccaagggcccccgcaccgaggccatcatgctggagaacgtgaagatggagaccatcacggccatcccctacgatatcctcaaggagggcgtgctctgagcgtgatcggcggcgacgttccgttgattgcggctgcagcttagtgagatgtaaccccg

SEQ ID NO: 3330 - DNA, 496 bp, Chlorella sorokiniana
  Clone ID: LIB3602-036-Q6-K1-H2
cggccgcgtgggcatgcctgcctcctcccgcccgccacagcaccagcaccagcagcagcagcagcagccgcagcagctctcctcccgcacccagagcgtgccgctggagaagctgattgacgacatcgcagtcatgggcttttcccgcaacgatgtgcggcgcgtgattgaggacatgcggcagagtgggcagagcatcgacatcaatgtagtggttgatcgcctggcgcgtgagtcgtaggcagcagctgcgccagcttgcctcggcggcagcacaagcagcagcagtggcagcaaggtttgcctttggcgtcgccacagcagcagaagtggccgggctggcagggtcaggaatgatagcattttttgtgcttgctaccgcgctgcatgcttgcttcagcccctttgcatgtatcccccgttcaatgccacgcctgcatgcgttgcatttcggctctttcttgcacccggagggcctgtaacatatgcacattgt

SEQ ID NO: 3331 - DNA, 568 bp, Chlorella sorokiniana
  Clone ID: LIB3602-036-Q6-K1-H4
atggaataatgatgcacccgccctggccgctgcggttgtgggagtggccattgcctcctctgccaccaccgccgcctcgctggcggctgatgtggtggttgtcaacagcagcggcattgcggcggtgcccttcctgctgcgcgttgtgcgcgccacacaggcggcgatccggcaaaacttactgctggcaatcggcagcatcgcggccctggccctgcccaccgtgctgggctgggtgcccctctggtttgcggtcatgctgcacgagggctccaccctgctcgtggcactcaactcgctgcgcctgctggcttttggagcgccttcgcgccagtggcagcagcagcccgctgcggccgacgcagcagtccacgcagctgcacacgaggctgcagcagaggcggatgaaccaggttgggagcaaggtgtgccccccgctgtggccgcttgagcgtctgctgccctgctggccgcattagcgctctctgcccaattggctactgaagagcttgctgccgaggccagctcacgggcctgtaccggtgctgactcccatgcaatgtctttt

SEQ ID NO: 3332 - DNA, 463 bp, Chlorella sorokiniana
  Clone ID: LIB3602-036-Q6-K1-H5
ttggactgcgcaacaaaacggtctgcgctcggtggccatccgcaaggaccacgaggtgtctgtcgtgcgcggcacctacaaggccgccagggcgaggtggtccatgtgcaccgcaagagtggggggtccacagcgagcgcatttttttgtgaaggccaacggcgccaccgcgaacgtgggcgtggacccctcacaggtgggggtcaccaggctgaagctggacaaggaccgtcgccagctgctggagcgcaagctcgcgggcaagggcctggccatcatgggcaagttcacggaggcggaggtggcggccctggagaacgtggtctaagcgccacgcccaccccgtagcagtcagcagcagcatcagtgttgaggccgtgggctggccaccgacgccagtgcggttcgggtggaggcggcccgtctgacccggtgggggcagcctctccgtgtggttgcgcgc

SEQ ID NO: 3333 - DNA, 596 bp, Chlorella sorokiniana
  unsure (1)..(596): unsure at all n locations; Clone ID: LIB3602-036-Q6-K1-H6
ggnagccgactgtgttccgcgacgtgactgacacgatgaagattgcgcaggaggagattttcggccccgtgcagtgcatcctcaagtacagctccaccgaggaggtgattgcgcgcgccaatgcgtgcgagtatggcctggccagcggcatcatctccaacgatgtcaacttcatcaactcagtgtcccgcggcctcaaggccggcaccgtgtgggtcaactgctacaacgtgtacgagtcggcggtgcccttcggcggctacaagacctccggcattggccgcgacaagggcgagtatgccctggagaactacaccgtcaccaaggccgtgtaccagtccctggagtccaaccagtgctggatctaagtagctgcattgcatctgcccaagcggcaattggccggcctcaacctgtccaacgaacggctgcaccaaccaaccagctgaccatctgaagcgtgtgcaccgatttgccgagcaacgcacccccctacacgaagttctatgccttccacctgacatttttgggaccctgcagttttcaacacccgcctgaagtccattctggcctgctgntcattgcttctgcccggc

SEQ ID NO: 3334 - DNA, 522 bp, Chlorella sorokiniana
  Clone ID: LIB3602-036-Q6-K1-H7
gtccctcattcccttcactcccctcagcgcaccccttccccctgcccctcagcataccctgcttggcaccgctgcccttcgtcgtcaccctcctcggcagtactcgctttgtcctgaaccccctccggccctgcatgcaccctcgtacgattgttcgcacccccttcccctctcaatcacaccacccccgtttggcccgcatctctggtaccctctgattggcccagtgtctgcactcgtcgtcttatcgcaccctcacccctgcccctgcctctcgctcacccatcacccctgttccacatccgtctttagccccccttgctccatcactgccacccttcatttgtgccctgccatcccaatcacgctcaccccaaaccgccttacatgtgtgcgggatgcaccaagccacccacccgtttttgacgcggtgccgccaccgctgtttgcgcggcgtggcccgccttttcttaccctaacgctcctctctcttaccgaagattgtgtaagtttaagattttt

SEQ ID NO: 3335 - DNA, 521 bp, Chlorella sorokiniana
  Clone ID: LIB3602-036-Q6-K1-H8
cctgcagcagcccccgccgccttcaacaggggggccccgttgtggatctgaacacgattgcaagccgtctggccaatggccagtacggccgccctatggaccttgcatcggacgcaggccgcatgtttgctggcttcgccgcagtctacccggagggcacccagcagcgcctggcgctgcagcagctgcagagcgcctttgagacgctgtggcagcgcgtgctggcgcagtatgctcatctctgaggccgctctggagccagcagcgtggcatagcacggcgccgccggggcctgccggagcaagctcgggcatgtgccaacagcttgcagcgacagaggcagcctgctgcttatgttgcctcctgccagtagtccatagaacgtcttgtgtgttggtgtgttgccggggtgcaagagtgtgcgcgcccgctgcggggatgcaggggcgcctgctcctggcctcgtctagactgtgtttaccccagttcactctcatgcgtttgtgtaacaacgtatcaat

SEQ ID NO: 3336 - DNA, 609 bp, Chlorella sorokiniana
  Clone ID: LIB3602-036-Q6-K1-H9
cagaatccaggcgctgcagaagcggctgattgccaagacggaggaggtggcggagaaggacctgcagatccaggagaaggagcggctgtacctggagctcaagtccatcctggtgcgccagccggggcccgaggccgcggagcagctcaacctgtaccaggccacgctgcgggagaagaccaaacagatgaagtcgctggcctcggagctcaacatgtaccaggcgcaggtgcaagagtacaagtacgagatagagcggctgcagcgcgagatgaacgaggtgaagcgcaagtatttcgagcagaagaagctggcgcagcagcagggaggtgtggcggcggcggcattggtgggtgcaggcagcggcggcggcagcggcagagaggagctgatacccgcggcacggggcagcgcctcgccctcgccggtccctggggcagcctccctcaaagcctcgcctgcagtcagcaccgtcagcctgtctgtgtcggccatgtgaggaggaaagggcagcggcagcggtgaagcgggcaggcggcagcggcggcggcagcgggcggcatgcttcatgaggctgtcacgagccagatcggttgtcgctgttggcct

SEQ ID NO: 3337 - DNA, 346 bp, Chlorella sorokiniana
  Clone ID: LIB3602-014-Q6-K1-A10
ccagaacgagatgatcgacgccatcgccatcaccaagggccacggcactgagggcgtggtgacccgctggggtgtgtcccgcctgccccgcaagacccatcgcggtctgcgtaaggtggcctgcatcggcgcgtggcacccggcgcgcgtgggctggaccgtggcccgctccggtgccatgggcttcaaccaccgcactgagatgaacaagaaggtgtaccgcatcggtgtgaagggcgaggccagccacgccgccaccaccgagcacgacgtgacggtgaaggacattacccccatgggcggcttcccccactacggcgtggtcaaggaggactatgtgatgatc

SEQ ID NO: 3338 - DNA, 536 bp, Chlorella sorokiniana
  Clone ID: LIB3602-014-Q6-K1-A11
cgagaagttcgccgccttccagaacatgcgcggcgggcgggtgcagctgatggcgctgcccatgcccgagtccgactactacaacgcagagaagggcgacgcgctctatgcctttgagctggcgctggctctgcagaagctgaacatggacaagctcaaggcctgccactcgctggccgacaagtcggatgacttccaggcccaggatttcctggaggacgagatgagcgcccaggccaaggtggtgaaggagctgggagactatgtgtgcgagctcaagcgcgtgggcaagggccacagcgtcttccactttgatgagaggattgaccagggaggcctgactgctgcggcgtgagctgaccaggcagtaagttgcaaagggcgcagctgcagaaatggcctgcaagcccagcggcgccagcagggcggcaggcgtcggcggcggcaggcgtcggcgtggcatacgcactgatgcccacctggcacacaccactagcttgcgttgaatgatggttgatgaagatggcaacaaaaac

SEQ ID NO: 3339 - DNA, 90 bp, Chlorella sorokiniana
  Clone ID: LIB3602-014-Q6-K1-A12
aaaaaaaaaaaaaaaaaaaaaaaaaaataaaaaaaaaattatataaaaaaaaaaaaaaaaaaaaaaaggggggtaaaaaaaaaaaaaagg

SEQ ID NO: 3340 - DNA, 306 bp, Chlorella sorokiniana
  Clone ID: LIB3602-014-Q6-K1-A2
gctgtttggcatcagcggcgaggcgggcgaccgagtgaactttagcgagtacatcatcgccaatgtgcggctgtatgcgctgcgcaacgggcagcagctgtcgaccaaggcggtggcaaacttcacgcgcagcgagctggccaccgcgctcagaaagtcgccatatcacaccaacctgctgatggctggctttgatgaggggtcgggccccgcgctctactggggtgactacctggctacgctgcaccgcatgaacatctgtggcacgggatacggcttctacttcgtgctggccatgtttgacaa

SEQ ID NO: 3341 - DNA, 600 bp, Chlorella sorokiniana
  unsure (1)..(600): unsure at all n locations; Clone ID: LIB3602-014-Q6-K1-A4
gccggaccggcggcaaccaaccccgagcagaaccgactacgtgtcnggtgcgcatacctgggtgcgtgcctgcccgcccagcgttggaagcgctttgtgcctgaccagcgctcggcgggccgtggagcccgctccggcnncagttccccttcttccaatcctcannacctgtttggcgtgccctcaagtacannagcgcatggggganngcaggagctnnngagggaagcgnngcctgccgtaccgtcaaatcgtgcggcnnccaaccggcttcacangnnacgggccttacanccagcnntacgacatcnnaacacgnnntgctgcgcaacaaaccagcgnngcagccggcaggggacatcnnacgctgnnagcccgaagggatgacncnntgatgggcgaagacaatnncacgcattnngcagtggccgagggccccattgtgcagctgctttgccgctcgactttttgtggaggggcggcactttcagcnnattggcagcaagcaggggcgacggggccggggcaaggacgctgccaaatggcgcgatctgtttgccgcctgcggcgcagcaccgcagcgtgccggcgtggcgtgag

SEQ ID NO: 3342 - DNA, 482 bp, Chlorella sorokiniana
  unsure (1)..(482): unsure at all n locations; Clone ID: LIB3602-014-Q6-K1-A6
aaaaaaaaaaaaaaaaaaaaaaaaaaaaaattaaataaaaatttttttttaaaaaaaaaaaaaaaaaaagagggggaatttttttttagaggggggggcgtannttttttntttttttttaaaataaattaaattgtccttcccttttttttccatcttaaacttttttctttttttttccccttccctctacttttctttccccttactttccccccctttccccctggtttccctttacctttaccctccttataccctccctccctaccaccactttaacccccttgactccccatccccttttcccctcacctccatttctttccccccggactgcctttttccccccccctttaccaccccccttttcacttcccttttgcccccccccccctacggttccctaccccttgcccctctccttttcccccccccttacccccctttcctttcctttttcccccctttcccttcttttc

SEQ ID NO: 3343 - DNA, 62 bp, Chlorella sorokiniana
  unsure (1)..(62): unsure at all n locations; Clone ID: LIB3602-014-Q6-K1-A7
naaaaaaaaaaaaaaaaaaaaaaaaaaaaaaaaaaaaaaaaaataaaaaaaaaaaaaaaaaa

SEQ ID NO: 3344 - DNA, 539 bp, Chlorella sorokiniana
  Clone ID: LIB3602-014-Q6-K1-A8
cctggaccttcgccactgcagcacattgtcagacggcgggctggctgaggtgtctcgcctgcccttcctgcgccgcctgcacctctccttttgtgtgcggctcaccgacgccggcctgttggcgctggccggtcccactgctgcgtccagcatcactactgggccccacaagggcgacagcagcggcaccggcgactgcagtaccagcgccagcagcactgtggcaagtgcattaggtggcagttacggcacccagcactggggcatcactgtgcggcgcaccagcagcggcggcggctgggagcacggcagcgtgcctacttccttagccaggagtgtcagcatgggggctcaggcatcggcaatgcagtcgggagctgagctgacgccacctcataagcttggcagtgctgctgccggctgccgccggctgcaggagttggagctctaccactgtccccaggtgacgcatcgcgggctgtgggcgctggccgaggcctgccttgagctgcagcacgtcaacattggcaagtgccggc

SEQ ID NO: 3345 - DNA, 536 bp, Chlorella sorokiniana
  Clone ID: LIB3602-014-Q6-K1-A9
gttttatcacgccgtgtaacgcactgcacttgacaatatcataagctagcaggcagtagcctgccggggagtgacaaaactggaccgatggctgggggcaaaggctgaccgacgccagcctgttcgggctgcgggagcccacttgtggatctactatcactactgcgccccacactaacgactgactttaacacggcgactgccattcctgctgctgtcggcgctactcaaagcgcattacgacctgctaaacaccaagaacgcgcaagattatccctctgccgcctacatgaacttgcctccattcagaccaccctacagtacgtgctctagctgctgcgtctgtaatcgtagcagcccgtggatggtctatacgatctgccgttgatggcactcacactcacgaggttgatagaggtgcacattgctgccgccatctactagcttacagcctctccggcggccaatgactatgcattatcagattctgtgcccctgcagatggatgcttccggcattctcataatggacacccc

SEQ ID NO: 3346 - DNA, 577 bp, Chlorella sorokiniana
  Clone ID: LIB3602-014-Q6-K1-B1
gcgctcagcggcaggtggcggcactcgctgcacctcagcaggcgcagcagcagcaggcggaggcagcgcagcagcagcagcagcagccgcagccggcgggcaaagccggcaagaaggcagcggcggcagcggccagcagcccgggtgtggagctgctggcagaagtgcgggcggcactaacggatgacttcaacacgccgctggccattgctgcgctgtcggcgccactcaaggcggccaacgacctgctgcacaccaagaagggcaagaaggcccccggccgcctgcaggagcttgcctccatccaggccggcctgcagtccgtgctcgagctgctggggctgtgttcggagcagccggcggcggttctggacgagctgcgggcgctggcgctcacgcgggcggggctgagcgaggggcagattgcggcggcaatcgaggagcgggcagcggctcgggcggccaaggactatgcagcatcagatgcggtgcggctgcggctggaggcggccggcattctcatcatggacacccccgaaggcaccacctggaagccgggcccgcggctgcacattgc

SEQ ID NO: 3347 - DNA, 558 bp, Chlorella sorokiniana
  unsure (1)..(558): unsure at all n locations; Clone ID: LIB3602-014-Q6-K1-B10
ccggcaagggcagccagggcgccagggactttgtgctgagcagctaccaggagctgaagaaggccaaccccaccttccccatcctggtgcgggagtgcagcggcgtggaggccaagctcattgcccgctacgactacggcgtggaggaggcggtcaaggtggaggggctgagcaaggccgacatcaccaagcagctggaggcgctggtgaagaagggggagagcatgccgcggtcagccgagagcgagggcaagctctgagggcgcggcggcctctgaacgcgcagctgcaacttgcgcacaacttgcgcggctggcgctcgccgccacgccggcaggcatgcacgctctgagcgcatagctgtacgctcgctgccatgccggcaactgctgtgcagcagccttgtgagcatncncgctgccgtgcgccatgccgtgcccgctgcgcacacgcgcctgtgctgacgtgcgtnggctgctgcatactgagctgtggcgcaactgccttaactnnntctgcgtgttctgctctctgtgtctgtgcctgtgtcgtgccctg

SEQ ID NO: 3348 - DNA, 338 bp, Chlorella sorokiniana
  unsure (1)..(338): unsure at all n locations; Clone ID: LIB3602-014-Q6-K1-B11
atccgagggctctgaaggcgcccgctcangcggcatgcagctgcagacggacgaggtggtgattggtctggagcgggatgttcggccgcacctgtgagcggcccccattggaccaagtttgctgcgcctcctcttcgtacagtccatgctggcgtcctattgcgatgctgtttgtcactctgtcttgccttccgctgctgtttcctgctttcttcttagcttgctgttgtggtgcatcaactctagcctcacctgcgcaagtagggctgtggccctggtagtcattactcgcctccgggcggatggaggtgcggattggcgcttgctacattgatggc

SEQ ID NO: 3349 - DNA, 580 bp, Chlorella sorokiniana
  unsure (1)..(580): unsure at all n locations; Clone ID: LIB3602-014-Q6-K1-B12
cgctggtgggcggcgtggtcggcgnnnncnnntgggcgcggcagtgattggcgtcagctaccgagcctacacccgctgcacagcaggcggcggcaagggctctgctggcagcacctctggcccgctgctggaaggggctggtgccagcgacaccccccgccaaacgctgcccttgtatagcagccgtttggcgccggtgccggagtgatcgctcccttcctcaaatgcaattgcccagcatgctccattctcacagccaatgcccatcatgcttcatctcagcctcaaatgcccatggtgcttcattttcacagccatttggccatcatgctgcaccccacatgcacctttcagtccattgtggctcatattcaaccctcatccttgctgcccatccagctgcgactgctgagcggcgctctctcagttgtattcttcggatttcctgtgccattgcgaatctagcaagttggccccttgtattcatcatcttgctgggtgctcccgcgcactcgcccanatgcaattcagcctgcaatcaccctctgtcagctctgctatcaccaccctctgatgcact

SEQ ID NO: 3350 - DNA, 502 bp, Chlorella sorokiniana
  unsure (1)..(502): unsure at all n locations; Clone ID: LIB3602-014-Q6-K1-B2
ggtggacaaggacggcaaggtgatcgtgaacgagcacggcgacccggtgtatgcgcgtgcgggcgagaagggcgcccacacgctggtggaggacgccgatgggaagctggtgcccgcctacaagaaggccgccaaggcgggcgcccacaagctggtggaggacgccaatggcgacctggtgcccgcctaccagaagggcgccaacacgctggtggaagacgccaacggcgacctggtgcccgcctacatgaagggcggcatggctactgccaagaagcgcaagcagaaggctgaggccctgaggcggcggctggagggggcgaaggagtattgggcaaagcgccgtgcagccgcctaggccaagcggcgcggccagtgccgaccctgcctcacccagcactggagtaagccgtgcctcgccccgctgtactagacaatctgcactgaatgtaatatttttcccattnnnaaaaaacaaaaaaaaaaaaaaaacaaataaaaa

SEQ ID NO: 3351 - DNA, 314 bp, Chlorella sorokiniana
  Clone ID: LIB3602-014-Q6-K1-B3
cttcatcaacaacggcgtgtccctgcccttcatcaacgacaccgtgcacaatattttgggcggcagcgcatgatgccttgtaatgcagcttccagcgccgatgagctgtgcgtgagcgcagcttgagagaaccgagcaggcgggcacgctgggggccctcccccctgcaagcctgcctgccgcgttgtaccggcgtgccccgcgccagccacgtcaccaccctcctcctcatcccctctatccgcccgccgctgatgggtgcacggagccccgggaccaactcccacgcccgcggcggcagcgccggcctgact

SEQ ID NO: 3352 - DNA, 577 bp, Chlorella sorokiniana
  unsure (1)..(577): unsure at all n locations; Clone ID: LIB3602-014-Q6-K1-B4
tgctccacgaggtgacgtaccagaccgcgcacggccagctgctggacaccaccaccgcgcccatcggcacggtggacctgagccggtacacgctggacacatacctgcgcattgtgacctacaagaccgcctactacaccttctacctgcccgtggccgcgggcctgcgcctcgccggcgtcaccgaccccgctgcctacaagctggccgaggagatttgcgtgaccatggggcagtacttccagatccaggacgactacctggactgctacggcgaccccgaggtgattggcaagatcggcaccgacatccaggacaacaagtgctcctggctggtggtgcaggcgctgcagcgcgccagcgaggagcagaagaaggtgattgaggagagctacggcaaggatggtgaagaggcagtgcagcgggtcaaggcggtgtaccgcgagcttgacctggaggccctgttcaagcagtacgagcaggagagctacgacaagctggtgaagacgatcgaggggcaggacctgctgccgcangccgtgttcacgatgctgctgaagaagatttacaagcggca

SEQ ID NO: 3353 - DNA, 90 bp, Chlorella sorokiniana
  Clone ID: LIB3602-014-Q6-K1-B5
acccttccggcaaaataggaatcacaggcttatgatgattggctgtgttatgatgcgcacttcgcgaggtgaaaaaaagaggtggagctt

SEQ ID NO: 3354 - DNA, 488 bp, Chlorella sorokiniana
  Clone ID: LIB3602-014-Q6-K1-B7
attacaacccctcgcagcgggcctccgctgcgctgggcctcaggctgccgctctcaaaggcgcagctgtacgacacgtgggtgcagcacggcagcgctgacccccagtcccccgtctttgcccgctcggccaatggcatcatttcatatgtggacaaaaagctgggcggctacccgctgcagggcgtgaacgagaagctctggctggagacgttcctgcagcggcggcggtacgtgctgtctgtgacggacgacgtatgggctgccagcacgcctcgagtggacctgtacaagtggctggtcgaggcgggcgcctttcagctcgacaggccgctgcgcctgctgtgggatcgctgcactgcgctggaccctcaggtggggtaccacccccgggggccatgcaccaaccagagcgccggcgtcttgagcgtgggcggcgttgactatggcagcttcgacattccatgactggaacctgcaaaaatcccc

SEQ ID NO: 3355 - DNA, 397 bp, Chlorella sorokiniana
  Clone ID: LIB3602-014-Q6-K1-B8
cccccccccctttttttttttttttttttttttttttttttttttttttttttttttttttttgggcatgtgtttgttacagcgagcgacgcgcagcaaagaagaatcatcgttaaaagaaggcgtagcaaagaccagacgggacagaagttaatatttgcagcaggcgggggggcaggcccccccttataggccctgcggaggtgagggctcaaacacgggtgagttgagtgggtgggcaggggcaagtgacacaaagggcgaggcaattcataccgtttgctggcgcgcaaaggggtcaaagcaaaagcgagggaggccctccgggcgctcctatttgtgtatatggaaaacgcaagcgaggcattgggcatgcggtgcggggatggcgggctcc

SEQ ID NO: 3356 - DNA, 366 bp, Chlorella sorokiniana
  Clone ID: LIB3602-014-Q6-K1-B9
agcgactcccagtttgctctggagcagcaagtgttggcagccatgtgcgcccttactgccgctgcactgcaagcgcaagcgcgccggcccgggctggcggttcaactcacacgcattgacgagctgcaccctgaagaaatggggctggcgtgggatccctttgcatgaacttcaacaagcagagagtccgctgccccttccgcttgagattcctgctcttggtatgtgcatattgccggtgtgcggtgctgggtgtgcgacacctggcgcttgcgctatgatgctcacattataacttcagtttctcagctcgcatgcgctcggaatggaagaatggtatcaaccagtactgtaaatatgtgcaaa

SEQ ID NO: 3357 - DNA, 442 bp, Chlorella sorokiniana
  unsure (1)..(442): unsure at all n locations; Clone ID: LIB3602-014-Q6-K1-C1
gagctggagagcatcatgaccatcgtggccaacccccgcgcctacaagatccccgactggttcctgaacaggcagaaggacgtcaaggacggccgctactcgcaggtgacctcctccgcgctggacaccaagctgcgcgatgacctggagcgcctgaagaagatccggaaccaccgcggtctgcgccactactggggcctcaccgtgcgcggccagcacaccaagaccactggccgccgcggcaagaccgtgggcgtggctggcaagaagaagtaagcagcttcttgcgggcgcggcctgcggcacgggcggatgctggcggctgggtgacggcggctggcgccgcccgcgcagcaaccccactggcagagccggcggcagcaggtggatccacaccagtcgttgcagtgctgccgtcgtgtaatgcacccttcgcgannna

SEQ ID NO: 3358 - DNA, 367 bp, Chlorella sorokiniana
  unsure (1)..(367): unsure at all n locations; Clone ID: LIB3602-014-Q6-K1-C10
ccagcctttgacgccgtcacgtgctccctggctatgttcatgcccagcttcgaggtggccatccgggagtttgcccgcgtgctcaaacctggcggcctgtttgctgcgccggtgtggcagtctgaggacaaggcgcctttcttccaggtaaccatggggctggcggccgcatacgacccagagcttgcccgtaccgncgccgcctccactgccacgcgcttcggcgaccccgccccagtgctggccgctgctggggatgcgggcctggagggagtggagtgccncnagcttgccgttgccttcaccatgaaagctgagcagtactgggaggagctcctcggcatgccgcttcccgatcaagccagcg

SEQ ID NO: 3359 - DNA, 259 bp, Chlorella sorokiniana
  unsure (1)..(259): unsure at all n locations; Clone ID: LIB3602-014-Q6-K1-C11
cgacaagaagccgcctgcactactnnncnnnnaaaantttcggcaaccgccaggagtacatcaacaacctggtgcgcgccatgaactgagcgctgagccggcgagcacagcgcagcgcgcgcagcacgcacagcgcggcgcgtgcagcagcctggacggagcggccccctgatgcctgctagccacggcactgttggccgggccagtcgtgaggccccgagcgcacccgaatgtccaagggagtgcacggggggcgggc

SEQ ID NO: 3360 - DNA, 496 bp, Chlorella sorokiniana
  Clone ID: LIB3602-014-Q6-K1-C12
cggacgcgtgggcctagatgattgagcgcgttgccgatattatgcgcgtgcagaagcagtaagggcgcgtgcccgaccccaccattgtggacacgagcgaggtggacctggtggacgtgaagttactggaagaggagcccattgtggtggtgcagttcacgtgccaccagatcaactgtacgcgtgacacattcggtaacgtggttgatggcaagcccgatgaagtgcaccgtgtctactacttctgggcgctgcagcaggagaagcagggatttgtgggcgctgacggcgcctaccacccgccccggtggcagctgcgcgaaatgctcatccgcggcatgcaccacctgctctaggctggagattcgacagctgttggcagctctgcactgcagccgggagcggctggcaacaccaaccagttttttccgtacccagtccgacacagctgcatgtggcagcattgctcagcgaagcacggtgcagtgcagcgggc

SEQ ID NO: 3361 - DNA, 590 bp, Chlorella sorokiniana
  Clone ID: LIB3602-014-Q6-K1-C2
gcgggaggcgccgcagctgcttgccgcgctcaagcccatcggtcggccttcagaggggattgctcggcggcgggtagcgagccagtccaggcgccatggacttcctctccgacattgggcgcatgaacaagcgccaggtcctgctgcagaccatcaacctgggcatgatcatcaccagtgccctcatgatctggaagtcgctggtgctggggaccggctccgagtcgccggtggttgttgtgctcagcggcagcatggagccgggcttctatcgaggcgacatcctcttcctttaccagcccaagcagccggtggacacgggagacatcattgtgttcaacacggatgggcgggagatccccatcgttcatcgcgtgatcaaggtgcaccagcgcgccgacaacgccttccacacagacatcctcacaaagggcgacaacaactggggcgacgaccgcagcctgtaccccaagggccagctgtggctcaaccccaaccacatcatgggcaaggtggtgggcttcctgccgcacattgggcgcgtgaccatcataatgaacgactacccgatgttcaagtatgcgctcata

SEQ ID NO: 3362 - DNA, 321 bp, Chlorella sorokiniana
  Clone ID: LIB3602-014-Q6-K1-C3
aggccttcccccagtgcgtgttcgaccactgggagctgatgacccccgacccgctgcagagcggctcgcagaccaacgagattgtgctcaacatccgcaagcgcaagggtctcaagccggagcctgccgcacttaacgaatacgaggacaagctgtaagctggtcctgcggcgtcccttttggcgagtgagcggcatgcgtgagcggcgcagcgcgcgcggcggcggccgccgccagcccacctgtccctgcgacctgcccgtaccgtgctcaacgtgcaccagatccacacactaggctgaaatgtaatcagttcaattg

SEQ ID NO: 3363 - DNA, 485 bp, Chlorella sorokiniana
  unsure (1)..(485): unsure at all n locations; Clone ID: LIB3602-014-Q6-K1-C5
gaccacgcgtgaggcgnctttcactacatcgcagcaggcacctgaccaaggccaaggcgtacatgcaggcggtgattgaccacaagcgctgcgtgcctttcctgcgctacaacggcggcgtgggccgcacctcccaggccaagaacgagggcaactcgattggccagggccggtggcccaagaagtcggccgagttcctgctgggcctgctgaccaacgcggagagcaacgccgagagcaagggcctggacgtggatgcgctgtacgtgagccacatccaggtcaacaaggcgcagaagggccgccgccggacttaccgcgcgcacggccgcatcaacgcctacatgtccagcccctgccacattgagctgatcctggcggagcgcgggcaggcggtgaaggccgaggcggaggacaagcgccgcaagctgagcaagaaagagctggccaagaagctgcgcagcggcaccaccagcaagagcagc

SEQ ID NO: 3364 - DNA, 436 bp, Chlorella sorokiniana
  unsure (1)..(436): unsure at all n locations; Clone ID: LIB3602-014-Q6-K1-C7
gccgtcggcgccagcagcccagctgaacgactcatctgtgcggccgctgggccgctgtgattcatgtgcatcggcccatgagcggctgccttgcacgcatggtgcggcacggcctgctctgcggcccttcatacctttgtacctttctgtatcatcttgcagcaatggcagccggctgcatctttctaacatcgtcaccggcccactcgtttgtgccatgcccacctgcctccaacgtcacccttcatcaaccctcacccaacccatccacctgccacccatccactcaccttccctccgccacaacctctgccacccactcaccacccatcacccgctcaacgccctccatgcaccatcctccccatccaccaaatctgccaccccaaacgcacgtncgccgctgcaccacctgcccgcccctcacccgcaccca

SEQ ID NO: 3365 - DNA, 522 bp, Chlorella sorokiniana
  Clone ID: LIB3602-014-Q6-K1-C8
gctgcaggagatttgcagcagcatcctgcagctgctggacgaccacctgatccccaccgcctccaccggcgagtccaaggtcttctacctcaagatgaagggcgactaccaccgctacctggccgagtttaagacgggcgcggagcgcaaggaggcggcggagcacacgctgctggcgtacaaggcggcgcaggacattgcgctggtggacctgccgcccacccaccccatccgcctgggcctggccctcaacttctccgtgttctactacgagatcctcaactcgccagagcgcgcgtgccacctggccaagcaggcgtttgacgaggcgattgctgagctggacacgctgggcgaggagagctacaaggacagcacgctcatcatgcagctgctgcgcgacaacctcacgctctggacctccgacatgcaggacgccgagcagggccgggaggcgggcggcgagggcgaaatgaaggaccaggagtaagggcggcccccgcacggtgcgccctcatgggc

SEQ ID NO: 3366 - DNA, 431 bp, Chlorella sorokiniana
  Clone ID: LIB3602-014-Q6-K1-C9
ggacgccgctcccttcaagcagtggtaccagcagcactacggcgcggaggtgggccagaagaagaaggccgccgccgccgcgcccgccgagggcgaggccgcctcccagagcaaccacgtgaagcggaagctcaagcagcgcaaccagggccgcaagctggaccagatgctggacgaccaattcgccaccggccgcctgtacgccgctctgtcctcccgccccggacagtgcggccgcgcggacggctacatcctggagggccgcgagctcgagttctatgtgaagaagatgcagaagaagaagggcaaggctgccgcgtaaagcgccgcctagcgaggccgcaacccccgggtgccacttgctggataggatcaagttgttaggcaccaactcgcagaacaacaaccatacgctatggacctcctacatg

SEQ ID NO: 3367 - DNA, 79 bp, Chlorella sorokiniana
  Clone ID: LIB3602-014-Q6-K1-D1
aaaaaaaaaaaaaaaaaaaaaaaaaaaaaaaaaaaaaaaaaaaataaaaataaaaaaaaaaaaaaaaaaaaggagaggg

SEQ ID NO: 3368 - DNA, 588 bp, Chlorella sorokiniana
  Clone ID: LIB3602-014-Q6-K1-D10
ccgcaagctgcggctgcaccgcaaggacgagcgctgggcggacaaggactacaagaagtcgcacctgggctccgagtggaagaagcccttcgccggcgcttcgcacgccaagggcatcgtgctggagaagatcggcattgaggccaagcagcccaactccgctatccgcaagtgcgcgcgtgtgcagctgatcaagaacggcaagaagattgcggcgttcgtgcccaacgacggctgcctcaacttcatcgaggagaacgacgaggtgctcatcgccggtttcggccgccgcggccacgccgtgggtgatatccccggcgtgcgcttcaaggtggtgaaggtgtccggtgtgtccctgctggcgctcttccgcggcaagaaggagaagccccggaactaaacggcccgcgcccagcagcggcagcagcggcgcgcctcggcaacggggggcgccgcgtccgccagcactgcacctgcctggcggcggcttgggagggcgtgcagcgcatgcaacgtgcaccgccgcggcccttccgatagtttaggaccccacaaccaagttcctcttgctccactactgatgtaaca

SEQ ID NO: 3369 - DNA, 385 bp, Chlorella sorokiniana
  Clone ID: LIB3602-014-Q6-K1-D11
aaaaaaaaaaaaaaaaaaaaaaaaaaaacttgaatggtttttttaaaaaaaacaaaaaaaaaaaaaggggggaaaaaaaaaaaaacaagggtgcgccaaaacaaaaaaacaccaaggggcctcccgttttaagttttccagctttccgtccccatccttccgccctgttaatctttttttcgttcccccccaaattcaacctccggcccatcctttttcaccttgaaacccaaaaacccctggctctaccccccttattccccttaccacttttccccctttcccctcttgcgttaaagccacatagcccccccccttccccccttcccaccatttgccccacccaattggaaattgtcactccccctctcccgtccccttaacc

SEQ ID NO: 3370 - DNA, 405 bp, Chlorella sorokiniana
  unsure (1)..(405): unsure at all n locations; Clone ID: LIB3602-014-Q6-K1-D12
gtttgtggtgccctcctaccgtggtgccaccttcctggaccccaagggtcgtggcgctgcgactggctatgacactgctgtggccctgcccgccgctggcgacgatgaggagtacctgaaggagaacatcaagtcggccggcgcaatgaagggccaggcagtgttctccattgccaaggtggatgctgccaccggcgagattgctggcgtgtttgagtctgtgcagccttccgacactgacctgggagccaaggcccccaaggacgtcaagatcactggcctctggtatgctcagctttcgtaagcgctgccagcgcccgtcgtttggagaagagaattacagctttgtcgctcgacctgtttgtcagacgtagaactgctcatgtaacataagcgcgcnnnana

SEQ ID NO: 3371 - DNA, 511 bp, Chlorella sorokiniana
  Clone ID: LIB3602-014-Q6-K1-D2
aaaaaaaaaaaaaaaaaaaaaaaaaaaaaaaaaaacaaaaatttttttttttataaaaaaaaaaaaaaaagggagggcaattctaaaaaagcggggcctgcttactaattcctccttatactacctctttcgttccaactacatgggtttccctttttttggtctccattttttctccccctcccttgtaaaatccttttttttttttttgtccccttaatttaatttctttgccccttttttaaccacatcctttttttgaaaacccctgtattttcccaactttttttccttttcccccctttcccttttttccctttgccttttttgcaaattgccccccccctttcccttttcctaaatattgcccactttacttgttttttggaccccccccttttcccccctcttaaccctaccgcctttttttttcccccccttcgctcccttttcccttcgttgccccctttccccctttccttttttttttccctttttttttttgcccctc

SEQ ID NO: 3372 - DNA, 588 bp, Chlorella sorokiniana
  unsure (1)..(588): unsure at all n locations; Clone ID: LIB3602-014-Q6-K1-D3
aactgtgaacgacacaagccccatcagcggccttacggcgcagtgcaccccaggcaatggcctgcccggcgccagcgttgaggtgtttcctggccaggcccccccagacgcgaccctcaccttcaccggcggcctgaccaacgtgaccgcccagctgggcctgtacctggacaacttcctgggcgcgggcggcagcgggcccacagtggtgcccttcatctgtacacggccgggccaggtggtgactgggttccaggcggcctgggagccctcgcccgtgcagcccggcaccaacatcgccaccggcgtccgagtgtactgctccgagcctggcgtctgcctgggcggtgtgcccgcggcctctccacccgtggtcttgttgccaccaccttcgccctcaccaccgcctccggtggcgctttcaccaccgncaccactcccggcgccctcgccgccactcccggcaccctcngccgccgttccggtgcccgcgccgnccgcagagacgccgggctggtcgccgtggctgggcccgtcgacacctcagagcaccatgggcatttgcccctgcccaggctacatccaggc

SEQ ID NO: 3373 - DNA, 443 bp, Chlorella sorokiniana
  unsure (1)..(443): unsure at all n locations; Clone ID: LIB3602-014-Q6-K1-D4
cggacgcgtgggcggacgcgtgggaccgccacgggtgcagaaactctgtgcaacgtaccacgaacagtggaagagattgaggctgtgatggcgggtgggccctggccgccgccggcggcagcaggcaagcagcagtgagcggcgcgcctgtcaagtggccactaaggtgcaaagcagtgggtgcatggcgtgtcccagctgcacagaacagagcagcacgcctggacgcatcgaaacgcttcatgcaccggttctgagctcgcgcccttggcaattgtgttcaacttactggaaacattcaaccgacttaagaaccgggcgcacacacatattcatattcatttgtagattacagatacttggtgtgtagggacatatttgtgtaaaaaaaaaaaaannnnaaaaaaaacnnnnccaaaaaaaaaaaaaaaaaaaaagggggg

SEQ ID NO: 3374 - DNA, 223 bp, Chlorella sorokiniana
  Clone ID: LIB3602-014-Q6-K1-D5
aaaaaaaaaaaacaaaaaacataaaaccaaacactaatgcatttttttttttcaacgtaccacaaaacaagggaggagattaaaagttgtaatggggggtggcccttgaccaccaaacactgaaatataagcaagcagcattaaaaaggagcgcctgtcaagtgttcattaaggtcaaaatcattgtgtgcatggcgtgtaccagttgcacattacatagcat

SEQ ID NO: 3375 - DNA, 454 bp, Chlorella sorokiniana
  unsure (1)..(454): unsure at all n locations; Clone ID: LIB3602-014-Q6-K1-D6
tccgggaccccttggccggccccgtggccggccgcgtgggtggcggcggcagcaagggcggcagcggcgctcgcctgctgacaagcttgccgcggcggccgcctgcaaccacgcccagcagcgccagcccactgtttgaagggttttgccgccagccgcagctgggcagcgctgcagagcggcagcggcgcagcacaacanaggaggagggtgtgggaggcggggacgccagcccctctttgtctgttgatgaccccatcgccagtctgagccacgtggcagctttccagcccatggcagaggctgcggtagagcgcgcagctgcagcagctctggccgccacagcccagaaggcattcccgccaccaccaccgccgncccgccacctgcacggcatcgcagccgccgctgcaacaggcagcgacgatgatgctgcaacgcctgctgctggcaa

SEQ ID NO: 3376 - DNA, 368 bp, Chlorella sorokiniana
  Clone ID: LIB3602-014-Q6-K1-D8
ggctgcagcaacggcatgatgcgtcgccgcagaggtgccagcatggcagctcgcccaatgataggcaatcaaccagctctggcagcggcgcatgcggctcgctccaagcagctagcgctgcaagcctgccccaggtcttcccccactcctactagcagcgccccagccccgcgctgctgctctgccccccgcattgcaagttttggcgcttctaatgtcccgtgccgctttgtcacactaagcctgcagtgcagactgtatattcactcgctctgatcgcaaacgtacctgtcgacaaccgacactttcccacgccgcggtgtgtgcccggtctctggggcgctcaccgggtctgtaacctgcccaca

SEQ ID NO: 3377 - DNA, 411 bp, Chlorella sorokiniana
  Clone ID: LIB3602-014-Q6-K1-D9
ggcagtgatgcgtgcgaccgccgaggcggcggcagcagcagaagcagcagtgccagcagccaaggcagcagcagcagcagcagcagcagcagcagcagcagcagcggagccagcaggtgaagcagcagcagaggccacggcggagacggtagctggcaaggtggctgcgcaggcagcgctctgagatttgggagtgaagcctggcacccagtgcaacagttgctctgctctctgtgttctgagcttgcttctgtcgctaatttctcaaaacgcagcagcttgcttccgttgctcatgcgttctgccctgttgcgcccaccagcggccagttttccctctgcacggctgcggctgcggaatcattgacaatcagtcctctcaacagcagagcaagttggaacagcagggttg

SEQ ID NO: 3378 - DNA, 475 bp, Chlorella sorokiniana
  Clone ID: LIB3602-014-Q6-K1-E1
gaactgccggaagtgatcaatgaaggtgttgtgctggggcagaagctggggcagccatgattgattgcgaaaagcatggataggcggaaggtttgttgcccctgcaacaccccaaattgcccacctgctgacccgcaagcgctgcgtgcagctggacgcgactactataatgtcacgctggtgcccgactgcaagggcccggacgccgagttccgcttcctggtggaaagcaacaacccctgcaagggtggccagccctttgtgggcttcatgacagtgaccgccaacagcagcgactgcgagcgggactgggtggagacgggcggctacgatgtggaagtcaaggcgagctccgacgttgagggcttgcagccgctgcagtgcgccaccggctaccgcgccgccactgaggaggagctggacggcaaggccacccagctgctgtggcagacgctcgtcttccccaccttttctg

SEQ ID NO: 3379 - DNA, 519 bp, Chlorella sorokiniana
  Clone ID: LIB3602-014-Q6-K1-E11
cttcactgccctcctactgtcctccacagggcctgggcgagatgatgccggagcagctgtgggagacgacgctcaaccccgcgacgcgcacgctgcgcaagctgaccatcgaggatgcagccgaggcctcccacatgtttgcgctgctgatgggcgacaaggttgggcctcgccgcgaactgattgagcgacacggcagccggctggccctggaggagctggacatttgagaggccgctaagcagtcctgtgcatgcggctgcaatggcagcctgcttgcaaatagctgcgctgctctgagcgagcgccaagtcagccctgcctggcggtatgatagctaggcatgccaagtaagcagctgccgacgtcgtctggccactctgctgcccttgcgaccattctgtgtgttgctgtcccctcatccaaaccttgctcaatgactctattcgttctcccctgactctctgctctactacattcagcacgtatgaccgtcaacacacatgtaaaacacagcag

SEQ ID NO: 3380 - DNA, 416 bp, Chlorella sorokiniana
  Clone ID: LIB3602-014-Q6-K1-E12
gcaaggaggagctgctgcagcagctcaaggagctgaagtaggagctgagcggcctgcgcgtggccaaggtcaccggcggcgcccccaacaagctgtccaagatcaaggtggtgcgcaagggcattgcccgcgtgctgaccgtggtcaaccagaagacccgggacgctctgaaggaggcgtacaagggcaagaagtacgtgcccctggacctgcgcgtcaagaagacccgcgccatccgccgccgcctcaccaaggcgcaggccaacgccaagactgagaaggctgccaagaaggcgcgcgccttcccgcagcggaagtacgcgctcaaggcgtgaaggccttggaagcagcccgctgcagccgtgcaggcacacctctaggcagcggccgctccggccccatgtaacttgacgccc

SEQ ID NO: 3381 - DNA, 298 bp, Chlorella sorokiniana
  unsure (1)..(298): unsure at all n locations; Clone ID: LIB3602-014-Q6-K1-E2
cgagcaacaggcaaccatgccgtcccagaagcgcttcgccatcaagaagaagctggccaagaaggccaagcagaaccggcccatccctccttggatccggttccgcaccaacaacaccatccgctacaacgccaagcgccgccactggcgccgcaccaagctgggcatctaagcgcctcccacgaggagcagctgacggcagcagccccggcacggcaggcagtgcgctggccgcgcttgcaaggcagcccgtcagtggcatgatgacagcttaagcttgtaacgatggcctagcnna

SEQ ID NO: 3382 - DNA, 414 bp, Chlorella sorokiniana
  unsure (1)..(414): unsure at all n locations; Clone ID: LIB3602-014-Q6-K1-E3
gtcgaccgcatagcggctgacctacgctccgccggcctgcgagtcgaggttgtgtcaggtctgtctgtgggcaaggccattcgaggcgctgaaactgacaaggtgccggtgatgtgtgtgattggtcagcgggaggcttccgacggcaccgtgtcggtgcgcacctatgctggcggagatctgggccccatgcgcgctgacgacttgttgtctcgcctggtggctgccaacagcaacaaatctcccttctgacgggatgcaaagagaatgcaaagcggttgatgttggtcgacatgtcgccacaatgtgttttggtcgccacctgtgtatgccaaccaaacggtgtaaatggctcccaatnnaaaaaaaaaaaaaaaaaaaaaaaaaaaaaaaaaaaaaaaaaaaaaaannnna

SEQ ID NO: 3383 - DNA, 356 bp, Chlorella sorokiniana
  unsure (1)..(356): unsure at all n locations; Clone ID: LIB3602-014-Q6-K1-E4
gtcgacacaatagcgcctgacctacgctccgccgtcctgcttgtattattttctgtcacatctgtctgtgggcgaggccattctaggcgctgaagcgtgccaacctncccatcatgtgtgtgattgatcagcgctaggcttcccactgcaccttgtccatgcacacctattctgcctgagatctgggccccatgcacgctgacaacttgttgtctcgcctgttggctgccaacagcaacaaatctcccttctgacaggatgcaaaaacaattcaaagcgtgtgatgttgctcaacatgtcaccacaatgtgttttggtcgccacctgtgtatgccaaccaaacggtgtaaatggct

SEQ ID NO: 3384 - DNA, 340 bp, Chlorella sorokiniana
  Clone ID: LIB3602-014-Q6-K1-E5
ggggggacaacagtttacaacatgtcgagagttgtggttcaggggcttacaaattagcaaacaagggggaaaagtgaagggggggtttctggcacccatacaaaaatgccaagcgggcaaagcaggaacagcaaacacttttttcacaagaatggcacaagaacgtggggcaacctgcggcaacaacaattttcttcaagcttgagggtttgggaacctttggaattacatttttttttgccaacttgcacaaccgtttgtttaccaacccccaaactgggcaggccattttttgtccgccagccagttttccagccagtacccaagagggaccccccac

SEQ ID NO: 3385 - DNA, 579 bp, Chlorella sorokiniana
  Clone ID: LIB3602-014-Q6-K1-E6
gaagagcatgctgaccgtcagccgagcgatgtatgcctagtagctgacggtgcagtcgctcctgctggagcgcatctacctggtggagatgcagtgccctgaactcgccattggcggggtgtacatggttctgtaccacaaccgccgcatggcgtttgaggagatgcaacccgccctggcacacaccgagtgttcaaccgttaagcgcctacgttgcccggcgatttgactcggtacggtgctaccgacacgctgcacgccgccactggtggccaggactttccaactgcgcgtgcgaccactgtgagctgatgacccccgacctgctgcagagctgctcgcataccaacgagatgcgctcaacatacgcaagcgcacgggtcataagtcgcagcctgccgaacttaacgaatacgaggacaagctgtaagctggtcctgcggcgtcccttttggcgagtgagcggcatgcgtgagcgtctcaacgctcgcggctgcggtcgccgccagcccacctgttcctgcgacctgcccgtaccgtgcttaacgtgcaccagatccacacactaagctgaaatgt

SEQ ID NO: 3386 - DNA, 466 bp, Chlorella sorokiniana
  Clone ID: LIB3602-014-Q6-K1-E7
cgcactgcaggcacatgcaaacgcgcctgcggagggctgtctccttggcagggcaacaacagccctaactgcgaccatgagcccagtgctcatgcacattaacatgcagaccactccggcaaactgacggcccatgtgacattagcatggtgtgccaagggtcctggcatggaacggtgcagcagaaggatatgctcaaactatgcatgcgctagcttatgtgctgatgaaaacggcaccgtggtccataccacaggcagcaccactcacgtatggctgagcttgcactccgccttgctcctctggttgtgcaccaatcctacttgggtgcgtggatcgactgccatttgggctttaatgcattccgtgtggctcagtgtccatacactcccctagctacactcgtgttcgcgtgcatctcaactcatttgtgttgcaacattttgcattgtgacaatcaatgtgc

SEQ ID NO: 3387 - DNA, 121 bp, Chlorella sorokiniana
  Clone ID: LIB3602-014-Q6-K1-E8
ctattatgttgctgctcctcgtgcgcttgcgctctctttgctcgctgctacctccaaactgctaaacactgacgtgagcttgccagccacaagcaaagcaggctttacacatgccacctgc

SEQ ID NO: 3388 - DNA, 296 bp, Chlorella sorokiniana
  Clone ID: LIB3602-014-Q6-K1-E9
gctgcaccacctgccgccccctcacccgcacccatcttccacccgccacctttcctgccgctcaccggcgcacatcctacctgccacacctcactccatgtccacccttcacccgcgcttcacacagcggctgctgccatgcaaagctgctgccaaacccatccatcatgctcgcacacccactcacccacacgtccaacgtatccagacccattttcaaggcccgactgtacagtgcctttttgcgtccttatgccgatctggtaccaggacttaatgtgtaacaaatggtatgt

SEQ ID NO: 3389 - DNA, 445 bp, Chlorella sorokiniana
  unsure (1)..(445): unsure at all n locations; Clone ID: LIB3602-014-Q6-K1-F1
ctgccctgtgccgttgcagctacattgatattaaaaacttcaaagctatggcccaccagcacacaattgtgcttgcggatgacgctaatgaagcagacgtattacaggacatgcaacgagccgtggatgagggcatcactgagccctgggaggtttatgtggcgggtgatgtaacagactcccgctttacttcgttgcccaggtacacaaagcatttcagcatgacgcgctacaaatggccttcagcagccgagccgtgagctgcaggattggcttgtggcttgccattatctcagttgttccaactgaacattcttgcttgtttttgttttccttcgcatggcttgtgcaccacaactgttgtttgcttgtactgattccttttggcctagccttgctagcaaatgtgcccatgcaaactggtccttgtggatatcactgcnna

SEQ ID NO: 3390 - DNA, 471 bp, Chlorella sorokiniana
  unsure (1)..(471): unsure at all n locations; Clone ID: LIB3602-014-Q6-K1-F10
gccgctcgccctggcctgcagcatgctcatctgctccgtgttttcgcggccacagctgaatgcggtgctgggaaagatgaccaaggaggcggccgaggtgcacggccggcgcctgagcgtcaacccaaccggaaccgcgggcggctgggagctgatggactggggcgacgtcgtggtgcatgtcatgaccacagagcagcgcgagtactacgcactggaagacttctatggcgcagcggaggaggtgtctctgccattcgaccagagtgatgaggcggccgcagtggacagctggtccaaaaagctgtgattagccttggtcgtgatgaaaggcggcagccactcggtgcagcacggaacagtgcagtgcggcacacccgtgcggtgcatgccctcctggtaccattttttagcattgccaaggaagctgcaacttagctgtagacctgtaaatcatcgcantgcnnaana

SEQ ID NO: 3391 - DNA, 594 bp, Chlorella sorokiniana
  unsure (1)..(594): unsure at all n locations; Clone ID: LIB3602-014-Q6-K1-F11
gcgctcggcgcgccgcaagaagggcgacgtgaagagccagagcagcgcggcgctggccatgctggcgggcgccgcctccaagcccacctctgcagctgccgccgcggcggccgcagccatgcagcaaaacctgggggagctgtggggcagcctgaatggcgcgggcggcctgccggcgggtgcctctggcatcgacctctccaagctcagcaccgagcagcagcagcagctcctggccaacccggaatacgcgggcatctcagatgagcgcgaggtcaagcgcctgcgccgcaagcagtccaaccgcgagtcggcacggcggtcgcggctgcgcaagcaggcggagacggagcagctggcgcggcaggtcaaggacctggccacagagaacgcgcggctgaaggaggagaagatgcagctggtggcccagatcgagatcctcaacgccaagctgtccatgagcgcgtttggcgccatgcacgggctggcgggcgaggctcccaagctggcggcccaagggcaggacatgcaaagcgtgcagatggcggcagccatggcgcaggcgatgcangtcaaccccggcgccatgctggg

SEQ ID NO: 3392 - DNA, 492 bp, Chlorella sorokiniana
  Clone ID: LIB3602-014-Q6-K1-F12
cttagctcgtccccagtcctcccagtgtcccgcagcagccagccatgcagcgcctgagccaggccgcgagcaaggtcgcccgccgggcgttccactctagccgcgccacccgttctgcggactatgagcaccgggagaacatgtacgagctctggaacatgaagaaccgcaagatgaagatgggcctggctgtgggcggcaccgtgttcggtggcattgccattcccctcgtcgccgcggagctgcagttctggaaggctagcggcggcaagtaagctgctggccagctgccgccctgtgcggcggcaggagggcccaactgcccctgcacctgcacctcttgaccaatgcggcaagtgcggcggcagatgcggcagtgcggcgcccgttctcctgccagcatgcagcactgcagccctcccagcggcggtggtcgggacctgggctggcagcggctgacgccctgcctcacgtccccgggagcctgatgtg

SEQ ID NO: 3393 - DNA, 507 bp, Chlorella sorokiniana
  Clone ID: LIB3602-014-Q6-K1-F2
gccgctacttcgacctgaaggacctggagaacaccgtgggcagctgggacatgtacggccaggaggacaagagccgctacaacggcctgcagtccgagttctttgagcgcgcggccaacggcctgtcccgccgcgagtacatcctgggcctggtggccatcggcggcgccggcatcctggcttggggcggcaaaggcgcagcagacgtccgcttgcccatcactgtcggcccccagcagcccgcccaggtgggcccccgcggccgcctgtgagcggcgccagctcagcgggcgggcgaccgctagccggtacggcggcccaccagccatgccagcctagcagccagccgccctagcccccttgttggctcccagcccggccctcacccctcactcatcgattcacgagaagaacaaccactgcccattctgcgctctacttgtgccgttacggtgcgcgccctccggcgccgcacgtgtaccaacagtgtaatctggtactgcccac

SEQ ID NO: 3394 - DNA, 594 bp, Chlorella sorokiniana
  Clone ID: LIB3602-014-Q6-K1-F3
gtgcgtgcgccgcgccgtgtacgtggaccccgagaccggcaaggaggaccccgccaagaagggcatctgctccaacttcctgtgcgacgccaagcccggccaggagatcaccatgaccggccccaccggcaaggtgctgctgctgcccgaggaccccaacgccgtcatcatctgcgtggccaccggcaccggcattgcgcccttccgcaccttctaccgccgcatgttcatggagaacgtgcccaactacaagttcacaggcctgttctggatgttcatgggtgtggccaactccgacaacaagctgtacgacgaggagatgcagaccatcgccaaggcgtaccccgagcagttccgcctcgactacgcgctgtcccgcgagcagaagaaccgcaacggcggcaagatgtacatccaggacaaggttgaggagtacgccgacgaggtgttcgacctgctgaacaacggcgcccacatctacttctgcggcctgaagggcatgatgcccggcatcttggagatgctcgagcgcgtggccaagagcaagggtctctcttacgaggagtggttcgagaacctgaagcacaagaacca

SEQ ID NO: 3395 - DNA, 247 bp, Chlorella sorokiniana
  unsure (1)..(247): unsure at all n locations; Clone ID: LIB3602-014-Q6-K1-F4
cgtccgcccttgatttttttttcttntctaatttttttttgggtggggcttgctttacacacgaggtgtcaccagccaaccagctgaaattccagggggcattccgttccgttgcgttgtccataaacattctttcggattgcggttaagtggaatggaccgggggcccttcgaaccccccgggtggggttggtgctaacggaacaataaaaggcgggagggtgcacgcgggcacggaggagggagc

SEQ ID NO: 3396 - DNA, 381 bp, Chlorella sorokiniana
  unsure (1)..(381): unsure at all n locations; Clone ID: LIB3602-014-Q6-K1-F6
gcggcagccatggcgtccaagcgtaagggtggcgtgggcggcaacaagttccgcatgaccctgggtctgcccgtggccgcggtgatgaactgcgccgacaacagcggcgccaagaacctgtacatcatctcggtgcacggctggggcgcgcgcctgaaccgcctgcccgccgccgcccccggcgacatggtcatggcgaccgtgaagaagggcaagcccgacctgcgcaagaaggtcatgcccgcgattgtggtgcggcagcgcaaggcgttccngcggaaggacggcacctacatctactttgaggacaacgcgggcgtgattgtcaacaccaagggcgagatgaagggctccgcgatcaccggccccgtggcaaggagt

SEQ ID NO: 3397 - DNA, 412 bp, Chlorella sorokiniana
  Clone ID: LIB3602-014-Q6-K1-F7
ggcacttggggcagctgcaagtggggctgtcgcgggctgtgcgcctcgggcagggcagcgaggtgcggatttcgaccatcaagccgctgcccatgcaggtcgatggcgagccatttgtgcaagcgccccgtgtggtgcacatcagccggcgggggcagggcctggtgctgcgccgcgtgcagagcaagcctctggccaaaatgatgcaggcgctgtcagaggtgctggaggaaagcgagcaccgcggtaccatcaccccagcacagcaccatgcgctcatggctgagctgtcgtcccgcctgcagccgctgctgctgcacccagcctgattggttgccttgcacggctgtagcttgtgctagaatgttgcccgtctgcatgactgtccatccacttgtaaggctcctgttgc

SEQ ID NO: 3398 - DNA, 84 bp, Chlorella sorokiniana
  unsure (1)..(84): unsure at all n locations; Clone ID: LIB3602-014-Q6-K1-F8
naaaaaaaaaaaaaaaaaaaaaaaaaaaaaaaaaaaaaataaataaaaaaaaaaaaaaaaaaaaagggggggaaaaaaaaaaaa

SEQ ID NO: 3399 - DNA, 222 bp, Chlorella sorokiniana
  Clone ID: LIB3602-014-Q6-K1-F9
caaattgttccgcgctacgctaataatgaaggacggccatgtgggcggtgtattttgcaaggtgtgtacgctgcgctataccaagagctccctcgctgccttgagttttgactagttgctgggccgcaagctgcgcccgtcaaccatctttgttgtaccatgcacagtcgccacttgtatatattttgccaggaaaaaaaatctttataaaaaacatcccca

SEQ ID NO: 3400 - DNA, 565 bp, Chlorella sorokiniana
  unsure (1)..(565): unsure at all n locations; Clone ID: LIB3602-014-Q6-K1-G11
ggactttgacgagttcctgatggtggtggccgacaagtttgagaaggtggacaacaagcccgtggtggtcggctggctggtggcggccttctcggccattgtgatcgcagagtggttcatccacctgcccctgttcaacgtcctgctgggcttccccatccagtttgtcggcctggtggtcaccccctacctggcgctgcgctactacgtgaacaaggacggcagcccgctttcggacgccgagttcctggtgaacaagtacactgagcagctccccggcctgngcaagaagtgaggcgctgccgtgcaacgctggcccggctgggctgcctggctgggaaacgagcgcctgcaagcggcatgcggcccgccagccataaggcgccctgagcagccgcgcaggctgcgcagagcgccggtctgccaaccctgcggctgagcaacagcgcccctttccaccagcctctccatcggccgtgacctgttcagcaccagctccaatatgtacgaaactgcctgagaagatcagccaatccctttttcccggtgctttgcccgctcagtc

SEQ ID NO: 3401 - DNA, 241 bp, Chlorella sorokiniana
  Clone ID: LIB3602-014-Q6-K1-G12
cgtccggctacagcgggagattgctgcaggagcgtggcacacctttttttgcagccgctccctggtgctgaggcagtgcttgcagctgccgggggcgctgtcactcaagaccattttcctcattggcggccggtacgcctaggaagcccggcagcagcaggcggcggacggcgactctgatgacgattgatggatggcccagctgccgtgcagcaggcagcttctggatttaactgggcct

SEQ ID NO: 3402 - DNA, 374 bp, Chlorella sorokiniana
  unsure (1)..(374): unsure at all n locations; Clone ID: LIB3602-014-Q6-K1-G2
cgcgcggaagtgaagagcgtggtgtgcgccagcaaccccacctccaagatctgcctcaaggacagcgccaagaactgaggcgtgccagctggactgagcgagcgctgagcccttgctggccgcacctgaggcaggcagccattgctgactgccggggggcaccgggccgccacccgctgcccggcagcatgggcgaggcggcgtgagaaagagaggacttgtgcactgccacacagttttttggacacctgtgctgtaacatatacttgaggaaaaaaaaaaaaaaaaaaaaaaaaaaaaaaaaaaaaaaaaaaaaaaaaaaaaaaaaaaaaaaaaaaaaaaaaaaaaaaaaaaaaaaaaaaaananggggggg

SEQ ID NO: 3403 - DNA, 404 bp, Chlorella sorokiniana
  unsure (1)..(404): unsure at all n locations; Clone ID: LIB3602-014-Q6-K1-G3
agcagctggaggacggccgcaccctggcagactacaacatccagaaggagtcgacgctgcacctggtgctgcgcctgcgcggcggcatcattgagccgtccctgcagatcctggcccgcaagtacaaccaggacaagatgatctgccgcaagtgctacgcccgcctgcacccccgcgctgtgaactgccgcaagaagaagtgcggccacacctcgcagctgcgccccaagaagaaactcaagtaaactactcgcttcggcacgagcggaagcggcatgagcggcagcaaccgctgccccccccccgccccgccagccgggatgccatgacagcaccggctgctcagctgctgatgtgctgcatgtcaattgctgctgcggaaatgtaacggtggtagcgatnaa

SEQ ID NO: 3404 - DNA, 565 bp, Chlorella sorokiniana
  unsure (1)..(565): unsure at all n locations; Clone ID: LIB3602-014-Q6-K1-G4
ctcgacgcccgcccctggcccagcccagccgcgccgctccagcgcgctccctcctcgacccttacgctctgcgcccctggacccgacccaaacgcagccatgtccggcaaggcggtgattcgggccacgcagatgttcaccaagaccggccaggccagccgcgtcagcctgggcaaggagattgccatcggcctgaccctgggcgcgtccctcggcttctggtggcagacttatcactgggatctggcgaagaagtgggacaactactacaaggcgctggaggcccagaagtgagctgctcgctggcagccggtgcggcgcgatgatagcatagcgcgccaagcaaagcagttttatgtgcttggcgcaacccacgcgccctgcgccggcccccagtttttgcttgctctcggcgccgcggnttgcgcagagcggctgagccgaacgccgcagccgcgcgccgcatgatggtccccagcacttgtgcctcttgcttgatgcccacaaagacccacgctgtacccgtccaaccctggttcgggagctgcttgtaacgtatgtacac

SEQ ID NO: 3405 - DNA, 60 bp, Chlorella sorokiniana
  Clone ID: LIB3602-014-Q6-K1-G5
ggactttgacgagttactgatggttgtggcccacaagtttgtgaaggtggacaacaagcc

SEQ ID NO: 3406 - DNA, 548 bp, Chlorella sorokiniana
  Clone ID: LIB3602-014-Q6-K1-G8
cgcttcatcggagccgcagccgtgcgcctggcggtcctcaagtttttgctgtccatgaccgctaccaaggatgtgctggccatggccaacctggaggtggacatgaagaacattcaggagggccagaccgtgacggtcaagtggcgcggcaagcccgtgttcatccgccaccgcacccccgccgacattgcggccgccaacgacgtggacatcagcaagctgcgcgacccgcagcccgactcggcgcgcactaaggaccccaactggctgattgtgctgggcgtgtgcacgcacctgggctgcgtgccgctgaacaacgcgggtgactacaacgcatggttctgcccatgccacggcacgcactacgactcttcgggtcgcgtgcgcaagggccccgccccctacaacctggaggtgcccgactatgtcttcctggaggatggcaaggtgctgattggcaccaaccaggcgtgagctggctctgacgttggctgacatcaggcctttggttatggggccgcatggctgagctgggcgccccaatgtgt

SEQ ID NO: 3407 - DNA, 397 bp, Chlorella sorokiniana
  Clone ID: LIB3602-014-Q6-K1-G9
atgaagaacattcacgagggccagaccgtgacagtcaagtggcgcggcaagcccgtgttcatgcgccaccgcaccctcgccgacattgcggtcgtcaacgacgtggacatcagcaagctgcgcgacccgcagcccgactcggtgcgcactaaggaccccaactggctgattgtgctgggcgtgtgcacgcacctgggctgcgtgccgatgaacaacgcgggtgactacaacgcatggttctgcccatgccacggtacgcactactactcttcgggtcgcgtgcgcaagggccccggcccctacaacctggaggtgcccgactatgtcttcctggaggatggcaaggtgctgattggcaccaaccacgcgtgagctggctctgacgtagggtgacatc

SEQ ID NO: 3408 - DNA, 76 bp, Chlorella sorokiniana
  Clone ID: LIB3602-014-Q6-K1-H1
aaaaaaaaaaaaaaaaaaaaaaaaaaaaaaaaaaaaaaaaaatttaataaaaaaaaaaaaaaaaaaaaaagaggtg

SEQ ID NO: 3409 - DNA, 483 bp, Chlorella sorokiniana
  Clone ID: LIB3602-014-Q6-K1-H10
cctgtacaagcgcgtgtgcgactacatggagtatgacacgcgtgtggaggtgctgaacaatcggttccaggtgctgcaggagatgctcgacatgctgcgtgaccacagcaacaacgcgcacgcctcgcggctagagtgggtcatcatttggctcatcgttattgaggtggtggtggggctgttcgagtgcgcatcgattctgggctggatcggcgtgggatgagcgcagcattggacgtgcctacatgttgcttgctttgtgctctcccctgctgctcgctcgtcgcttgtcgctccctgccaaactctctttcgacctgtcgcacccctaccttttgctgccctttgatgccgcgcaatgccatgcacttgtatgattgcagcagtggcatgcaatgtaatgtgagatggtggtaggcggctggcggagcaagagggagcagcatgcagactttctcaacaggcagtgtgcctgcctgcact

SEQ ID NO: 3410 - DNA, 492 bp, Chlorella sorokiniana
  Clone ID: LIB3602-014-Q6-K1-H11
gctgcccagcggcgcagcgcagcaagcagcggcccccatcagcctccgactctggcggggcttcggtgatgcggctggcagcttcctggacaagggcgaggtcaccgaccgggtgctgaacgtggtgaaaggatttgagaaggtcgaggagggcaaggtgtcagccagcgcttcgttccagaaggacctgggcctggacagcctggacaccgtggagctggtgatggcgctggaggaggagtttgccatcgagatccccgactccgaggcagacaagatcctcagctgcgccgacgccatctcctacatcgcctccaaccccatggcgaggtgaagcgcgcgctgaggcgcacggcgcggtgacgccgcttgccggcccgtgcccgccccttcccgctccaaaccagccttgccatgtacagcacttgtgtctgctccgtctgccagacagggtgcggcagtgctgggaagcgctgatgcgcgctcagcatg

SEQ ID NO: 3411 - DNA, 478 bp, Chlorella sorokiniana
  Clone ID: LIB3602-014-Q6-K1-H2
tgctttcccacacgagcaaggcaatcggtacttgggccacctgctgtacgaccttgccaaagcttccttgtccaggctggcgtttggtctggctgaagagctgcggccgcacggcgctgccgccttagcgctctcacccggccacatgcgcaccgaacgtgtgctgcagcactttggcacggatgagcagcactggcagcaggagcctgggctggcgggcagcgagtcgccagaatacttgggcagggcggttgcagcgctggctgccgaccctcaagtgctgcagcgcagcgggcaggttctgctggttgccgatctggcacgtggctatggtttcaccgacattgacggcacgcagccgccgccctttgtgccgccggcctgaggcgcagcgcctgcccaaactgcctcaaaattgttgtgcatacctggttttgtatcagtgtctgcaatatgtatctggtaacatacattgctg

SEQ ID NO: 3412 - DNA, 313 bp, Chlorella sorokiniana
  Clone ID: LIB3602-014-Q6-K1-H3
ctaacgctgtaccaagtctctgctgaccgccgtcccctccggccgtgccccagcgcccctgctcacctgccctcttgagactgctcctccgtgcttgcggcgaatgggctcctgtagattagacagcccccatgcgtacccaccactgtgccctcttttcctgtactctcgccggccgcggcgcgcacacacatgctcgctcgaaaacccaacgaagccgcccgcccgccatacacacgcactgctgtatcactgatgcacccaccgtgtgagccctttttcccatgcctgtgctcaccccatgtaacccaga

SEQ ID NO: 3413 - DNA, 573 bp, Chlorella sorokiniana
  Clone ID: LIB3602-014-Q6-K1-H4
aaaaaagaaagggaaaagctctctgagtcccccaaccccgcgctgtactcgttgtcaaagctggctggcgggtgtttcgagccgcggcgcccttgcctgaacgtcgcaaagtgatcaccatggcgtcagcttgcacccgaagcgtcgcagccagcctcggcaccagaccgcagctgacccacgcctcacggcagcctcggccccccaggagcctggtacgagtacgagcattccagatagatcgcaggcatcacatggagctgcaatggcagcggcagctggaggcggagcgcctgctagcgggggtggccggccagctggctgcgggtggagtgatagaggtgcagagcctggagcaccttgagcggctgcttgaggaggcgtccggccagctggtggtgctgacagtgtactcgcggagctgcggcatctgcaaggacgtgctgcgagagctggaggcggtgtgccgcgagtcgcggcagcagcgggcgcgcatcgtcttcctcacgcatgacatgcaggatgcgtttgactggcccttcgacatcagccgcatgtacaagatccgcagca

SEQ ID NO: 3414 - DNA, 541 bp, Chlorella sorokiniana
  Clone ID: LIB3602-014-Q6-K1-H6
gggcgatgaggagacgcccctgagccagcacggcctggcgctgtgaggaatgccacacccgctgtgaggaatgcaacaccgcgaccggcgccggaatgccacaaccagcggcggcaccatactgctgctgcgccggcaccaggcgcgggcgcccttgcatcatgaaggagatgtactcatgaatggaatagctttcccaggccactccccacaaatagatgtcatgcctcggcagggcagccgcctgccatgcagtggctggcccttctcgtcccatactgccgcagatctcatcccatgtcgccagcagcaatgaacgcactgatgccttccattatgttgatgctgatgcccgccctgcctgagaagcaacgctatgctgcatgctggggcactcgatccccaccaaattttcatttgtgttgtgtgccctgcctgcaatgcttggaaaccccaacctacatacatattctcatgttgccagtgtccccaccatctgcaccttttgcgattttttcctatctgtcaagtctgcccaact

SEQ ID NO: 3415 - DNA, 544 bp, Chlorella sorokiniana
  unsure (1)..(544): unsure at all n locations; Clone ID: LIB3602-014-Q6-K1-H7
atggacacaacaaatgctcgctggcaacaatcaaaatgccctactataccgggtgctgctgttcctctacatcctctcccaacacttgcacaagctgtcagcaactggacaaatatgttctatggggggcgaaatctgaggtcatgttcatttggcacaagacaatctaccaatacaactgtagtcgaggagttggtgtgctcatatgatgacctagaccttgccattgttgtaagattgagggatggactacagctcctagacggactgcgatttgctccaccacctccacctttgcccccaccacctcaagctcgaccgcctaaatggactgacaacgcaacagcacctttgccagtcgacatgctgcatgggccccctgccacgagccaaggcctgagtggttgtttcctcaccagctctgactgcggngaccatgggacattgaagggactgtccccatcaggctgcacttgtgtctgtgagctcggatggcaaaacgctggggggccaggctcatctaaatattattgctcagaatata

SEQ ID NO: 3416 - DNA, 404 bp, Chlorella sorokiniana
  Clone ID: LIB3602-014-Q6-K1-H8
gcttgggtggagcacagcggctggcaccatgtcgaagcgtactaagaaggtcgggatcgtcggcaagtacggcacccgctatggcgcttcgctgaggaagcagatcaagaagatcgaagttagccagcactccaagtacttctgcagcttctgcggcaagttcgccatgaagcgccaggtggttggcatctggaagtgcaaggcctgcaagaagacccaggctggcggcgcgtacgtgctcaacactgcggcgtccgtgactgtgcggtccaccatccgccgcctgcgggagcagaccgagaagtaagcgagcggccattgaggagtgaagcgggcggcggcggcggcgctgcagcagcgcgctgcagcgtgccgggtggccgctgcttcatgatgtaacgcag

SEQ ID NO: 3417 - DNA, 466 bp, Chlorella sorokiniana
  unsure (1)..(466): unsure at all n locations; Clone ID: LIB3602-014-Q6-K1-H9
cggacgcgtgggcgcacctggagcgcacgggccactacctgaccggcaaggacaaccaggtggtgtgcgtgcacccttccacctgcctggaccacaagcccgagtgggcgctgtaccaggagtttgtgctgaccagcaagaactacatccgcaccgtgacggacatcaagggggagtggctggtggacctggccccccactactttgacatgtgcaacttccccgccggcgaggcgcgccgcgcgctagagcggctgtatgcaaagcgcgagaaggaccagcgggagcgggcatcgcggcaattctagacggcacatcgggctctttataccctgtactctctgctgcgctcccctgtacccccgtatttactctcgttggtcatctgctgctcgtcgggagccaccttgctcacttgctacggcaatgctgcccggttacgatgtaacacgcatcaccnncnnan

SEQ ID NO: 3418 - DNA, 415 bp, Chlorella sorokiniana
  unsure (1)..(415): unsure at all n locations; Clone ID: LIB3602-053-Q6-K1-A1
cctcacccaacccatccacctgccacccatccactcaccttccctccgccacaacctctgccacccactcaccacccatcacccgctcaacgccctccatgcaccatcctccccatccaccaaatctgccaccccaaacgcacgtccgccgctgcaccacctgccgccccctcacccgcacccatcttccacccgccacctttcctgccgctcaccgccgcacatcctacctcccacacctcactccatgtccacccttcacccgcgcttcacacagcggctgctgccatgcaaagctgctgccaaacccatccatcatgctcgcacacccactcacccacacgtncaacgtatccagacccattntcaaggcccgactgtacangtgccttttgcgtccttatgccgatctggt

SEQ ID NO: 3419 - DNA, 573 bp, Chlorella sorokiniana
  Clone ID: LIB3602-053-Q6-K1-A10
gtggtggtgccgggtgtggcgggctgccgctccgtcaagtggctgggcaagattgtggcgagcgacgaggagagccacagcttctggcagcggcgcgactacaaggccttctcaccttctaccgactgggacaacgtggactgggatgcggccccctcaatccagaacatgcccgtcacctcccacatctgcgagccggcacggggagcggtggtcgacgatgatgaggtcacagtcaagggctacgcgtggagcggcggcggccagggcatcattcgggtggatgtgtcggctgatggcggcaagacgtggcacgatgcgcagctgcagaaggtgccgcagaagcgcggccggggctgggcgtgggcgctgtgggaggcgacgctgccggtgcccaaggggcacaagggcccgctggagctggtgtgcaaggccacggacgagagctacaacacgcagcccgaggaggcggcgcccatctggaacctgcggggcgtcaattgcaactcctggcaccgcgtcacggtcaacgtggagtgaggctgccgcatgctgggcttgtgcacaaacgtg

SEQ ID NO: 3420 - DNA, 264 bp, Chlorella sorokiniana
  Clone ID: LIB3602-053-Q6-K1-A11
acgccaggcgcttgtgttcattgcatccacacccataactctgctacttctccccgcccggtgcgctacacccacgcctgcttgtatacatgcggtgcttccccccacaccctctctttccctcccattttgtcagcagcctttctttcattcctcgcctgcgcggcagcgccgagtcctgcagtcattctgcatggcacgcggttgtaatatcgaggcgtgaaataaaaaaaaaaataaatataataagtcaaaaagtatatc

SEQ ID NO: 3421 - DNA, 370 bp, Chlorella sorokiniana
  unsure (1)..(370): unsure at all n locations; Clone ID: LIB3602-053-Q6-K1-A2
gcggaggaacggagggcgcaacaagcacggccgcggccacgtcaagcgcgtgcgctgcgagtcgtccgccgccatggtgcccaaggacaaggccatcaagcgcttcatcgtgcgcaacatggtggacgcctcggccatccgcgatctgcaggacgcctgcgccatcgacggctatgcgctgcccaagatctaccgcaaggtctactactgcgtgtctgccgccatccactccaagattgtgcgcgtgcgctccgtcaaggaccgccgnaaccgcgagccgccccgccgccccggctttggcgcccgccccgagcgcaagtgagcgtcggcatggccgcagcagcagcagccgctgaggagcagtgagggc

SEQ ID NO: 3422 - DNA, 504 bp, Chlorella sorokiniana
  unsure (1)..(504): unsure at all n locations; Clone ID: LIB3602-053-Q6-K1-A3
acgcagaccccgaccagcggtggagtaccggccagatcatggcccacccctggttccttcaagacctgccccccggagcgcagcacatgaacgcgtactacatggcgcatgcaccccaggtggagtcgctggcgacccaaatagggtcgattctagaggcagcggcacacacaggcgcgcctggcgagccgctgctcagcgtgcagttcagccggccggcgccctcggtaccccccgcatgaggctctcggcgtcttcaaccgatgcccaagggcgaatcactttctttctttctttctttcccgcatgaggcactgcctggcaaccctcagccagggggcgaggcaatgcgaccgaacgaattctgaacgtgtgcaactttcgagcgtgtgtggtgtccgacttgcttgccggccttgtgcaacttatgtgacccaagtcgtctgcatttttgtgcatgtagctctggtgtattctgtcgntattttgggtgtcgtgcgtgtg

SEQ ID NO: 3423 - DNA, 362 bp, Chlorella sorokiniana
  Clone ID: LIB3602-053-Q6-K1-A4
gtgaaggagatcaagaacggccgccttgccatgctgtccatgttcggcttcttcatccaggccatcgtgaccggcgagggccccatcaagaacctgaacgaccacctggctgacgcctcggctaacaacttctacgccctgtacgccaagaacctggcgtaagcacttgtcgtacgaacgtacgaggcccgcgcgcgattgtgcgccccttgagaagatcacacgaccctgtcgcaccgcactgccgcctgtacgcacccaccatgtgtatgtgctagagcctatgaagttttgtgtaagcccttgatactcagactagaaaacctcagccagggggcgaggcaatgcgaaccaaacgaaaa

SEQ ID NO: 3424 - DNA, 70 bp, Chlorella sorokiniana
  Clone ID: LIB3602-053-Q6-K1-A5
cgcaggcgcttgtgttcattgcatccacacccataactctgctacttctccccacccggagcactacacc

SEQ ID NO: 3425 - DNA, 295 bp, Chlorella sorokiniana
  Clone ID: LIB3602-053-Q6-K1-A6
cccgccgcggccgctgctgcgcccgccgccggcggcgccgcggccgcggaggagaagaaggaggagaaggttgaggaggaggaggacgaggacatgggcttctccctgttcgactgagcgcacagccggccgcggccagccaccctccagtgcctggtccgctccagttgcagcggcagctcgatccctcgcctgcggcacgtacggcgtagcgtggcggcagcggcggcggcagcctagcggcgtgtttgtctcgctgccgtcgcagctgcggcgcatgtaacgcactccttcc

SEQ ID NO: 3426 - DNA, 216 bp, Chlorella sorokiniana
  Clone ID: LIB3602-053-Q6-K1-A7
cgcgtgcgcttctagactaactgtggggtggtgtcaagggctggggcctcaagcgcttcatcgtgctcaacattgtgaacgcctcaaccatgcgcgatctgctaaactcctgctccatcgacttctatacgctgtccaagatctaccgcaaggtctactactgtgtgtctgtcgccatccactgcaagattgtgcgcgtgcgctcacgttatgacc

SEQ ID NO: 3427 - DNA, 77 bp, Chlorella sorokiniana
  Clone ID: LIB3602-053-Q6-K1-A8
acgaaaaaaaaaaataaaaaagcacaaaaaaaaaaaaaaaaaaaaaagaaaaaaaaaaaaacatacaacggggaaaa

SEQ ID NO: 3428 - DNA, 401 bp, Chlorella sorokiniana
  Clone ID: LIB3602-053-Q6-K1-A9
acggccaagaactcgctggagaactacgccttcagcgtgcgcaacacgctgcaggacagcaacgtggcggacaaaattgatgaggctgataagtctaagctcgagaatctggtcaaggagacgcttgagtggctggatgccaaccagctggccgaggaggaggagtttgaggccaagcgcaaggagctggaggaggtggcctcccccctgtttgccaagctgtaccagcagggcggcggcgcgcccggcggcatgcccgacatgggcggcatgcccggcggcggccccgccgccggccccaccgtcgaggaggtcgactaagctggcactcctttgccggccctgctccgcatgggcggcgcccccaccgccttgcgctgcttcgtccgggcccgggggcg

SEQ ID NO: 3429 - DNA, 550 bp, Chlorella sorokiniana
  Clone ID: LIB3602-053-Q6-K1-B1
aagacatacagaggcgtgcggcagcgaccttggggcaagtgggcagctgaaattcgagaccctactgttggcgctcggcggtggctgggcacatttgacacggcagaggaagctgcacgcgcatacgaccaggcagcgcgtgcgatcaggggcgtgcatgccaagtgcaacttccccttgccggaggaggaggcattccaggcgcagctgctggcatcgcagcaggagacatggacaggaggccaggcctccccgccagctgcttcacaaacagcaacttcaacacaggcagcatttagccaagctgtgtccattccttgcaatgagtcccatcccgtccagccgcgcgcggcagtccagggcccagagtggatggcacaatctttggggaaggacggcctcagcctgggcacatccccgatgattaggagctatgacatgggctatatcagcacgcgcatgatggagtgtgaagacgcattcagcgacatggggagcttaaaacagaatctggagctgccccctgagtatgcatatgatgatgatgatg

SEQ ID NO: 3430 - DNA, 541 bp, Chlorella sorokiniana
  unsure (1)..(541): unsure at all n locations; Clone ID: LIB3602-053-Q6-K1-B10
ggccaccattcgcccgtatgctgtcatcccaggcatgaaccacgcgcagttctcaaacggtgtggtgaacattgtacgcggcgacctgccgtctgatgtgcccgctgagacacaggctgaggcgttggcgggcctgctggtggcctttgtcgctgccaaccacccggcagccacgctcaaaaccagccaccatgctgtggagaagctgatggaggccaccgccaccagctttgagctgctgtctcccttctgcgaggccagcgggcgcggctcgccagcctccctgctccgcgccggtgctgcctccagctccgacccagctggcgacgacctggcagcatatgctctgggcgctgagcggctgccggccttcggcccaggccgcaacggctttggccaccccggcgagctggcggcggcggagcgctttgcccgcgcagcgcagcggcgcatgctaacggcggngctgccggcaggctctgatgtggcggccgtccgtgttgcggtgacggtgcacatctcgctggacacgttcatctac

SEQ ID NO: 3431 - DNA, 550 bp, Chlorella sorokiniana
  Clone ID: LIB3602-053-Q6-K1-B11
cgctgctggagcgggaggaggtgtgcatgaaggcctttgccaagctggacaaggatggcagcggcacgctgaccgctgatgaggtggctgaagccatgggctgcacggggcgcatgtctgagcaggaggtgcgggatgtgatagcgcggtacgatgtcaacggtgatggcatcatcgattattcagagttcctcaagatgctgcgggagaacgactcgcagctacggcgtgcgagcgactctctgaagcgcggggagctggcgctggacccggtggtgcacaagtagcggcaatttgactgcagcaaagcggtgctcaagcagccgaagcaaggggagctggcgccgcacaagtagcagtgtaacaggcacatagatggcagttgagtggtgcacgtgcagcggcaaagcggcgcagacccgccggccctgcagccgccccggctttttgcttctcgccatgaccatctgcttcgtactgactgcccttccctgttcctggctatgcgttcctgtacctgttttgggcccccggcctgctgtgtgataca

SEQ ID NO: 3432 - DNA, 96 bp, Chlorella sorokiniana
  Clone ID: LIB3602-053-Q6-K1-B12
aaaaaaaaaaaaaaaaaaaaaaaaaaaaaaaaaaaataaaaaaataaaaaaaaaaaaaaaaaaaaaaaagaatgaaaaaaaaaaaaaaagagtggg

SEQ ID NO: 3433 - DNA, 426 bp, Chlorella sorokiniana
  Clone ID: LIB3602-053-Q6-K1-B2
acggcgctaccccgaccccgagatcaaggtgaacgacacggtgatgctggacctggagactggcaagatcaaggacttcatcaagttcgatgtgggcaacctggccattgccaccggcggccacaacaacggccgtgtgggcaccattgtgcacaaggagaagcacaagggctccttcgacattgtgcacatcaaggacgcggccggccacacctttgccacccgcgtgaacaacgtgtttgtgattggcaagggcgacaagcccatgatctcgctgcccaagggcaagggcatccggcagagcatcctgcaggagcaggccaagctgtacggcaagtctgcctaagcgcaggcgacgccacatgagctgagccgacgccggcgagggccgcccgccggcggcccccacggcagacgcgcagcagc

SEQ ID NO: 3434 - DNA, 542 bp, Chlorella sorokiniana
  Clone ID: LIB3602-053-Q6-K1-B3
cggacgcgtgggcggacgcgtgggcccatccgcagcagcagaccgccatggcgctatttcgaccgctgcaggcctcgctgcccacgctgctgcagcgctggggcgccgccctgcacacctccacctcgctgcggggcctggaggagctcatagtgctgccacccaaggaggatgagaaggaacccaccacagggcgcggctggcaggcgcaggatctgcggaaaaagagctgggacgacctccacaagctgtggtttgtgctgctgaaggagcggacgcggctgcatgcagagaagcagctctaccgcagccgcggcgaccgcatgcccgaccccagccgcatcggcaaagtgcgcaagtcgatggcgcgcatcaagcacgtcatgagcgagcggctagcggagcacgaggacccacacgtgcggcagcagctcaagtcgtttatcgacggcctttgagcagcagcagccagtgccccagcacctgtggagtggcgctctgccaagcagcggcgggttgctctcgagcagcagctgcggcat

SEQ ID NO: 3435 - DNA, 520 bp, Chlorella sorokiniana
  Clone ID: LIB3602-053-Q6-K1-B4
gccgccaagcccaagaaggccgcccccaaggccgccaaggcagcacccaagaagaaggccacccccaagaaggccgccaagaaggcgaccaagaaggcgtaagctcggcctccggagcacggccctgagcacggttgtggtgcggtgcagaccgacttgtttacccttcccgaacgacagactgcccaactgcgccactctctcgccgccctggggcctgctgcccgccgtacctctgcctgctctgctgccgagtggtcaatcccaatgcatgactcgcttgccgcgcgcgacgcccgaagagcgcaccctgcacccacaaacggaccagcgaccccccgccgccacgcacttctgaccgccccgctctgcctatgacagccgttctagtgcgcgcagccgttttgccgccactcacctcccctgctgccctgtccctgacgcacctatctccgtctgacgcatctgtattgctttctctggggttggggccatgtgcccggtgtgtaaactatgagat

SEQ ID NO: 3436 - DNA, 404 bp, Chlorella sorokiniana
  Clone ID: LIB3602-053-Q6-K1-B5
acctgttgaaccggaaggaggtgtgcatgaaggccgttgggcacgctttaaagagaatggcatttggtaccctgaccgtggaagaggtggctgatgctatgggctgaccgaagcgcatgtctgagcaggaggtgcgagatgtgatagcgcggtacaacgttaacggtgacggcataatcgattttgcagagttcctcattatgctgagggagaacgactcgcagatgccgcgtgcgagcgactctctgaagcgcggggagatgctgctggaccagggggagcacacgtagcgcgaattttactgcagcaaagcggtgctcaatcagccgaagcaaggggagttgactgcccacaagtataagtgtaacaggtacatatatgtcagttgagtggtgcacgtgcag

SEQ ID NO: 3437 - DNA, 585 bp, Chlorella sorokiniana
  unsure (1)..(585): unsure at all n locations; Clone ID: LIB3602-053-Q6-K1-B6
ctcgccgctgcggccccaccgctgttctgctgcttgccctggccctgggcgcggcctggggcgttgctgcagatgatgacgaccgctgcgccgctggctggcagccggtggaggcgggcgctctcctggacttggccgcagatgtggccacccgggtgtcggagctagccaatgctaccggcgttctgacctgtggcacgcaggcttctgatgtcgtcgactgcccacgggactggcagggccagacccgccaccgcctgtatctcaacgtctcctgcgaggagtctgctcgtgaggtgattgtgaacctggaggtggacgccctgngcgcagctgacggcaccgtgcggggcattgacgtagatatcgagcgcgtcactgttgatggccagcggattggcgacgacctggaggacctgtttggcgatgatgacccgcgggaggacaccatggagacgctggaggaccgcattgaggacctgttcggcgacgatgatgacaatggggacgacattggcgacgataatggcgatgacaatggcgacgacaacgacgacgacaactgaatccgttgatatgctcgct

SEQ ID NO: 3438 - DNA, 424 bp, Chlorella sorokiniana
  unsure (1)..(424): unsure at all n locations; Clone ID: LIB3602-053-Q6-K1-B7
ctnttattctttatatcttgcgtacttttttctcttactggaattacatacagctcagattgcagggaccacttagcactcttgatgagcaaacgagcgggggcaaaatcacatcgtctcgggcagcaccttgcgctgcacctcgaacagaatctcgggcttgttggcgtcaaagggcacgtaattccggtccttatcgtacacgtggcagtgggtgaaaatgtacttgagcatgcgccagttgaacccacgcgtccgactagttttagatcgggagcgggcagcctttatagcattctgcacgagcatgccaagctgtacgggaagtctgtctaagcgcaggcgacgccacatgagctgagccgacgccggagagggccgnccgccggcggcccccacggtagacgcgcagcatcagacgggg

SEQ ID NO: 3439 - DNA, 565 bp, Chlorella sorokiniana
  Clone ID: LIB3602-053-Q6-K1-B8
agactttgtgcaggccattgtgacgtgggactggagcggcaagatccagcccacctggcgcctgctgcgcaagtgcctcaagtctgagcccgggcaggagccaacggagccctatctcatcattaaagacccccaagcgtacctggaccccaagcgcctgtacagcccccgacccggcatgcagcgatagcggcgcgaggcgcagcaatgcacggatggcggccgaggcggagcgatagcagggcggcatgcagcagccggcaagcagcgatagcggggaggcatgcagcctcaccgccaccggcatgcagccttagcaggcggcgtgcaggttctctgcccgcggatgcagcgatagcgggcgaggcacagatacctaaggcagggggccgcggcagcgggcaagcatgccgtgatagcggggcggcatgcagcggcggccaacggcggtgtgctggcggtgcagttgtggcgcggctagctatgccattgtgcatgccatgcagcggcagtagagcagtgcagcaacagcaggatggcagtgcggccatgctgttctgtgtgc

SEQ ID NO: 3440 - DNA, 517 bp, Chlorella sorokiniana
  unsure (1)..(517): unsure at all n locations; Clone ID: LIB3602-053-Q6-K1-B9
acgccctattgcctgtggggtctcaggagcaggatggtgaagttcctgaagcccgggaaggtggtcatccttctgtccggccgctatgccggcaagaaggcggtcatcgtgaagaactacgatgatggcaccagcagccgcccctacggccacgcgctcgtgtgcggcctgtctaaggagccccggaaggtgatcaagcggtcgtccctcaagacccaggcgcgccgctccagcctgaagaccttcatcaaggtggtcaactaccagcacatgatgcccacccgctacacgctggaggtggacctcaagggcgtggtgaccgccgagtgcgtggacaacagcaccaagaaggtggaggccaacaaggaggccaaggcgctgctggaggagaagttcaagagcggcaagaaccggtggttcttcaccaagctccgcttctgagggagtttcttggagagcctaagtngcagcagccgtgacgtgacgtgcttcttgccccgagacgcccatgtaacgt

SEQ ID NO: 3441 - DNA, 515 bp, Chlorella sorokiniana
  unsure (1)..(515): unsure at all n locations; Clone ID: LIB3602-053-Q6-K1-C1
cggacgcgtgggcgagggccaggacaccctgtaccccggcggcgccttcgaccccctgggcctggctgacgaccccgacaccctggctgagctgaaggtcaaggagatcaagaacggccgcctggccatgctctccatgctgggcttcttcgtgcaggccatcgtgaccggcaagggccccctggacaaccttctgcagcatttggaggagcccggggagttcaacttctacgccctgtacgccaactccctggcgtaagcagcttgtttggagcacctgcggcggccgaggcggcggcgctgagctggcgcanagcgcggttggcgaccgccgccgcctcacgctgttgcccttgaccctctttcctttacgcgcttgcatgcgttcccgactccgctgcatgttgcctgtgtgtgcaatngtgcatcanngcaaagaaacgagaagaaaactncacccaaacaccattttgccttgtgtaccatcctgtacgaaaaggaggcttgagtggtgt

SEQ ID NO: 3442 - DNA, 582 bp, Chlorella sorokiniana
  Clone ID: LIB3602-053-Q6-K1-C10
cctagcggacatgagctgcagcagatgctctaagcgctgctgcttaagcgcacatcggagcgagcggcaaagaacgagatgaaaatggacaaggccgcagccgaagcagcggcaaatggcatcggcgatgcagcagcatctggtggacggcggcggcaagcgtgcggcggagaacggacacggcgatgcagcaccggatgcacataacggcgcacacgttgcgccagctgctgcggaaggggccgctaagcgcttaaaggctgcagagttgaagcccaatggcgcgcacgacaaggtgtgaaacaacttgttcaccagcagcaccggcggcggtagcggcaacgactacatgtgccgctacaccatgcggagcgtggcgtaagccgtttagcataacggctgctgggacttcgctgcagagcaccaacagaggcggtagctgaaccagcttggctgtgttgggagcctacgtacaggcgcttggctgacgtgccgctgcatgctctaacctccgtagcaaccgaccgcatgcccttgtgccatttcactcgcaaccgactcatacacatagctgactgtaac

SEQ ID NO: 3443 - DNA, 103 bp, Chlorella sorokiniana
  Clone ID: LIB3602-053-Q6-K1-C11
tcctaatactataaactgcaccacattctctaagctctgttccttacgcgcacatcggatcaagcgtgagggcactataataatgtggacaaccccacatcct

SEQ ID NO: 3444 - DNA, 428 bp, Chlorella sorokiniana
  Clone ID: LIB3602-053-Q6-K1-C12
cttcaatactattaactgcaccagatgctctaagctatgttgctcaagcgcacattgtatcaagcgggaaggatcgacaaggacgtggacaaggcacaactctgtactgcggtaaatgaaatctgctatgcaacatcatctgttgacggtggacgcacgcggccgtgtgaaacggacacggagatgcaacacttgaaggaaagaacggcgcaaacgttgtgccagctgatgcggtaggggccgctatgggcttaaaggctgttgagttgaagcctaagggtgcgtacgacatggtgtgtaacaactagtataccaccagcaccattggatgtagtggaaacaactacatgtgccgctaacccatgcagtgcgtgacgtacgctgcttaacgtaaaggccggcggaacttcccttgacagcaacaacat

SEQ ID NO: 3445 - DNA, 492 bp, Chlorella sorokiniana
  Clone ID: LIB3602-053-Q6-K1-C2
cggacgcgtgggcgagggccaggacaccctgtaccccggcggcgccttcgaccccctgggcctggctgacgaccccgacaccctggctgagctgaaggtcaaggagatcaagaacggccgcctggccatgctctccatgctgggcttcttcgtgcaggccatcgtgaccggcaagggccccctggacaaccttctgcagcatttggaggagcccggggagttcaacttctacgccctgtacgccaactccctggcgtaagcagcttgtttggagcacctgcggcggccgaggcggcggcgctgagctggcgcaaagcgcggttggcgaccgccgccgcctcacgctgttgcccttgaccctcttccctttacgcgcttgcatgcgttcccgactccgctgcatgttgcctgtgtgtgcaattgtgcatcaggcaaaagaaacgagaagaaaactccacccaaacaccattttgcctggtgtacccatctgta

SEQ ID NO: 3446 - DNA, 515 bp, Chlorella sorokiniana
  Clone ID: LIB3602-053-Q6-K1-C3
cttatacagcttcgacgtccaggacaccctgtaccccggcggcgccttcgaccccatgagcctggctgacgacgcggacaccctggctgagctgaaggtcaaggatatcaagaacggccgcctggccatgctctccatgctgggcttcttcgtgcaggccatcgtgaccggcaagggccccctggacaaccttctgcagcatttggaggagcccggggagttcaacttctacgccctgtacgccaactccctggcgtaagcagcttgtttggagcacctgcggcggacgaggcggcggcgctgagctggcgcaaagcgcggttggcgaccgccgccgtctcacgctgttgcccttgaccctcttccctttacgcgcttgcatgcgttcccgactccgctgcatgttgcctgtgtgtgcaattgtgcatcacgcaaaagaaacgagaagaaaactccacccaaacaccattttgccttgtgtaccatcctgtacgaaaaggaggctgtagtggtgt

SEQ ID NO: 3447 - DNA, 252 bp, Chlorella sorokiniana
  Clone ID: LIB3602-053-Q6-K1-C4
actcgcttgacgctttggggttgacttactgacagcggcgtggttgccgcttggctgattgatgcacgccatgaaatacacagagggattaagtggatgtaaatgtgaaagacgtgcaaaaaaaaaaaaaaaaaaaaaaaaaaaaaaaaaaaaaaaaaaaaaaaaaaaaaaaaaaaaaaaaaaatggacaaccttttgaaaagtggggaggagcttggagagtaaaacttctactccctgtacttcaactgc

SEQ ID NO: 3448 - DNA, 471 bp, Chlorella sorokiniana
  unsure (1)..(471): unsure at all n locations; Clone ID: LIB3602-053-Q6-K1-C5
acggaaggccttggccgaggagtacaagggctccttcttcaaaaacatgggcggcacagaacaggcagggtttcccaatgaagcagggcttgctaaccaacggccgcttgcaggtgctgatgtcgcccggcaaccagtgtttccgcggttacggccgccgaaacggcaagcgccgccgcaggtcggtgcgcggctgcatcgtgtcccaggacctgtccgtgctcaacctggtgatcgtgaagaagggcgagcaggagctgccgggcctgaccgacgaggagaagccccgccagcgcggccccaagcgcgcgtccaagatccgcangatgttcaacctgaccaaggatgacgacgtgcgccactacgtgaagatctacggcaagaaagtggagaagaacggcaagaccaccatcaagtgccccaagatccagcgcctggtgacgccccaggtgctgcagcgcaagcgccggc

SEQ ID NO: 3449 - DNA, 524 bp, Chlorella sorokiniana
  Clone ID: LIB3602-053-Q6-K1-C6
cagcaagatcgtccagcgcacccaaggccacgttaatggcaccaagctggtgcccctggtggacaaggacggcaaggtgatcgtgaacgagcacggcgacccggtgtatgcgcgtgcgggcgagaagggcgcccacacgctggtggaggacgccgatgggaagctggtgcccgcctacaagaaggccgccaaggcgggcgcccacaagctggtggaggacgccaatggcgacctggtgcccgcctaccagaagggcgccaacacgctggtggaagacgccaacggcgacctggtgcccgcctacatgaagggcggcatggctactgccaagaagcgcaagcagaaggctgaggccctgaggcggcggctggagggggcgaaggagtattgggcaaagcgccgtgcagccgcctaggccaagcggcgcggccagtgccgaccctgcctcacccagcactggagtaagccgtgcctcgccccgctgtactagacaatctgcactgaatgtaatatttttcccattg

SEQ ID NO: 3450 - DNA, 464 bp, Chlorella sorokiniana
  unsure (1)..(464): unsure at all n locations; Clone ID: LIB3602-053-Q6-K1-C7
gaccacgcgtacgctcctcgtcctctctagtcaacgagtggcaaccatgaagaacgacgagggcgagattgtcgatctgtacatcccccgcaagtgctcgtggaccaacaagctgatcacggccaaggaccacggcagcgtgcagatcaacattggccacctggacgagagcggcgtgtacaccaactcgttctccaccttcgcgctctgcggccaggtccgcgtcaagggcgaggctgacagcgctctggaccatctgtgggccaagaagcgggctgagatcggccagtgaagcgctgctgagttctagccgccagccggctgggctacacagctgccagccggcggtgggccagccagccttgggtcggccagtgatgcgctgcgaagcaaagtgctgagcgggcggtcgcttcngcgcgcctgcgcaagcacgcaatgcaagctgtaacgcgccttcttgc

SEQ ID NO: 3451 - DNA, 326 bp, Chlorella sorokiniana
  Clone ID: LIB3602-053-Q6-K1-C8
gccacctatacatctgctcgcacattttcccagcgtgcgcagcctctgttcccaatctattgcatcacatgccttcctgtccgcctgacctgagtggcaccgcttcagagtagccacacctgttttgtccgagtgaccgacttttgagcgagcatgcccagctgtgctgtcacccacgcgatccgcccatcaatcaacctgcctatccgcctttctcatgcgccctgtctgatctgtctgcagtccgtgcctacgaccgcttcatatatacatgtagcatgcatgcgactggttctgtacagcattcaatgcagtaagttgcatgc

SEQ ID NO: 3452 - DNA, 76 bp, Chlorella sorokiniana
  Clone ID: LIB3602-053-Q6-K1-C9
taaaaaaacactaaagcgaaacgaacttaaaaaataaataaaaaaaaaagaaaaaaaaataaaaaaaaaacaaatg

SEQ ID NO: 3453 - DNA, 293 bp, Chlorella sorokiniana
  Clone ID: LIB3602-053-Q6-K1-D1
actagttctagatcgagcggccgcccgcgatctagaacgtggcacgcagcagcggcgtcaactttgcgctgccggcagacctgcttcgagatgtggtgccccgcctgattgtgtacggctcggcagccacgcggcggtagtgtgggcgcctgtttggctggctggccggctggcgcagattcgctgagagcaggatgtttgttgaggatgagtgtgtgtcagtgggactggattcgtactgtttcagagcatcgatttgatgtggcactagattgtaaacaaagccgattaac

SEQ ID NO: 3454 - DNA, 559 bp, Chlorella sorokiniana
  Clone ID: LIB3602-053-Q6-K1-D10
cgcaggacgagctgcaccagctggtggcggcggcagacgtagacggggacggccggatcacgatggccgagtttgtggccgccacgctgggaaactcgctgcagcagcgcgaggactttctgcgcggcctgttccagcggtttgacagcaataatgaccagcaaatcacggcggacgagatgcagcagctgctggcgggctttggggtgacgccagaggacatcaaggcggtgctggaggcgcacgacctggacagcaatggccagctggactggggcgagtttttgtccttcatgcagaagcagacgggcagcctgcaggaggttgtgcggcggcggctgtccagctacgaggagcgaggcagcagctcaggagtggcagcggacgccgaagaggaggaggagggcgaggagcaccagagctccgaccactgagacgcccattttgctcggggcgctgcacatcgcctgcatgtgctatgctatatggcttcgcattcttctgtaccatactcgcaaatcgtgcgaatgcacactcgtgttgcaacaacagccttggg

SEQ ID NO: 3455 - DNA, 581 bp, Chlorella sorokiniana
  Clone ID: LIB3602-053-Q6-K1-D11
tcctgatcaaccccaccgtccacgtgtccccctcctaccgagataccggcctgaccgccagctactcgtttgagccgctgtccaacctggtgtacacgcgcgaccagcagatcaccacgtgccgcggcatcgtcatggggcggctgcgcagcccgcagcgcaacctggaggtctcgctcatgaagttctgcctgcagaagctgggccttcccgtggtgggcgacattgctgagccgggctacctggagggaggagacttcttccctgcaggccgagaccttgcactgctgggcattggcctgcgctccaacttcgaggcctgcaagcagctgatggaccaggacctgctgggcacgcggcgctttgcggtggtgcgcgacgactttgagcagcaccaggaccgcatgcacctggactgcgtgttctccattgtgtcggacagcgtgtgcatcatgctggaggagatgatgggggagggcagccccacgcgccgcctggtggacgaatacacaaagggcagcgatggcagctatagccggacgcgcagcgacgtggagtttagccagtacatgcgggacaac

SEQ ID NO: 3456 - DNA, 562 bp, Chlorella sorokiniana
  unsure (1)..(562): unsure at all n locations; Clone ID: LIB3602-053-Q6-K1-D12
cctagactcaccaaagcaccagcaccatgcaggctctgtccgccaagaccgccatcgcttctggcctcaccgccaaggtgcagcggcggcaggctgcggcccccgtggcccgcacccgcaccaccaccaaggcgctggccgacgtgaacctggtggtcggcggctgcaccgtgggcgccctggcgctgggccgctttgtgttcctgcccttccaccgcgcctccctggccaaggcgggcatgcccaagcagaacggcatgacccacctgcaggctggcgatgctcgcgctgaagaggcgtctttcattctaaagaccaacgaccccgccggcttcaccgtcgtggacgtcatggcctggggcgccctgngccacgctgccgccttctacatcctcgcaacctccagcctgggcctcgaccgcaaccccttctaaaccagtccacggccgcagcctgcgcccaggccacaaccccatcccgagaagagcatttgtccggcgctgtgcctttttctgttgggcatggcgactgcagccacgcatgtgatactgctatgtaaacg

SEQ ID NO: 3457 - DNA, 376 bp, Chlorella sorokiniana
  Clone ID: LIB3602-053-Q6-K1-D3
gcggcagcagccctgcgccaagcctgcgctcctgccgtttttgatcttccctagggcacgcacaccacgtttattcccacctgttgcctttcatcatcacaatatgcgggctgtgtctcccgctccaacggtaacctagcacttagtgtgatgcctgcttgctagagctgcacagcaggcgttgccctgcacttgccccttctgttttacagcagcgtgtgggcaacaaacgctcgccgctgcctgtgtttgctggtagtaccccctgcctgctgttgcgccatcccatcccatccttttcatgcaatcgccaaatacccttagcgctgccttccctcctgcactgctcccaccctgtaaataagagtgctgctca

SEQ ID NO: 3458 - DNA, 406 bp, Chlorella sorokiniana
  Clone ID: LIB3602-053-Q6-K1-D4
gcgtccatctctacgtgagtgccacttgctttccttcctcaccaattttccatccccgagcagcgtacctatgctgccaaccactgacgcgttgcagccctctcctcacattcatcatgatatgtcgattctttttcctgcactgccaaaacctgacgaacgacgcctcctcttgcacctttgtgacgcacaagcttgcaaaagaaatacagaaaagagagaacaaaaaacaaaaaaacaataactgtgtcagctgtaaataccacaatgaatgctggcgcgccatccgatccaatgcttttcatgcaagcgccaaatacccttaacgctgacttgcttcctgcactgatgcaacccgtgaaaataatagggggtgctcacttaaaagaacttgcagttaaatccc

SEQ ID NO: 3459 - DNA, 581 bp, Chlorella sorokiniana
  Clone ID: LIB3602-053-Q6-K1-D5
tcctgatcaaccccaccgtccacgtgtccccttcctaccgagataccggcctgaccgccagctactcgttggagccgctgtccaacctggtgtacacgcgcgaccagcagatcaccacgtgccgcggcatcgtcatggggcggctgcgcagcccgcagcgcaacctggaggtctcgctcatgaagttctgcctgcagaagctgggccttcccgtggtgggcgacattgctgagccgggctacctggagggaggagacttcttccctgcaggccgagaccttgcactgctgggcattggcctgcgctccaacttcgaggcctgcaagcagctgatggaccaggacctgctgggcacgcggcgctttgcggtggtgcgcgacgactttgagcagcaccaggaccgcatgcacctggactgcgtgttctccattgtgtcggacagcgtgtgcatcatgctggaggagatgatgggggagggcagccccacgcgccgcctggtggacgaatacacaaagggcagcgatggcagctatagccggacgcgcagcgacgtggagtttagccagtacatgcgggacaac

SEQ ID NO: 3460 - DNA, 214 bp, Chlorella sorokiniana
  Clone ID: LIB3602-053-Q6-K1-D8
caactacccaacgtcctgacccctgttcatttccccacctgtttcctctgctgtttcatccctcgctctgctgcccccctcgcccggaattgacttccgaatcacaccccacgcacatacacgccgtgcacttgcactgttgcgccagcggtttttacgcacaccatacccaattttggctcgttgaagcacggtgtaagcaagagcagtaccg

SEQ ID NO: 3461 - DNA, 583 bp, Chlorella sorokiniana
  Clone ID: LIB3602-053-Q6-K1-D9
ctccaaggacgtgctgtcggccgccttttccgccgacaaccgccagattgtgtccggctcccgcgacaagaccatcaagctgtggaacaccctgggcgagtgcaagtacaccattggcgagcccgacggccacaccgagtgggtctcctgcgtgcgcttctcccccgtgacccagaaccccatcatcgtgtccgcgggctgggacaaggcggtcaaggtgtggagcctgaccaactgcaagctgcgcaacaacttggtgggccaccagggctacgtcaacaccgtgaccgtctcccccgacggctccctgtgcgcctccggcggcaaggacggcgtggccatgctgtgggacctgtccgagggcaagcgcctctactccctggacgccggcgacatcatccactccctctgcttctcgcccaaccgctactggctgtgcgccgccacccagtcctccatcaagatctgggacctggagtccaagtctctggtggacgagctgcgccccgagctgcccgagcgctccaagaaggcgcaggtgccctactgcgtgtgcctggcctggtccgacgatggctccacc

SEQ ID NO: 3462 - DNA, 437 bp, Chlorella sorokiniana
  Clone ID: LIB3602-053-Q6-K1-E10
acataccatttgttacacattaagtcctggtaccagatcggcataaggacgcaaaaaggcactgtacagtcgggccttgaaaatgggtctggatacgttggacgtgtgggtgagtgggtgtgcgagcatgatggatgggtttggcagcagctttgcatggcagcagccgctgtgtgaagcgcgggtgaagggtggacatggagtgaggtgtgggaggtaggatgtgcggcggtgagcggcaggaaaggtggcgggtggaagatgggtgcgggtgagggggcggcaggtggtgcagcggcggacgtgcgtttggggtggcagatttggtggatggggaggatggtgcatggagggcgttgagcgggtgatgggtggtgagtgggtggcagaggttgtggcggagggaaggtgagtggatgggtggcaggtggatgggt

SEQ ID NO: 3463 - DNA, 427 bp, Chlorella sorokiniana
  unsure (1)..(427): unsure at all n locations; Clone ID: LIB3602-053-Q6-K1-E11
gaagctgggcgcgctgcgcgcgctgtgaccccgccgcgcgcgctgtgaccgcgctgtgcatgctgcaaccatgctgctcatgctgtgaccacgctgcgcatgccgcaaccacgccttgcgccgcagcaggtgcccctcccctgcgcagttgcctgtggttgggcccccacccctagttgccagcctggcaagcccggctcccgctgcatgtcctgcgtctgctgctccctctgcctatgctctgattggccttgatgatgaatgaatcgatccttctcacaacatgctgcggtcaactccctgcccgctcttcccttccgccctatccctttctcctgctcagccgctgctgtaccataccccatgcttgcccagcattatttccgtatgcacacgccaacgcatgaaacacactggaaacananna

SEQ ID NO: 3464 - DNA, 194 bp, Chlorella sorokiniana
  Clone ID: LIB3602-053-Q6-K1-E12
gtgcaattctgcctcagcacactgtcctgtgcattccctttcggattgatacctctacctgtaagtcggcacagcaaaaaaaaaaaaaaaaaaaaaaaaaaaaaaaaaaaaaaaaaaaaaaaaaaaaaaaaaaaaaaaaaaaaaaaaaaaaaaaaaaaaaaaaaaaaaaaaaaaaggtattaaataaagtgacg

SEQ ID NO: 3465 - DNA, 382 bp, Chlorella sorokiniana
  Clone ID: LIB3602-053-Q6-K1-E2
ctggagagcgtgctgcagaacaagcccgcgccccagtaagcgcagcagccagccacttgccgcggcccccagctggcgaccgcctggccccagctgcgatcgccgcagcccccaacgtccctttcttgtgccccctattctttcccgcccctgttgtttgctcatcctaacgtctcccctcacctgagaagatccctgctccgcatcgccacccgatccatcgctccgcgctgctgtttgttcccccaacgtattttatacggcgcggcactcccgatccgtccccgcccagttccgtttctgcagcgcccgcacgtgtatccatgctcggctatgcggcgccgctctctactgctgcggcactcatgtaacaagcgacatc

SEQ ID NO: 3466 - DNA, 424 bp, Chlorella sorokiniana
  Clone ID: LIB3602-053-Q6-K1-E3
cccgagtagcgccgctgcctatttcattttgcagctcttgtagcctccctctgcctagaagcaacgaatgccgcctcaccgctaggaccctgatgtcctctccctctcgtgaggccccgcgcgcctccatgctcggagccgactcgcccaacgcgccgtgagcctgcggccacgcagcacccacccgcgctcgctcctccccggcgagagggccctccccccccaacatacagcaccactgcgcagctggctggcgccgccccgcgacctggcggcgccgccctgcgtggcgctgacctcggctccccaatgatccgaaccgcgccccaagcatgaatgacaatgccgcgcccgcactttttttggccccacgcatttcgttcatactactaatttgattttcaatgtactgtctaactaacgc

SEQ ID NO: 3467 - DNA, 315 bp, Chlorella sorokiniana
  Clone ID: LIB3602-053-Q6-K1-E4
tgctcgttgccgactcgcccaacgcgccttgagcctgtggccactcagcacccatccgagctcgcttcttcccgatgagagggccctccatccctaacatacagcaccactgcgcagctggctggccactacccggacctgtcggtacccgcctgcgtggcgctgacctcgtctacccaatgatcctaaccgcacgctaggcatgaatgacaatgtctctcccgcactttttttgatcccacgcatttcgttcatactactaatttgattttcaatgtcctgtctaactaacgcacagcataaaaaacacaagac

SEQ ID NO: 3468 - DNA, 369 bp, Chlorella sorokiniana
  Clone ID: LIB3602-053-Q6-K1-E5
taagctccttgccctggatgcgctgttatgaacccagttgcgccctgaccggaaggttctttctccaccaatggtgctcatgctgcgttgtgggtgcccatgcttttatggcccgttgcccctttgctggcccgttttccctgattagtccttcgctgtgccttaaaccccaatggttgaccgcctgtcaggcccggctcccgctgcatgtcctgcgtctgctgctccctctgcctatgctgggcgggccctttatgaggaacaaaatttattcttcttacatgatgctgcagtcatcttctttgggggctcttaaattccattctatggctgtctgttgatcacccgctgatggggaataccctgggc

SEQ ID NO: 3469 - DNA, 249 bp, Chlorella sorokiniana
  Clone ID: LIB3602-053-Q6-K1-E6
caacaagcggtaaaaaaaaaaaaaaaataaaaaaaaaaaataaaaaaaaaaaaaaaaagaaaaaaaaaaaaaagggggggtaaaaaaaaaaaaatgaggaaaaaaaaaaaaaaaaaaaagggggcgctgtttttaaggattcaaggttcctttccgggtcccgggactctaaagccttttttttgggcccccaaaattcaattaaagggcccgaggtttaaaaccgtggagctgggaaaaacctggggg

SEQ ID NO: 3470 - DNA, 523 bp, Chlorella sorokiniana
  Clone ID: LIB3602-053-Q6-K1-E7
gcgcgccacgcgtaacgctccgacacgctctgcaggaggaagaggaggaggatggcgtggggtcgcaggagcatggtgcgccatcgctgctgcccgctgtccagcagtttgctcagctggtggccggcaggcatgaggatccctcagcatccagcctggctgctgcgctgaccagctgcctggatcagatggaggggcaggcaggagcggctgcaggtcagttggcagccgagctgcagcagctgcagcagcagccgcagcagccgccgccgcagcagcagccacatgcgcagcaggaagcacagcgagggcagcagcctgcgactcagcacagcccaagttttgatggtgcagccgatggaaccggcggtggggacggagggctgtcgtccactcagccagttgagctcgagatgcaggatgccccagcagcagccgatgctgtgcaggctgcggcagcgctggcaggaccacaagggctggagccagcccggggaggaggcagggccacgcccattcctga

SEQ ID NO: 3471 - DNA, 568 bp, Chlorella sorokiniana
  Clone ID: LIB3602-053-Q6-K1-E8
cggacgcgtggggcaggctgctaggtcgccagctgcagggtggcttgaaccgcgctgctgtgcagtgctgcctcgtgctcacccgccagctctgcctccaaccttccccacagggcgaatggctgcgcggctaccagcccatggcgcagcggccgcaagtggtggaccccaaagcaggtgcaaaatcaggcagggtggctggcagggaaacaaaccagcatgaatggcagggccactccacctctgcccatgcttcatgctgccctcctgatgcgttttctgaacgtcctgcctccttctgcctttcctgaacgtccccacctgctggccgctcccatgtgcagaccagctgggcccggtgccaccctccaacgcgtacgtgcgcagggtcagcggcacgcaatggcagtgaagcgcgcagcaggctgtgctgccaaattttgacaatcgtgtaaactaatctgcagacttagtgcaatttttgtcctgtactgccagttcatagcgccctagcgagtgtttagcctcgagccctgcccctgtgtctcatcatcttgcaactcaacaa

SEQ ID NO: 3472 - DNA, 437 bp, Chlorella sorokiniana
  Clone ID: LIB3602-053-Q6-K1-E9
acgctgtattctttagagcggtcgtccttttttttttttttttttttttttattttctcagcagtgtatttacatgtgccatgcctgcatgcacgctatcgcgctaggcaggggatggcagctgagggcgaaatgaaaggcagttctctgaaaggggtgtgtcgtgtggcgttaaacgctgcatggcattattgctcgggatggaagcccgcccagggaaccccccggcgtgtgttgggcaaagtagctgctgactggcgcaatcagaggcggcagcgagttcaacaaaggctgaagtacacttgcagctgactggcggttgttgcggacagcgctacgccagcctgaaaggcttgaaaggcgaggagctgtggcgagtccagctggcttaggcggccaccatctccttgccctcctggcctgcctaagaggccgcc

SEQ ID NO: 3473 - DNA, 527 bp, Chlorella sorokiniana
  unsure (1)..(527): unsure at all n locations; Clone ID: LIB3602-053-Q6-K1-F1
ctaaggaggagacaagatggtgactcctctggtgcgcgtgaagagcatcaagaagcgcaccaagcgcttccagcgccaccagagcgaccgtaggatcacggtcaaggagagctggcgccggcccaagggtattgactcgcgtgtgcgccggaagttcaagggatgcggcatcatcatgcccaacattggctacggcaccaacaagaagacccgccacgtgctgcccaacggcttcctcaagtttgtggtgaacaacgtgaaggaccttgagctgctgctgatgcacaaccgcaagtactgcgccgagatcgcgcacaacgtgtccaccctcaagcgcaaggcgattgtggagcgcgcggcggagctgaacattgccctgaccaacggcaacagccggctgcgcagccaggaggacgagtaagctgctcgcccccctgcgtcaccagcagcggcgccagtaccttgggagcatagcagcggcttacattggggtgctactgctcccatgtaaggcaccccaatcnana

SEQ ID NO: 3474 - DNA, 375 bp, Chlorella sorokiniana
  Clone ID: LIB3602-053-Q6-K1-F10
ggatgccaccattcgcgagattgagcggcggctgtcggagtggtcgctcatacctgttgggcatggggaggggttgcaggtgctgcgctatgaaaatggccagcagtacgagccgcactgggactactttttcgacgagtccaacgtgaagaacggcggcaaccgctgggccacggtgctgatgtacctcgtggaacccgaggagggcggcgagacggtgttccctaatgtgcctgtgccaccgggccagacacgggaggcggggtacagcgagtgcgcgatgaagggcctggcggtgaagcctcgcaaaggggacgcagtgctgtttttctcgctaaagacggagggcgtgctgcaccgcttctccctgcacgg

SEQ ID NO: 3475 - DNA, 432 bp, Chlorella sorokiniana
  unsure (1)..(432): unsure at all n locations; Clone ID: LIB3602-053-Q6-K1-F11
gctttggcctgcgccacaccaagacgcacacgctgtgccgccgctgcggccgccgctccttccacatccagaagagcacctgcggctcgtgcggctaccccgcggccaagatccggaagtacaactggagcgtgaaggccatcggccgcaagaccaccggcaccggccgcatgcgccacctgaagaacgtgcagcgccgcttccgcaacggcttccgcgagggctctgctgccaagaagatcgctgcctaaacagctggtgtctgcagctacgcggcagcacgttgagccagctgtgtagcaggatgtaacaccgcgncncncannnnanaaaaaaaaaaaaaaaaanaaaaaaaaaaaaaaaaaaaaaaaaaaaaaaaaaaaannnaaaaaaaaaaagaaaaaaaaaaaaaaaannngggggggggccgtt

SEQ ID NO: 3476 - DNA, 468 bp, Chlorella sorokiniana
  Clone ID: LIB3602-053-Q6-K1-F2
ggtcagcaaggcgaaaacacagcagatgcggcagctggcgaggaggggagcggcggctactacagcagcagcgacgatgacctgccgcccatccccaagttcaacaaccgcaaagtgatcgagtatgaggtgtcagacagcgactcagatgaggagtgaaaattcgtattggccctcagaagcagctgctagtgccgcagggcgcgctgcgtctcgtgctgccacttcgccctggccgtgtggcgccatctgcctcgtgcacgcccgctttgcctcctcatccccctgcctccttcttgccctcccgcctgcctgtacctttcgcctgtaccaactgcttattctgtattccttcctcattgcctcccttgctgcccccattcatttcgtgccacacagtgcgccgccactgcgcccattgcgcaggccatcacaagctgaatgtacccatgttacaactgccgtatc

SEQ ID NO: 3477 - DNA, 327 bp, Chlorella sorokiniana
  Clone ID: LIB3602-053-Q6-K1-F5
gtccgttttggcctgcgccacaccaagacgcacaccctgtgccgccgttgcggccgccgttccttccacatccagaggagcacctgcggctcgtgcggctaccccgcggccaaaatccggaagtacaactggagcgtgaaggccatcggccgcaagaccaccggcaccggccgcatgcgccacctgaagaacgtgcagcgccgcttccgcaacggcttccgcgagggctctgctgccaagaagatcgctgcctaaacagctggtgtctgcagctacgcggcagcacgttgagccagctgtgtagcaggatgtaacaccgcgacacac

SEQ ID NO: 3478 - DNA, 481 bp, Chlorella sorokiniana
  Clone ID: LIB3602-053-Q6-K1-F7
acgccactaccactacgagcaggacgcggtgatctcctctgacggccagttctgcctgaccggctcctgggacggcaccctgcgcctgtgggacatcaccaccggcgccaccacccgccgcttcctgggccactccaaggacgtgctgtcggtcgccttttccgccgacaaccgccagattgtgtccggctcccgcgacaagaccatcaagctgtggaacaccctgtgcgagtgcaagtacaccattggcgagcccgacggccacaccgagtgggtctcctgcgtgcgcttctcccccgtgacccagaaccccatcatcgtgtccgcgggctgggacaaggcggtcaaggtgtggagcctgaccaactgcaagctgcgcaacaacttggtgggccaccagggctacgtcaacaccgtgaccgtctcccccgacggcttccctgtgcgcctccggcggcaagggacggcggtggccatgctg

SEQ ID NO: 3479 - DNA, 336 bp, Chlorella sorokiniana
  unsure (1)..(336): unsure at all n locations; Clone ID: LIB3602-053-Q6-K1-F8
attgaaccccgtcaacatacagcaacttcgagcgagccactcacaacaagacggcagcagctggagcgcgccctgttaggaagccgccgtgcccagctgcatccaactactggcgagatgatgccacaaacgcatcagccgtgtgcttcatgtgaagtgctcccttaatgaatgacacgcacccagtgccccccccctgccacctatgcatggcctttctatgcttcacgtgagcacgttacattgagtagtctatcaacaaagcgagcgcgcctctatgtggaaaaaagcgcccanngnaaaaaaaaccaaagaattagaacataatactgggac

SEQ ID NO: 3480 - DNA, 329 bp, Chlorella sorokiniana
  unsure (1)..(329): unsure at all n locations; Clone ID: LIB3602-053-Q6-K1-F9
atcgacgcatcagcagcagcagcagcagcagcagggcagccaaggggcggctagtgtgccgtcgccagcaacagaaccggtgcgagatgagctgtaatggatggatggatagatttacaggatggcacagaaagcactgtacagcagcgttgagtcgaggagcaaagcttgggactgaatgcagccggagagttcaacagcacaaccgaatggtggtgggagcccgggccggaatggccggccagaatctgagggcatgattaataactagctacagccaaccagctgcagccgctgaatgcaggagttggaagataatncaccnnnac

SEQ ID NO: 3481 - DNA, 182 bp, Chlorella sorokiniana
  Clone ID: LIB3602-053-Q6-K1-G1
cgcccggcccggcgtagccgccgtgcaggcagccgacgggcagtgcggcgccgcacccctgctcttgctgtgccatcaccaccacacttacaccctcggctcccgttcgttcctgctccctgctgtttatgccactctcgataggttctctccaacgatgtgtaatgtttcctcgggcccca

SEQ ID NO: 3482 - DNA, 455 bp, Chlorella sorokiniana
  unsure (1)..(455): unsure at all n locations; Clone ID: LIB3602-053-Q6-K1-G10
accgcatctgcgaccgctttgactacaaaaaggaggtggacgagtacgacatgatttgcatggggctcaagggcgacaagaagtgcgggtttgacgaccccgactcctccgactcgagctccaactgagcagccagaaatgcagctgccctccagctcagctgcccttagcctcagcctgagctccccattggcaccctcacagccccgccgcagatcaaagcgcactgcagctatgcgtttttgcagcgctcctctctccgcccccaaactactgctgatgtgcattagcaacagcacgtgcgaacctcccctgcgcaacgaagctcttcgctcgctgcctgcgaaccccgccccatttctgcataccaatgctggcatgcccncatgcacttcttgattcctcccactgctcattcccagaagggcgttgatgccgcccttcccaacccccgg

SEQ ID NO: 3483 - DNA, 473 bp, Chlorella sorokiniana
  Clone ID: LIB3602-053-Q6-K1-G11
cgcgtggtcaccccaggttgacacagcagcgcggcagccatggcgtccaagcgtaagggtggcgtgggcggcaacaagttccgcatgaccctgggtctgcccgtggtcgcggtgatgaactgcgccgacaacagcggggccaagaacctgtacatcatctcggtgcacggctggtgcgcgcgcctgaaccgtctgcccgacgtcgaccccggcgacatggtcatggcgaccgtgaagaatggcaagcccgacctgctcaagaaggtcatgcccgcgattgtggtgcggcagcgcaaggcgttccggatgaaggactgcacctacatctactatgaggacaacgcgtacgtgattgtcaacaccaagggcgagatgaagggctccgcgatcacctgccccgtggccaaggagtgcgccgacctctggccccgtgtggcggcagcggccaacaccattgtgtatagcggctgacg

SEQ ID NO: 3484 - DNA, 317 bp, Chlorella sorokiniana
  Clone ID: LIB3602-053-Q6-K1-G12
ggcgcagaagcgcttcatctacgacaccatccgcaacgacttccaccgccgcttcctggagcgctacgtgcggtgatcagagcagcacattgcactgcacgtgcatagcggcacgtttggaactgctctgcacgtgcggagcagcttgtggccgcgccgacggggccagcaggcgcaacagcggcggcggctgcgcgcacattagctgcctgcaaggcggtgcccccagcagaggatccgacactgtggtgcctttttatggacatggctgtatcatcagctgttacagcaattctgttgcttgttcactcgcttaa

SEQ ID NO: 3485 - DNA, 470 bp, Chlorella sorokiniana
  unsure (1)..(470): unsure at all n locations; Clone ID: LIB3602-053-Q6-K1-G2
ggcggtggctgtgagcctcccttcccgcccccgccgaaccaccaccaccacggnggttgctgcaagccgtcgcaccagtgcgactgcagcggcgccagcgcagcaaaggacaagtgaggcagcttaacgctgttggtggacgactgatgcgtgctgagctcagcatgcacctcccgctgcacagctggccagtgttttcttgtgctccttcaagccccatgtgcccatggtgcttcaatcccaatgtttgatgtcgatggtgcctttgcctactaagctacaacatcaaccttctgtcttgtgtcctagccaagtaatccctggcctgccgatgccacgcttgcttgccaagatgcgtcccttggtcgccgagtcgactgcgcccctttcaccccaacaatgcgccttgcagcatcaacctcatggtgccaagcaagcagccgccgccctgaatgccttgtaacgtttag

SEQ ID NO: 3486 - DNA, 513 bp, Chlorella sorokiniana
  Clone ID: LIB3602-053-Q6-K1-G3
cccgaattccgtgttcgaccacgcgtcccttccatacctctaaagcgtccgtccctttttttttttttttaaaaagcacaaccacaactcatatatgactgtggggagtaaaaatgcagaggcgctcagtctacaaaacgatattagcccgctccttaataatatagggggggggcctttttagtgatcaattttttatgcacccttgcctgcaaataatactcttttttttggggaccccaatcataattaatggggccatgtttttaaaaggaccatatttgaaaaccctggtctttccacatattatatctcttggagaaaactccttttttgccctgttggcaaaaaaacaaaagggcccccacttttccctttataaaaattgtgccccccttggttggcaagtggaccccccctttttagctgcattaatgccgggggggtcggggttttaacccatggggacctttttattttgctgtgtgtttatcgccccgttttttgtttttt

SEQ ID NO: 3487 - DNA, 327 bp, Chlorella sorokiniana
  Clone ID: LIB3602-053-Q6-K1-G4
acgggcgggccgcttcggcctggcccccacctccacccgccacaccaaccagtctggcatcaagctgctgccggctgagaagtccgccggcctggtgtccaacgaccccgctggcttcaacgcggtggatgtgctggccctgggagctcttggccacattttgggctgcggcattgtgctgggcctcaagagcaccggcaacctctgagcggctgccgcgcggacccacaagaaaccttgtttctagcctgtaactagaagcccccccgagaagactgccaccgatctgctgtatgttttatcacgccgtgtaacgcactgcacttg

SEQ ID NO: 3488 - DNA, 450 bp, Chlorella sorokiniana
  Clone ID: LIB3602-053-Q6-K1-G7
tgcaagctgctagttgtcacacagcaatcagctcctcaagtttggcagacagtctgacaggaatcaatcaaatggcgtgggggtgggtccagggtacattcaaatcggggcgagcacacaaggtgcggcagcaaagcgcagccgccaactgtggcggctgtcgggtgcacggcctgttgcccaacacagcggtcccagcagcggttggcacctgccctcacaccgctcagagcaggcccttgatgtcgctctcaatctgcatggggctggtggtgctgccgtagcgcttgaccacgttgccgctgcggtcaaccaggaacttggtgaagttccacttgatgtcagcggtcaacaagccgccctgcgccgacttgaggtagccaaacagcggcagcgcgtcggggccgttcacatccgacttggcaaacatgggacccttgaagcccttgc

SEQ ID NO: 3489 - DNA, 293 bp, Chlorella sorokiniana
  Clone ID: LIB3602-053-Q6-K1-G8
ggccctttggtcattgcgccccctgcaactccatcagtgcctccactctccctgcctggtcgtgctgtgctcgctgcctcgaggagaccgctcgcttgctcccaccagtgccatttcgtgtcccttcaggttcccgcccgagctgctgtgctgtgctggcttgctgtatcgacccaccaacccaaccacgccgtgcataccctaccccctctccctttgccgctgctgccgctggccgcgcagattttgcatgtgattcctcacaccccgtgtccctgtaaatcttccactgc

SEQ ID NO: 3490 - DNA, 509 bp, Chlorella sorokiniana
  unsure (1)..(509): unsure at all n locations; Clone ID: LIB3602-053-Q6-K1-G9
cacccagccacgccagagctgtagccaccgctgcaccaaatttagccaaatcgtgatatctatccctgctaatctgctgcgctgtccccgctcccgccttgcccgctttgtctgctgcccatcagatgcccgaggtgggccgggaggaggagggtgaggagcaggccggagtggatggagtgcccaaggtcggctttggcgccatgtgaagggcgggagccacaaagggcccctgcagcccttggccgctctatgtgccgctggcaccccagtgccacccttcaaaaccgagcgctgtgccttgtggtccgctgcgcttctcacttcacgtaacaccttgtgttgccttgtactccgccccaaagtacgtccgccccagagtagacagcccctgtacattctgccttggcatgccccaattgagctgcatcttgtgcactagcctgctgacgtgtaaaatgcangttgnaaaaaaaaaannaaaaaaaaaaaaaaaaaaaaaaanaaaa

SEQ ID NO: 3491 - DNA, 455 bp, Chlorella sorokiniana
  Clone ID: LIB3602-053-Q6-K1-H1
cggcaaggcgcagtgcgtggtgattgcgcacgacgtggaccccattgagattgtggtgtggctgcccgcgctgtgcaagaagatgggcgtgccctactgcatcgtcaagggcaaggcgcggctgggcaccgtggtgcacaagaagacggccaccgcgctggcgctgacggcggtgaagaacgaggaccagcgcgagttcgccaagctggtcgagtccttcaagaccatgtacaacgacggcccccgcgtcagctggggcggcggcatcatgggccccaagagccaggcggcgcagaagaagaaggagcgggctctggccaaggacgccggcctccgcgtgtaagcgggcagcacccacctgccgctcaccgcgcgccgggccgggacagcccggccagcagggtcggcgtgccgcgcgtgggcgcgggcgccggccgggtgttgacagccgagtg

SEQ ID NO: 3492 - DNA, 512 bp, Chlorella sorokiniana
  unsure (1)..(512): unsure at all n locations; Clone ID: LIB3602-053-Q6-K1-H10
cggacgcgtggggtgctgctgattgacgactcgattgtgcggggcaccacgatgagccagattgtggacatggtgcggaacgcgggcgctgcaaaggtgtacctggcgtctgcgtcgccgccggtgcggtatcccaacgtgtatggcgtggacatgcccacccgcagcgagtttgtggcgcacggcctcacggaggacgagatctgcaaggtgctgggcgccgacggcctgatctaccaggaggtggaggatctggtggcctgcggccgcgacctcaaccctgagatccacgactttgacgactcgtgcttcactggccggtacgtcacgggcgacatcaacgaggcctacctgcgcaaccttgaggagcagggccgcggcaagcggcgcgcgcggccagngcgcaaggccagcctggtggcgcccgccgcccggtcggccggcagcgctgatgcggctgaggatcggctgccagcacccactgcctgatctgcacaccgcacaaacagttt

SEQ ID NO: 3493 - DNA, 380 bp, Chlorella sorokiniana
  Clone ID: LIB3602-053-Q6-K1-H11
gccccactttgccgagtacctgaagaacggcgtggagcccgacgagctggaggacctgtacaccaaggtgcacgaggcgatccgcgccgacccctccgccaagcccaaggcccgcagcaagcccgccgaggccaagcggtggaaggaggtcaagctgacctacgagcagcgcaaggacaagctcaaggccaagctggccgagctggcggccgacgagtaagcgcctcccctttggggcgcttgccagttggagcaggcgggcgctgcgcccgccgtgcccgctgcgccagcacagcgctcggcgctgccgcccgcgctgcggcaggtgggcgggcgctccacaccacaccacacctaaccacaccatgcctcccggtgga

SEQ ID NO: 3494 - DNA, 374 bp, Chlorella sorokiniana
  Clone ID: LIB3602-053-Q6-K1-H12
gacctacgcgtccgcgcagctgcgtgtgcttcatgagcacagcgagaagtttgacctgcgggcggagggcgtgttcaagtacctgcagatcttcaccgccatggccaacagctttgggcacggctgcaataacgtgagcaatgccgtgggcccgctggcagccatctacggcgtgtggctctactcttctgtgtcggaggagtcccaagtgcccgtctggatcctggtgctgggcggcgcgggctttgtggttgggctggccacctttggctacaagatcatgagcgtgctgggcgtgaagatgacgcgcctgacctccagccgcggctttgttgtggagttcagcacttccatcatcatcctcactgccaccc

SEQ ID NO: 3495 - DNA, 402 bp, Chlorella sorokiniana
  unsure (1)..(402): unsure at all n locations; Clone ID: LIB3602-053-Q6-K1-H2
ggagcaccaacgttatgccgaaaatgccatattaagccagcggcgcgcagaacgcgcatgccctgcgccccgcagcttgccagcacaaccagaaagcctgttttccctctttgtttctgctgtttcactacacgcacgctgtatctgcgctgtacactcctttgcgcccgttctctctgcatgcaattttcagttggaagcatgaggcacccctgttgttccacctttgtttgtttctgccgcccgggtgcgctgctgtacccctgagcatgccggccgcccttgctgcccgcctgccccttccctcggccctcagcccgcccattcacgcgacattcttcatctcaaagctcatcctcaccgctctgcaagcattataattgtaagctctggcatggcana

SEQ ID NO: 3496 - DNA, 462 bp, Chlorella sorokiniana
  unsure (1)..(462): unsure at all n locations; Clone ID: LIB3602-053-Q6-K1-H3
gaattgaatttcgacccacgcgtgcgctagcaccaactttatgccgaaaatgccatattaagccagcggctcgcaaaacgcgcatgccctgcgccgcggagcgggccaatacaacgcagaaagcctgttttccctctttgtttctgctgtttcactacacgcacgctgtatctgcgctgtacactcctttgcgcccgttctctctgcatgcaattttcagttggaagcatgaggcacccctgttgttccacctttgtttgtttctgccgcccgggtgcgctgctgtacccctgagcatgccggccgaccttgctgcccgtctgccccttccctcggccctcagcccgcccattcacgcgacattcttcatctgaaagctcatactcaccgctctgcaagcattataattgtaagctctggcatggcngacaaaaaagaaaaacgtgtgcttaaatataggac

SEQ ID NO: 3497 - DNA, 56 bp, Chlorella sorokiniana
  Clone ID: LIB3602-053-Q6-K1-H4
cggacgcgtggggtgctgctgattgacgactcgattgtgcggggcaccacgatgag

SEQ ID NO: 3498 - DNA, 400 bp, Chlorella sorokiniana
  unsure (1)..(400): unsure at all n locations; Clone ID: LIB3602-053-Q6-K1-H5
cggaccggaagtnccgacccgagcgacgggggccgcttgggtggttcctgtgtcccgccgtcgggcgccccagcgccattgccagccgcccggcccagccccaggccaagcgcgcccaggcgctgcctgaagacgcggccaccagcaccacagagacggcggaagcgggatgcggacgcaagaagctgtttgatgacctgagcggcgcacaaggcgtgaagctggcggttgacaccttctacgataaggtgctgtctgacccggagctgttgcccttcgtagagtccgtggacatgcacgagcagaacatgaagcacgtcaagttcatgagctctgcgttcggcggagcagacgaatacaagggcctaagcatgtacgacgcacacgcacatctggtcaa

SEQ ID NO: 3499 - DNA, 97 bp, Chlorella sorokiniana
  Clone ID: LIB3602-053-Q6-K1-H6
cgcagctgcgtgtgcttcatgagcacagcgagaagtttgacctgcgagcggagggcgtgttcaaatacatggggatgggcgaccccttgagacaaca

SEQ ID NO: 3500 - DNA, 150 bp, Chlorella sorokiniana
  Clone ID: LIB3602-053-Q6-K1-H7
aacacaccttaccttaaacaacgtctgatatactaagcggggtcgtctccacccaacattacatcctaaaatcccaccatatatggttacttctttgctattatattataccaaagcgaatcaaacctcgtaaatatcttcaaacacaca

SEQ ID NO: 3501 - DNA, 477 bp, Chlorella sorokiniana
  Clone ID: LIB3602-053-Q6-K1-H8
caggctgttcaattacaacttgcggccatggtgcagccgaggaggtggcagctgggccattgctacatgaaacaaaagggagtgagaggctagtgtacagagggctacagcactgcatcaagcgcacgtggcagtgctagtctggcggcagcagcagggcagctggttggcactggccagtgtggagcccactgcagcgcctgagattccgctgcgtgctgtgccagctggccgtttgcccaagctccccgctaggcaggttgtgctggctacacgccagcagcggccttgcttttgcagcgccaccgcaggtgcagcagcaggcacccaggctgtggcagcgctgctcatgtgctgcagcgcctgcgccagtgctaccgccatgctctgcggcagtgctaccgttatgccgtggcagtgccaccacagcggtgctaacgcaggtgcagcagcaggcggccgggcgactccacatac

SEQ ID NO: 3502 - DNA, 418 bp, Chlorella sorokiniana
  unsure (1)..(418): unsure at all n locations; Clone ID: LIB3602-053-Q6-K1-H9
ccgccacttgtcagcccaggcggccgccgcactgcaacacttcctagcgcagcagcagcagcagcagcagcagctggcgggcagcgggggtgccgccagccctcttgagctgctgctcctgtggctggtcaccgccagcgatgtgttcacgcgacccagcaccagcagtggcagcctgctgcttgccgacccggcagctgcaggtggcggtctgctgccgccgctgcaccgcccctggcagctgggctgggagcagctgtggcaggcggccctcaacccgcagctgcggcaggcagaacacgtggcagcaggagagggatgagagggcacataacatgaccacttgcgatgttgcagtttgcgactctgtgcatgcacacaaggcaacgatgcgtgtgtaatgctgctaatcgnnnaa

SEQ ID NO: 3503 - DNA, 482 bp, Chlorella sorokiniana
  Clone ID: LIB3602-044-Q6-K1-A1
cccacgcgacctcatggcgcagctcatggactagtctaaggactttactaccttcatcacggaccgcagcacgccgcgcaacagcatgctcgacggactgtacaccatgctctccaagatggacaccagcaagatcaccaacatctttgtgggcctgatgtcggtcaacaacctggtgaagaatctgtgcaagattgagtacaatgttgaggagattgccgcggagcacaacggcaaggtcaacgccatggacaccatcagcgcgggcctgatcgcggaggacatcaatgagatcaagactgtgctgaagccggtgctgaagctcaccctgaagctgaccctggacgacgtgatgaacccctgcatcatcctgggcgtgatccagtgcctcggcgacctgaacatgctcatgagcatgctgaagctcgtgaagaatgtgcaccacatcgtgtacgacgccgtctaagtgtccactgtgctgc

SEQ ID NO: 3504 - DNA, 484 bp, Chlorella sorokiniana
  Clone ID: LIB3602-044-Q6-K1-A10
ggagcaggatggtgaagttcctgaagcccgggaaggtggtcatccttctgtccggccgctatgccggcaagaaggcggtcatcgtgaagaactacgatgatggcaccagcagccgcccctacggccacgcgctcgtgtgcggcctgtctaaggagccccggaaggtgatcaagcggtcgtccctcaagacccaggcgcgccgctccagcctgaagaccttcatcaaggtggtcaactaccagcacatgatgcccacccgctacacgctggaggtggacctcaagggcgtggtgaccgccgagtgcgtggacaacagcaccaagaaggtggaggccaacaaggaggccaaggcgctgctggaggagaagttcaagagcggcaagaaccggtggttcttcaccaagctccgcttctgagggagtttcttggagagcctaggttgcagcagccgtgacgtgacgtgctccttgccccgagacgccat

SEQ ID NO: 3505 - DNA, 374 bp, Chlorella sorokiniana
  Clone ID: LIB3602-044-Q6-K1-A11
aaaaaaaaaaaaaaaaaaaaaaaaaaaaaaaaaaaaaaaaaaaaaaaaaaaaaaaaaaaaaaaaaaaaaaaaaaaaaaaaagaaaaaaaaaaaaaaaaaaaaaaaaaaaaaaaaaaaaaaaaagggggggcccctttttaggggcccaatttttctacccgggcccgggaggtgataaattttttttttggggccccaaaaataaaatccggggcccgtttttaaacaccgggggcggggaaaaacccgggcgttcccccaataaaatcctttggaaacacacccctttttccccgggggggataaaagaaaagggccccccccagtgctcttttcaaaaaagtggcccaatcaaagtggaaagggcccccccc

SEQ ID NO: 3506 - DNA, 196 bp, Chlorella sorokiniana
  Clone ID: LIB3602-044-Q6-K1-A12
gtccgaaacaaaaagaagaaaattcctgaatcccggataggttaccatccttatgtccgaccgctatgccgacaaacaatggtgttatcttataaaaactacgatgattgcaccagcatcctccccttcggtcactcactcttgtgcggactgtctaaggagccccataatgtaatcaatcggtcgtccctcacta

SEQ ID NO: 3507 - DNA, 401 bp, Chlorella sorokiniana
  Clone ID: LIB3602-044-Q6-K1-A2
tcgagcgcactgcagtgctgcaggaacttcctcctctcgcagcccataaacaccgcccccttctgccggcccccctcaggctaccgcactgcccatcgtccagcgcggcacgcaaacgctacgccacgtctgccccgctgaattttgctactaatacgccccttagttgccgcccccctgcccgcttgcttcagataaacttgccctgcctgatgcccccctttcatgcaccccattagacttgcccctgcgaattcgaccgtcccacgtttttgggccccttcacatgctcctttgcttctcccctcgtgcgtgacttgttgattgtaaatgcctgaccaagacggacaagcgcctgactgttagactgctggcaacccattcttgcagggccctgatct

SEQ ID NO: 3508 - DNA, 126 bp, Chlorella sorokiniana
  Clone ID: LIB3602-044-Q6-K1-A3
ggcgcactatactatggctgcttccaagtacattctcgagctatatacgaagaacccttagtgatgtcctctctttgggtgtccgattgatgaacggggagtacccccagctaaccctaattttcc

SEQ ID NO: 3509 - DNA, 484 bp, Chlorella sorokiniana
  Clone ID: LIB3602-044-Q6-K1-A4
cgcagctgcggctgttgaggcggcatgagcccagccgtcgccagcccgccagccagcccgctccccacaaacagccgaccccacccagcacgcgacgcagagaaactagaagactgaccgacgatgctctgttgacaccacggctgccgaaactcgcctcgtcagcgccccgggccggggggcaaacctcggctgccgccattgcgacagcctgcccacatctgggccccactcaaacccaagcccctcggtccccccttgttcttttctctctctcctcagggaaagacttgcttattgttgttgtttgttccatccatccatgcctgtgctgcccccatgacacgtctgccccagccgaccccggagccctaaacaactcgtcctcccggcggccggccggcgcatgtgcctgctcgccttctgctccgctccctcctctttcatttgtagatttgccccaccctgttgatgcttcccgcgt

SEQ ID NO: 3510 - DNA, 481 bp, Chlorella sorokiniana
  Clone ID: LIB3602-044-Q6-K1-A5
cggacgcgtggggggctagcagacatgcgagacgccggcggcgctgcggcatgcggcgcgggcggctgaggacggtaggcactgggagcatgaaatgctctcagtgccggacccacgcatctgaatgctgacgaccacgcggcagcaccatcctgcacgccggcagcacagcccagctgctgccccacaccagcccctctgctggcatgggcagcggcggctgtgctgcgcggcaagcgccacccggcttcatgaagcgccacggtcaaatgccataccctggcacaccgtggatgctgagcctgccgggccgcgcgcagtgctggctgctgccgagcggccgcagcgtcctgtacccctccttgtgtaccataacgaatgcttctggccgtgctgtgtggcatgagcagcggccgcctgtggcactctgctggcttggtgcctccaggccgcagaattgcaccggcggctgcacatgact

SEQ ID NO: 3511 - DNA, 483 bp, Chlorella sorokiniana
  Clone ID: LIB3602-044-Q6-K1-A6
gtccacaggcgccgccctgctgcggaccctggcctgccgagcggttgctggcgagaagctgaacagtgcgctgctgggcagcaggcctgcgtccacgtctgcagactcgtccgaccgacccctctctggcgacccaggcgtgcgccatgcgcggcggcagcagccctcatccatcgccgagcccccgctgctgcacgacagcctgagcgaggcagactacagccactacaagcggcagcgcaccacgccgcgcatgagcagcatcagcgagccagattactacctgaacaactcgctgtctgaggggacgtacggcatgccggctgtgctgcagcacaagcgcacgcagggctcctcgctgcggggcgggcccaagccaatgatgatgcagcgcatcgtggtggtcaaccgctcggcggcccaggacgacaagccggagcgcctgcacgactccttctccgccgtcgactacagcgccagccg

SEQ ID NO: 3512 - DNA, 482 bp, Chlorella sorokiniana
  Clone ID: LIB3602-044-Q6-K1-A7
gactagttctagatcgcgggcggccgctcgcgatctagaactgtttgaatgcaagggagtggttcggagcatttgcatgtcgccgtgctggagaacctggccaacttcccccaggcaagccatgctgattgagttaggggttgattacaaccatgcgcaagggaatggttcggagcacttgcatgtgacctctgtgctgggaacctggccgacttcccccagtgataaaactggagccagctaacggcagagcccagcctcaaaccttgcaagagcggcagccagctgatgtggtgcagagtgcttctccgggggcgccagtgtgtgtggtccatcagccgtgcagtgcgcctgactgttagactgctggcaacccattcttgcagggccctgctctggactccaacttctgggtgctcatgatcacttgggtaaataccagcatgtcatgagctggggatgcttgggggtcgagttgtgct

SEQ ID NO: 3513 - DNA, 483 bp, Chlorella sorokiniana
  unsure (1)..(483): unsure at all n locations; Clone ID: LIB3602-044-Q6-K1-A8
ggacgacgtgctggccgtcgaggccagcgacgtcaccgacgagtttgcggcgcgcctgctggaggctgactatggcagctatgccgctgcccccatggagctgcggcgctgcgtggttgagcgtggatacgccgtgcgcgatgcgctggccgcgtatgccaccgccctcaatgtcattgacgactgctccccttggcatcctgcctcccacgtgcctttcccgtaccgcgccgaggcatgaaaagccaaccccgcccggcggctggcggcaaccagcgtgcagccccacgcattgtggtactgcgcgtgctaagttgcaacccttgccaaagtctcccaccagctcagggtcccaattggcaatgtctgccacagtgactgcattgngtctctgtgattcttcacaagtgcgctgctgcaagcgcttgtgttcattgcatccacacccataactctgctacttctccccgcccggtgcgctac

SEQ ID NO: 3514 - DNA, 481 bp, Chlorella sorokiniana
  Clone ID: LIB3602-044-Q6-K1-A9
gggcacgctaccatgggtgcttacaagtacatcgaggagctttggaagaagaagcagagcgatgtgctccgcttcctcctccgcgtgaggtgctgggagtaccgccagctgcccggcattgtgcgcctcacgcgccccagccgccccgacaaggcgcgccgcatgggcttcaaggccaagcagggctacgttgtctatcgcgtgcgcgtgcgccgcggcggccgcaagaagcccgtgtccaagggtattgtgtacggcaagcctgtgcaccagggtgtgacgcagttgaagccgacccgtaacctgcgcaacgttgctgaggagcgggtgggccgcaagtgcggcggcctgcgcgtcctgaactcgtactgggtgaaccaggacgctgtgcacaagtactttgaggtgatcctggttgaccccgcccacaaggccatccgcaaggacgcgcgcgtcaactggatctgcaaccccgtgcaca

SEQ ID NO: 3515 - DNA, 365 bp, Chlorella sorokiniana
  Clone ID: LIB3602-044-Q6-K1-B1
aaaaaaaaataaaataaaaaaaaaaaaaaaaaaaaaaataaaaaaaaaaaaaaaaaaaaaaaaaaaaaaaaaaaaataaatgtggaaaaattaaaaaaaaaaaaataatctcctaatttaaaaaaattaaacactttaattaaacaacatttgggctgcccctttttatggtctttccttttttttgcctttctttcctactgtttcttttttttttttttggctccttatttctttttcttcgcccctttttttcttcttttttgtttggaaaacctttttttttccccatttttatcctcttgacgatatttcctttttttcacgttgctgttaaattaaaaagtttccactatttttttttt

SEQ ID NO: 3516 - DNA, 482 bp, Chlorella sorokiniana
  Clone ID: LIB3602-044-Q6-K1-B10
cccaacctggtgcacgctcagtccatcgtggccatcctgctgacccaggttgtgctcatgggcctgattgagggctaccgcgtcaacggcggcccggccggcgaggtggtggaccccatctaccccggtgaggcctttgaccccctgggcctggctgacgaccccgacaccctggctgagctcaaggtgaaggagatcaagaacggccgcctcgccatggtgtccatgtttggcttcttcatccaggccattgtgaccggcaagggccccgtgcagaacctgtccgaccacctggcctccccctccaccgacaacttctactccctgtacgccaagaccctggcgtaagcggcctgcacttgctcctgcttgagcctcgactggcggcgggcgtgaccctgtggcagtgcgctcccgcttgcgcccgctgcctgacttgacttcagctccactgttgcaccgaggggatggtgtaacatgta

SEQ ID NO: 3517 - DNA, 482 bp, Chlorella sorokiniana
  Clone ID: LIB3602-044-Q6-K1-B11
ccttgtttgttgccctcatgcaggtcagcaagtcgggcgaggcgggcgccgccctgtcgtccacctccctgctgggcctggacgagcagaccaaggcgctgctcacggtgcgctgctgctgctgtcgcattgctgtgctgcttgcaatggcagcgtgtgcggtgaatctgctgcatacagtcgggctgctgctggcttggcttgcaagctgcagccaccagcagccagcacactgcccagcatgcctcttggggcctcagttgcacctccaagcccgcttgtgagcatcctccgccccctccctcccctccacctgccgcattacaggcgggcatcctgctggtgggcgtgattggcacggtggtgggcacgcaggtgctggtggacaccatggcggcgcgcctcaaggccggcgcctccaagctggccaccctgggcgccttctgggtcgctgtcttcctggccgccaagtttgtgctcga

SEQ ID NO: 3518 - DNA, 481 bp, Chlorella sorokiniana
  Clone ID: LIB3602-044-Q6-K1-B12
aggctacatccaggctatcaacttctggacagagcctgggctgaatgcaaccacacaggactctgggccgctgagcggcattacggcgtcatgcgctgcggcggccggcatcaatgccgctctgcaggtgttccctggccagggcccagaggaccagaaccgaaccttcccaggtggcatcagcaatgtgacggcctcatttggccagttcctggacaatttcatgggcgtaggcggcacgggcacaaataacgtgagatgctcgccgacgtggcctgggctgcacgcctgcctgtgctgccattctcattctcatgctctgcagcaggcgctccctcgtgcacgactgccgcagacggagcatttctgcagaccaggcgaggtggtgacaggcatacacgttgcttgggagccggctcccgtggcacccttcaccaacttggccacaggggtgagggtgtactgtgctgacccgagaaat

SEQ ID NO: 3519 - DNA, 233 bp, Chlorella sorokiniana
  Clone ID: LIB3602-044-Q6-K1-B2
gtgcttgctaacgaaagaccgtgtctttcgtcgccatcgaaggccatgttcactcgccgtctttttacaacttaattactgttaaagccctggcgtttccaactttagtccctttgaaaaccatgcccttttcgaaaaatgccgttttaaccaaaaggcccttttcgttcgccctttccaacattagcggcccctgactgtcaattgtaaccccccttgttgcgcctttttaa

SEQ ID NO: 3520 - DNA, 158 bp, Chlorella sorokiniana
  Clone ID: LIB3602-044-Q6-K1-B3
gtgcggcttcaacaacactgatgtgcaaatcctcaacacgatggtcatcccctacgaagaccgataatgtgctggagggggacctgctgcgcagcggcatgaaagagttttcgcagtggccgaccttcccccaggtgttcgtggcgggcgatttagtg

SEQ ID NO: 3521 - DNA, 365 bp, Chlorella sorokiniana
  Clone ID: LIB3602-044-Q6-K1-B4
aaaaaaaaaaaaaaaaaaaaaaaaggacaaacaaataaaaagaaccaaactaacaaacacatacaaaaaaaaacatgggtcttctataaaaagacgtacatttcttcactgtccgttactttccatcgctttgactgaaaaaactcttgttttacctaacttaatcgtcttgcaacgcatccttctttcaccagctggctttataacaaactggcctgaaccgaatgactttcccaccggtcgccctccctgactggtgaaaggcaccctccctgtagctgttccaccacctcgcctcctcttatacttacaccctttactgccgttacgctagccccctccctaacgcccgctgcttttgcttc

SEQ ID NO: 3522 - DNA, 417 bp, Chlorella sorokiniana
  Clone ID: LIB3602-044-Q6-K1-B5
ggccatcaagcgcttcatcgtgcgcaacatggtggacgcctcggccatccgcgatctgcaggacgcctgcgccatcgacggctatgcgctgcccaagatctaccgcaaggtctactactgcgtgtctgccgccatccactccaagattgtgcgcgtgcgctccgtcaaggaccgccgcaaccgcgagccgccccgccgccccggctttggcgcccgccccgagcgcaagtgagcgtcggcatggccgcagcagcagcagccgctgaggagcagtgagggcggcgctctgcagccgcgcctcgtcctgcgatgagtcagcaccgcggggccgcccggcgcacggcacgccacccggcaggcagcttatttatgtgcgctgggccgcgcgccggcgccccgtgtaaatcgcgatatgcg

SEQ ID NO: 3523 - DNA, 480 bp, Chlorella sorokiniana
  Clone ID: LIB3602-044-Q6-K1-B6
acgacctggggcttgcggcgctggtgcggcgtgcctacctgccaggcatcacagcagacagcgtgcgccaggcggttgagagcaaccccgaacgcttctatgtggcggcggcaaagggcgtgtttggctcggaagaagtgctgcgcctgctggtggcggagcggctggcagccgagaccgcaacagggcaatgaggtggtgctcggagcaacgctgtgcagcgcctgcaacttcagttttgatgcagtgcgcccttgctgcttgtaatgatgtcttcccggcaaaaaaaaaaaaaaaaaaaaaaaaaaaaaaaaaaaaaaaaaaaaaaaaaaaaaaaaaaaaaaaaaaaaaaaaaaaaaaaaaaaaaaaaaaaaaaaaaaaaaaaaaaaaaaaaaaaaaaaaggggggggccgttttaagggatcaaagtttacttccccgtgtttgcaaagaaaaattttttttttggggcccccaaaa

SEQ ID NO: 3524 - DNA, 481 bp, Chlorella sorokiniana
  Clone ID: LIB3602-044-Q6-K1-B7
cgatctttcacagtgggatgcaacactgcgcaagctgggaggccttgtagcagagctgctgacggacgagcaagcggtccaaggcgccatggcagcccacctggccgcactggaggcaatagcagatgcccaggggcctttgcaggagtggcagccccagccggcgcagcagtgggcagtccacctcgcatggctggcaacacgtctcgaaccggacatgtggccaccaaggctgagtgtcatgctggtggaagctggctcgtttctggtgcagagcatggcggcagcagtggatggcaacaatccagcgaaggcgcccagcgctgagctggtggcttgtctagctgaggcggcggatgcgagtgcagcagaagcgcccagcgccgagctggtgttgaccgagtggctaggggccattgctggctgcccacgtgcggcctacctgatgctgaccagcggcgtgttagcccaggcattggct

SEQ ID NO: 3525 - DNA, 477 bp, Chlorella sorokiniana
  Clone ID: LIB3602-044-Q6-K1-B8
gcagatcgacaacacgtacaacaagctgcagacgctgtgcgagtacattgatgacacagaggactacatcaacatcgagctggattcccaccggaacgcgctcattcggctggacctggtgctgacctccttcaacgcctcggaggccctggtcaccgccatcaccggcctcttcgccatgaacgtcatgctgcagccggaccacgagggccaggcgccctactcctggttcctgatagtcgccatctccactggcgtgggagccatcgctgtgtttgcgggcgtcatgacctactgccgctggcggagcctgatctgacctagcaccggctgcactagccaactggcatccctgctccgagcagccgctgctgcagcggctgctcgcgctgctggctggaggaaggctgctggtgtgtgcctggtgtgcccaccgctactcacataacaacttgtcaagcccatactcatttcatg

SEQ ID NO: 3526 - DNA, 482 bp, Chlorella sorokiniana
  Clone ID: LIB3602-044-Q6-K1-B9
gtgcggcttcagcaacactgttgtgcaaatcctcaacacgatgggcgtcccctacgtgaccgtgaatgtgctggaggatgacctgctgcgcagcggcatgaaagagttttcgcagtggccgaccttcccccaggtgttcgtggcgggcgagtttgtgggcggcgccgacatcctcatccagtcgtacaccagcggcgagctgagcgagatgctggaggcggccctgaacagctgaggcaggggccacatcgcgaatttgcaccagcttgaggcagccctggacagctcacgcaggccaagtcgcaaccttgaagaggctgatgtggctgacgcagggcccgagcgtccgacccaaccaatggctcggtgcagcggccgcagcgtgggcatgcagtcccccaaaatctttacttaccatgctgacccgaatgaatctggggcaggccgcgtgctgccctgtcccctgtatcctaatgccccct

SEQ ID NO: 3527 - DNA, 232 bp, Chlorella sorokiniana
  Clone ID: LIB3602-044-Q6-K1-C1
ctcacgttcttttccacatcttccctcctctacccaccttcaagacccctcctcctcatcccctccctcacgtcacctctttcacgatgatgcccccctgacctggtgcttatggacaaagcaccttgacatccctccccgcgtgtctgaatgcactagcctcaccgccgctgtttggtttgcagtctgcagtgcggcacattgcaaatgccttgttgcaaaggatggttgc

SEQ ID NO: 3528 - DNA, 360 bp, Chlorella sorokiniana
  Clone ID: LIB3602-044-Q6-K1-C10
aggagggtaaagagcaaagatgccggcggtccagcgctaccgcgcgcgtacccgccacatgttcagccgcggcttgaggcagaagggcttcatcccgctgtccacctacctgaccaactacaagctgggtgactatgtggacatcaaggtcaacgccgcggtgcacaagggcatgccccacaagttctaccacggcaagactggctgcgtgtggaatgtgaccaagcgcgccgtgggcgtggagctgctcaagcaggtcaacgggcggtacatcaagaagcgcatccacgtgcgcatcgagcacgtgacccccagacgctgccacgaggagtttctgcgccgctgcaaggagaacgacgc

SEQ ID NO: 3529 - DNA, 483 bp, Chlorella sorokiniana
  Clone ID: LIB3602-044-Q6-K1-C11
caggaagtgcgccaatgccgcccatgactttggtgtggattgggtgaagggccactactaccgcgtgcccaagtactgcaagaccaagtggctggcctaccccgtggagtgctccacttgctccggctactactaggcaactagctgagcaaggcagggcagcctgaaacaggctcccatgtgccgacgctgctggcggcatgaggcacagcaccaagaaaggcagctttcaagggcggcgttgtgctggagcaggcatggccgccagtctggagcgccagctacagcacgttgccgcgctcgatggccctgccaaccagcctcgacgcacagctgaagcgctgcaacacacccgtgacaaaccgtgcaacagcagccacacactgcgttgcttgaaccccctttccgtgacccaagacccgatccattccgtgatctctcccatctgcaacccagcacactcccccattccctggaccccat

SEQ ID NO: 3530 - DNA, 427 bp, Chlorella sorokiniana
  Clone ID: LIB3602-044-Q6-K1-C12
gaggaagagaactaatgccaccaatgagtttggagtgcattcactgaagacacctctttacgtttccccaacgatttggtgcaaaaagtgcgccaatgctccccatgactttggtctctatcttgtgaatgctcactactacatgattatctaatttatggcataccaagtggctggcctaccccgtggagtgttccacttgcttccggctactacatccgcaactagctcatcttaatgtcgtctttacataaacaggctcccatgtgccgacgctgctggcggcatgaggcacagcaccaagacaggcatgttttaatgacggtcttttactataacatggaaaacctgtataactggagcgccagctacagcacgttgccgcgctcgatggccctgccaaccagccttttactacaatctaaaa

SEQ ID NO: 3531 - DNA, 478 bp, Chlorella sorokiniana
  unsure (1)..(478): unsure at all n locations; Clone ID: LIB3602-044-Q6-K1-C4
aggcctccttcgttatgcctagcgcattacaggccccgtgcgaccagcggcccctcgggccttggccctcaaccccacacctcgcccaaccgccctcaccctccctcacgcctaagtctgatgtgcaccgcactccgttagccccctcctccccccttttcaacgtctgccgcaagccgatttacttactgcaagcactagctgtacatgtgctgtgcaatctgatgcgcgtaggcggcacgggcacaaataacgtgagatgctcgccgacgtggcctgggctgcacgcctgcctgtgctgccattctcattctcatgctctgcagcaggcgctccctcgtgcacgactgccgcagacggagcatttctgcagaccaggcgaggtggtgacaggcatacacgnngcttgggagccggctcccgtggcacccttcaccaacttggccacaggggtgagggtgtactgtgctgacccgag

SEQ ID NO: 3532 - DNA, 482 bp, Chlorella sorokiniana
  Clone ID: LIB3602-044-Q6-K1-C5
gcgtgagcttgcgacactccggcaaaccaaatgggccttttctcgctgtgttgcggcggggctgcgacgaccaaggacgacgagcaggccccgctgtggacgccgctgcccggcgagcggcggaagggcggcggcggagcggcggcgccgggcctggcgttcggccaaggggcgctgcgctatgacccctttgcatctgcatacgacacacaccggaagaagccaggccgccacgagcccaacccgtttgctcaggatgcgccgctggttgcgccctcagacgacccatttgcccccagccagccagcagcgggcggctgggcagcagagccaggctacctaagggagcaggcgctgcttgcagcgcagcaggaagcggatgcgcactcgccgccctctgacagcaagcaccactggtttgggcggagccacagcagcagccctcaaccggcggcggcggcagcagcgacgcagcccggccg

SEQ ID NO: 3533 - DNA, 102 bp, Chlorella sorokiniana
  Clone ID: LIB3602-044-Q6-K1-C6
aaaaaaaaaaaaaaaaaaaaaaaaaaaaaaaaaaaaaaaaaaaaaaaaaaaaaaaaaaaaaaaaaaaaaaaaaaaaaaaaaggaaaaaaaaaaaaaaaaagg

SEQ ID NO: 3534 - DNA, 487 bp, Chlorella sorokiniana
  Clone ID: LIB3602-044-Q6-K1-C7
aaaaaaaaaaaaaaaaaaaaaaaaaaaaaaaaaaaaaaaaaaaaaaaaaaaaaaaaaaaaaaaaaaaaaaaaaaaaaaaagaggggaacccgaaaaaaaaggaagggggcgttcgttttgggggctcccggcttccttcctcttttttgggcccacttaatttttttttgggggcccctattttcatttttttggccggggtaaacactggcgtgctgggcaaaaccttggtgttccccattttaattttccttgggggatatcctcttttagcgagttggcctaattccacattgccccacttggttcgcctttccaaacaattgcccatcctgtttggcaaatggaaccccccttgtggtggcatattaacccccccggttgcggtgtctcttcgcaggggccctgttccatttcccacccctttagccccttcctttttcgctttcttccctgcttttcccgcccagttcctagtttttcccct

SEQ ID NO: 3535 - DNA, 480 bp, Chlorella sorokiniana
  Clone ID: LIB3602-044-Q6-K1-C8
ccgccggcggctcgcccagcaaggggcccggctccttcctgggggatgtatgtggcctggccgcctcgttggcgcgccaggcgctgccctgccacttccgcatcaccaccgaaggcagcgccagccgctccgctagcatggcggccctgaacaaccgcatctgattcaggcagcccatgagcatgccggtacaaatgatccacgctcgcagcagcacctgtcgcacgttcggcagctcggcgccctgcccccagctgcacgcttgatgcagctcctacaactccaagctttctgatcgacgcacccaaaccaacgaacgcttccttttgtacacgtctagaacctcatcaaggcccaatgcacggcctgcttttgcgccatcgagcgccctcagcacatccgtcccaccgcatcctaccagcaacgaacgatcgccgacttgatctcatttgtttgcctcgcctcttccagccccgccct

SEQ ID NO: 3536 - DNA, 473 bp, Chlorella sorokiniana
  Clone ID: LIB3602-044-Q6-K1-C9
gcgagacgtggcggtgggtgctggggcatgggcgggcagctgctgccgctcaagcgggatgcatgatgcaccatgccatgccatcgccatgccatgccatgccatgctttcgccatgccatcgccatgccatgccatgccatgctttcgccatgccatcgccatgccatgccatgccttgcccatgaccatgccctgcactccgcggcatgccgagccatgatgcccattagcatgccatggccatgccgtcgccgtgcactgtcctgccatgcctgctgctacagctggtcgcccgctcgttgccctgatgagaagcgcacttcaccctgattggccgccccaggtagtgctgatgaaccaagtgaccaccaagcttgaaggcggcggcagtggcggcggcagcagaggggagggcgcagcagacgttgcggcacggctggtgccagctttgggcgactcatgggcgcatgc

SEQ ID NO: 3537 - DNA, 456 bp, Chlorella sorokiniana
  Clone ID: LIB3602-044-Q6-K1-D1
gtgctggatgctcaagagcgtggcgtgccccagctgttgatgctggcacccctgttctgcacaatgatggccggtccagctggcctgctgctctatctggcgctcatccgcccatggttcagcgctagcgctgggcgccgcggcggggccggcaagcaggattgaacagtggatgttggcacgagtgcacgagcgccagcagctgcacagagagcaagactggtggagtgagggatggatgctgccggccagccgctgcaaggagtgactgagagagttgcacagggtgtgcctgtgtgcgcccgcggcatacagacaagcatgaacattcaagggctgcgacccagcgctctgcgcagttctaggcggctcagtcccgttttgtatgttcagctcacagcaagttgacaaattttgcacagacactgcgaggtatgctgtaaagagcagctctgc

SEQ ID NO: 3538 - DNA, 410 bp, Chlorella sorokiniana
  Clone ID: LIB3602-044-Q6-K1-D10
gccccatgatctgcgcgacaggggcacggaggagctgctgtagcacttgaaggagctgaaccatgacttgagcggcctgcgcatggccaaggtcacctgaggctcccatcaataagctgtgcaagatcaaggtgctgcgcaagggcattgcttgcatgctgaccgcggataaccagatgacccgtgacgctatgaaggaggcgtacaagggcaacaagtacatgcccctgaacctgcacgttaaaaagatcccggccatccgtcgtgccctacaccaaggtgcagtccaatgccaatactgacaaggctgccaagatggcgcccgccttcccgcaatgcaagcactcgctcacggctgaaaggccttggaagcagccgcatgcactcgtgcaggcacacttttaggaatg

SEQ ID NO: 3539 - DNA, 481 bp, Chlorella sorokiniana
  Clone ID: LIB3602-044-Q6-K1-D11
gccatcttcaactaccagaacgacccggaggtgctgcgtgtgttcgaaaagatgagccagctgttcccccaggcggccggcgcaggcgctctgcccaccatgccccccggcatgggtatgccgcccggaatgggtggcatgccgcccggcatgccgccaatgccgcccgcccagcagtaggctggtgcgcgcaggcaagcttgccgattgtgcccccgtacagtgccgccgccagcagccggcacactgcccgcgcagcaggaagcggcgagtgggtgcaggcttgcaagctgttgctggcgggtgcagctggcggcgacggcgcagctgggcgtttccttggcggcttgctgtgggcttttcctgttcttgactgctggcgtcagccgctgagttggcacttgcacaggtggcggctggcgcctcttgaccttgcatatgatttgttgtttctcgggatgccatgcgttggtgtaaagcg

SEQ ID NO: 3540 - DNA, 320 bp, Chlorella sorokiniana
  Clone ID: LIB3602-044-Q6-K1-D12
gccatattcaactaccagcgacaccatgcggttcttgatgtgtctagaaaagatacaccagagtgcgtgtccagctgggtgtcgcacgtggtgtccaagctgaccgccacggatgaccctgcaccgccctattcggtcctaggccaaccgccagcgcacgtacaagaccaaggcggagactgatgccaagaaacccgtcaccttcaccattgggctcaccctgctcttcatcctcctggagttgcccatgctgcagtactggggctacaccaacaaggactgagcgtggcaacctggtgtttgccgaatcatcatgttta

SEQ ID NO: 3541 - DNA, 481 bp, Chlorella sorokiniana
  Clone ID: LIB3602-044-Q6-K1-D2
cgcggtggtgcccggcaagccgccgccgttccagccccagggctcccccgccatcccgctgctggcggtactggccctgctggtgctggccttcagcaacctgcagacggccaaggcatccgcgggcggcggcctggtggcggccagcctgcaggcgcccaccgtgctgctgcagcaggtggcggcgccgctgctgctggcgctggccgtcctggtgctggtgatgaagaagggcaagtacctgtgcgaccgtcccacgctcctgcccgacgcggctgtgccctggcactgacgcagcggggtgtgggggcacgcctggtgtgggggaacgttgatgctcgcattggcgagcctggtgctgtgttgacgcctgctacggctggcctggtgctgtccaaccgtgcaatgtcgcttttttgcagccacactgcgtggccagtgactcctgaggtgtcctcctttttgtaagagcatgttacat

SEQ ID NO: 3542 - DNA, 349 bp, Chlorella sorokiniana
  Clone ID: LIB3602-044-Q6-K1-D3
cgcggagagagcccggcaagccgccgccgttccagccccagggctcccccgccatcccgctgctggcggtactggccgtgctggtgctggccttcagcaacctgcacacggccaaggcatccgcggtcggtggcctggtggcggccagcctgcaggcgcccaccgtgctgctgcagcatgtggcggcgccgttgctgctggcgctggccgtcctggcgctggtgatgaaaaagggcaaagacctgtgcgaccgtcccaccctactgtccgacgcggctgaaccctggcactgactcaaaatgatcgtggggacacgcacgactgtggtggatacgatgatgctcacaat

SEQ ID NO: 3543 - DNA, 481 bp, Chlorella sorokiniana
  Clone ID: LIB3602-044-Q6-K1-D4
cgcgtccaagaagttcaagccggtctgcgctcgcaacgccgccactcaggacacctggggaggtttccccaacgattgctacaggaagtgcgccaatgccgcccatgactttggtgtggattgggtgaagggccactactaccgcgtgcccaagtactgcaagaccaagtggctggcctaccccgtggagtgctccacttgctccggctactactaggcaactagctgagcaaggcagggcagcctgaaacaggctcccatgtgccgacgctgctggcggcatgaggcacagcaccaagaaaggcagctttcaagggcggcgttgtgctggagcaggcatggccgccagtctggagcgccagctacagcacgttgccgcgctcgatggccctgccaaccagcctcgacgcacagctgaagcgctgcaacacacccgtgacaaaccgtgcaacagcagccacacactgcgttgcttgaaccc

SEQ ID NO: 3544 - DNA, 329 bp, Chlorella sorokiniana
  Clone ID: LIB3602-044-Q6-K1-D5
ccctgctttcttcccggctcatagctcaatcgccatttcatttcctcagcccgtctcttctcatgcctgtccgtcgccgtctgtaccactgcctgccagcgccgatgcacaaacgatcccccaccacccgcgcgcgtatttcattctttagcggcctgccaatttttgctaggaccagccgccctgcgacataagggacacccactccagctgcgaagagatgctgctagccgtcctccccacgagccgtgtgctgcgcccgcagcgcccgcgctcgacgccccttttgccattttttctaacgaccacacatgtaacaaagctgttgc

SEQ ID NO: 3545 - DNA, 471 bp, Chlorella sorokiniana
  Clone ID: LIB3602-044-Q6-K1-D6
gtagagaacaagaaggcttcgcccggcatctgggactaccacctgcagtctgagaaggctgagcgggaggcgagccacgacgtggcgcgcgccgccttcaagtccatgggcgcctccaccactccccaaggcgatgtgctggatgcctctgccctgcgcaagatgtttgcctcggaccgcgtggaccagctgatggccatggccgacaagaacaaggacggcaagatcgacttcaaggagttctgcgacctgatccgcaagtacccctgcgactgagcgatacataaggcagatgcacggaccaatccctgcaataaatgcaccgtttcacaccgggccacgggcgcggcgctgattgacgcgtccccaagtaaactcctctcccaagccagtggcgccacggcacagcaccacgtgcggctgaagctgctgctgccctcagccacttcctctgttttccccgtcctcagt

SEQ ID NO: 3546 - DNA, 481 bp, Chlorella sorokiniana
  Clone ID: LIB3602-044-Q6-K1-D7
gtccgcgtcacccccatgcgcacggaggtcatcattcgtgccacgcgcacgcagaatgtgctgggcgtcaagggccgccgcattcgcgagttgaccagtgtggtgcagaagcgcttcaagttcccggagggctctgtggagctgtacgccgagaaggttgccaaccgtggcttgtgcgccgtggcacaggcggagtccatgcgctacaagctgctgggcggcttggctgtgcgccgtgcctgctatggcgtgctgcgcttcgtgatggagagcggcgccaagggctgcgaggtgattgtgtctggcaagctgcgtgcgcagcgcgccaagagcatgaagttcaaggatgggtacatggtgtcgagcggcaacccggtgcgggagtacatcgactcagccactcgccatgtgctgctgcgtcagggtgtgcttggcatcaaggttcgcatcatgaaggagtgggatccgactggcaaggttg

SEQ ID NO: 3547 - DNA, 83 bp, Chlorella sorokiniana
  Clone ID: LIB3602-044-Q6-K1-D8
gtgatgacccgcccagccgatctgtaagacatttctttccaaaaaaaaaaaaaaaaaaaaaaaaaaaaaaaaaaaaagagaaa

SEQ ID NO: 3548 - DNA, 475 bp, Chlorella sorokiniana
  unsure (1)..(475): unsure at all n locations; Clone ID: LIB3602-044-Q6-K1-E1
ggacagctgacggtgcagtcgcttgcacccgcccctccttcccatccccaccgcaaccctacacacagctaagccacatcctcgcccttgcgcacttcagagcaccctccctgttgtactttatgccccctttgggtgcccggcaccccactctctgccattggacatccgaatgaatgccccacggcctccgcccgtcgtgcttcatgcatcagactttcagaccccctcagcgcctgtctcggtcccaatgccctttcgtgtcacatgtccgccatttttcccccttgcccggcagcggcacgctgcagttggtccgttcactttgccttggaaggccgccattcttttcacccgctgcggcgtcttttcttgtggtgtcgcgggatttgcaaccctttgcngtgaaaaaaaaaaaaaaaaaaaaaaaaaaaaaaaaaaaaaaaaaaaaaaaaaaaaaaaaagggggcggccg

SEQ ID NO: 3549 - DNA, 466 bp, Chlorella sorokiniana
  Clone ID: LIB3602-044-Q6-K1-E10
cgccaaccggctggagcctttcttcctcaacctggcgggcggccaggagtgagcgcggcagaccagcggcaagcccgcctgcctgaccaccccctgtggcgcacggcaaacctgcccgcctgaccaccccctgtggcttggggcacacggccggccggccattttcccgcgaggccggctgcacagctgtgctgcctcgtttgcactcatgcgcaactgtttcactcggtttttccgtgtagcgtgcccgtttcatgcatccccgatcctgcatcagtagtgctattcccgcagcctggtagaaactgcttgtcttccccaactgccaacatggttcgaaatgccaccaccctcttgctgagcctccctgctgcagtgcactgtccagctgcctgcatgttgcccaactaccatggttcatgtttgtccatttacagcatagcatgatgtcaacagaaggcatgcc

SEQ ID NO: 3550 - DNA, 376 bp, Chlorella sorokiniana
  unsure (1)..(376): unsure at all n locations; Clone ID: LIB3602-044-Q6-K1-E11
gcccaggagggcatgggcgccttcttcaagggcgcgctgtccaacgtgctgcgtggcgcgggcggcgccttcgtgctggtgctctacgacgagattaaaaagtatctgaaccccgacgccaagcccagctccgagtaaagagctcgcgcaggctgcccgacccacggcggggtggaacttttttttccaacaaaccagccaacccacgctcctccgcactgcacagttgcctcctcttacagcgcttgctccctaccctccgctcgcccatgccatgagccgccagtgctgctgacgcacacgggcgctcgggacacgatatatgctgcgcacctccggcccctctgatgggcaaagctgcaacagatccgcngaa

SEQ ID NO: 3551 - DNA, 479 bp, Chlorella sorokiniana
  Clone ID: LIB3602-044-Q6-K1-E12
gcgcgagtttgcgcgcgagtacatgcgccccaccgcctcccagacgcagaagcagctgctgtacgtgatgaaccccgccaagctgagggcctgccagttcctggtgcagtaccatgagcagcgcggcgacaaggtcattgtgttcagcgacaacatctacgcgctgcggcactatgcggtggccatgaagaagcccttcatctacggcggcacggggcaccaggagcgcacccgcatcctgcacgccttcaagcacaaccccgcggtcaacacggtgttcttgtcaaaggtgggcgacaattcgctggacatccccgaggccaacgtgctcatacagatcagcagccatgcggggtcgcgccgccaggaggcccagcgcctgggccgcatcctgcgcaagaagaaggccaagcccgggcaggcggccagcgccgaggagtatgacgccttcttttataccctggtcacactggacaccc

SEQ ID NO: 3552 - DNA, 479 bp, Chlorella sorokiniana
  Clone ID: LIB3602-044-Q6-K1-E2
ggtcatcgtcaacatgctcatcggcctgatgtccaacgcacttgataagaccaaccaggacctggccaccaagggggtgctgcacaaggcggagatcatcgacgagcttgaggccaccatcccgcggttcattgaaaatcgcttcaagggctggggctggtatcccgagtggatccacatcctgcgcatcgaccccgacaggctggacaagccctctgatgacctggcatccatgtggagcagccctgcggacgacggtagctctgcggtcgatgccaagctgcaggcgatgcaggtccagctggaccggctggaggcgctgctgctgctggccactggcgggcaggcggccggtgcagctgcacagagccgcagcaacaaggagaccgctgctgacagcagcagcagtggcctcccggggacggaccaggagtaggcgagcggcagctgacttgcttgtgtcttctgtctggctgttg

SEQ ID NO: 3553 - DNA, 336 bp, Chlorella sorokiniana
  Clone ID: LIB3602-044-Q6-K1-E3
gttcatttttttcattcttatttttcttatgtccaacccactcgataagaccaaccattacctgtccaccaatgtggtgcttcacattgcggagatcattgactaccttcatgccaccatccctcggttcattgaaaatcgcttcaaggactgtggctggtatcccaagtggatccacatcctgcgcattgaccccgacaggctggacaagccctcttatgacctgtcatccatgtgtagcagccttgctaaccactgtagctttgcagtcgatgccaagctgcaggcgatgcaggaccagctggaccggctggaggcgctgattatgctgtccac

SEQ ID NO: 3554 - DNA, 444 bp, Chlorella sorokiniana
  Clone ID: LIB3602-044-Q6-K1-E4
tgattgactcgattgtgggcgacaacatccccatcctgacgggcgaggagaagtacaacgagagcgtgtccagctccgtgtcgcgcgtggtggccaagctgacgggcaaggaggaccccggaccgcccttccgcgccgaggccaaccgccagcgcacgtacaagaccaaggcggagactgatgccaagaagcccgtcacctccaccattgtgctcacgctgctcttcatctcggtggtggtgcccatgctgcagtactggggctacaccaacaaggactgagcgtggcagcctggggtctgccgaatctcagcttcaaccagataattgcaaatctgttttgttactgttgtatgtaagcggcgtgtgcgcgggcccccgcccgattttctgcccgcgctgacccttgctgttgacctcgatgtgaggcatgtaacttggactg

SEQ ID NO: 3555 - DNA, 482 bp, Chlorella sorokiniana
  Clone ID: LIB3602-044-Q6-K1-E5
cggtgatgcggctggcagcttcctggacaagggcgaggtcaccgaccgggtgctgaacgtggtgaaaggatttgagaaggtcgaggagggcaaggtgtcagccagcgcttcgttccagaaggacctgggcctggacagcctggacaccgtggagctggtgatggcgctggaggaggagtttgccatcgagatccccgactccgaggcagacaagatcctcagctgcgccgacgccatctcctacatcgcctccaaccccatggcgaggtgaagcgcgcgctgaggcgcacggcgcggtgacgccgcctgccggcccgtgcccgcccctccccgctccaaaccagccttgccatgtacagcacttgtgtctgctccgtctgccagacagggtgcggcagtgctgggaagcgctgatgcgcgctcagcatgccgcgcggccgtgccctcaccacatgccggccggcacacccctgtcctgattt

SEQ ID NO: 3556 - DNA, 84 bp, Chlorella sorokiniana
  Clone ID: LIB3602-044-Q6-K1-E6
aaaaaaaaaaaaaaaaaaaaaaaaaaaaaaaaaaaaaaaaaaaaaaaaaaaaaaaaaaaaaaaaaaaaaaaaaaaaaaaaaggg

SEQ ID NO: 3557 - DNA, 442 bp, Chlorella sorokiniana
  Clone ID: LIB3602-044-Q6-K1-E7
cgcctcttgcccatgcccgcctgtcatcataagccctgtaccggcccgcccccacgaaccctccccaccccacatgctgtcatccgggcccactcgtgcgccggtgcagttttggccaccatcagtcacatgccccttgctttcatgcacctcactacgctagtcagccgggccgccaaagcccccgagtgaatcccagaaccactggacctggggcgtggctcgcccccatttgattaagactgtccgctttgctcccgtccgcttgctgcgccaacccccagcagccccgattaatacgccctgccccacgcttgtttgctgcgccaactccgcgcagcggccatgcctttccataatcaagcacccgccctctctctcaatgtctcaagcctgccgcactgcctgccggcaggcaacggccgcactgtgtaatactgcc

SEQ ID NO: 3558 - DNA, 231 bp, Chlorella sorokiniana
  Clone ID: LIB3602-044-Q6-K1-E8
cggacgcgtgggaaaaaaaaaaaaaaaaataaaaaaaaaaaaaaaaaaaaaaaaaaaaaaaacgaccaaccctaaaaggggtaataaattaccaccgcgtgcctccctcctaatacttcttttgtcgctccctcttactttactttgttgcgcgtttttttactacttaattgctttgacaactccgccgtctcccttcttagcctttttgacttcttccttttttcgcct

SEQ ID NO: 3559 - DNA, 482 bp, Chlorella sorokiniana
  Clone ID: LIB3602-044-Q6-K1-F1
gtgcactatgcgggcatgcccatttggacgcagatggacaacctgtgtgacaaggcagactgcccggtcaagcaggggcccacacaggtccgctactcgcagctgttccccgccatcaccccgcccggctcgtacacagtcaccctgaacggccactcgggcgcggagcagctgttctgcgtgacggtgcccttccaggtggtgccgccgcaggctgccgaggtggcggcaggctgggaggctgccctgggtgaggcggcgcggcagcaggccctcaccactcaccgcaagcgcctggcagcgtgagagcaccgctggtgtaagcaacaggatagccaacaacccatcggctgctgcctgccgcatgccggcactctagtgcacgcaccacgatagcaacagctggccgccgcatgccggcagcccgtaacctttgtatgctcacccccctacgttcttttgcatgcctgctaccttctgcc

SEQ ID NO: 3560 - DNA, 91 bp, Chlorella sorokiniana
  Clone ID: LIB3602-044-Q6-K1-F10
aaaaaaaaaaaaaaaaaaaaaaaaaaaaaaaaaaaaaaaaaaaaaaaaaaaaaaaaaaaaaaaaaaaaaaaaaaaaaaagggaaaaaaaaa

SEQ ID NO: 3561 - DNA, 478 bp, Chlorella sorokiniana
  Clone ID: LIB3602-044-Q6-K1-F11
accaaggtcatcccccgcaacaccacgctgcccaccagcaagaacgagatcttctccaccgccgccgacggccagacgagtgtggagatcaacgtgctgcagggcgagcgcgagtttgcgcgggacaacaagtcgctgggcaccttccgcctggacggcatcccgcccgcgccccgcggcgtgccccagatcgaggtgcgcttcgacattgacgccaacggcatcctgtccgtgaccgccaccgacaagggcaccggcaagaagcaggacatcaagatcacgggcgcctccaccctgccctctgacgaggtggagcgcatggtcaaggacgcggagcgcaacgccgaggacgaccgcaaggcgcgcgagttgattgacaccaagaaccaggccgactcgatggtctaccagaccgagaagcagctcaaggagtttgcagacaaggtgcctgaggatgtgaagaccaaggtggaggcca

SEQ ID NO: 3562 - DNA, 469 bp, Chlorella sorokiniana
  Clone ID: LIB3602-044-Q6-K1-F12
gggtcgctggcgacccaaatagggtcgattctagaggcagcggcacacacaggcgcgcctggcgagccgctgctcagggggcagttcagccggccggcgccctcggtaccccccgcatgaggctctcggcgtcttcaaccgatgcccaacggcgaatcactttctttctttctttctttcccgcatgaggcactgcctggcaaccctcagccagggggcgaggcaatgcgaccgaacgaattctgaacgtgtgcaactttcgagcgtgtgtggtgtccgactgcctgcccgcccttgtgcaacttatgtgacccaagtcgtctgcatttttgtgcatgtagctctggtgtattctgtcgttattttgggtgtcgtgcgtgtgccgtgcagccacagctgtctcccagctggcgagcaccggttaacatgcagcacgcaaatttctttggttgacttctttcattacatt

SEQ ID NO: 3563 - DNA, 164 bp, Chlorella sorokiniana
  Clone ID: LIB3602-044-Q6-K1-F2
cccagctggaggggccggcgccaccagcagcagcggccttgggcggggcagcggcaaggcgcccacgctgggtctagcacaccggcggtgaagtgccccatgtctcctccgcctgtttgaacgactgtcacacttcagcactgacagtgtaatgttgaatctat

SEQ ID NO: 3564 - DNA, 401 bp, Chlorella sorokiniana
  Clone ID: LIB3602-044-Q6-K1-F3
cggcccggccggcgaggtggtggaccccatctaccccggtgaggcctttgaccccctgggcctggctgacgaccccgacaccctggctgagctcaaggtgaaggagatcaagaacggccgcctcgccatggtgtccatgtttggcttcttcatccaggccattgtgaccggcaagggccccgtgcagaacctgtccgaccacctggcctccccctccaccgacaacttctactccctgtacgccaagaccctggcgtaagcggcctgcacttgctcctgcttgagcctcgactggcggcgggcgtgaccctgtggcagtgcgctcccgcttgcgcccgctgcctgacttgacttcagctccactgttgcaccgaggggatggtgtaacatgtatgctgggg

SEQ ID NO: 3565 - DNA, 242 bp, Chlorella sorokiniana
  Clone ID: LIB3602-044-Q6-K1-F4
gtcgcgctggccgccactgccgccctcttgctgtttcatttcccacggaggttttgcacgtcctcggtaccatttcagccgcgtcgcctagcccctacccattgcgcgccccacttagcccacccccgcctcccccgaagacggtggctacccaccgcccctgacgccgccgccgcgcacttttgcaccccttgagcgggatgctccccgcccgcacggctcacatgtaagctctcagagcg

SEQ ID NO: 3566 - DNA, 85 bp, Chlorella sorokiniana
  Clone ID: LIB3602-044-Q6-K1-F5
gtcattttgaaaaaaaaaaaaaaaaaaaaaaaaaaaaaaaaaaaaaaaaaaaaaaaaaaaaaaaaaaaaaaaaaaaaaaggagaa

SEQ ID NO: 3567 - DNA, 451 bp, Chlorella sorokiniana
  unsure (1)..(451): unsure at all n locations; Clone ID: LIB3602-044-Q6-K1-F6
cggacgcgtgggacaatatcgaaccgccaaccgacgatcccgccatgatacaggccccctttcgtcacctctttttcagcatgcctcccctgtgcatctgctctctcttccctgctccccgagccctgctctccgcttgctgcctgcggccgcctgcatgaagcggcgctcgtttttgcttcagtgctcatcagccatttccagttgccgttgtaagcacagcatcgtgaaaaaaaaaaaaaaaaaaaaaaaaaaaaaaaaaaaaaaaaaaaaaaaaaaaaaaaaaaaaaaaaaaaaaaaaaatanaataaaaaaaaaaaaaaaaaaaaaaataataaaaaaaaaaattaaatttnttttaaataaaaaaannggggggggcttttttaagaaatcaattttttataccggtttttggacaaaaaaattttttttatggggcccccaaaaa

SEQ ID NO: 3568 - DNA, 479 bp, Chlorella sorokiniana
  Clone ID: LIB3602-044-Q6-K1-F7
gcatctggtaattttgcgcccccagctttgctggccttatgatggctgggcctcaaaggacatgatgcgcgctaccaagctcgtgctggctctgttgctgacatccctgctggctcggcccgctgcttctgttgaagatgtgcccaccgtcgaccagccggagcgctcgctgaacatggaagtgaagcccgagccatgccccaagggtgacgataaatgcttggcccacaagtaccgagttgcgctgctgcatgccctcaccacgatcgagactccgccgtccaaagcggaatacctcgactgcccgacaggctactgcccctgcctgacatgccccaacacctgctgtggcaaatgcatggatgccacaagccctcagtgcaccagcatcaagtgccttttcggctggggctcatgctcgtgaggccacttaagtgaagttaagaagcttctctgttgaacactgcctagcatgcttc

SEQ ID NO: 3569 - DNA, 456 bp, Chlorella sorokiniana
  Clone ID: LIB3602-044-Q6-K1-F8
gaaggaagcgtctgagtcgggacaaagatggcgaccgctatcaagcctgcccagaagccgggtgtggaggaggccgaggccgcccccatccaccgtatccgcatcaccctgacctccaagaacgtcaagagcctggagaaggtgtgcgcggacctggtgcgcggcgccaaggagaagcagctcaaggtcaagggccccgtgcgcatgcccacccgcgtgctgaagatcaccacccgcaagtccccttgcggtaacggtaccaacacctgggaccgcttcgagatgcgcctgcacaagcgcctgatcgacctgcactcccccgccgaggtggtgaagcagatcacctccatcagcatcgagccgggagtcgaggttgaggtcaccatcgccgacgtgtaagcagccatttcagctgtggaagctggtcgcacggtgcgcccctgaccgccgctggcg

SEQ ID NO: 3570 - DNA, 419 bp, Chlorella sorokiniana
  unsure (1)..(419): unsure at all n locations; Clone ID: LIB3602-044-Q6-K1-F9
tcattccaggctttgttgcccctgggctaaactgaccggtacaggcgtttgcttccgtagcccccactcctgactggcttagcacattagcttcgtgttgtctcgacccttcggtgcttttgcccatgtgatagccccccttctttcatcgtctctgtcgcaccctgcatgccttgtccccagtgccgtgcccctgtcttgctgctctagcgcgtgtgtgtgcaaggcaaggcacgaggcctgaacaaccctaggtgtagcttgcatctgtcgccgctctcgccccgactgtagcttttgcctgactgcgcgaatcgccactgataaggcccttctactgctgacttttttactgagcgtgtgcgggtgtaattggctgccngccccaacaagtaaacaaacatttaagaatgagaaac

SEQ ID NO: 3571 - DNA, 483 bp, Chlorella sorokiniana
  Clone ID: LIB3602-044-Q6-K1-G1
tgctggcctgctgccatggcaggcatgtgcctcacactccccaatctagcccccgtctctccctgccccttttcccctgccctctccctgcctgtcgcttcgtgctgctcccatcctcattcgccgcgtgcagttgcgggccgctgccaagaaagtgacgcagccgatgcattcatctcccagcaccgctttgccattcgtacccccctgattccccatttcccaactcaactcgcctgctcggctgtgagcacaagcacgccaccaaccttccgccacatccatcctgctacagccctgctacagccgtacctgcgcactccacccttttcctagcccccatttcgttgccccgacctctttttcccgccgccgccgctaccaaccaagccgccagtgcaaggccctctgcggcgctgtgccaaccggccacccctgcctgcacaacatgcctacctctttccctatgcgcgctttgctgcg

SEQ ID NO: 3572 - DNA, 431 bp, Chlorella sorokiniana
  Clone ID: LIB3602-044-Q6-K1-G10
tccgcggcggcctggtcttctgggcagacctgatgggcgcagagtacatccgcgggcggctggcggcctgggcgcagcagtttgcggcggcagggctggacggctttttcaagccctccgcgtacctggaggcgtgcgcgcgctccggcgccaagctgtcagccggcaagaacgcggcctccaagatgtgaggctccacggctgctggcgctgctgctgctgccgtattggcgcagtgttgcagccgccggacgcaggccatgtttgccgcacctggaatgaatgctcaacgccgccgcccggcaaggcccgtttctactctttgctacgtagcgcttctgttttccgtcagcgaatcccagttttgaccaatccaattttggtagcgtgccagaccttgcttagcgagcgccgaatgtaaatgcttgctt

SEQ ID NO: 3573 - DNA, 478 bp, Chlorella sorokiniana
  Clone ID: LIB3602-044-Q6-K1-G11
atccgcatccgcggtgtgaacgacatcgaccccaagaccaagaagatcctgcaggtgctgcgcctgcgccagatcaacatgggcgtcttcctcaaggtgaacaaggcgaccatgaacatgctgcagcgggtggagccctacgtggcgtacggctaccccaacctgaagaccgtcaaggagctgatctacaagcgcggctttggcaaggtcaacaagcagcgcatcccgctcaccgacaactcggtgatcgagcaggtgctgggcgacaaggacatcatctgcgtggaggacctggtgcacgagatcttcaccgtgggccccaacttcaagcaggccaacaacttcctgtggcccttcaagctgtcctcccccaagggcggcatcgacaagaagcgcctgcactacatcgagggcggccaggccggcaaccgccaggagtacatcaacaaccctgtgcgcgccatgaactgagcgctga

SEQ ID NO: 3574 - DNA, 347 bp, Chlorella sorokiniana
  unsure (1)..(347): unsure at all n locations; Clone ID: LIB3602-044-Q6-K1-G12
ggtgaaggagatcaagaacggccgcctcgccatgttctccatgttcggcttcttcgtgcagggcctggtgaccggcaagtcccccctggaaaacctggctgaccaccttgctgagccgtctgtgaacaacggcttcgcgtccgccaccaagttcctgcccctggcctgaacgccgtcgtcaacctggagcgacctgngcatcccatattaacggcggccagccggttttggacaagcacacacaacatatgagattcccaacctccctgcgcactgcttgtaacaatcctggctccctcttgtacccttgacccgcactcgggcgtggatatgtaacgttccgcggg

SEQ ID NO: 3575 - DNA, 481 bp, Chlorella sorokiniana
  Clone ID: LIB3602-044-Q6-K1-G2
gcgctgagagcgcaccaccccccactcaccttgatagtaccaaccctacacctccgccctcacctgcgacgttctcttccgagctagcgcctctttctgtaactgcctagttctaaactaaaacgccgagtgcagatgcgggccgatgacaagaaagtgacgcaaacgaatgcatacatctaccagcaccgatattgccattcgaaccccgggtggtccccatataccaactaaactcacctgctcggctgtgagcacaatcactctaccaaccttccgccacatccatcctgctgcagccctgctaaaaccgtacctgcgcacaaaaccctgttgctacccaacatattggtgtcgcgacctatttctctttccgccgtcggtaccaaccaaaaaggccctgcacggacctctgttgcaatgagtcaaccagccacaattgccagtgcaacatgcctacctctgtccctatacgcgctgt

SEQ ID NO: 3576 - DNA, 484 bp, Chlorella sorokiniana
  Clone ID: LIB3602-044-Q6-K1-G3
ggcctgctctgcggcccttcatacctttgtacctttctgtatcatcttgcagcaatggcagccggctgcatctttctaacatcgtcaccggcccactcgtttgtgccatgcccacctgcctccaacgtcacccttcatcaaccctcacccaacccatccacctgccacccatccactcaccttccctccgccacaacctctgccacccactcaccacccatcacccgctcaacgccctccatgcaccatcctccccatccaccaaatctgccaccccaaacgcacgtccgccgctgcaccacctgccgccccctcacccgcacccatcttccacccgccacctttcctgccgctcaccgccgcacatcctacctcccacacctcactccatgtccacccttcacccgcgcttcacacagcggctgctgccatgcaaagctgctgccaaacccatccatcatgctcgcacacccactcacccaca

SEQ ID NO: 3577 - DNA, 87 bp, Chlorella sorokiniana
  Clone ID: LIB3602-044-Q6-K1-G5
aaaaaaaaaaaaaaaaaaaaaaaaaaaaaaaaaaaaaaaaaaaaaaaaaaaaaaaaaaaaaaaaaaaaaaaaaaaaaaaaaaaaaaa

SEQ ID NO: 3578 - DNA, 480 bp, Chlorella sorokiniana
  Clone ID: LIB3602-044-Q6-K1-G6
acggcggcaagaaggagatcatgaagatggtggcgcccgcgggccccatgtaccaggcgggcaccctgtcgggcaaccccctggccatggtggcgggcatcaagacgctggagatcctgggccgccccggcgcctacgagcacctggacaaggtcaccaagcgcctgatcaacggcatcctggacgccgccaaggagacgggccacgccatgtgcggcggctccatctccggcatgtttggcttcttcttctgcgagggccccgtggcctcgttcgaggacgccaaggcagcagacaccgccaagtttggccggttccaccgcggcatgctggagcacggcgtgtacctggcgcccagccagtttgaggcgggcttcacctcgctggcgcacaccgaggcggacattgacgccaccatcgaggcggcgcgcgcggtgctcaagtcgctctgagcggcgtgagctgagcgtgcggcgcgga

SEQ ID NO: 3579 - DNA, 312 bp, Chlorella sorokiniana
  Clone ID: LIB3602-044-Q6-K1-G7
gggctttctacgcgaagcagacgccgctggttgcactggcggtgatggccgggcacatggctgcggaggtggtgtcttgagggcttttgactggacgaaatggtgtgggttggccactcctgcgcacctgcgcttttctcgaaggcatggtttgtattctagctgcacagtatgtttgccaggccatgttgctcacttgacgcacgttagtcgccctctgcccactatcgttcctgcaccctgtacactaaacatgctcaggctcgttcccatgcacatccttccatctggctgtaaccgtctggcagcgaa

SEQ ID NO: 3580 - DNA, 482 bp, Chlorella sorokiniana
  Clone ID: LIB3602-044-Q6-K1-G8
cggacgcgtgggccgcccccaacatcaagctgttcaacgccaccgccgccgaggacctggtggtgaagcaggacgagaagaacggcaagtacgtggcgggtgcagtgaccaactggacgctggtgtctctcaaccacgacacccagatgtgcatggaccccaatgtgatcgagtccaaggtcatgatctcctcctgcggccacgacggccccatgggcgccgccggcgtgaagcgcctcatgcgcctgggcatggtggagaaggtgccgggcatgggcgcccttgatatgaacaccgccgaggactctgtggtggaccgcacccgcgaggtggtgcccggcatggtcatctgcggtatggaggtggctgagctggacggctgcccccgcatgggccccacctttggcgctatgtacatgtccggcctcaaggctgcccaggtcgcgctcaactccctgcgccggcagcaggaggaggaggcg

SEQ ID NO: 3581 - DNA, 176 bp, Chlorella sorokiniana
  unsure (1)..(176): unsure at all n locations; Clone ID: LIB3602-044-Q6-K1-G9
gaactccctcctgttccacttacgtgtattgctggcctgtacccatggctttcgtttgctgctgctccctccgcatgggcaccacggtgccaccccttgcaaaaaccgattatttaaaaaaaaaaaaaaaaaaaaaaaaaaaaaaaaaaaaaaaaaaaaaaaaaaaaagggnggnc

SEQ ID NO: 3582 - DNA, 407 bp, Chlorella sorokiniana
  Clone ID: LIB3602-044-Q6-K1-H1
ccgatcccggtcgacccacctccgaaaaaaaaaaaaaaaaaaaaaaaaaaaaaaaaaaaaaaaaaaaaaaaaaattataaaaaaaaaaaaaaaaaaaaaaaagggaaaatttgaagggtcagccccgccatattctgcttggccttagggggcccccttttagggtccactttcccccccttttttgctttgtctttttttttgtgccccaatcctttctcgcccgtttttccactctgtttgaaccctcttggttccccaattattccttttccccctccccttttcccgtttggttttaccaaaggcccccccattcctttccaaattttcctcctcatgcttttggccccccctttcccgcctttttccccgcggttggtggtcccccatttcccttcttttcc

SEQ ID NO: 3583 - DNA, 467 bp, Chlorella sorokiniana
  Clone ID: LIB3602-044-Q6-K1-H10
gccaccacccaattctagccctccgaaagccccagcgccacgatgctgcgcctcgacgcctccaccctgctcaagcgggtgtgcctggcgcccgccacctgccagtccagcctgtaaactgcttcgacatctatgacaaacatgctgaccatgcgagacgcacacggtgaagagagcgctggctcttactacactgcaattccaaacgctattgtccacaaccccaaggctatcaagcgcaaatccaacctggcgttctccacgcatggcatgcccaacatggacaccacctccattgagggctgcctcaagggcgcctacgtggtgcacagcggagactgccaacccagatgtatactgataggcactggatacgagctggtgatggctgtggatgccgccaaaaagctggaagctgacggcaagaaggtccgcgtggggtccatgcactgttgggagctgtttga

SEQ ID NO: 3584 - DNA, 447 bp, Chlorella sorokiniana
  Clone ID: LIB3602-044-Q6-K1-H11
gcggcagctacgagcaggagtttgcggctgagatggcccgggctaaagagggcaaggccaaggccacgccctggggcagcggctatgccaaggcccccgaaatcctgcacggctactccaagaaggtcaagggcaagacggcggaggagcggctagacatgcgggcagcaatgaagtcggacaagttctgccgctaaatcagcagcaagttgtattggctgacaagagaggattgcttcagcgctggagcaacgcacgagacaacggcggatgcgcatgttcgtgtgtcgccacaactgtcacctcagccccaacatctcgaccctgactgtaccatagttgactgacgaagctgttagcaaacaggtccaggagaacaggagtttgattcggcaaggccacggctggtggcggcggcagcggcggcggctggcatgcccgtgcatg

SEQ ID NO: 3585 - DNA, 119 bp, Chlorella sorokiniana
  unsure (1)..(119): unsure at all n locations; Clone ID: LIB3602-044-Q6-K1-H12
cgnacacctgggcccctggcggcgggcttcgaccgcaacctgcggcgcgcgctgctgaaccttgaagccttcaagggtggantatttccccttcacagacgaccacaatttgcggcccc

SEQ ID NO: 3586 - DNA, 482 bp, Chlorella sorokiniana
  Clone ID: LIB3602-044-Q6-K1-H2
acgacaccagccagcgctccattttgtccatgtttggcaagaagcggccggccgaggcagctggcaaggctgcaggtgggatgggagcagcagcaggccaggcggcaggcacagcggcaggcgggggcggcagtggtgcggcggcagctggggctggagatgcagcaggcgcagcagcagcagcagcagcagccgggtctgaggaggcaagcggtgcagcagagggcagtggcggcagagggcagcaggacattcagcagcagcaggagcagcagggcgctgagcaagagcagctagcgaaaaagccgaggcaggaaactgtgcctggcgcagaagagctgccatcaggtgacggtggggcagcagcgggcaggagcagggcggagactgggccagctgggggcggcaggcagcagcagtcggcacgcagcggcagcagcggcgggaggaaaccagcaccaagtggcggcaggggcagggga

SEQ ID NO: 3587 - DNA, 482 bp, Chlorella sorokiniana
  Clone ID: LIB3602-044-Q6-K1-H3
gcgcgaccacctgcagacggcgctggcgtgcttgaccaccgtgtagcttagcaaacatggcggtcggcaagaacaagcgtctgtccaagggcaagaagggtggcaagaagaagattgtggaccccttcagcaagaaggactggtatgacatcaaggcgcccagcatgttcaacacccgcaacgtgggcaagaccctggtgacccgcacccagggcaccaagattgcctccgatggcctgaagggccgcgtggtggaggtgtctctggccgacctgcagaacaacgaggccgatgcctaccgcaacatcaagctgcgcgtggaggacgtgcagggccgcaactgcctgacccagttctacggcatggacctgaccaccgacaagctgcgctccctggtgcgcaagtggcagaccctgattgaggccaacgtggacgtgaagaccaccgacggctacttcctgcgcgtgttctgcatctccttc

SEQ ID NO: 3588 - DNA, 470 bp, Chlorella sorokiniana
  Clone ID: LIB3602-044-Q6-K1-H4
cactcagctacgcgcagctgaagccggtgccctgcaagagcacgcctgaggcgctgcggctgcgcgacagccaggccacagacatccagaagcaggtgcgggaggatgtgactcggtccgctacagagacgagcagcacctggacgaggcgcttacccgcatcttcaggtttgggcaggcgggcggcatcccgcggcggctgtgccccattctcaccggcctgcgggaggaggtggtggacggccagtacgcgctggtgctggagttcaccaccaagaaggagcagatgacgcaggagatgtgggaccagcggctggacaagatccagaccttctttggccccggcatcgtcgccaagctgaaggagacggagcagggcatggacgtgtccctcatctgcaacggcagcggcgcggggcgcggcggcggcgagaagaaggacgtgctgccgccgctgatgccaggcatga

SEQ ID NO: 3589 - DNA, 394 bp, Chlorella sorokiniana
  Clone ID: LIB3602-044-Q6-K1-H5
cgctcacggcgtcccagtgcaagcgcgcggccacgcagcagctgcacgacagcaagatcagcttcccgctggcgcgcaaggtgctgcgcccctcgtcccgcaagttccgcaccaccttcaaggcggtgcgccccaacgtggccatctactgagcgcctcgccccaaggcggctcgcggccacactggcggcagcagcggcggcggcggcgacccagcttgtgctctggagcggcgccgctgaggaggagaaggctgcccggccggcgggcggccgccgcaggagtgcgcggcggcgccgcaggcggcagccggggggcggcggcagtgcgccccgcccccgccctgtagcccggttgggtgcaaggctgcaggcgcgtgtaaacacccgcttgc

SEQ ID NO: 3590 - DNA, 478 bp, Chlorella sorokiniana
  Clone ID: LIB3602-044-Q6-K1-H6
cggacgcgtgggcgcctggcggcgggctgcgaccgcaacctgcggcgcgcgctgctgagcctggaggcgtgcagggtgcagcagtaccccttcacagacgaccagcaggtggcggcccccgactgggagctgtacatccaggagattgcgggggacgtgctgcgggagcagacgcccaagcagctgtttgtggtgcgcggcaagctgtacgagctgctggtcaactgcataccgccagagatcgtgctgcgcaagctgtgcctggcgctgatgcccaagctggacgacgagctgcggcactcgaccgcccaggacgccgcattctacgagcaccgcctgcaggagggctccaaggctatctttcacctggaggccttcctggcccgcttcatgtccaactacaagcagtacatgatctcgttgggcctgtagcggcttggcggatccggaggtggtacccgctcggcatggaggcatg

SEQ ID NO: 3591 - DNA, 480 bp, Chlorella sorokiniana
  Clone ID: LIB3602-044-Q6-K1-H7
ctagttttagatcgcgagcggccgctcgcgatctagaactagtatcatggcaaggctggtcaggttgttgccacctactgatgcgatggcagcagatcagcccaaggccgtagttcctgacttggccagcaaactgcacatgaggctgcaggagtacatcaacagggtgctggccagcctttcagatgccagccgcgctcttcacatggacggatttgctgcaggctgtaattgccttgttgtgatgcatgaggccatgaaggctgtgccggactgcatgcggccgttaattgggcctttgctgcggtccatgcatcgtctggccaaagaacacaaccaatcccccacagcggggctgctgtctgccaaacccgaccagcctgcaaagctgcagccaactgacgacacctatggctctggctcctggttcatgtggaacgccctcaatgtggcggtgccatctgcactgaccttgtcagc

SEQ ID NO: 3592 - DNA, 378 bp, Chlorella sorokiniana
  Clone ID: LIB3602-044-Q6-K1-H8
tgcccaccaagatcctgtggatccgccgcatgcgcgtgctgcgccgcctgctcaagaagtaccgggacagcaagaagattgaccgccacctgtaccacgagctctacctcaaggtgaagggtaacgtgtacaagaacaagcgcgtgctcatggaggccatccacaagcagaaggcggagaagatccgcgagaagaacattgcggaccagctggaggcgcggagcgccaagaacaaggcggcgcgcgagcgcaaggcggtccgccgcgaggagcgcttcgcgcagggcgtgaccgccgccaccgagagccagaagtaagcggctccgtctcggcggcagcagccgcggcggcgggcgactcattgtgctcccaccgccg

SEQ ID NO: 3593 - DNA, 483 bp, Chlorella sorokiniana
  Clone ID: LIB3602-044-Q6-K1-H9
ggcgcaaccccatgcgcatggctgccctgtctgaggccggcgtgctgttcgtgatgacccacgactctatcggcctgggcgaggacggccccacccaccagcctgtggagcacctgacctccttccgcatcatgcccaacatgctgaccatgcgccccggtgacggcaacgagaccgcgggctgctactacgcggcggtgcagaacgccatggcgcagaaccccaagggcatcaagcgcccctccaccctggtgttctcccgccagggcatgcccaacatggacaccacctccattgagggctgcctcaagggcgcctacgtggtgcacggcggcgacgccaagcccgatgtcatcctgatcggcactggctccgagctggtgatggctgtggatgccgccaagaagctggaggctgagggcaagaaggtccgcgtggtgtccatgccctgctgggagctgtttgaggagcagccgcagagct

SEQ ID NO: 3594 - DNA, 347 bp, Chlorella sorokiniana
  Clone ID: LIB3602-045-Q6-K1-A1
gctggacgagcgtgtgggtcaaagtcgcctcgcagtgggtcaccgtcgcgctctactgctggacgctggtcgcacccgtcctcttccctgaccgcgacttcagctagggcgtggccagctgatcgctcctgcgtaccgtgcctccgtactgcgcgcgagctgtaatatcagcctgacgacttgtaccaaccgacctgcacgctgcctcctctgtgtttcattgcgggctgtgccctctgcctactaccctactatgcgccccgcggctcttgccgatctgctgtaagccaagccagcacttaaaataaaaattatcaaaaaaacccatataacatgatatttatatg

SEQ ID NO: 3595 - DNA, 462 bp, Chlorella sorokiniana
  Clone ID: LIB3602-045-Q6-K1-A10
accacattgatcagctgcgccagctggcatccaacccgctggacgctctccgccgcaaggagtgccagctgcacatcacagccacctacttgccgctaacagagcaagaactggctgccatggagcgagaagcggggcggcagcggagcggtggagggctggcggccatgcagcgggtcagcacgctggcggctaccagcccgcgcatcgccaacctgctgcacagcggcgtgctgtacgtgtatctggaccgagccgagaatctggccagctccacggcccagggcttcacacgcaacatgaaagtcaaagtgcgggtgggcggcgtgacgaagaccacggagcgcggcaaggtgtccttccgccaccgctccaaccccgtgtttgacgaaacgcttgagctggtgctggatggcagcctgacgcggcaggcagacctggcggtacatgtggaggtgtggg

SEQ ID NO: 3596 - DNA, 114 bp, Chlorella sorokiniana
  Clone ID: LIB3602-045-Q6-K1-A11
aaaaaaaaaaaaaaaaaaaaaaaaaaaaaaaaaaaaaaaaaaaaaaaaaaaaaaaaaaaaaaaaaaaaaaaaaaaaaaaaaaaaaaaaaaaaaaaaaaaaaaaaaaaaaaaagg

SEQ ID NO: 3597 - DNA, 450 bp, Chlorella sorokiniana
  Clone ID: LIB3602-045-Q6-K1-A12
cagcgatgactcccagatgtacatcctgatgcgcctgctgggtggtgccaagaagcgcaagaagaagacctacaccaagccgaagaagcagaagcacaagcacaagaaggtgaagctgcgggtgctcaagttctacaaggtggacgacagcggcaaggtgcagcgcctgcgcaaggtgtgcccccagtgcggccccggcatcttcatggccacccacttcaaccgcgtgtactgcggcaagtgccacctgacgtacgtgtacgacaaggagggccagaccgcctaagcgccccgctcccccctgcggatgcacgcttagcagcagcacacgcggcgggtgcgcccggcatgccggcacaccagccacggagcggcggggcgtccctggcagcggcgcagcgcctgcaagcccttctgttgtgttctgtgccgctgtaatacccctgctgc

SEQ ID NO: 3598 - DNA, 330 bp, Chlorella sorokiniana
  Clone ID: LIB3602-045-Q6-K1-A2
aaagaacgagcgtgtggataaaaagacgcctcacagtgcgtaaaacgacgcgctctaatgatggacgctggtcgaacccgagctataacctgaccgcgacttgagctagggcgtggacagctgatctctactgcgtaccgtgcatccgtactgcgcgcgagcatcaaatatcaatctgacgacttgtaccaaccgacctgcacgctgactaactctgtgtatcattgcagactgagccctgtgcctactaccctactatgcgccccgtggctcttgccgatatgctgccagccaagtcagcataaggaaaacgtaaaaagcttaaatggc

SEQ ID NO: 3599 - DNA, 472 bp, Chlorella sorokiniana
  Clone ID: LIB3602-045-Q6-K1-A3
gtcggaggaggagcctggacgcaatggtgcagggcggctacaagtaccaccagtaccaggtggtgggccgccatgtgcccaccgagaaggagccggagcccaccatctaccgcatgaagctgtgggccaccgacgccgtgcgcgccaagtccaagttctggtacttcctgcgcaagctgcgcaaggtgaagaaggccaacggccagatcctggccatcaacgagatctttgagcgcaaccccaccaccgtgaagaactacggcatctgggtgcgctaccagtctcgtaccggctaccacaacgcctacaaggagtaccgcaacaccaccctgaacggcgctgtggagcagatgtaccaggagatgggcagccgccaccgcgtgcgctccccctgcatccagatcatcaagaccgccacgctcacggcgtcccagtgcaagcgcgcggccacgcagcagctgcacgacaggca

SEQ ID NO: 3600 - DNA, 461 bp, Chlorella sorokiniana
  Clone ID: LIB3602-045-Q6-K1-A4
ggggctcccatgacccactgcatttgtcggtttgtctgctcgacactaactcccgcctctcccctccacgcaggcgcccgcggcctgccctactccaccttcctgttcttctcgctgctcagctcaatcccctcaaaacaagcgtcccctccccactccgttccccctgtacacaggcgccctttccttccttattccaccttcctcttcttcccgctgcccacttcatctgcctgcaaattgacgaaacaaacttctgcctcccccccttctgcagacgccctttcctgccctactccacctttctgttcttcccgctgctgtacggcgcctcccgcactggcacacagtacgcggtcgccccggcggtggacatgcagcaggcggtgctgctggacaactctacgactgccattgcgagggtggacctgccgccgcctgaggccagcggcgtgcagccg

SEQ ID NO: 3601 - DNA, 457 bp, Chlorella sorokiniana
  Clone ID: LIB3602-045-Q6-K1-A5
gaggctacaatgaacccactgcatttgacggttaagtcagctcaacactaacataccgactataccatacacagcaagagcccctgactgcacctactccaccttcctagatcttctcgctgctcaacataaatcccctgggggcgggcgtccaagtagcccactccgttccccctgtgcacaggcgcccttttcttccttatttcaccttcctattcttaccgctgcccacttcatctgcctgcaaattgacgaaacaaacttctgcctcccccacttatgcagacgccctttactgccctactccacctttttgttcttaccgatgatagacggcgcctaccgcactggcacacagtacgcggtcgccccggcggaggacatgcaccccgtggtgctgctatacaactctacgactgccattgctacgctagacctgccgccttctgatgccagc

SEQ ID NO: 3602 - DNA, 468 bp, Chlorella sorokiniana
  Clone ID: LIB3602-045-Q6-K1-A6
ggcgcggcgggttcgcgtgaagggccctcgcggcacgctgcagcgcgacttcaagcacttggctgtggacatgttcctgactgaggaggagggcaagaaggtgctcaaggtggactgccactttggcaagcgcaagagcctggcgtccatccgcacctgcacctcgcacgtgcagaacatgatcaccggcgtgaccaagggctacgagtacaagatgcgcctggtgtacgcccatttccccatcaacatcaacatcgagaacaagggcggcaaggtggagatccgcaacttcctgggcgagaagattgtgcgcgtggtggacatgctgccgggcgtgacctgcgagcgcagcgccgccgtcaaggacgagctgatcctgaccggcaacgacatcgagctggtgtcccgcagcagcgcgctgatccaccagaagtgcctggtgaagaagaaggacatccgcaagtttcc

SEQ ID NO: 3603 - DNA, 479 bp, Chlorella sorokiniana
  unsure (1)..(479): unsure at all n locations; Clone ID: LIB3602-045-Q6-K1-A7
cggacgcgtgggtgctgggcaacctgggcctgcccgccgagtttgccacccactcccagatccgcggcctgtcgggcggccagaaggtgaagctggtgctgggtgccgccatgtggcagcagccccacatcctggtgctggatgagcccaccaactacctggaccgcgagtccctgggcgccatggcctccgccatcaaggagtacggcggcggtgtggtgattgtgtcgcatcaccacgagtttgtgaaccaggtgtgccaggagaagtggaccgtgggcggcggcaagctggaggtgaccggccagtccgcggccgctctggaggccgccaagctggagtggaagcgccaggaggagaccaccgacgccttcggcaacaccatcaagatcaaggcccccaagaaggagctgtcgcgcaaggagaagaaggccaaggccaaggggccaacgccgnnccgccgcgccgcgccggggccg

SEQ ID NO: 3604 - DNA, 467 bp, Chlorella sorokiniana
  unsure (1)..(467): unsure at all n locations; Clone ID: LIB3602-045-Q6-K1-A8
cccacgcgtccggccgcgctcggctgcccacgtgccctgctgccggctgtgctggggcatgggccccgctgcatcacgctgtgctccctcatgtacggcctgccgctcaggtgggtgctgctccagctggtggctgtgaccgccgccttcctgtggcacacccccgacttttgccggcaccacgccggctgcggcctgctggcatgccaagccagctatacagtggcgctggtggcggtggcggctgccatagcttgcgcgctgacctctgccaagcagcccggccgcttctggtcatggcggccgtggcggcacgaataaggcggcacatcaatcacatcaggccgtgcagcggcgcagcccttgttccttattgccatgcataatacttccattcatgccactagtcgctcctaaatttcttgccttgtcagtgcagccatgtgatttgaggagtgtgncgcctg

SEQ ID NO: 3605 - DNA, 61 bp, Chlorella sorokiniana
  Clone ID: LIB3602-045-Q6-K1-A9
aaaaaaaaaaaaaaaaaaaaaaaaaaaaaaaaaaaaaaaaaaaaaaaaagaaaaaaaaaag

SEQ ID NO: 3606 - DNA, 152 bp, Chlorella sorokiniana
  Clone ID: LIB3602-045-Q6-K1-B1
gaacgcgcactgtcccggcgcattaacctccaccgttgtggcggatacgcacaggcgaaccggtacactctttagcgccctagctcccgctcgttgcggtatcttcccttcctttctggacacgttcgctggctttccccgtaaagctctaa

SEQ ID NO: 3607 - DNA, 293 bp, Chlorella sorokiniana
  Clone ID: LIB3602-045-Q6-K1-B10
gcggagcctggaccagcgcagctgatatggcagcagtaaagcagctgcatgagtgaacaacatagagaatcgctgtacagaccatgtgcgtgcctgcatcggggccgtgctcacacatgacccttgacctccactgttcttttgagcgctgtagagcctgcgggttcctccacccgcctttcaaactgagctgtcaatgctcgtaatcaagcagcgtgcttccctcctgcagcactttctgtacacagtgtggctttccttcttgctttacaacttgcaaagcgaacagccga

SEQ ID NO: 3608 - DNA, 467 bp, Chlorella sorokiniana
  Clone ID: LIB3602-045-Q6-K1-B11
gtcggaggaggagcctggacgcaatggtgcagggcggctacaagtaccaccagtaccaggtggtgggccgccatgtgcccaccgagaaggagccggagcccaccatctaccgcatgaagctgtgggccaccgacgccgtgcgcgccaagtccaagttctggtacttcctgcgcaagctgcgcaaggtgaagaaggccaacggccagatcctggccatcaacgagatctttgagcgcaaccccaccaccgtgaagaactacggcatctgggtgcgctaccagtctcgtaccggctaccacaacgcctacaaggagtaccgcaacaccaccctgaacggcgctgtggagcagatgtaccaggagatgggcagccgccaccgcgtgcgctccccctgcatccagatcatcaagaccgccacgctcacggcgtcccagtgcaagcgcgcggccacgcaaccagctgcacgg

SEQ ID NO: 3609 - DNA, 459 bp, Chlorella sorokiniana
  Clone ID: LIB3602-045-Q6-K1-B12
gtggaccgcacccgcgaggtggtgcccggcatggtcatctgcggtatggaggtggctgagctggacggctgcccccgcatgggccccacctttggcgctatgtacatgtccggcctcaaggctgcccaggtcgcgctcaactccctgcgccggcagcaggaggaggaggcggccgctgaggcaggccaggagggcaaggagatggtggccgcctaagccagctggactcgccacagctcctcgcctttcaagcctttcaggctggcgtagcgctgtccgcagcagccgccagtcagctgcaagtgtacttcagcctttgttgaactcgctgccgcctctgattgcgccagtcagcagctactttgcccaacacacgccgggggttccctgggcgggcttccatcccgagcaataatgccatgcagcgctgaacgccacacgacacacccctttcagaga

SEQ ID NO: 3610 - DNA, 405 bp, Chlorella sorokiniana
  unsure (1)..(405): unsure at all n locations; Clone ID: LIB3602-045-Q6-K1-B2
gtggctcctagacagtggtgatgggatcgcgcgggctgggcatcaccaagcgcgcgctgttcaacctgctggccgtgggatcagtctctgactatgtggtgcaccactccaagtgcaacgtggtgattcacaaggaccccagcgcggtgaaggcggccgcgggcagcagctcggagtgagagctcttctgtgaatggaaagcggtgaccattcgaagcggcgtggcatggacgcactctttcaccgcgcggcgtggttcggcaccgtctagtcgctgcactctggtctcggtctgtccatgtgggccactctggatgggccatgttcacacattccctgntaaccaccaccagctanaaaaaaaaataaaaaaaacaaattaaaatatatgtactacctttttaa

SEQ ID NO: 3611 - DNA, 89 bp, Chlorella sorokiniana
  Clone ID: LIB3602-045-Q6-K1-B3
aaaaataaaaaaaaaaaaaaaatggaatcgcacaaacatgaacataaacaaaacacacactgaaaaacctgaaaaaacaaaggaacaag

SEQ ID NO: 3612 - DNA, 462 bp, Chlorella sorokiniana
  Clone ID: LIB3602-045-Q6-K1-B4
gaccagtatgggtatgtcatggcgagtgtagcgctgaccacggcccttgtgcagtggcaggccattcgtgtggccatcgcgcgcaggaaggtcgggctgagctaccccaagatgtttgcggagggcgactctgaggaggcccgcgtgttcaactgcacccagcgctcccaccaaaacacgctcgagtacttcacaggcgtggtggcaatgcaggcgctgctaggcctgcagtaccctctggtggcggcggcagctggcaccacatggacgcttgcacgcgtggcgtacacgctgggctacagcaccggcgatccgtcaaagcgcgcaccaggcgcaattgccagcggcctgatccacgtgctgctgattctgggcactggagtgacgggagtgcgcattgcaactggactgtgaggccagtcagcccagccgccaggtggctgctgcactgggagtgaagct

SEQ ID NO: 3613 - DNA, 463 bp, Chlorella sorokiniana
  Clone ID: LIB3602-045-Q6-K1-B5
agcagcagccctaggcggtcccgaagcaggaagcgcaggcggcggcggtcggcaagccggggcaggcagcggcgacgcagcggcagccgcgaagatgatcgcagccgcagcagcagcggcagcggcagccggtaccgcagccgccaccacagcaggcacagcagtcaccgcaggcagcactcgcctcggcgcagcaggggccgcagccgcagcagggagcggcggcggtgctacgtcagcccttcccagtacattgctgggcaggaggacggcggcgaccgctgggcaatggaatgaagtctggacgtcaccaggcacatccattgaatgaatcaatcaatacccactcttcagactttctgcagctgaagcatttgtaccatatcgcccaggcatgtacatttgaccagggccctactctcagcctcctttgatgtcccattcctctgaattgttcgctggc

SEQ ID NO: 3614 - DNA, 476 bp, Chlorella sorokiniana
  unsure (1)..(476): unsure at all n locations; Clone ID: LIB3602-045-Q6-K1-B6
ggcaccgcacgtcctgcgccaagctgacggatgctgagcgtgtgaccccctcctcttcctttcaagcgctctccatgctgtgcattcagctgctatgaactctcgcccgctttatgtaccctatgcagcacccaagctcgcttatagacactatgaactgcttccttcgttatgcttactctcctaagctcacacgtgcatgctgctatgcatctagctgggtgccggttaccccaatgatcacctgtgcattgttctgactgaagacactatcaagcgatgttatcacattagaagctaccacccaccaggcacatccattgaatgaatcaatcaatacccactcttcagactttctgcagctgaagcatttgtaccatatcgcccaggcatgtacatttgaccagggccctactctcagcctcctttgatgtcccattcctctgaattgttcgctnggcagttgcattttaacc

SEQ ID NO: 3615 - DNA, 455 bp, Chlorella sorokiniana
  Clone ID: LIB3602-045-Q6-K1-B7
ggccagcaattcctgttcctgaagcagaagtgccgctcgctgttcaaccagcgcaagcggcccgccaagcttgcctggaccaccctgtaccgcaagcagcaccgcaaggacctggaggcgcaggttgcccgcaagaagcggcgcaacgtgaacaaggcggccacccgctccgtggcgggcgccagcctggaggtgatccagaagaagaagagcgagaagcccgaggcgcgcaaggcctcccgcgaggcggcgctgcgtgagatcaaggagcgcgccaagaaggccaaggccgacaaggcggtgcagaaggcgcaggccaaggcctcgggcgccggcaaggctgtcaagaacatgcctaagggcgcgggcaagggcggcgccaagagcaccggccgctaagccagcggcaatgcagcgggcgtagcggcctgctgggccgctgccgttgtaacgca

SEQ ID NO: 3616 - DNA, 458 bp, Chlorella sorokiniana
  Clone ID: LIB3602-045-Q6-K1-B8
cggacgcgtggggcgctacggccacgccggcgatgtgttcatccccaccatcggcttcatctactttgctggctggctgggctacgccggctccaagtacctccagaccgtggccaccgccgccaagcccatcgagaaggagatcatcatcgatgtgcccctggcctggaagctgctgtgggagggctttggctggcccctgcgcgccttcgccgagtacaagaacggcagcctgatggaggacgacgccaagatcaccgtctccccccggtaaattggcagcccttgtagcggcgccgcgcccatttgtgcgcgcgccagcagcagcagcagcagcagcttgtatcatgactgcggccgtgggaggaggccgcggcgggcaaaggcctgagagctaaccaaccaagctccctggttaaggcctggggagcgccggggtcggcgccgcgcagcacccc

SEQ ID NO: 3617 - DNA, 462 bp, Chlorella sorokiniana
  Clone ID: LIB3602-045-Q6-K1-B9
ccgactactacaacgcagagaagggcgacgcgctctatgcctttgagctggcgctggctctgcagaagctgaacatggacaagctcaaggcctgccactcgctggccgacaagtcggatgacttccaggcccaggatttcctggaggacgagatgagcgcccaggccaaggtggtgaaggagctgggagactatgtgtgcgagctcaagcgcgtgggcaagggccacagcgtcttccactttgatgagaggattgaccagggaggcctgactgctgcggcgtgagctgaccaggcagcaagttgcaaagggcgcagctgcagaaatggcctgcaagcccagcggcgccagcagggcggcaggcgtcggcggcggcaggcgtcggcgtggcatacgcactgatgcccacctgccacacaccactagcttgcgttgaatgatggttgatgaagatggcaacaaa

SEQ ID NO: 3618 - DNA, 467 bp, Chlorella sorokiniana
  unsure (1)..(467): unsure at all n locations; Clone ID: LIB3602-045-Q6-K1-C1
cggacgcgtgggcggcggcagggcgagcagcagcgcggcgggcagccgcagcaacaggcggctgccgctgccctggctgccggcacggagcagcatattctgctgctagggttggagtacgagtcggtagcaggtcagcgcctcctgctgacgcccgccctgctggcggtggccctgcagagttcccttgacagcgtgtcggtgcggcagcatgccccagcagcagcggcgacggcagggccggggccgcagacagccgctgccgcggcagctgcggcaactgtgccgcccacaggcgcagccgccttcctcatgcagcgtgacctgcccctgtggctacagctgcctggagagcagctggcgcagcttgccggcaagcggaggagcgctgcgggcgggcccggcggcagtgaccgcccagcgtggctgcagctgcgccggcttggctggtgagcanncgcctgatg

SEQ ID NO: 3619 - DNA, 463 bp, Chlorella sorokiniana
  Clone ID: LIB3602-045-Q6-K1-C10
gaccacgcccgccccttccagtttgcggttcaagtggtgggcgacaactcgtatgcagtgcaagcgtgcgagccggcggtgccggggctgcagcggctcttggagcagctcaatggcggcggcagcttcagcgcgtttgtgcgctgcatgcggagcgagttccagtcgctcgtgcaagcagagatgcagcagcagcagcagccggggcaggcagtgccggcggcgcccgttgcggcctgctgagcccgccagctcttgcggcagccccacatagctgcgccggacacctgtatgctagatgacgactgaccaccaactgcgactgaccaccaagaccgacagccaacctacggacatgacgatgcggcacgccgcctgccagcccgccagcccctccttggctgtccaatactacactgatggcgccgcagcggctggggccactgcaagggcttgccccccg

SEQ ID NO: 3620 - DNA, 257 bp, Chlorella sorokiniana
  Clone ID: LIB3602-045-Q6-K1-C11
gctgtgcctagcgcatgagaagatgccctgacctacctaacaagcaaccgttgctttcactcctatgtcgcccaccaccctttggttggcttcttttgccttgcgccccctgtggcgcaccatgtaccctcctcccctgccctcccgcccgcaccctcgatcggcctaagcctgcacttgtgtcattatgctcccaaccaacactgcaagaccctaccgtcttttgtggctggcaggcaatgtaaacactcatgccc

SEQ ID NO: 3621 - DNA, 393 bp, Chlorella sorokiniana
  Clone ID: LIB3602-045-Q6-K1-C12
acctagccagtgcttacatctgtaacgcatgcagaagccactacacctgctgtacacgggtgtggctcacaagcaaagcatgcaaatgcccagctatgcagtgctctttccagcccgccaaggttgtggccaagtccagcaactgcccctgtacacccgccgcctagcgcagtgctggagcccgccagctgtgcccgcctcgccaaccgccaagcgtagtggctgcaattgagcgtgcgccgcccgccgccaatcaaagcagctgctgtttaggggtgcgccggccgcggcccaccacagcggcggctgctgagtgtgtgcgccgccagccgtgctgccacaccagccttgccggctagaaatagtattcatgatcgtgcactggcatgcgat

SEQ ID NO: 3622 - DNA, 505 bp, Chlorella sorokiniana
  Clone ID: LIB3602-045-Q6-K1-C2
tgcatcgcacctctccccatctaatacacccctcgtgcctgcccttgccccatgccatgcggtatcgtgcggtgcctgtgcccagtggtttatttctgtcaaccgattccttcctgccttattgcggctccttccttccttcagtgggccctgcctttgatgagagcggccatgcctgccgcccctcctgcccgccccgtccctccatctcacagcccaaccccccaacgaatgaaacctgcaacgctcgtgcgttgttgcttttccaagcccgccgggggcaccccctccccacccggcagcctcaatctagctcaaccgcaactagccatgccccaacacatgtgccctgctctcaggaccaaacctcttggcaaattgtgcagcaattgttgcaaattgcgttgctttgaccaacaaaagaggcttgagctgcaccctactgctggtgagcactcctgattgtgggcaagttatccaaggtttttttggggaaaaagtccct

SEQ ID NO: 3623 - DNA, 459 bp, Chlorella sorokiniana
  Clone ID: LIB3602-045-Q6-K1-C3
aaaaaaaaaaatataaaaataaaaaaacaaaaataaaacaaaaaaataaaaaaatacaataaaaaaataaaaaaaaaaaaagggggaaataataaaatggggggggcgccgcttttttccttccttttttgggcgccctttcttgtttctccagcttttttctttcgtcgtttcctgaattcctctttcttttcgttttccccccccttattttccttgcccccccttttcccccccctattttgtttcccccttgcccttcccccttttattgcctttttcgctatagccctttttcccaccggctttctcttctattgggctccccccttggttctttttttgctcctctctttcttccgttgttttttggccccctctctttttgggtccttttttcgctccccattttgttgtttcctcccttagagcccttttttttttcttcccctctttttt

SEQ ID NO: 3624 - DNA, 547 bp, Chlorella sorokiniana
  Clone ID: LIB3602-045-Q6-K1-C4
aaaaaaaaataaataaaaaaaaaaaaaaaaaaaaaaaaaaaaaaaaaaaaaaaaaaaaaaaaaaaaaaaaaaaaaaaaaaaggggggaattataaaatttatagaagggtacgtccacttttactaacttcattatcttaacttactttttggggcccccttttttgggttcccattttttctccccctttcttccccccttttttttttttttttgctccccctatttcattttctctgccctttttttcccaacttcttctttggaaacccctttttttcccccctttttttcccttttcaccccccccctttttccccctttctcttttttccaaaagcccctccccctttctcttttccccccatttccccctctttattcccatttggcccccctttttttctgcctttttacctcccttggttttgtttttttccccccctttttcccttttcctttttcttaccccctcttttccccccccccctctcttttttttctttttttttttttttttttttttccccctttcttttttttttt

SEQ ID NO: 3625 - DNA, 336 bp, Chlorella sorokiniana
  unsure (1)..(336): unsure at all n locations; Clone ID: LIB3602-045-Q6-K1-C5
gcctacgcgctgggacgcatcaccaacgccctggagcgcaagtggggcatcgtctaggccttgcggcacacctgtacggctgggcgtgccgccgcttcgccacatgtgcaatgtgccccaaggcaggcgctttggccagcaggggcgagcggcctgtgctgctgtgttgtggagcactgctgtggcccggcctttccttcatttcccttcttagccatcttcccagtccacctatacctgctcttcacctgatatacctcgaaacgccgacggcatcccattccatgtgccccgttttcaaatgtgacctaacaacatgcaactcgacgcagcana

SEQ ID NO: 3626 - DNA, 471 bp, Chlorella sorokiniana
  Clone ID: LIB3602-045-Q6-K1-C6
tcgagcagaacctggcgtgggcagtggcctacaactttgtgggtgtgcccatcgcagcaggcgcgctgctgcccgagtatggcatcgcgctcagcccctcgctggcgggcggcatgatggcgctgagcagcatcgcagtggtcacaaacagcatcagcctgcgctggaccctcggttctggcagcagcagcggcagcagcgacagcagcagtgcagcaggcgtggcccccagcggtgccccggcgcaccagctgtgatgctggcgtgcagtgcaacacagcggctccctctcacccgaagcgggcagccacgatcaccaccagggaagtggccagctcaatggcaaagcaccagttgagcggagtgcgccaggcacccaacagttttccatctgagctgcacaggcatgtgcctgactgacgtttgattcctccctcagaatttccgcattggcacctgattggcgcacca

SEQ ID NO: 3627 - DNA, 463 bp, Chlorella sorokiniana
  unsure (1)..(463): unsure at all n locations; Clone ID: LIB3602-045-Q6-K1-C7
ggcgtggtggcgcccctgctgggcaacatggtgctgctgggcatccacttccccaccttctccaacacccgcaagtggctggagactgtggaccccacccccgccaacgagttccccttctggaaggtgctggctgctggtggtgccgccggcctggcgggctccttcgtgtcctgcccttctgagcacattcgtactaagatgcagctgcagcgccgcgcggcactggctgcgcagatgggcttgaaggcgcagggcctggagacctacaagggcagctgggactgcgcggtgcagatcctgcgcaaccacggcgtcaagggcctgtaccgcggcatgacctccaccgtgctgcgcgacatccagggctacgcctggttcttcctgtgctacgaggccacgctgcacgcgctggcaggccccgcgcaccagcgccaggaagctggactacaagcancgtgct

SEQ ID NO: 3628 - DNA, 384 bp, Chlorella sorokiniana
  Clone ID: LIB3602-045-Q6-K1-C8
cccacgcgtccgctccacgcgtccgaaaaaaaaaaaaaaaaaaaaaaaaataaaaaaaaaaaaaaaaaaaaaaaaaaaaggaaaaaatatataaaaaaaaaaaaaaaaaaaaaaaataaaaaaaaaaataatttttttttatttttttttttaattttattgttttttttttttttttttttattttttgtttttttttttttatttaatttttttttttattatttgttggttttttttatttttttttgttttgatttttgggtggagttttttttaagttttttttttttttaatgattgggatttggggattggtttttttgtagttttttatggattgggtttgtttgttattttttttttttgatagttttttttttt

SEQ ID NO: 3629 - DNA, 72 bp, Chlorella sorokiniana
  Clone ID: LIB3602-045-Q6-K1-D1
gtttaaaactgccttagttgcatgccatcagcatctgatctgagcaagcacttgtgtaaagggttacagagc

SEQ ID NO: 3630 - DNA, 406 bp, Chlorella sorokiniana
  Clone ID: LIB3602-045-Q6-K1-D10
cccagagcgtgccgctggagaagctgattgacgacatcgcagtcatgggcttttcccgcaacgatgtgcggcgcgtgattgaggacatgcggcagagtgggcagagcatcgacatcaatgtagtggttgatcgcctggcgcgtgagtcgtaggcagcagctgcgccagcttgcctcggcggcagcacaagcagcagcagtggcagcaaggtttgcctttggcgtcgccacagcagcagaagtggccgggctggcagggtcaggaatgatagcattttttgtgcttgctaccgcgctgcatgcttgcttcagcccctttgcatgtatcccccgttcaatgccacgcctgcatgcgttgcatttcggctctttcttgcacccggagggcctgtaacatatgcacatta

SEQ ID NO: 3631 - DNA, 457 bp, Chlorella sorokiniana
  Clone ID: LIB3602-045-Q6-K1-D11
ggcctggctgacgaccccgacaccctggctgagctgaaggtcaaggagatcaagaacggccgcctggccatgctctccatgctgggcttcttcgtgcaggccatcgtgaccggcaagggccccctggacaaccttctgcagcatttggaggagcccggggagttcaacttctacgccctgtacgccaactccctggcgtaagcagcttgtttggagcacctgcggcggccgaggcggcggcgctgagctggcgcaaagcgcggttggcgaccgccgccgcctcacgctgttgcccttgaccctcttccctttacgcgcttgcatgcgttcccgactccgctgcatgttgcctgtgtgtgcaattgtgcatcaggcaaaagaaacgagaagaaaactccacccaaacaccattttgcctgttgtaccatcctgtacgaaaaggaggctgtagtggtgt

SEQ ID NO: 3632 - DNA, 468 bp, Chlorella sorokiniana
  unsure (1)..(468): unsure at all n locations; Clone ID: LIB3602-045-Q6-K1-D12
cgcagcagggcgctggacaaggccaggctgctggcctgtcagacgggccgcccaacgtggtcgcagcgcagtgtgcctcagagggtgatcaggagcaggatgcaattgctggacagctgccgcaggacatctcttggggcccgcttgtctttgaagcgcgccggtttgtggagctgcgcaaaaagacattctcagagcaattttggtccacggaggcgctgggcatgggcatcttctacacgctcaatgtgttcatcatgcagttttacctgggcacaacacgcctgcagctgaagaacaagggtgacaccggccaaatgaccgactttgcaaacatcattgtggcctttgccttccttggagtgccagtgataggctggctgctggacaagaagggttatggcatcaccctggggaccatcaacgggctgaacctggtcagcagcatcctccnaggccattccaaac

SEQ ID NO: 3633 - DNA, 464 bp, Chlorella sorokiniana
  Clone ID: LIB3602-045-Q6-K1-D2
gcggagggctgccgcaaggccgtgcagggctggtgcctgcagacgctgcgccgggacccgcgctggaagagcgacagcctgacggtgatcgaggtgccgcagggcgtggactcgcaaaaggtggtggacgtggcgtgcgccaagtacaacctgtccctgggcattgggctggcggacgtgaagggcaaggtgttcctcatcggccacctgtgcaacatggacgagctcatgctgtcctccgcgctgtgcgagacggagatggcgctcatcgacgccggcgtgcccgtcacgccaggtatcggcagtgtgtcgcgccatcgagtactgccagcagaccgccaatcccatccccacccgcagagcacatgctggactgagagcctgtgtctacagccggactaacaacactgcgtactgctatgctagcaaccaggcagccatggctcacctgtgccatatcgctg

SEQ ID NO: 3634 - DNA, 393 bp, Chlorella sorokiniana
  unsure (1)..(393): unsure at all n locations; Clone ID: LIB3602-045-Q6-K1-D3
cggcaaccccggcccgggcggcaaccctgggccagaaggggaagtgccgccggttgagggcttctcagccaaccccttccacacccagcagacccgcgccaagctgtaaaggggctctggggcagtggacagccaatgattgatctggagcctctggcgagagtgtgcgctccaacagcagagcgagcttcacctgtccagagcgcatcgagttgcagttgcagcagtttgctgttttctgccgcatgtttgcttggggaccacctaccgtctgtgctttttcttccttgctttgtatagccctgcctgcgccacaccggactgtgtattgcttcagcctttatgtttctccgagttgcatgtctcgtcgcttgtgaaaacctgttgngcnna

SEQ ID NO: 3635 - DNA, 467 bp, Chlorella sorokiniana
  Clone ID: LIB3602-045-Q6-K1-D4
gagcaagcgccatggctcccgcagacatgagcaaggccggcaaggccggcaaggcggtgaagaagagctccttcaagtaagacgaagaagccccgctacagcgtggtgttccaccgccccaagaccctggttcgcagccgggaccccaagttcccccgcgtcagcgcgccccgccaggcccgcctggatgagcactccgtgatcaagtaccccctgaccactgagtccgccatgaagaagattgaggacaacaacaccctgatcttcatcgtggacgtgcgcgccgacaagaaggcgatcaagaaggctgtggcccgactgtacgacatccataccaagaagatcaacaccctcatccggcccgacggccagaagaaggcgtacgtgcggctgaccgccgactacgatgcgctggatgtggccaacaagattggcgtgatctaaagcgtgcggctggagcggggcgg

SEQ ID NO: 3636 - DNA, 231 bp, Chlorella sorokiniana
  Clone ID: LIB3602-045-Q6-K1-D5
tcgggcccggcagcccccccgggcggtgcggacgccccttgttcaattattttttggcggattggttcctttcggcggccctgggtgggttttctgcttccctttggcttcttgggttcttaaggccttgggccgattttggtccattccgggccccttttggaccggattttatcttgtgaaccccccgggccaaaccaaaacaaaacccacagtaacagcagaatccgg

SEQ ID NO: 3637 - DNA, 230 bp, Chlorella sorokiniana
  Clone ID: LIB3602-045-Q6-K1-D6
gcgagccgaccagcaacctgggcagcggcgctgacgagtggttgggccataagtgcggggatctgtgcgttctgaagctcgtgggtgggaaccatgatgctgtgtgcatctactgttactcaatcctgggtgagcattctgacaaaggcatgcgcactgtcgcgcgcgataacatgatgtgaacacaccggcacaagcaccaagagctgcgcggactgacctaggacgag

SEQ ID NO: 3638 - DNA, 448 bp, Chlorella sorokiniana
  unsure (1)..(448): unsure at all n locations; Clone ID: LIB3602-045-Q6-K1-D7
gtggttgtttccagagagtcagcgtgctgctgaggcaggaggcacgctgtcaatgttccagctgacggaacgctgtacccaactgcccatcttgtttgcacagaaatgaatgcccagctttgtgttttgcactccctcccttgggctgacattgcccctactgccccaggcggcaaggcatgcccggtggcaaacccctcgaacgtgcacatttcaatcttcctgtcgcttttcgaatgtacattttcacagcagctgccgcactaagcagcagcatgatacgctttctgcccaacaaacgcatgaacgaacgttttgcatttgctgccccaagccaacttcattgtgccgctcctgcctttcattccgtctttgcgccgcctgtacatcatctgcacttttcagtgcttgaatgacaaaatatgtggatttgtgtnaagtagaaatg

SEQ ID NO: 3639 - DNA, 301 bp, Chlorella sorokiniana
  unsure (1)..(301): unsure at all n locations; Clone ID: LIB3602-045-Q6-K1-D8
gggcgagcaacaggcaaccatgccgtcccagaagcgcttcgccatcaagaagaagctggccaagaaggccaagcagaaccggcccatccctccttggatccggttccgcaccaacaacaccatccgctacaacgccaagcgccgccactggcgccgcaccaagctgggcatctaagcgcctcccacgaggagcagctgacggcagcagccccggcacggcaggcagtgcgctggccgcgcttgcaaggcagcccgtcagtggcatgatgacagcttaagcttgtaacgatggcctagcnna

SEQ ID NO: 3640 - DNA, 447 bp, Chlorella sorokiniana
  Clone ID: LIB3602-045-Q6-K1-D9
gaggcccgcccagttgagggcgcacagaagtacacgcacccgtgtaacacgcacacacgcaaaaaaaaaaaaaaaaaaaaaaaaaaaaaaaaaaaaaaaaaaaaaaaaaaaaaataaaaaaaaaaaaaaaaaaaaaagggggggcgtttttaaaggataggggggttagttttaggggtttgaagcttaatttcttttttttggggagacttagtttttttttagtggcagttattttaaattgtttggagtggtaaaaaaatggggtgattggaataaatttgttgtacaaattttattttttttgaggtggtttaatattttaagaggcttggtgtatttggaatttaggaacgtttttttggcttttattaaaaattgggaagcttgtttggggattggattaagccttgtaggtgtggtttttacgcagagggtgtggtgttt

SEQ ID NO: 3641 - DNA, 508 bp, Chlorella sorokiniana
  Clone ID: LIB3602-045-Q6-K1-E1
aaaaaaaaaaattaccaaataaaacccaaacaaacaaaataacaaaaaaaaaaaaaaaaaaaaaaaaaaaataaaaaaaagtggggacaaatataataaaatagggggcccccctcttttggttccttattttccctccgcttttctttcccatcattccctttttttttgcgttccccttaattcaattccattggcctctttttcccaccgcttgtcatggtgaaacccttgaactcccccactttccctgccttgcgcggcctcccctttttcccccttgccttttttaaacagatgcctcaccggttcgcctttccaaactttgtcaccccctggatggcctttgtgcccctccctgtcacccttctttaccacccgctgctcgttgtgtttcccccctgtttccccttctatttcgtaacccctttacccccccttcctttggtttttttcccctttttttttccttccttttttttgcaaagggcttttttttttccccccc

SEQ ID NO: 3642 - DNA, 470 bp, Chlorella sorokiniana
  unsure (1)..(470): unsure at all n locations; Clone ID: LIB3602-045-Q6-K1-E10
ggctgggagggcgtcgagccgccctctgagccggccggctacgaccccaagaacaagttcgccgacccggttgtgtactacaagcaccgcgaggctcgggtggcgaacgagtatgtgaaggttgcagaggccaagctcatccgccagaagctgaagaagtgctacaaggagtcgggggtgaacttccagcagaactgccgcgagctggcgcaggagtaccttgaatcgattaagggcgtgggcgtgtaccgcgcaaactccgggccgcacgacgagccgcggtgggagtactacaatgcagagcggaagcagtgaggcagcatgggccgctgcctgccagctgcgcatgtgcgggcgccgctgtgtgcggttcgcgcacagcccactgcggccgggctgcggggcgccgtgaggctggttgatccagctggcgccacctgccatgtactcngcctgccagcctggcttgt

SEQ ID NO: 3643 - DNA, 469 bp, Chlorella sorokiniana
  Clone ID: LIB3602-045-Q6-K1-E11
ggaatggcagcagctccggcaacagcgagcagctgcacaggcaactccccgagaacgcgtgttgaatgacttcaagcgtggactggatttactggagattgaggcgaacgacctgggcgaggatgtttttcaggcgctgcgccgcctgcggggggatgccctgcatgccgagctgcagcagctgtctgtccagctggaggacatgctgacccgtctggacatggtgcagctcggggaggcggaggataccgtggacctgcggcgccagcgccgcgaaattgttaccagtgtgcaagctgagttggagggcatagacaacttccggcaagattttgcggcggcccgaagcatcatgcgcaggctgaacacggtactggatgcgctgtgccagcagcagcccgacttctgctgcccaatcacacacgacatcatgcgccagccggtcatcgccagcagcagcagggacgta

SEQ ID NO: 3644 - DNA, 473 bp, Chlorella sorokiniana
  Clone ID: LIB3602-045-Q6-K1-E12
ggaggacggccgcaccctggccgactacaacatccagaaggagtcaacgctgcacttggtgctgcgcctgcgcggcggcatgcagatctttgtcaagacgctgacgggcaagaccatcaccctcgaggtggagtcaagcgataccattgagaacgtgaaggccaagatccaggacaaggagggcatcccccctgaccagcagcgcctgatcttcgcgggcaagcagctggaggacggccgcacgctcgccgactacaacatccagaaggagtccacgctgcacctggtgctgcgcctgcgcggcggcatgcagatctttgtcaagacgctgacgggcaagaccatcacgctggaggtggagtcgagcgacacgatcgagaacgtgaaggccaagatccaggacaaggagggcatcccccctgaccagcagcgcctcatctttgccggcaagcagctggaggaaatggccgcac

SEQ ID NO: 3645 - DNA, 485 bp, Chlorella sorokiniana
  Clone ID: LIB3602-045-Q6-K1-E3
cagccatgcaggccaccttcgccggctctaagctgcagcttggcgcgcgcgtcagccgcaagagcgtgaacaccaccgtggtggcctccagcggcaagaagatcgacatcagcaagcagggcctgaactccatccagaatgagaccgtgaagctcaacctgatgggcaagtccaagaccatggagagcaaggactgggtggacccccagggccgcaagggcaagggctacggcgtgtaccgcttcgccaacaagtacggcgccaacgtggacggctacagcccgatctacacccccgacacctggtccgagtctggcgactcttacaagctgggcaccaagggccttattgcttgggccggcctgattgtggtgctgctgggcgtgggcatcaacctggtgatctccacctctgccctgggccagtaaatggcgacgccccccgcgtcggcagcagcaggcagcaagccaagccaaggccaattt

SEQ ID NO: 3646 - DNA, 414 bp, Chlorella sorokiniana
  Clone ID: LIB3602-045-Q6-K1-E4
cccacgcgtccgacaaattaaaacagatataaactgcaaattggcgcgcgcgtaaaccgtaagagcgtgtacaccaccgtggtggcctacaccggcatgaagatcgacatctcttttctggcctgaactccatccataatgagaccgtgaatctcaacctgatgggcaagtccaagaccatggatagcaaggactggttggtcccccagggccgcaaggtcaacgactacggcgtataccgattagcccacaagtactgcgcctactggacggctacagaccctatctacaccaccgacacctgctctgagtctggcgactattacaagctgagcaccaaggtcctcattgcttgagccctactgattgcggcgctcatgggcgtggtcatcaacctggtgaccttcacctttt

SEQ ID NO: 3647 - DNA, 478 bp, Chlorella sorokiniana
  Clone ID: LIB3602-045-Q6-K1-E5
gctgcgcagcagaccaaagaatgccccggtgtcgaacccaataataaagtaagccacccatgaaccccagcttatgaccgaattttcttgtgccgtgcttcattccttcaaaccctctctccgtcacctcagcccgcctgctttagcgcccacccaagccgtgtacagcagggttttgccgctcagtttcccttgcccaagcataatcaccccctggcgcaaatgcagttgtgtctcttcgccgtcactgccgccgccgttcacgcggggcagcagcaattttgacgtgctgtgctgtcatgccggcacaattttggaacatccatcagtctttagccgcgtctttgtgcggcgattttgcagctcctgcacttcatccaaatgtatccagcccgcccccttgcccctcaccgcatgtgtgccgtacgctctgctccttgcagcaccacaccccccgagtggcccccggtcccttttt

SEQ ID NO: 3648 - DNA, 449 bp, Chlorella sorokiniana
  unsure (1)..(449): unsure at all n locations; Clone ID: LIB3602-045-Q6-K1-E6
gctgcccctggtttcaagtgggtgctggttcgggaggggcaggacgcccctgccgcatcagctgctgctggcggcaacaccggcccctcgcggcagggcagttcaacggcgatgtctgctgcaggggaggagccctcaacagcggcggcgccctcggcagcagcagcagcggcagaagaggagggtgtgcgagtcggcggcagcttgctgtggggcggctctcgcagcaaccagtctggcggctggggcggcggcggcggcagtggcggtgcgtctggccggccaaaggaccagcagctggctgcgctgcagcagcagatacgggagctggaggccacacgggaccggctggcagaggagctggtggcagctgccacggaggcggccgcggngcaggcggcccaggcggcagcccggcgtgcggcggctgaagtgaccgacctgcagga

SEQ ID NO: 3649 - DNA, 457 bp, Chlorella sorokiniana
  Clone ID: LIB3602-045-Q6-K1-E7
caagaagcgcaggctggagcttggcagcagcacgagccgggcagcggttgccgcggcggccacccctgtggcgccgccgctgcccaggccgcctgcttactgtgacctgtttgcggagcctgagcccaccgcaggcggccaaccagcgctgccgcctgcgcagctgccggagtgggtgcgccggttgcaggaggggcgcaggctgcagacagcctcccagctggacacctgggcgtgcgccctgagcagcgagggccggagaatggcagcagcgatggcggcggggttgaggttgcaggcggacaacaagctgagctacaagaaggacgatgtggagcgctatgccaccgccctggagcggctcatcaccagccagcacccgccggcgggcctggaggcgcagtgggcgctgttccgccccatcgacaccgcggccaacctggcctggttcctgggc

SEQ ID NO: 3650 - DNA, 418 bp, Chlorella sorokiniana
  Clone ID: LIB3602-045-Q6-K1-E8
gccggtcgcaccggcggggtgtgccgcgcgcatgatgcgaacctgggcggtaatgccgcgggtgtggtcgtgtgtgtccccggcctgctggctgatgacccggctgtggcgctggtggacgacgcgcattgacgactagggcaccgacaagatcactgggcataaacgacctctgcgtgaggtgggcacatgaccatggagttcaccatagtgcaggcagtgttgtaagtgtccacccggcagattgacactgcctgttaacgcaagaacgaccatgactgtggcatgatgctctgagcaagcgaccagcatcatgcagtccgggcgaggtacgaccactggcctgacatgcaatattaagtccttgtgtcgcagatcgcgcatgatgtgtacgctaaatctagacttcacaaccaga

SEQ ID NO: 3651 - DNA, 462 bp, Chlorella sorokiniana
  Clone ID: LIB3602-045-Q6-K1-E9
gcggctgccttgcacgcatggtgcggcacggcctgctctgcggcccttcatacctttgtacctttctgtatcatcttgcagcaatggcagccggctgcatctttctaacatcgtcaccggcccactcgtttgtgccatgcccacctgcctccaacgtcacccttcatcaaccctcacccaacccatccacctgccacccatccactcaccttccctccgccacaacctctgccacccactcaccacccatcacccgctcaacgccctccatgcaccatcctccccatccaccaaatctgccaccccaaacgcacgtccgccgctgcaccacctgccgccccctcacccgcacccatcttccacccgccacctttcctgccgctcaccgccgcacatcctacctcccacacctcactccatgtccacccttcacccgcgcttcacacagcggctgctgccatg

SEQ ID NO: 3652 - DNA, 462 bp, Chlorella sorokiniana
  Clone ID: LIB3602-045-Q6-K1-F1
agcagctggacgaagtgctggaggcggcgctgggcgatgattttgatgcgctggacgactttgatgcgatggaggaggcggtgccgccgccgcgtctggcagctgctggtgaccccgacagcttttgccgggtggatcttaatttgacagatgcgcagctgaagaagaagttcccgcagttcccgggcaaggcagctgcgctggagtgcatagttgacgccggtcagatgctctacctgccagcaggctggttccacgaggtcaccagctacgccacagagggctgccccacccacctggcacttaactactggtaccacccgcctgacaacctgaaggatgccgcagccgcgctggagcagccatacacttccgatttctggccagcagtgtgggagggacggcgggcagaatatgaggtgcggcatcggcagcaggcacagccagagccgcagcttgcag

SEQ ID NO: 3653 - DNA, 85 bp, Chlorella sorokiniana
  Clone ID: LIB3602-045-Q6-K1-F10
aaaaaaaaaaaaaaaaaaaaaaaaaaaaaaaaaaaaaaaaaaaaaaaaaaaaaaaaaaaaaaaaaaaaaaaaaaaaaaaaaaaaa

SEQ ID NO: 3654 - DNA, 471 bp, Chlorella sorokiniana
  Clone ID: LIB3602-045-Q6-K1-F11
accggagcgagctgtgatgcagcagcagctgtgagctaggagcagctgtggtgcaagagtcagctgtgatgcaggagcgagctgtgatgcagcaacagcagcagcagctgtgatgcagcaacagtagcggcaactgtgatgcagcagcggcagctgtgatgagctgcgtgagctagcagatgcagcctggcttgcctcaacccgccaacagcctgctggggcacaggctgctggaacccatctccctccggcgcagcccgcggcccctgcacaatgcgcctggcaccctgaagcggcgggtgcactaatctgcgggcctccttgaaccacggccgaatgcttttatgctcatacatacaagatcgaacaatgcgatcccaaacctcgcacaccaacccaccacgactgaacgtgcaaaaatcaacatgactcctcccattttcctcccacaactcaaatgccacctggcca

SEQ ID NO: 3655 - DNA, 467 bp, Chlorella sorokiniana
  unsure (1)..(467): unsure at all n locations; Clone ID: LIB3602-045-Q6-K1-F12
caaaaattcggtcaagctgactggttcaattgcaaatgacttggcgaaacagcacacacccaacaagcaggaggcggccaagcggcggcgggaggcggagcgcgtggcaaagtcgaaaccataggcgtcaaccaagcatgccgcgggcacggggtcggcagcgggcacggggtcggcagcgggccccatcgcccgggtgcggtgtagcctgtaggccgcttgcagatagcagcatggcagcggcactccacgatttgcatgtgatcagctactgtccccaagcccgccccaagcaagtgctgctcagcatggagctggccttgcagtcttccacaaacagttgtgtacagtgattgtaataaagtgcagatccaaaaaaaaaaaaaaaaaaaaaaaaaaaaaaaaaaaaaaaaaaaaaaaaaaaaaaaaaaaaaaaaaaaaggggnnnacattaaaaaaaataaaaa

SEQ ID NO: 3656 - DNA, 451 bp, Chlorella sorokiniana
  Clone ID: LIB3602-045-Q6-K1-F2
gaagtaccggcccgaggacaaggcggccaataaggagcggctgctgaaggaggcggaggcgcgcgaggctggccaggaggttgagaagaagaagcctgtggtggtcaagtacggcatcaaccacatcacgcagctggtggagagcggcaaggcgcagtgcgtggtgattgcgcacgacgtggaccccattgagattgtggtgtggctgcccgcgctgtgcaagaagatgggcgtgccctactgcatcgtcaagggcaaggcgcggctgggcaccgtggtgcacaagaagacggccaccgcgctggcgctgacggcggcgaagaacgaggaccagcgcgagttcgccaagctggtcgagtccttcaagaccatgtacaacgacggcccccgcgtcagctggggcggcggcatcatgggccccaagagccaggcggcgcagaagaagaaggag

SEQ ID NO: 3657 - DNA, 400 bp, Chlorella sorokiniana
  unsure (1)..(400): unsure at all n locations; Clone ID: LIB3602-045-Q6-K1-F3
tgaccattgcttcggcttactacggctatgctgtgctgggcggcgtggttggcgactacctgggcgcaaccattgcggccactgagctggcaatctacctggtcctcacagccgactgggcagcggtggccgtgcggtggcagccgctggcggtgctggcggcagccgcggtggtgccggttgtatacacgcggcgcatgatccaaatcgggggcgccaactgctgatgcatgctcggcgctgtgcctgcatttattgctcgtcattgtaaccatgccttggacaaaaaaaaaaaaaaaaaaaaaaaaaaaaaaaaaaaaaaaaaaaaataaaaaaaaaaaaaaaaaaaaaaangggcgggcaaaataaaaaaatccaatttttggtccccaaaaatgaa

SEQ ID NO: 3658 - DNA, 123 bp, Chlorella sorokiniana
  Clone ID: LIB3602-045-Q6-K1-F5
atatcggtagcggtcttttaagaggtaccaattttaggggctcgttcctacgacgttatacctccattacgacgccaccaaaatacaaaacagtggccgatttttaacaacgggacaacggga

SEQ ID NO: 3659 - DNA, 481 bp, Chlorella sorokiniana
  unsure (1)..(481): unsure at all n locations; Clone ID: LIB3602-045-Q6-K1-F6
cgcagggcgatgcgcggctgcgatcgactttcaacgactgcaccaaggtgctgctggaggagcagggtgcgcggccagtgaaggacattctggatgtgggcgcagccaccgggctgtccagcctggcgctgctgcaggccttccccggcgcgcaggtcacgggcattgacctgtcgccgcacatgattgccgtgggccgctacctgcagcgccagcgaaatgcggagcgggcggcgacggggcagcagcccgagcagctacgcttcgtacacggcgcgggtgaggacacgcggctgccggatggctgcatggacctcgtcagcatcatgctggtgtgccacgagctgcccgccgctgccagccaggccatcttcaaggaggcgttccgggttctgcgccccggtggcgcgctggcggtcatggagatgaaccccgcctcccccatcttccagcgcatcttcagcaanccccttcccctttt

SEQ ID NO: 3660 - DNA, 458 bp, Chlorella sorokiniana
  Clone ID: LIB3602-045-Q6-K1-F7
aaaaaaaaaaaaaaaaaaaaaaaaaaaaaaaaaaaaaaaaaaaaaaaaaaaaaaaaaaaaaaaaaaaaaaaaaaaaaaggaggaaaaaaaaagaagggggggatgtattatataaaaatattttaacattcaagggggggggggggttttttgggttttgtgttttgggtgcggtttgttggggggtttttttttttttttggggccccttaatcctttcccttgggggggttttttcaatggggggggtggggatctccttttgttgccctttttttttggggtgggggcctgcccctttttctgtgcgttgaattttggaaaaggggctggggcgtgttccttttccaaaaacttttccatttttagggggggtggggccctctctttttaccgttttttatggggggggggggggggttttcccctttcgtttccttttttttttttctggcccc

SEQ ID NO: 3661 - DNA, 352 bp, Chlorella sorokiniana
  unsure (1)..(352): unsure at all n locations; Clone ID: LIB3602-045-Q6-K1-F8
gagagcctccttctggcttcgttgctcgcttgcccgttagcagccgtgatgtgcgcggcccgctgctgcatgccgccgcccccctccctttcatttacctgcttgccttgcttcccaactggccgctctccagccgctgcctctgtgccactctgtgctgctgctgttgctgctgctttccccgttctggcttgcatgtcccccttgctctgccccaccctctgcacgctttgattcgtcccccatgctgtgcacccttcccatgctcaacttgttccgccgctccccgactgccctctccacgtctgtgcacgtgctgcacatgacacatgaaaaatcactgcacccanna

SEQ ID NO: 3662 - DNA, 338 bp, Chlorella sorokiniana
  Clone ID: LIB3602-045-Q6-K1-F9
aaaaaaaaaaataaaaaaaaaaaaacacaatagaaccgatcacataaaaaaaaaaacacaaaccactaatacatgcggggggcttggtatcctgcctcccacgggcctcctcagtaccgagccgaggcatgaaaagccaaccccgccgtgccactgtgggctaccagtgtgcatccccacgcattgtggtactgcttggatgtacaaactagaccctggccaaagctttgcaccatcttatggtcccaattggcaatgtatgcttcccatgctcaacttgttccttctgttccttaataagttcgtctatgaaagcgcttgtgttcattatgacacat

SEQ ID NO: 3663 - DNA, 471 bp, Chlorella sorokiniana
  Clone ID: LIB3602-045-Q6-K1-G1
gcgtggttgagcgtggatacgccgtgcgcgatgcgctggccgcgtatgccaccgccctcaatgtcattgacgactgctccccttggcatcctgcctcccacgtgcctttcccgtaccgcgccgaggcatgaaaagccaaccccgcccggcggctggcggcaaccagcgtgcagccccacgcattgtggtactgcgcgtgctaagttgcaacccttgccaaagtctcccaccagctcagggtcccaattggcaatgtctgccacagtgactgcattgggtctctgtgattcttcacaagtgcgctgctgcaggcgcttgtgttcattgcatccacacccataactctgctacttctccccgcccggtgcgctacacccacccctccccgtctccatgccatgctttcccccccaccctctctctcccgcccattttgtcagcagccctttctttcaattcctcggcttgtgc

SEQ ID NO: 3664 - DNA, 471 bp, Chlorella sorokiniana
  Clone ID: LIB3602-045-Q6-K1-G10
aaaaaaaaaaaaaaaaaaaaaaaaaaaaaaaaaaaaaaaaaaaaaaaaaaaaaaaagggcggacgatataaaaggaaccaagctaacgggcgcgtgcttgcgaaggatccactcttctttcggcggcgccgcaatgcaataccttggccgtggtgtcacaacgtttcaattgggagacccctgttttaccccaacttaattgggtagcccctggtgcccctttagtcagttggcttgataccgatcaggctttcgccggtcgcccttccaaacagtaggcccgcccgaatggccattgccacccgctctgcagcctgaatttaaacggggacgctccgtgggttacccccttaagcaccgctgctctggcgattaccctaaggccgactccttcacttgcctgccctttattgcccgcctctttcgctggcttccctcgtttagttctaaattggggggtcttttccgggt

SEQ ID NO: 3665 - DNA, 464 bp, Chlorella sorokiniana
  Clone ID: LIB3602-045-Q6-K1-G11
tccgatttctgccactggggccgccgctgtggctacacataccacgaccccaagcagggccccatccacgcatccatcgaggcgctggaccgggagggcatggcgctgatcgaggcgcaggacgcggccggcttccagcgctacctcaagcagtacggcaacaccatctgcgggcggaaccccaccgcagtgctgatgcatgcgctgcagcattgcggcgcggtgcggcaccaggtgcggttcaccaagtatgaccagagccaccgctgcaccagcgagcaggacagcagcgtgtcgtatgcggcagcagtggcggtggcgctgtaaagcgtttgctggcacacgcattcaccctgccgtcgatgtgttgtacctttccgtgtcgtctcctggctcactgtgggtacatactggacgcactgctggcaccgatgcaattgggtcaagcgggtaaacaagcgggt

SEQ ID NO: 3666 - DNA, 474 bp, Chlorella sorokiniana
  unsure (1)..(474): unsure at all n locations; Clone ID: LIB3602-045-Q6-K1-G12
ggcacgcctgcgagcagggccggcgcgcgaggcagagtttgttcagcaaatgctgcaacagatcatgtctggtggcggctctttcagccagaagatggtgcaggcatctctgcccatgatgtacaagatgctgaagatgatgggaatggagccgggcggcgagttcaaggtggcgctagaagaggcagacgcctgcggcgctcgggtggtgtacggagaccgcgacgtgcaggccacgctgcagcggctgtcgcagaacatggatatgcagcagctgcttcgcatggccacggggcggggcctgcccgagccgccggcgtcgctgctggaggctttccgctcgagcggcggggagggcttggaggcgcaggttgagggcatgaagagccggcggctggtgcgcgacatgtgcgaatacctgcgagccatcaatccggggctggccaaggcgcttgtagacgagcgcgancgaga

SEQ ID NO: 3667 - DNA, 471 bp, Chlorella sorokiniana
  unsure (1)..(471): unsure at all n locations; Clone ID: LIB3602-045-Q6-K1-G2
atgctgcgctgtcctccctccctgccgcgcattgctgcacaacccttgcccctcccctgctcctgccgccgccagcccggatcgctggttgcttgagcagcgatccctaggctcggccggctggctgtacccgctgcctgcctgcccacccttgtagctcctttagcccagactgactgcttttattcccttagatagactcccgcacctgccggcaggtgcaatattgcagccgcactgttgcagccgcactgccgcacggatgcattcggcaaacgcaccgcatgctccaggctgcgtaatctcgcacccaagcccagcccacttcctgtgcccgcactatgacttacttctcagcaagcaatggatgacatggtatgaagccgaatttcagcatgtaagcaaacctgagctgantaaaaaaaaaccaaatagaaaaaaaaaattataatataaactaaaaataaaaca

SEQ ID NO: 3668 - DNA, 462 bp, Chlorella sorokiniana
  Clone ID: LIB3602-045-Q6-K1-G3
cttctacaccggccgcaccatcaagagcctcaagtggttcttcatcatctcctgcggcctgctgctcatcattgctgccggactggtggcccagggcgttgtgttcttcacctccgccggtctatttggcaccaccttcccctacgagtaccgcccctggtacaacaccatcctgtggaacacctcgggctgctgcgacatgtacaacaaccaattctggtccatgatgcgcgcgctgtttggctacacggaccagcccacgggcctcaacctgatgtactacctgctgtactgggctattgtgctgagcatcacgatctggaagtggtacaccggcaccctcaccgaccgccgccaggcccagattgacgacctcaagtcgtttgcagtccacctgggagagcgcatggacgccgacgccggcctggacaagggcaagcagctcaccagcagcagcagcag

SEQ ID NO: 3669 - DNA, 467 bp, Chlorella sorokiniana
  Clone ID: LIB3602-045-Q6-K1-G4
ggcaggcagccaggccgacatcctgatgtacggcaagccggtgcacgtgcacggcgacatggccaagaatgaagtgcaccgcccgcagcaccaccctgatacaatcaattacgctgcggtggccaaggaggagattcacgacgtggtggagcacccgccgccggtcaagctgatgagcggccgcgccactggtgtggaggcgtgggacaaggtcaactcgccaaaggccaggcacgactgagcggtcagagtggcagagtggcggagaggctccagcagtgaacgcactgccgtcggctggtgtccacagatcaactcaatctgttgagaccagctgctgcctccatccaagcttgcaatgctcactgccaacgcaacccacacagacgcgcctaccagcccaccagcagcctcgccggtgcacgctgcgctacgtgagttttccctcctgttcctccagtattgca

SEQ ID NO: 3670 - DNA, 371 bp, Chlorella sorokiniana
  Clone ID: LIB3602-045-Q6-K1-G5
gcgggcaggcagacagcccgacatcctgatgtacggcaagccgttgcacgtgcactgcgacatggccaagaatgaagtgcaccgcccgtagcaccaccctgatacaatcaattacgctgcggtggccaaggaggagattcacgacgtggtggagcacccgccggcggtacaagctgatgagcggacaccccactgttgtgtaggcttgacacaaggccaactcgtcaaaggccaggcacgactgagcggtcagagtggcagagtggcggacaggctccagcagtgaacgcactgccgtcggctgttgtgcacagatcaacttaatctgatgagaccagctgctgcctccatccaagcttgcaatgctcact

SEQ ID NO: 3671 - DNA, 479 bp, Chlorella sorokiniana
  Clone ID: LIB3602-045-Q6-K1-G6
ctcggaccctcgtcatccccgatgaggtgtctatcgaggtcaaggcgcggcgggttcgcgtgaagggccctcgcggcacgctgcagcgcgacttcaagcacctggctgtggacatgttcctgactgaggaggagggcaagaaggtgctcaaggtggactgccactttggcaagcgcaagagcctggcgtccatccgcacctgcacctcgcacgtgcagaacatgatcaccggcgtgaccaagggctacgagtacaagatgcgcctggtgtacgcccatttccccatcaacatcaacatcgagaacaagggcggcaaggtggagatccgcaacttcctgggcgagaagattgtgcgcgtggtggacatgctgccgggcgtgacctgcgagcgcagcgccgccgtcaaggacgagctgatcctgaccggcaacgacatcgagctggtgtcccgcagcagcgcgctgatccaccagaaaagt

SEQ ID NO: 3672 - DNA, 466 bp, Chlorella sorokiniana
  Clone ID: LIB3602-045-Q6-K1-G7
ggtcattgctgaggagggcaacatgcccaacatcatcctggcgggcccgcccggcacgggcaagaccaccagcatcctgtgcctggcacacgagctgctgggccccaacttccgggaggcggtgctggagctgaacgcgtcggacgaccgaggcattgacgtggtgcgcaacaagatcaagatgtttgcgcagcagcgggtgacgctgccgccggggcgccagaagatcgtcatcctggacgaggcagacagcatgacgtcggcggctcagcaggcgctgcgccgcaccatggagatctacagctccaccacgcgctttgcgctggcctgcaaccagtcctccaagatcatcgagcccatccagtcgcgctgcgccattgtgcggtatgccaagctgagtgacaaggagctgctggcgcgcctgctgcaagtctgccaggcggagggtgtggcgcacaaacgcccg

SEQ ID NO: 3673 - DNA, 426 bp, Chlorella sorokiniana
  Clone ID: LIB3602-045-Q6-K1-H1
atcatgacaaccgtgacagccacaaccaaggtcccggaaatccgcgatgtgacgaggatcgagcgtatcggcgctcactcccacatccgggggctggggctcgacgatgccttggagccacggcaggcttcccagggcatggcgggccagctggcggcccggcgagcagccggcgtggagctggagatgatccgcgaagggaagatcgccggccgggcggtcctcattgctggccagccaggcaccgggaagacggccatcgccatgggcatggcacaggccctgggccctgacaccccgttcacggccatcgccggcggtgagatcttctccctggagatgagcaagacggaggcgctgacccaggcctgccggcgctccattggcgtgcgcatcaaggaggatacggtacatcatacgaatggg

SEQ ID NO: 3674 - DNA, 456 bp, Chlorella sorokiniana
  unsure (1)..(456): unsure at all n locations; Clone ID: LIB3602-045-Q6-K1-H10
cttgcgtccagcgaggcagcagtggcgcagctgcggcagcaggtggcggcgctggaggcggcggcgctggaggcctcggcacggtttgcacaggccaagacggagggcctgcaggcggccgaggctgcacgcaccgcagctgtcgcgccgctgcacgccgaggtatcccgcctgaccgagcgcgtcaacagcctgcagaagctgcacaccagcgagctggccgccatcaaggcatcagctggacagcaggcggcggcggcgcaggcggcagcgcaggctgagctggaccgtctgagtgcagcgggcgcagctgcacggcgggagcgggatgctgagggggcacgtgccgaggggctgaccattgacgtggcccgcctgcaggaggagctggccaagcacacacagcgcgccgnctccaccatcgagctgcagcagcaggagctgggcatggctcaa

SEQ ID NO: 3675 - DNA, 466 bp, Chlorella sorokiniana
  Clone ID: LIB3602-045-Q6-K1-H11
gcagtaggagcacagcggcaccggccttgtttgtgcacacagcgcaaacatggctaccatccgcactcgcaagttcatgaccaaccggctgctgggccgcaagcagtttgtgctggatgtgctgcaccccggcaaggcaaacgtgtccaaggccgacctgcgcgagaagctggccaagatgtacgacgtgaaggacctgaactgcgtgttcgtgttcggcatgcgcacccagtttggcggcggcaagagctccggctttggcctgatctacgacaacgttgaggtggccaagaagttcgagcccaagtaccggctcgtgcggaacggcctggcggaggcggtgcagaagtcgcgcaagcagatcaaggagcgcaagaaccgctccaagcctctgcgcggcgtcaagaagtctggcaagaagtaagcagcccgaggagcgcgccacgcgcgcgacctgtaacacatt

SEQ ID NO: 3676 - DNA, 74 bp, Chlorella sorokiniana
  Clone ID: LIB3602-045-Q6-K1-H12
aaaaaaaaaataaactaaaaataaaaagaaaataaaaaaacttcaaactgcatagataacagcagctactaaaa

SEQ ID NO: 3677 - DNA, 453 bp, Chlorella sorokiniana
  Clone ID: LIB3602-045-Q6-K1-H4
gtacgcctacaagcatgagccgctcccaaaggtgaacctgcggatgcccgactctgcggtcctgcgcggcaagctgcccgccgtcaagatgccggcattcaagctgcccgcggcgctgcagcgcaagcccgccgcccaggcgtgagcgcctggagagcatgagccttgtgggccgggactgccggccacgattgctgtgcgcagcgcagtccctgcccctgcggcaccccttatccgcccaggcagccctgcggagggatgacacatgcattccaggcatgttacactggactgtcaaaggcaagctttctgtgacgctgacgcaccaccctctgtgtgctgctgctctgcgcgggcgcgcccccgcccgcgtccggcttttccctgtaacttattcgtttgtgcagcgcgcattcgtgcctgccccgctaactgcccacgcgggcgcccctt

SEQ ID NO: 3678 - DNA, 460 bp, Chlorella sorokiniana
  Clone ID: LIB3602-045-Q6-K1-H5
ggccggtctagcaggtactgggcagccatgacggcagctgaggtcaagctgttcgggaagtggagcttcgaggatgtggaggtgaacgacatctccctggaggactacattgcggtcaagcccaagtatgcgcgcttcaccaatcacagtgcgggccgcttccagaagcgccgcttccgcaaggcgcagtgccccatcgtggagaggctgaccaacagcctgatgatgcacggtcgcaacaacggcaagaagctgatggcggccagcattgtcaagcacgcgtttgacattgtcaacctgctgaccgaccagaacccggtccaggtgctcgtggacgccatcatcaacggcggcccgcgtgaggatgccacccgcattggcagcgccggtgtggtgcgccgccaggctgtggatgtgtcgccgctgcgccgagtgaaccaggccatctggctgatcacca

SEQ ID NO: 3679 - DNA, 341 bp, Chlorella sorokiniana
  Clone ID: LIB3602-045-Q6-K1-H6
gaccaaattagcctgtattgcgcatccaagaaggtggctgactacaaaatgatcgggaacagcagctgctgaacggtcaaggtgaactacatacggctgtgcgacctgattgcaggcaagtcgaatcatactcgcatcacaaatcacacagcatgcagtttctataagcgatgcttgcgaaggactcagtgcctgatcgcagagaggctaaccaacagcataataatgcaaccatgaaacaacagtaagacactcatggccgccagcacagccaacaacgtcgttgacattagcaacatgctgaccgaccaaaacaactttaacgagctcatgaacgccat

SEQ ID NO: 3680 - DNA, 128 bp, Chlorella sorokiniana
  Clone ID: LIB3602-045-Q6-K1-H7
cgctggtagagcaagtcaagatggcgaagggcgacaagcgccaggaggtgtgcacccgctagtacaccctcaacctgggcaagctgctgcacggcatcaccttcaagaagcggtcgccttattccttt

SEQ ID NO: 3681 - DNA, 461 bp, Chlorella sorokiniana
  Clone ID: LIB3602-045-Q6-K1-H8
gaacagacccagccctaggcttagcgcctgccggactggatgccgccgccacgcagctgctgacggcgctgaacgccgctttcctgggatactatgcctgctgctgtggcgacacctggagctcagagctggggcagctgagcccagaagagccccgacttattactacgggtcggcccgtgcgcaagggcaccaacggcggcgtgacgctgctgggctttggagccgcgctggctggcgggctgttcatgggtctcactttctggctggcaagcctcattagccccctgggcggcgggccagctgccgcgctgcgccgctggcagcctgtggctcttgggctggcgggcggcttcattgggtcgctgattgactcgttgctgggagcctccattcagttcactggctacaaccgtgtgacaggcaagatcaccggccgcccagggccagatgtgtccccc

SEQ ID NO: 3682 - DNA, 71 bp, Chlorella sorokiniana
  Clone ID: LIB3602-045-Q6-K1-H9
ctccggtgcggatcaattctttttgcaaccccttttttccaagtacgtttccttgtaacactacgctagcc

SEQ ID NO: 3683 - DNA, 396 bp, Chlorella sorokiniana
  Clone ID: LIB3602-049-Q6-K1-A11
cccacgcgtccggcggcatacaccaacgggagctgtacaaacagcgcattgcggagattgagcgggaggaggcgcggcgctcgttccaggcgcgcagcggcggcgggcgcgccggctgcggcttcacgcagcagctgccggggggcaaggagtgagggtgagagctgcgtggggcatatgagggaaggcgaagggtacacgcctgcacaacccatttcctctgctttctcactcaggcccacatgtggatgataatgctgctttctacccctgatgctctgctcatcgatttgctgccattgcttttgaatttcagtccgtacataagttctcatttgatcagctggaatgccacatgtatgcaaaacgaatgcctcttattttcaagattttata

SEQ ID NO: 3684 - DNA, 512 bp, Chlorella sorokiniana
  Clone ID: LIB3602-049-Q6-K1-A12
cagacagctactcgctgtacggcatggtggccaaccagctgggtgacgtggactcgctgatggagctgccacccggctggttgcccgaccaggtgccggtccgcacctttgtggagagctactttggtttcaagcactcctttttcggctggtgcgcgctcatcctgattgccttcacggtcttattccgactcatggccctgctggcgctcaagcgtttgaacttccagcagcgctgaagtggcggtgatgagagagcggtatgcacaggacagacccggctggcgcatagtcagcgcaacgtttcagccctcttgctagacttggagagagttacttattttgcgtatgcacagtgccttgcgccctggtgcgggacggacaggctgatcgtgccgtgcccagccctttttacgcttgccgattaaactcgtgcgcgaatgagccgtttaccattcttaccgtaccgccctttaatttatgcttttcgcgcactatacggttgccccatt

SEQ ID NO: 3685 - DNA, 198 bp, Chlorella sorokiniana
  Clone ID: LIB3602-049-Q6-K1-A2
gaaccagctgacatctatcatgcaggggacgactccctctaagcgccaaccaagttggagagcataggccatgagaggcttcatcatcacaaggagaggagcatgatggcgggggcaaccgatgccccaatgctcaaactagaaggagacgacctgccttattatacggacgccccaaaagtgcacattcaccggcca

SEQ ID NO: 3686 - DNA, 159 bp, Chlorella sorokiniana
  Clone ID: LIB3602-049-Q6-K1-A4
atgggcgcccttgatatgaacaccgccgaggactctgtggtggaccgcacccgcgaggtggtgcccggcatggtcatctgcggtatggaggtggctgagctggaccgctgcccctgcatgggccccacctttggcgctatgtacatgtccggcctcaaa

SEQ ID NO: 3687 - DNA, 534 bp, Chlorella sorokiniana
  unsure (1)..(534): unsure at all n locations; Clone ID: LIB3602-049-Q6-K1-A5
agggcaaccacgtggtgggcatcctgtccgacgagggcgacccaccggtgaacgtgatgaaggtggagcatgcgcccaccgagagctatgcggatgtgggcggactggagcancatattcaggagattaaagaggcggtggagctgtccctgacgcacccggagctgtatgaggacattggtatctagccgcccaaaggcgtgatactgtacggcgagcccggcaccagcaagacgctgctggccaaggcggtggacaactccaccagcgccaccttcctgcgtgtggtcggctcggagctgatccaaaagtacctgggcgacggccccaagctggttcgcgagctgttccgcgtggctgacgagcaggcgccattcatcgtgttcattgacgagattgacgcggtgggcaccaagcggtacgacgcgcacagcggctgcgagcgcgagatccagcgcaccatgcttgagctgctcaaacagctggacggctttgatgcgatgacggatgtcaaggtcatcatggccaccaacc

SEQ ID NO: 3688 - DNA, 535 bp, Chlorella sorokiniana
  Clone ID: LIB3602-049-Q6-K1-A6
gtggtagatcgcgagcgggcgtcctgttcgactaggccgacccatcggtgaacgtgatgaatgtggagcatgcgccggccgagagctatgccgatgtgggcggtctgtagcagcatatccaggagattaaggaggcggtggagctgcccctgacgcacccggagctgtgtgaggacattggcatcaagccgcccaagggcgtgatcctgtacggcgagccctgtaccatcaagacactgctggccaaggcggtggccaactccaccagcgccaccttcctgcgtgtggtcggctcggagctgatccaaaagtacctgggcgacggccccaagctggttcgcgagctgttccgcgtggctgacgagcaggcgccatccatagagttcattgacgagattgacgcggtggacaccaagcggtacgacgcgcacagcggcggcgagcgcgagatccagcgcaccatgcttgatctgctcaaccagctggacggctttgatgcgatgactgatgtcaaggtcattatggccaccaaccg

SEQ ID NO: 3689 - DNA, 115 bp, Chlorella sorokiniana
  Clone ID: LIB3602-049-Q6-K1-A7
gcggtgcagacgcaacggccgcggactgattgcaaagcatgttattgatgttcgatgaccagcaatgcccactctgggagtttttgtgaatatgaaacgatcaaaaaaaaaataa

SEQ ID NO: 3690 - DNA, 237 bp, Chlorella sorokiniana
  Clone ID: LIB3602-049-Q6-K1-A8
caacctgcaacgtgtgtgccaacttattctgaccaaaagccactgcatgtattgctcccatgcactgagacctgtgacttgtaacctgaagcttcgcccaaaaaaaaaaaaaaaaaaattgtgtcttttttcacgtatccaattcttatatttttctctgccattcttatagaaatttcatcctttttttttctcgtctcccttattattcgaattttatcttgtctctattatttt

SEQ ID NO: 3691 - DNA, 437 bp, Chlorella sorokiniana
  unsure (1)..(437): unsure at all n locations; Clone ID: LIB3602-049-Q6-K1-B10
accgagccaacgcacactctcttgcttccttgcctcccttgcctagcgttgctgctccgttcctgctcgctgtcgcggcccgtgactgccggcgctagcatcgtcgactatcagcccaccggctgcagctgacacatcctcgtgcagatgtagaattagagcgccagctgcccactgtcgtcctttccatgccctggccgtccatcttctatctctgggacctctatacataatgcaccttttatgtatcagtgtgtgggctcccgccgcattcagacattaacggtggggcattcttacgctgagccataacacagnaataccctgccacttcctccgtttcatcacaagcttggcttctgacacataagtttgaaagacttcatatcccactgctgccaaaaaaaaaaaaaagagagtactttataaaataaaaa

SEQ ID NO: 3692 - DNA, 534 bp, Chlorella sorokiniana
  Clone ID: LIB3602-049-Q6-K1-B11
ggttcaatgccgcatgggtgcacttcatgcaattgctgcacgagagttcggccatccaaaaccgtcttgatgcccagcgcaagggcggctccctgcccatgccgcttcccaccccacccttccgcctgccgccgatgcgggagccggaaacacaaggcgcacccgagccggaggcagcatgcggagtgcaacccgccacacctgtcggcagcggcagcgcccgcaggggccagccaggcgatggcagcaatagcgaggaggctgctgatgccggtaacgcgggtagtgaggctgtgccgctgcttgcagcggggagcagcagtctgccgccgggccttcggcggcggcagggccaccaggagtgcagctgaggcggttcccgggcgatgctgtcggtgctggcggcgtgcccgcttgcatggctgacgtctcaagccgcttgcttacgcttcaccgccgattcttctcttgcacaaagtatcattactccttttcatgtactcgcctgtacgccagctcaagttttcattctgt

SEQ ID NO: 3693 - DNA, 428 bp, Chlorella sorokiniana
  Clone ID: LIB3602-049-Q6-K1-B12
gttctagatcgcgagcggccgaccttatgtaattgctgtacgagagttacataccatttgttacacattaagtcctgggaccagatcggtatatggactcaaaaaggcactgctcagtttggccttgaaaatgggtctggatacgttggacctgtgggtgagtgggtgtgcgagcatgatggatgggtttggcagcagatttgcatggcaccaaccgctgtgtgaagcgcgggtgaagggtggacatggagtgaggtgtgggatgtaggatgtgccgcggttagcggaagtaaaggtggtggtttgaaagatgagtaccggtgaggcggcggtacttggtgcatcggaggaccttcattagtggaggtaaatttggttgatggcgatgatggtgcatgtagggcgttgagcggttgattggctgtcag

SEQ ID NO: 3694 - DNA, 440 bp, Chlorella sorokiniana
  Clone ID: LIB3602-049-Q6-K1-B4
aaaaaaaaatagaaaaaaaaagaactaaaaaaacaaaaaacaaaaaaaaaggccaactacaacaaagatcactggcgtgcaaggggcggaactgggctatcaactttgccgtttacttccccaaccttgagtttgtggctctcactttcaactacatggaggtcaatttaattgggacccactttgaactgtcgggcgtgccaaaactgacgcctttccagactcacctgctttacagcacctccgagcttagcgccaaccagtgctgtgctagagtgctgatggaagagtccttccacttcgggtgccacttcaaagacgcgcgtggagcgcatcttgagcgcgtgcataagtccatgcgcatgctgaaggcccacacactgtagagctttgcctccctgaccactcagaccttgcacgttgtcattacctccgttcct

SEQ ID NO: 3695 - DNA, 534 bp, Chlorella sorokiniana
  Clone ID: LIB3602-049-Q6-K1-B5
aacaactttggcacgtggggcctccccgggggcaacgcggacgacacagacgcagacctgctggaagtggccactcgcgaggcccaggaagagatggggccgcagctgccgcgcttccaagtgcgggagagcgtgctgaccaagcgcggcaagaggggccagaagcagtacatggtgtttgttgccggcatcagtcctgaggagcgggcctcgtggcggccacacctgaatgaggagcactccgcctggcgctggttcccactcacggagctgctggctggcaacacggcgctgcacccagtggttgagctggcgctgctgcacgacccctggcggcgccccgtgctggcggcggtgggcggccaggcgggttgatgagtgtcgctggccatcttctgttcccatgttgtgcttgctttactatggctttttgcgtgtagcccctcctgtcgacttccattgcgctgtacattacaccgctgccatgatgtgtgcataactccattattgtttggcattccaacccatacacat

SEQ ID NO: 3696 - DNA, 436 bp, Chlorella sorokiniana
  Clone ID: LIB3602-049-Q6-K1-B6
aagacaatagccaccgaccagcacgagtgggaccggctgattgaggcacacgaccagctcatgctagaggagtggcgggagaagcaaggatgaagtgggcctgacaaggctgcctgccccagcgccaccaagcggccaaggataacagctgacactgtgcttgctggcgctgttgctgactgttggcagatccttccctacgagtatacactgctgtgttctgacctgatacatgagtgctccctctgttgctggctcacaatctgcaccatcgtgtgagccgatacttccctcaaactactgtaattgctatagctgctaaacaaaccctggcggcgccccctgcttgcggcagagggcggacaggcggccttgattagagaccctagctatctttctgttcccatgttgcgcttgctttactatatatttttgc

SEQ ID NO: 3697 - DNA, 276 bp, Chlorella sorokiniana
  Clone ID: LIB3602-049-Q6-K1-B7
aaaaccgcctcactatcaggagctgaccagacatgacgacgcctgacgacacgctgttaaggaagcggagctgggcggcattctaatgtgaacgacagtctccctacatgaccacattacatggccaacacataaaatgcacccttcaccaaacacagcgtggtccattaataacactgccgtttccacagaggacattgaccaatcgggggaaggctcaccaacagtctaactattcaccggccgaacaactgctataaactcatgggacacagt

SEQ ID NO: 3698 - DNA, 403 bp, Chlorella sorokiniana
  Clone ID: LIB3602-049-Q6-K1-B9
caagaagcgcaagacgaagacctacaccaagccgaagaagcagaagcacaatcacaagacggtgaagctgcgggtgcgcaagttctacaaggtggacgacagcggcaaggtgcagcgcctgcgccaggtgtgcccccagtgcgggcccagcatcttcatggccacccacttcaaccgcgtgtactgcggcaagggccacctgacgttcgtgtacgacaaggagggccagaccgtctaagcgccccgctcccccctgcggatgcacgcttagcagcagcacacgccgtgggtgcgcccggcatgccggcacaccagccactgagccggtgggcgtccctggcagcggcgcaacgcctgcaagcccttcttgtgtgttctgtgccgctgtaatacccctgcttgc

SEQ ID NO: 3699 - DNA, 518 bp, Chlorella sorokiniana
  Clone ID: LIB3602-049-Q6-K1-C1
gcgcagtaagacagcccccatgctgaccgacgatgtgcgcgcccccatcgtggcttcggcccagcagcataagggcgcgcgcaaggcgaccgtggcggtcctgccccgtgtgggcaaagtcctgggtgccggtgtggcctccctggcccttttactgaacacccacaccgcccctgtgaagatgggcgctgactactgcgcgctggtgttcaaacccttcaacatttccattttctaaggcgagtctgggagctttgtgaacaacgccccctttctctacaacattgagttcgatgaggactatgtgccctctggcgtgaacgccgaggcgatcagccgtgaggactacctgaacgcccccggcgaggagttcaccgtgaagctggacaccgctggcgagtacagcttttactgcgagccccaccatggcgccggtattggttgccgcattaccgtgaacatgagcgcagcatgttcatcgccgcggtgtgttctgacccatttttgaagcacttgct

SEQ ID NO: 3700 - DNA, 234 bp, Chlorella sorokiniana
  unsure (1)..(234): unsure at all n locations; Clone ID: LIB3602-049-Q6-K1-C10
gcttgatgagtagcacccgcaccacccctccctcgcatgagcttccccctcgtccccgcttccttcactgcgctggccactgatggcctgaggccaccctgcaagctttccccgcttcctttgcgctgcatctcacgcaatgcggatattgttacagagctgggcatantaaaaaatacaaacttttataaattatttttattttccaaaaatatgaaatatatattttgggtg

SEQ ID NO: 3701 - DNA, 425 bp, Chlorella sorokiniana
  Clone ID: LIB3602-049-Q6-K1-C11
caagcgcccctccaccctggtgttctcccgccagggcatgcccaacatggacaccacctccattgagggctgcctggagggcgcctacgtggtgcacggcggcgacaccaagcccgatgtcatcctgatcggcactggctccgagctggtgatggctgtggatgccgccaagaagctggaggctgagggcaagaaggtccgcgtggtgtccatgccctgctgggagctagttgaggagcagccgcagagctacaaggacagcgtgctgctgcccgaggtgaaggcccgcgtgtctgtggaggccggcagcacatacggctggcagaagtgggtgggcgacaagggcaagtccatcggcattgactagtactgcgcctccgcccccggccccctgctgtactagaagtactgcatcaccgtggacg

SEQ ID NO: 3702 - DNA, 387 bp, Chlorella sorokiniana
  Clone ID: LIB3602-049-Q6-K1-C12
gtggacgtgagcggcgtggacatctccaagtttgacgacgcctacttcaagagcgccgagaagaagcagaagaaggggagcgaggagggcttttttgccgataagaccgataaggcgccgctgcccgctgagtatgtggccaaccagaaggcggtggacgcggcgctgctgggcaagctgagcgacgagctcaagggctacctgtccagccgcttcacgctgcgctctggcgaccggccgcacctcatgaagttctgaggtgccagcctggcagctcgctcgcccagcaagcggcccggcggccggccttgcttggcggcagcccgagcggcacgcggcgggtccgtagtgcacggcccgacgagcgctgtgcggctgcggcatggc

SEQ ID NO: 3703 - DNA, 343 bp, Chlorella sorokiniana
  unsure (1)..(343): unsure at all n locations; Clone ID: LIB3602-049-Q6-K1-C3
gcgccaacgatcgtgacgagcaaccngagcccatttactggctttgacgcccgcacccctttaccctgtcgattgagttgggcctcctttccacattgtgatgccttttacccacccttcacttgacctgccctgtacactacccgccgccccgggtgctcgttccccctgcttgttttgccgcggctcccaccgagaggacccgcccgcgggccgtccacgccgcactctgcccaacgaacccttcctgccatgttgtaccccagtttttctggccctcgccctatgtgttgcctgcgccggccttgcctgctgtcctgcacccctgtaccatgcctcggct

SEQ ID NO: 3704 - DNA, 537 bp, Chlorella sorokiniana
  Clone ID: LIB3602-049-Q6-K1-C4
gcaacaaggaggagatggaggcggtcgctgctacgcatgaatgatttgtgccaccagaactgttacattttcaccaggcggtgtgctgacatccatccattactgcagccgcaacaaggaggagatggaggcggcggccggcacgctggacggcatcgtggacaccgtgtccgccaagcacgaccttgtcacctacttgtccctcctgaagacaaacggcaagtttgtgattgtgggcgtgcccgccgagccctttgagctgccctccttcgctgttgtctttaagcgcctgaccgtgggcggctccctcatcggcggcatcaaggagacgcaggagatgctggactttgcggcgcagcacggcattgtgtgcgacaccgaaaagatcggcatcgactacgtcaacactgccatggagcgcctggtcaagaacgatgtgcactaccggttcgtgaatgacatccaaagcaacctggtggtgttaggcggcggctggacaacccaagcggtagcagcagcctgcacattgggagcgcc

SEQ ID NO: 3705 - DNA, 508 bp, Chlorella sorokiniana
  unsure (1)..(508): unsure at all n locations; Clone ID: LIB3602-049-Q6-K1-C5
gcgggcaagatcaccgctgaggagtatgcagaggcggccccggaccccatctaccagttctctgctcctgtgggcgggcacatgaacgaggaccatgcggatgcgacccgtgccatggtcaagcactatgtgggcattacagtggacaaggcgctgatccagagcctggaccggctgggcatgacagtggtgtgcgagcggggcaaggacgcgctcaagtgccgcctgccctttccccgccccgccaccgaccgtaagtccatcaaggagctgattgtggagatgacgcatgcctcggcgggcgcctttgcgtgagaaagggcagcctgatgcagctattacgtccgccggcgagtgcgtggctgcattgctgcctgcgagcttggtccatctgattatattatctccccccttcggtcctaaactcccgctcggtcaccccctcagaacactgctcagcttgcattggtgtaaatcatggcacatagaanaaaaaaacagaccaagc

SEQ ID NO: 3706 - DNA, 461 bp, Chlorella sorokiniana
  Clone ID: LIB3602-049-Q6-K1-C6
gaaaaaaagatcaccgataaggatatgcaaaggcggaacccagaccccatctaccagttctgtgctcctgtgggcgggcgcatgaacgacgaccttgcggttgcgacccccgccatggggaagcactgtgtgggcatcccagtggacaaggcgctgattcatatcctgggccgcctgggcaagacagtggcgtgcgagcggagcaaggacgcgctcgagaacccctggcttttcccacctcagtcaccgaccgcaaatccatcattgagctgattggggaaataacgaaaggctcggagggcgcctctgtttgaaaaaggtgagccatgtgcaggattacgggccccgcccagtgaccggctcaatagccgcctgcgagctggggccatctgacaatattacctccccccttgcgagctaaactgccgctcggtcttccccttagaacactgcttttcttg

SEQ ID NO: 3707 - DNA, 302 bp, Chlorella sorokiniana
  Clone ID: LIB3602-049-Q6-K1-C7
ctccaaaccgcctcctagtccaccatgaagaagttcctggctattgtgctggccgtgctggccctggcgcagctgggccttgccggcgcgccatgggaggccaacaatacggttcgcgcctgcgtcaagtcgcgcaagtgctggaccaaaggcaccaccgccgtgtgcggcgtggattctcacacgcataaacgcatttgatttccaacaagtgctactttgattgtgttaactttcacgcccgagacacctgggagatcgaacactggtaccaccccagacacaagagctacaccaagcac

SEQ ID NO: 3708 - DNA, 229 bp, Chlorella sorokiniana
  Clone ID: LIB3602-049-Q6-K1-C8
gatgagtcagcaccgcggggccgcccggcgcacggcacgccacccggcaggcagcttatttatgtgcgctgggccgcgcgccggcgccccgtgtaaatcgcgatatgcgaaaaaaaaaaataaaaaaaaaaaaaaaaagagcaaaaacaaaggaaacaaccgtctagtgcggaatgaaagcaaaacacgcataatctcaacgaatatagccaaacatgatgcttaattt

SEQ ID NO: 3709 - DNA, 469 bp, Chlorella sorokiniana
  Clone ID: LIB3602-049-Q6-K1-C9
ccacagccggggcattcttcatcttctgcgccctcacaatcctgctggcgctggcctcccaggcgctgggcgtggctgtctcggctgcctgcccctccgagaaggtggcatttgcggtggcccctggcataaccgtcatcctcatgctgctgggcggcttcttggtgacgtacgactccatccccgtctggatccgctggctctgctggatcagccatctctactatgcgttcatgggactcactatcaacaacttccgcggccagtccgagtggagctgcacaacaccagccacgcccgactgcacagcgcggtctggcgacgccatcctaaccaggctggggttcgaggacaagggcatgtgggtgccgtttgtgggcctggcctgccttacactgggcttcaacctggctgggtatgcagtgctgcgcttcaccaagcagaagttcctgccgctcaccggcagcac

SEQ ID NO: 3710 - DNA, 429 bp, Chlorella sorokiniana
  Clone ID: LIB3602-049-Q6-K1-D1
gatcaaccatgcaggcgacgctgtgcggcagcgcggggcagctcgccagccggtcctccgccttcgcggggagccggccagccgtggcggccttcagcagcgtgcagccacgcagcggcagggggcagctacaggtggtggcagccaagggcaagcagcgcatgcggacgggcggcaacacgcgccaggcgcagatggcgcagcagcagatggtcccgcccacgccgccggtggaccccgagaacgaggagtttgtgatcttcgtgcgctccaagaagctgccccagtgggtgccgctgagcgtggtgaagggcggcgccgcggtcaacatgctggtgaagggcctggggtctgacttcatgaaggagacgaccgagaagacgctggtgcagaacatcggcaaggctgtgtacaaggacaaggagcaga

SEQ ID NO: 3711 - DNA, 244 bp, Chlorella sorokiniana
  Clone ID: LIB3602-049-Q6-K1-D10
aagcgactgtacccaggacatgcagtacaagcggagcgacatgctgcgctacatcctgccgctgcatcgcgagctggtggacgcggggctgcgcatgctgctgcacagcggaaaggtggacgccataccgccactgatgggcacgcgcaacttgatacagcaggctggacctggcgatcaccaacccgtggatgccatgaacgcacgctacatgccatgtaccctggcggacagcggagcacac

SEQ ID NO: 3712 - DNA, 454 bp, Chlorella sorokiniana
  Clone ID: LIB3602-049-Q6-K1-D11
ggtgccacagcattacagcaccggcaagcggggtgctatcagaatcacagtgcaatcaaaaattcactacctagggctcatcctacctaagcgctgcacaggccgccggtggcagagggcacgccaccacgcggcggacaacctggctaattgcaggcaccgtcagcagaaggcaaggcggggctgagcaagtgctctgagctctgagggccaacggtgtgtgctactgtactgggttgggtgccgtatgagatgcgttaccagctggctaacgggcaaggcataggtgaggggcggctccccgctgtgcacatgacgggggcaagcccactacgcctaccaatgaaaagtaaagggcagaccaagcgaaagcaaattgcaaagggcttgttgggagcgaggcttgcaaccccctgcaggcagccatatgctaggggtgcaaggtgagggggac

SEQ ID NO: 3713 - DNA, 354 bp, Chlorella sorokiniana
  Clone ID: LIB3602-049-Q6-K1-D12
gctggctcatgagttcgagcgctcctgctctctgaacactttttggtgcaatgcgcggaccaagacctagatcggggcgcatttaaaaacctagtgagattcacactgtattgtctagggccgatcctacattagccgtgtgcctgctgctgtcttctgactacaatgctagcgtactggataaacctgtctcaccgcagatgtgaacaaccgcttgtaaagaggagctgaacaagtgctcttagctatgagggccaacggagtgagctactgtactggggtgggtgccttatgagatgcgataccagctggctaaggggcaaggcaaaagtggggggctggttccagttatgc

SEQ ID NO: 3714 - DNA, 258 bp, Chlorella sorokiniana
  Clone ID: LIB3602-049-Q6-K1-D3
gggtgcagcagctggctgcccagctgtccctcaagcagctgcagaacttgtgtgccaagaagggcctgagcacctcgggcaccaaggcgcagcttgcagagcgcctgctgcggcattcggccaacgagtgacgccccagcggcttcctttggttaacctgtcctttttctcgcatattatactatttcaatatcatgtgcaactgcctctgcctagaaagaaactaacaacaagaaaaacaaccagaatggcgaatga

SEQ ID NO: 3715 - DNA, 331 bp, Chlorella sorokiniana
  Clone ID: LIB3602-049-Q6-K1-D4
gcggggtgcagcagctggctgcccagctgtccctcaagcagctgcagaacttgtgtgccaagaagggcctgagcacctggggcaccaatgctcatcttgcatagcgcctgcttctgcattctgccaacgagtgactccccatcggcttactttggttaacctgtcctttttctcgcatattatactatttcaatatcatgtgcaactgcctctgccttgtaaaaaaatataatatattaataattctaaatttcgttatatttccctttttcgaatgtatatttaaaaattatataatattttatttatattttatattattataattttt

SEQ ID NO: 3716 - DNA, 411 bp, Chlorella sorokiniana
  Clone ID: LIB3602-049-Q6-K1-D5
gccagcaagatggcccctaaggagcagaagtcgaaggaggcgaaggcgcttgccgccgccaactccagcaagggcaagaagaagaaatggtccaagggcaagctgaaggagaaggtgaacaacctggtcctcttcgacaaggccacctatgagaagctgctcactgaggtgcccaagtacaagatgatcactccctcggtgctgtccgaccgcctgcggatcaacggcagcctggcgcgcgccgccatcaaggagctgctgggcaaggggctgattaaggaggtggccaagagccgcgcgcagcagatttacacccgcgcgacggcagccgccagctaagcagccacccagcagtttggcagcatgctagtgcactcgttgtgcttgccaatctggtaacaggtccctcgc

SEQ ID NO: 3717 - DNA, 517 bp, Chlorella sorokiniana
  Clone ID: LIB3602-049-Q6-K1-D6
gccacacgtacagtccctgcgctacttcatctgctagcacacctacgaccgcaccgactgcaatgacgcctggttgcacaccatatgtgaccccaccttttgcttctgcagactgcatcaacaccaccggctacaaccagggagcgctcgctgaggcaatggcgtcaggcgacccactacccgaattacacaccctcacagatggccctaaggctgcccataaacagacccgtaaacaacgctggcatccaagttatgatacaactcatgatagcgcttgtggttccccatgagttctcctgcatgaaagtaatctgccagcaactctgccctgctgactgctggctaatctgattgctagtataggccagattattcttgagacactgtgcattaccaactggccagtcgcccagtggtagcccctgtgattgcgcctgagaactgtgctgtaccggcggcacttatcataagaaatatagtatcgtcatgtgaagtgcaacgtcaaaaaaataaa

SEQ ID NO: 3718 - DNA, 366 bp, Chlorella sorokiniana
  Clone ID: LIB3602-049-Q6-K1-D7
atgcacacggcggtgcatgacgtggccctgctgaaggacctgagcttgaaggccaagctgagcatcatgggcagggggttgggctctctgggccgccagccgggagaccccaaccagctggtgccgcccgaggcatacctggcatatgcactgccggccatgccgctgccacccctacctgagcttgagaaggagcaaagagcggtccggccatgagcagcgagagccgcgaccacatgagaggggctgctgaatgccgcagctgcgctttttgcctcgccgtgatggcacagtggagagccatagccgtttgtttggctgatcaagagtgtgcgccagccgcgattgtatgcttcaagctttttt

SEQ ID NO: 3719 - DNA, 312 bp, Chlorella sorokiniana
  Clone ID: LIB3602-049-Q6-K1-D8
ggagggtaaagagcaaagatgccggcgggccagggctaccgcgcgcgtacgcgccacatgttcagccgcggcttgaggcagaagggcttcatcccgctgtccacctacctgaccaactacaagctgggtgactatgtggacatcaaggtcaacgccgcggtgcacaagggcatgccccacaagttctaccacggcaagactggctgcgtgtggaatgtgaccaagcgcgccgtgggcgtggagctgctcaagcaagtcaacgggcggtacatcaagaagcgcattcacgtgcgcatcgagcacgtgaccccc

SEQ ID NO: 3720 - DNA, 453 bp, Chlorella sorokiniana
  Clone ID: LIB3602-049-Q6-K1-D9
cccacgcgtacgcggcgagtgccggaagtgcaaagtgaaaggctgcgagaagtgtgacgggaacttgtggacctgcaccaagtgttggattcagcgggcctactttgaggaagggtactttccggacccgagcacaggcgcatgcacccgctgtgacaagggctgcaaggtgtgttctggaccgggtgcatgcttggagtgcaccctcactgtgttggaccctgccacgcagacatgcctaccatgcaaggtaccaaactgctaccagtgcgatcagtcacgtgacaaatgcgacgaatgcatgaagggcttacgcctggttgaagaaagcaacacctgcgtgccctgcggcgtttccaactgcgcgaaatgcattgacgacacacaatgtcgggaatgcatgccaggctatgggctggcgaacccgcacgacgttgagggttatagttacaa

SEQ ID NO: 3721 - DNA, 352 bp, Chlorella sorokiniana
  Clone ID: LIB3602-049-Q6-K1-E1
tcgactacgcctagactgacacctgcccgtatacatgatccaaccctacgtccgcctccttgctcagacctatctctagggtaatgtcaaaaaaagctaatacactgactaccttcattcaaccatctggactggcacaacctccggttaccttattaaatagtgctggcccctaataaccgttactccatgccaggacattcaaaaacgattcttcgcatgctgagctcacaccagccttacccgctaagtgctgagtgcgacgcccattgaactatggcattaagcgcggcaagtgtggtcttgtctttcatactaaacgctccattattgacaattgtagcgcgcggtc

SEQ ID NO: 3722 - DNA, 381 bp, Chlorella sorokiniana
  Clone ID: LIB3602-049-Q6-K1-E10
actagaagaacattacaatggctggtgaaagggcacctaaaaccaaacgaaaggcaaaggggtctggaaggcattcaaacccatccatggaagggggccccgacagccagcttcaaaaatctggccctgtgcccgggcacaaaaaaaaaccggggcccggcacagacaacgtgacccccacattggccctgttgctgtcccaccccccattccctaaacaaccaattctttgtgtgtgagggggctttcccccccagccggagcataaatacaaccgtgggggtgggtttaaggcaaacaaaagggggctgatggaaaaggcctatagggcaagtcgaccacaacccccgcactttgaaaaaaaatgggacttttcccccc

SEQ ID NO: 3723 - DNA, 464 bp, Chlorella sorokiniana
  Clone ID: LIB3602-049-Q6-K1-E11
gctccccgactccttcagccagcccctgaagtgtaaacacgatgcaggccgccctcacccagcgcttcaccgccgtgcgcggcactgcccgcgctgcccgcacttccgtgcgggtgcaggctgccgctcgccccacctggtaccctggtgcgtggatctcggtttgggggagcagcagaggctatgtcgccattggggggagggcacgcgtcggcagctggctcaagccacagatattgcaattgcgcagcccccagatgttcacatgcctgtcacatggcttgcacgagccactccactgcctcaatgttgcttgcgtcgcaattaatgacgctgtgttgtgcattcgtgtgttgcccgcttgtcgcctgcccaacgcactccaccagcccgtcggcgattcccacccctattcttgcctgcgtttgcttgtcctggcgcaagcgcgaccccgcccaagtacc

SEQ ID NO: 3724 - DNA, 377 bp, Chlorella sorokiniana
  Clone ID: LIB3602-049-Q6-K1-E12
cggacgcgtgggcggacgcgtgggctgcgcatggaggtgctgctggagcggctggacctgcgcatggaggccgcgggtggctcccaccaggcaacgctgcaccggctcatggactggacgcatgtggctgaagagtgcgggctgaagcggctgtggactaagtgcatccgcgagatctgtgtcacgctgtcccgcggcaagaagggcgtggggccactcacgaacgtcagcaaggacctgcagggtgcgctggctgcggtgcctcccccttcggacaacatgcacacggaggtgcatgacgtggccctgctgaaggacctgagcttgaaggccaagctgagcatcatggccaccctgctggcctcgctgtgccgaca

SEQ ID NO: 3725 - DNA, 514 bp, Chlorella sorokiniana
  Clone ID: LIB3602-049-Q6-K1-E3
cccacgcgtccgagcagctggaggttcaagatgacgacccgcttcaaggccaaccgcaagaagcgcggccacgtgtcggcgggccatggccgtatcggcaagcaccgcaagcacccgggcggccgcggtaacgctggtggccagcaccaccaccgcatcatgtgggacaagtaccaccccggctacttcggcaaggtgggcatgcgctacttccacctgaacaagaacaagtaccactgccccgtgatcaacctcgacaaggtgtgggctctggtgggcgaggacgcgcgcgtggcggcggccaaggacaccgcggccgcccccgtgattgacatcaccaagcacggctacttcaagctgctgggcaagggccagctgccgcagcagccggtggtggtgcgcgccaagtttgtgagcaagctggcggagaagaagatcaaagaggtcggcggcgcggtgcatctggtggcgtaagcacccccacgcccacccgcaggagcagcagcagttcccc

SEQ ID NO: 3726 - DNA, 152 bp, Chlorella sorokiniana
  Clone ID: LIB3602-049-Q6-K1-E5
aaaaaaaaaaaaaaaataaaacaaaacaaaataaaaaattatataaaaaaaaacaacattttcttaattcttttaggggtgatatttcctcctttttatacacccaatctttctccccttcattcaacttataatttttttttattgcccct

SEQ ID NO: 3727 - DNA, 298 bp, Chlorella sorokiniana
  Clone ID: LIB3602-049-Q6-K1-E6
aaataaaaaaaaaaaaaaaaaataaataaaatttaaataaaaaaaaaaaaaatttattatttaattttatttttaattggggggtacttattaatttggtatccgcccttttttttggttctctctttttttttccctttctttttcttttttcttttttttttttttacttttattttaatttctttgctttttttttaatttttttccttattggtatatactttttttttttccaatttttttttttttttttgtgacatattatttttaattagtgctttgttgttatttactt

SEQ ID NO: 3728 - DNA, 401 bp, Chlorella sorokiniana
  Clone ID: LIB3602-049-Q6-K1-E7
ggcggcaggagtctgcgccacttgcggaccaagcagggggctgaagcccccagccgcggcgcagtggactacagcggccgccagctgataattggcggcgcccttttcccatgtgcttgctatgccccatgccctgtgaacagctctacagcactccagaacattgatgtaaatggcggcgggcaagtaaaaaaaaaaaatgaaaaacgtggaaaacaaactaataagcacaacaaaagcaaaatcgcaaatacaaatacgggggggccgttttagaagatccaagttaccatccgcgtgcttgcaaaaccatatactttatatagggttacccaaaatgaaataagtggctgacgtttaaaacgctgaaactgggaaacacctggggttacccaaattaa

SEQ ID NO: 3729 - DNA, 531 bp, Chlorella sorokiniana
  unsure (1)..(531): unsure at all n locations; Clone ID: LIB3602-049-Q6-K1-E8
ttcaggctgagaaggagagcgtaactcgtaccatggtggccgccaagaagaccaagaaggctcaggagagcagggctcccgcctggcgctggtgatgaagtcgggcaagtacacgctgggctacaagaccacgctcaagacgctngcgctcggcaggccaagctggtgatcatctccaacaactgccccgccgtgcgcaagtcggagatcgagtactacgccatgctgtccaagaccggcgtgcaccactacaccggcaacaacgtggacctgggtaccgcgtgcggcaagctgcaccgcgtgtccgtgctgaccgtcaccgaccccggagactctgacattgtgtccggcatgtaagcggcgcagcatggcatgcgtacccgggcgctgtctgagctgggactgcccctgtnttagaaacagtgggtctaaataaatatataattatctaatattatcaattatattttggaaggggggccttaatggaagaaatcttttcttctctccgccttgttggggtgaaatttt

SEQ ID NO: 3730 - DNA, 431 bp, Chlorella sorokiniana
  Clone ID: LIB3602-049-Q6-K1-E9
gcaaggcgcaactggtgcagcggctgctggcggcgggcggggaggtggatctggcggacaaggagggctacacgcgccctgcacatggcggcgggctatatgcacacatccaccattgcggcgctgctggcaggcggggcggacccggagcaggaggaccggcaggggcgcagcccgctggagctggtcgagtcgctgcgtgcggcgctgcccgccaccaaccccatgacggtgcagcggcgcatggccctggaaaacgtcatccagatgctcacggccaacatgtttgaggatgttgaccccgcggcggtgctggacaagcgggtgaacgaggagagcgggcacaccgagtggctggtcaagtttgaggacgaggaggagcccatttgggtggacgccaagtacgtgaaccaagatgtggcggaggacta

SEQ ID NO: 3731 - DNA, 467 bp, Chlorella sorokiniana
  Clone ID: LIB3602-049-Q6-K1-F1
ctcgtcaccatgcaggccgctctcgctcagcgtctggctctggtcaagcccacccggggcgcccgcaagcaggtgacccgcgccgccgtcgagttctacggccccgaccgcgccaagtggctgggccccttctccgagggctccgtcccctcctacctgaagggcgagttccccggtgactatggctgggacaccgccggcctgtctgccgaccccgagaccttcgcgcgctaccgcgagattgaggtcatccacgcccgctgggccatgctcggcgccctgggctgcctgacccccgagctgctgcagaacaacggcgccgctgacttcggcgaggcggccgtctggttcaaagccggcgcttcgatcttcaacgaggacggcctgaactacctgggcaacccctccctgatccacgcccagtccatcgtggctgtgctgctgacccagctggtgatcatgggcgc

SEQ ID NO: 3732 - DNA, 431 bp, Chlorella sorokiniana
  Clone ID: LIB3602-049-Q6-K1-F12
ggagatcatgtaccacaaggccaacctgaaccgcatcatgtccgagtacacggggcagcccattgagaagattgaggaggacaccgaccgcgatcgctacatgtcgccgctggaggcccaggcgtacggcctgattgaccacattgtgggcggcgaggaggccgtgttcaagattgagggctccacccgcgccttccccaagaccaaggagcagtacgtgaactggggcgacgaggacttcatggacggcagccgcggcagcaggtttgtgaagccgctggagccgcataccgagaaggtgtccaccagcaagcagtgagccgtgggcgtggcgccgacggcaccgctacattctgcttcttctctccgcgcttcttctccttgccttcgtgcgacactgtccagctgctccctgtaactcattcactagc

SEQ ID NO: 3733 - DNA, 428 bp, Chlorella sorokiniana
  Clone ID: LIB3602-049-Q6-K1-F2
gcgccgccggctacgtgaccaagtgctcctgcgagggcatttactttgcggccaagtcgggccgcatggcgggcgaggccggggtcaatgcctcagagggcggcaagaagatggcggtcgagcgcgcgctgcgcaactacctggacgagtttgaccgcaagtactgggccacctacaaggtgctggacatcctgcagaaggtgttctaccggtccaaccctgcgcgcgaggcgtttgtggagctgtgcgagagcaactacgtgcagaagatgaccttcgactcgtacctgtacaagacggtggtgcccggcaaccctctggacgacgtgaagctgctggccggcacggtgggcaacctgctgtgcgccaacgcgctgcgctccaaggacagcaagatcttgaacattttctttttgttgcaagagcaa

SEQ ID NO: 3734 - DNA, 464 bp, Chlorella sorokiniana
  Clone ID: LIB3602-049-Q6-K1-F3
cggacgcgtgggcggacgcgtgggtttgacgtagctgataatacagatgtgcggctacaagccgctcaaccaaaaacgcggccaccaggtcaggtacacaggcgggcctcctccactaaacgaacgcaggaacgaaagggacagtgaaacggaaagcaagggagcggcgcattgggaaccccgccagctagggtagggggagggtttgtcttttcggggggtagctgcaagggaatgctgctggctgctgctgctgctgccgacgcggggggcgtcgccatttactggcccagggcagaggtggagatcaccaggttgatgcccacgcccagcagcaccacaatcaggccggcccaagcaataaggcccttggtgcccagcttgtaagagtcgccagactcggaccaggtgtcgggggtgtagatcgggctgtagccgtccacgttggcgccgtacttgttggc

SEQ ID NO: 3735 - DNA, 525 bp, Chlorella sorokiniana
  Clone ID: LIB3602-049-Q6-K1-F4
gctcctaccgagccctggcacacaaccccgacgtgcacctgagcaagatccacaagcacgacgagctgagcgagagcgcggagcacatggagcgcgccgaaaagtactggcacagcatcttccgcaaggcgtggcttagccgcgtgcacgacggggacgtggtggacgcccgcatgatgcgcgtctaggcagtcgagacgcgtctaggcctggaggcagccccccgcctctgtgccacaccatgccaatgttaattgaaccccgccaacatacagcaacttcgagcgagccactcacaacaagacggcagcagctggagcgcgccctgttaggaagccgccgtgcccagctgcatccaactactggcgagatgatgccacaaacgcatcagccgtgtgcttcatgtgaagtgctcccttaatgaatgacacgcacccagtgccccccccctgccacctatgcatggcctttctatgcttcacgtgagcacgttacattgagtaggctattaacaaaacgagcgcg

SEQ ID NO: 3736 - DNA, 435 bp, Chlorella sorokiniana
  Clone ID: LIB3602-049-Q6-K1-F5
gcgcggcccgcagctgttcaaggagtattggcgccggccagacgcaaccgcggaggcatttgacgagcagggcttgggtgtcacaggcgacacgggcgtgctcgaaaagggtggttactaccggctgctgggtcgcacctctgtggatgtgatcaagcagggcgggtacaagatctccgcactgcacatcgagagtgcgctgctggagcatcctcgcattgccgaggtggcagtgctgggcctgccggatgccgaatatggcgagaccattgctgcagttgtggccctcaaaacagccccacagcaggccaacacagcagccagcgcagcagcaagcagtagcagcggtggtaatggcagactgactcttcacgatttgcgggcctgggcgcgagaccgactgccgccataccagctgtctcgccacctgaagct

SEQ ID NO: 3737 - DNA, 391 bp, Chlorella sorokiniana
  Clone ID: LIB3602-049-Q6-K1-F6
ggaccgcacaaatatcacggcccactcgaaacaaacaaacatgttggtgcacacatcccaaccaaatgctgccggacgggcaggcagcggcctgcaggctgcacatgtagcgcactgagcctgcggaggctctacgtcaactcacgcatgccactcacaggctgcccatgttaatgcaaccatgcaacgcattgctagacagacccctttgccaaacactcgccccacttcatgccttcttgctgttcttttctgactgctgcaacacatgctccattcggccccattggcgccgggcccacgctgcgtttttgtgattctgccggtcggttctgcttttcttccctcccctacgctgtacgtccgccatttgtgtaacagcagcctatgc

SEQ ID NO: 3738 - DNA, 433 bp, Chlorella sorokiniana
  Clone ID: LIB3602-049-Q6-K1-F7
gccactttcggcggcaagaccaaggctggcaccaaggccggcaccaagaagggcacccagaagcaggccaccaccgagaaggctgcccccaagaagtcttcctctggcgccagccagtggtacggccccgaccgccccaagttcctgggcccctacagcacgaacttcgtgcccagctacctgaccggcgagttccccggtgactacggctgggatacctctggcctgtcggccgaccccgccaccttcgctcgctaccgcgagatcgaggtcatccatgcccgctgggccatgctcggcgccctgggctgcgtcgtgcccgagctgctggacggcaccaaccacattgcctggttcaaggccggcgccgagatcttcggcgacgacggcatccaatacctgggcattcccggtctgatcaacgccaagtcca

SEQ ID NO: 3739 - DNA, 147 bp, Chlorella sorokiniana
  Clone ID: LIB3602-049-Q6-K1-F8
aaaaaaaaaaaaaaaaaaaaaaaaaaaaaaaaaaaaaaaaaaaaaaaaaaaaaaaaaaaaaaaaaaaaaaaaaaaaggggaaaaaaaaggggcgggcggtttagagtccaatttcttcccgtcttcaacgtcatacttttttatggg

SEQ ID NO: 3740 - DNA, 439 bp, Chlorella sorokiniana
  unsure (1)..(439): unsure at all n locations; Clone ID: LIB3602-049-Q6-K1-F9
cggcacgtgttcatgaccgtaccgcccgtatctggtcatcacaatgtgaggggccagcctggaacgtgtttccccttgcagggtccccttgtggctctggcgccccgcctggcggcctacacaaagcctggcggcttgctgggcctctcaggcattctgcaggagcagacgccggctgtgctggaggcatatggtccttactttgagggcttcgaggtgcagaccgaggaccgctgggcactggtgacagctgtgcggaagcagcaatgagccggctgcagcagacgctggttgtatctaagcagattgacagcacagtgcactgctcctccctcacttgccttcactagcgactgccatgtttttacatgcattgtttgtgcaacttttgtgagcgcaaagcagcnnnnnaaaaaaaaaaaaataataaaanttttaa

SEQ ID NO: 3741 - DNA, 434 bp, Chlorella sorokiniana
  Clone ID: LIB3602-049-Q6-K1-G1
agcgcatacaacgacaaggtgcttgacgtgttcaaggccatcatgtggaacaggatcatggccgtgtgcgtggtgcagaacgagaccaccaccgctgtgaccatctacatccttgtggtgcgcctcaccatgtgatgcccacaaccaccaccatctgctgctggtggatgtgcgttgttgcatcggagcgctggactttcagtttgacaagtagccacatgtcctcccggtgacgggcatccataaagctctttccatgcccagcgctctccgcatggtcttggctctagacaacgcgctgccgagcatgaagacagtcactagtcgtggcaggctctacaactttgccgacatgctttgcaccaactccaccgcgtacgtgccttacacccccatactgtcaatgttttacggcatgcatgcttgctttgaag

SEQ ID NO: 3742 - DNA, 54 bp, Chlorella sorokiniana
  Clone ID: LIB3602-049-Q6-K1-G10
ttcccggcaatgttccttaattaggtgcaggcaaccaaacggttgctttgtttt

SEQ ID NO: 3743 - DNA, 249 bp, Chlorella sorokiniana
  Clone ID: LIB3602-049-Q6-K1-G11
gaacataccattggggacacattaagtcctggtgccagatcggcataaggacgcaaaaaggcactgtacagtcgggccttgaaaatgggtctggatacgttggacgtgtgggtgagtgggtgtgcgaacattatggatgggtttggcaccatcttttcatggcatcaaccgctttgtgaagctcaggtgaaaggtggacatggagtgaagtgtgggatgtaggatgtgcggcggtgaacggcaggaaag

SEQ ID NO: 3744 - DNA, 243 bp, Chlorella sorokiniana
  Clone ID: LIB3602-049-Q6-K1-G12
aattattacaaaccattttgtgcacattaaaacctggggccagatcctcataatgactcaaaaaggcactgttcagtcggaccttgaaaatgggtctggataccttgaactctttggttagtgggtgttctaacattatggataggtttggcaacaactttatatggcactatccgcttttttaaactactttgaaaggtggacatttattgaagtttgggatgtatgatgttctgcggtaaa

SEQ ID NO: 3745 - DNA, 65 bp, Chlorella sorokiniana
  Clone ID: LIB3602-049-Q6-K1-G2
acgcaaacaacaacaggtgcataacgacttcaagcacatcaccgagaacaagatcaaggccgtgt

SEQ ID NO: 3746 - DNA, 443 bp, Chlorella sorokiniana
  Clone ID: LIB3602-049-Q6-K1-G3
attaaccggggcatcagccgcctgctgcagcaaatgcgcatggcaccctgggcggaggaggctttcaagacgggggtgtgctcctgcccacctgttggctcccccttctctcttttgagcctggccaacaactgcagcatggcggctgcgcttgggggcatgcaacagcgcttttagcagctctaccgccgccgcctgtatgtgcaccattacaccgcccacctggacgccgcggagcttgaagcggcagtaacatcagtgggctggctggctgagtcgtatcgacagctggatgatgcctcccggccgccagacctgtctcgcctgcggccgcaagaatttggccgcagtaccgccggccagctgaacctgcgataatgcatgctgctgtttcaagttaaacagttctctggatagcattcaaacgtggcctggccgattaa

SEQ ID NO: 3747 - DNA, 451 bp, Chlorella sorokiniana
  Clone ID: LIB3602-049-Q6-K1-G4
ggcgatggtggcccacctgcagcgcctgcaggccagcggctcactgtccgcggagcagggtgagcgaaacagtgggtggtctggcgctgacggcagcgctcaagttgacccctgccgagtttgaccggcgctggcaagagggcgggctgagtgatgcaaacctgggggacttacacaacattggcctaaaggacccagccggccggcagtgtgcggcagctgaagccctgggcgagctgctgcaggcagtggacggccttcctggcccgctgcagccgcagtaccggcagcagggcgaggcgctggtgaagcgctccgccgccctgtggcgtgcagcgccatctgcgctgcatgccaactggagcagcctgcagcagctggggctcatcagcagccaggttgtggcatcggtgcatgatctaccaaacttgcttgtttacaactgggatgg

SEQ ID NO: 3748 - DNA, 408 bp, Chlorella sorokiniana
  Clone ID: LIB3602-049-Q6-K1-G5
gcgggatgccaggatgagctgtcgcggggcgtgcgccgcgcactctgtgcattcaagctgggcgcgccgctcacccaagtgggcgacacatacgtgatggcggtgtgccctggcagctggcaacaaggcagcatgttcaagatgggcagcgtgggcacctgcctgtccaaggcggtggcgggctgtacgcatctcacagatggctgcagggcgctcgtactggtggaggcccccatggacgcgcgcatcatcgtggcggacattacctctagtgtggaagcgtaggccctactgttggcaaagattgtgaagaaagcgttgctgaacatctcgcctgttaaccatcagaagatcgggctaggtgccatcaccattaccggctgggtgggcaattctttcccttatctt

SEQ ID NO: 3749 - DNA, 405 bp, Chlorella sorokiniana
  Clone ID: LIB3602-049-Q6-K1-G7
gcagcctgagggcgagccacgcccgctgctgctcccagcacagccttttcctgttgatcgcagcccaaccctagggaggtggtttgacaagcgcgcacatgcccagtgccaaagctcggcttgtgccaattttctggagcagaagcagcggccatgcagatggccgcagctggagtggtttgtggctgcttgcatgctgcgcacggagtgcagcatcgcttgtgatgacagggtatgcaccaccttgagcgctgtattgtttggcttcctgctgctgtgcgcatacgagtttcttacagctgtgcacagtgatgtgcgcctctgtgcaatacttgtcatattccagggcacagattgcttttcaatactaaaggcgttctgcacaattggaacttctgttctccc

SEQ ID NO: 3750 - DNA, 86 bp, Chlorella sorokiniana
  Clone ID: LIB3602-049-Q6-K1-G8
accacgcgtccgaaagacatacctcacataattctccaagcataaccatttcttgccgccaccagtccaccagtagggagtaaatt

SEQ ID NO: 3751 - DNA, 536 bp, Chlorella sorokiniana
  Clone ID: LIB3602-049-Q6-K1-G9
gtgcgccccgtggctgccacccccctgaagcaggcccgcaacaccttcgcggcccgcaccgtgagcaatgccaccgtcaataagaccaccgccatgcaggtgtggacccccctgaacaacaagttcttcgagaccttctcgtacctgccccccatgaccgacgcggagatctcccgccaggtggactacatcgtgtccaacggctggaccccctgcctcgagttcgcgggcgctgagtctgcctacaccagcaacgagaactgcgtgcgcatgcagaacaccacctgcctgtactacgacaaccgctactggaccatgtggaagctgcccatgttcggctgcaccgatggcggccaggtgctgcgcgaggtgcaggcgtgccgacgcgccttccctgacgcctacatccgagtggtgggctttgaccccgtgcgccaagtgcaggtgtctggctttctggtgaaccgccccgcctttttgcgcgactaccatggccccttcacccgcttcgtgtaaacgggctgcggcatgatggc

SEQ ID NO: 3752 - DNA, 539 bp, Chlorella sorokiniana
  Clone ID: LIB3602-049-Q6-K1-H1
cagacaagcacgagacgccatacatgctcaaactgcgctggggcgtgggccccttaagcatggactgtgcggcgaaccgcacagacccaatatagcatgcattccagatactgaaggcgcacgggatgatcggtactggcgatctcagggcagtggacgaagacgtgaggtgatgagctgctgatggtctagacacacaccatccggattggcatgctgcagcaagaaacctgacagttcaccgagcggtgcttggatgccaacaaccaaggatgatggcgctactagccacaccccccatttttgctgccaggagcggcgcggcggcagccaccacgggcgctgcattggcgcccctggctgcccccgcaacaccgccctgtcgtgcttttgtgttttgtgcgaacccccaccaacccgctaagcgttttccttgccagcacttgcactttccggcatctgccttgccgtccctcgggcacctgactgcgcccgcgtcgaatgttggcccttgcgcgcatgcaatgttgacatgtgaa

SEQ ID NO: 3753 - DNA, 200 bp, Chlorella sorokiniana
  Clone ID: LIB3602-049-Q6-K1-H10
ctgtgctaaaccactgcttattattttcgtacattatctctgtgttaacaggcttgctggcccacaaaaataagggcgccccaaaaataatgcatatgatcaatacaaaactgtaaagagtcagtggttcgttgattaactgatagaattcgtaacggtccaaacataaaaaaaatcaatatttagtgccacttaaatgc

SEQ ID NO: 3754 - DNA, 504 bp, Chlorella sorokiniana
  unsure (1)..(504): unsure at all n locations; Clone ID: LIB3602-049-Q6-K1-H11
gcgagcgcacgcagaagctgcgcgaggcggagatcaagcacgcccgcctggccatggtctccttcctgggctacaccgtgcaggtgggccggccagcttggggcagcagcgaggtgttccagcaggctgtgggggagcatcagcggttgttgcgctggccaggccgtcctgcttcacctgttggctcggccatgctttgtgcctgccagctgtgaacagcttggctggaatgctgcacatgaatcatcgggccccggatgctgcttggctctgcctgcccaccctgctcactgtccctccctgctgcgcccaccctcgcaggcctggtacaccggcgagggcgccctgngctccctcaacaagttcgccaacggcttctaagcagcccggcatgacgacggcctgggcctagcgcccggccgctttgcagccacttgcagccgggccctttgcggggccatccccacccaacaccccttttatgagaagattaacaacctggca

SEQ ID NO: 3755 - DNA, 436 bp, Chlorella sorokiniana
  Clone ID: LIB3602-049-Q6-K1-H12
gggacccctggcttgaggaaggctaggcgtataaccactatgcccacttcgtgctggacgtgcccatgtgctacagggtaccggaacggcccgtaccatagcgcgacgagccaggtcgttccgcgactctcttgaggagcaatcagcccgtgctgccatgccagctgccgactctgaaagactgtgatagccacctcacatcggcgttccacagaggtagcagtgaagctggaactgtagatacgcatcacggaccgcggcctctggctcctgatttgctgcctgccctgcctattggtgggccttgttgacgacaagcatgcacacgcggaagagctggaactgatcactgacttgactcacgaagagcggcagatgctgctaaacgaggtgccatgaagacggctgggcacgcccttccgcggcggtacgatgc

SEQ ID NO: 3756 - DNA, 455 bp, Chlorella sorokiniana
  Clone ID: LIB3602-049-Q6-K1-H2
caacccgtacgaaagtcatccccgctaccaatacggtggtgcctgaccttaataagcctgagcagcgcgccgagcgggttgcttacaagaaggagggcttcacattaacggaccccccacactatgctccgtacgggccacctcagcccactggaccaagatggtgttagctgcgctgaataagccctacacgccccttacctgattgcctttgtcaagcaagaaaccaccaagttgaccgcccgctcctttgctaaagacaagcatgcatgatggcgctctcagcggcggcgcccatttttgctgccaggagcggcgcggcggcggccaccacgggcgctgcattggcgcccctggctgcccccgcaacaccgccctgtcgtgcttttgtgttttgtgcgaacccccaccaacccgctaagcgttttccttgccagcactttcacttcccggca

SEQ ID NO: 3757 - DNA, 537 bp, Chlorella sorokiniana
  Clone ID: LIB3602-049-Q6-K1-H3
ccgcatttatgatgtgggcgccaagaaggcgggcgtggacttcttccctcactgcgtccacctggtcagctgggagaaggagaacatctcgtccgaggcgctggaggcggcccgcatcgcggccaacaagtacatggtgaagaacgcgggcaaggacgccttccacctgcgcgttcgtgtgcaccccttccacgtgctgcgcatcaacaagatgctttcgtgcgccggcgcagacaggctgcagacaggcatgcgcggtgcgttcggcaagccatttggtgtgtgcgcgcgcgtgggcatcggtcagatcctgctgtccatccgctgcaaggacacgcacgctgcggtggcggaggaggccctccgtcgtgccaagttcaagttccccgggcgccagaagatcgtggctagcaggaactggggcttcactccctacctgcgcgacgattacttggagtggaagcgtgagggccgccttgtgaacgacggtgtgaatgccaagctgcttggcaaccacggcccgctggacgcacggga

SEQ ID NO: 3758 - DNA, 72 bp, Chlorella sorokiniana
  Clone ID: LIB3602-049-Q6-K1-H4
cggactctttggaaaaaaaacaaaaaaaaaaaaacataaactaaaataataaaaaaaaaacaaaaataaaaa

SEQ ID NO: 3759 - DNA, 300 bp, Chlorella sorokiniana
  Clone ID: LIB3602-049-Q6-K1-H5
cgattgtggtggacggcggcgagtggatgtgcaggccacccctggtgccccgagagctggtgtcacaaatcagccgtggggtggagtcgaagagccgggcagtggggctggccggcggtggcagcggaagcagcggcacgcgcagcaagctttgaaccaacaaaaaatgatgttcagcgtgtagttttgttacatcttcacacactgccactttgcatgtggcggctgcccgacagtgtgccatgcgcacagctgcgtgttatgtggtgcacatcaaaaaaaaaaaaatgctcaattgtc

SEQ ID NO: 3760 - DNA, 441 bp, Chlorella sorokiniana
  unsure (1)..(441): unsure at all n locations; Clone ID: LIB3602-049-Q6-K1-H6
caagcacaccatgcacaaggtcactcagtacaagaccggcaaggcgtcgctctacgcgcagggcaagcggcgttacgaccgcaagcagtccggctatggtggccagaccaagcccgtgttccacaagaaggccaagaccaccaagaagattgtgctgcgtctggcctgcaccgtgtgcaaggcccagcacatgcacgccatcaagcgctgcaagcacttcgagatcggcggcgacaagaaggtcaaggggctatactagtaaaaaaaaggagagcggcaggcggagagcatgaccgagaaatggaggcagcggcgcccgctcaccctgtgcggnctgcttcccgcccggcgcctcgctttggccgcctctggccactcgtacccctncttgtccatgcccttgtgctttctgagctgcccaacctggcatgcaagcagcct

SEQ ID NO: 3761 - DNA, 162 bp, Chlorella sorokiniana
  Clone ID: LIB3602-049-Q6-K1-H7
gggatatgatgctaaatcagaccaacaaacaattcaccatgcaaaccgccctgtgccagtccctggacgcccttgtgggctactacgaccagactagcatcaacgccgcacgtaccatcactctgagccgagctctaaaatcgaacctgggccttaaaggct

SEQ ID NO: 3762 - DNA, 133 bp, Chlorella sorokiniana
  Clone ID: LIB3602-049-Q6-K1-H8
atcatgcacacccacctaacaatatccaaaccttcctacgagttcataatacctataccctctcctacaccaccaacaaaattcacttaaaattcccacactataaaaaccatccccctaaaaaaacaaatcc

SEQ ID NO: 3763 - DNA, 71 bp, Chlorella sorokiniana
  Clone ID: LIB3602-049-Q6-K1-H9
ccttgctacgcctcccccgcccgtgcgctctctgcatcgggcgaaatgtttgcctgcgggcgcgcatgctc

SEQ ID NO: 3764 - DNA, 324 bp, Chlorella sorokiniana
  Clone ID: LIB3602-059-Q6-K1-A1
cccacgcgtccgggagccggcgcgcgaccgcaagaaggagaagaacatcaagcacaacggcaacctgacgctggaggatgtgtatgaggtggcgcgcgtgatgcgcgaccgcagctgcgccgccaccttctcgggcaccgtcaaggagatgctgggcacctgcgtgtccgttggctgcactgtggagcacgaggacccccgcgacatccagaccaagattgacgagggcgaaatcgtgtgccccgaggcgtgagcacgcccccggcacacagcagcagcggcctagcagcagcagtgtagctgtcatgtaacacactgctgctg

SEQ ID NO: 3765 - DNA, 259 bp, Chlorella sorokiniana
  Clone ID: LIB3602-059-Q6-K1-A10
atctacacaaaacaagcgaaaaatgcgcgctaagtggaagaaagaaagcggatgcagcgcctagaagcgcaagcgggggcggcaagcgggccaagtaagcggcctgccccgcagcccagcagcgctgcggcgcctgggcgcagccgcccgctcgcacgcgtgcaacggcgctgcagcggccagccggcgtcacggagtccgggcgcccggcagccgccgatgaaatgtgacggccgagtgtgtaatgctcacgaccgtg

SEQ ID NO: 3766 - DNA, 534 bp, Chlorella sorokiniana
  Clone ID: LIB3602-059-Q6-K1-A11
ccaagttgacctgcagcagctgctggcgcgcttgccgcagctggagcgctggggcatttttgttggcgtgtacgagcaaccaggcctgcaggttcgcggcttgctgagcagcatgctaggttgtattggacatgcatgccatcatggcgcatcgcacctgtgcatgccttcaaactagcaggctggagggggattccgtgtttgtgtgccagcatgcgttgtaagaatgggcacgcagttgcctttccccagttgcagttgaagtgtcagcctgccccatgtgcaaatgtacatgagctgcttccaactgcggtgccacccatctcctctcaggttggcggcgctgtgctatccggctgcgttgtggagggctgcaaccgcgccaatggcatggcgcaggagctgaggctatggaggattgagcgcatgcccagcctgcagcagctggttgcggcagccctgccggctggcatgcaacccagccagctgcgcagcctggacttcgtccactgcgtgctgtcgctgccggcggtg

SEQ ID NO: 3767 - DNA, 531 bp, Chlorella sorokiniana
  Clone ID: LIB3602-059-Q6-K1-A12
tgctcatggtgcagctgttcctgttcaactttgttgagatcaagcgctgggaggacatcaagcgccccggcaggcaggccgagcccggcagcttcctgggctttgagtcatccttcaagggcaccggcatcagcggctaccccggcggccccttcaaccccttcggcctgggcaacagcagcaaggaggccatggatgacctgaagtggcgcgagatccgcaacggacgccttgccatggtggccttcctgggcttcctgtcccagcacgccgccaccggcaagggccccattgacaacctgattgaccacgtgtcggacccgtgggcggcgaatttctgctccaacggcgtgagcctgccctccgccttcgccaacgtgttctgagctggctagcccgaccggcggcaaacaaccctgagaagagcttcgcccacaccccaagggcaccccgattgtgttttggttctctattctcctgctacgcgttctgcacttgcacctgccgagcttcccccgactggcatgtaac

SEQ ID NO: 3768 - DNA, 531 bp, Chlorella sorokiniana
  Clone ID: LIB3602-059-Q6-K1-A2
cggacgcgtgggcgaggccgaccaaatgctcaagcaagacgcgttcgcggacgacacggtgcgcatgatcaagcaggtgctgtcggacaacccgcacatacagatcctgctgttctgcgccaccttcaacgagcgcgtcaagcgctttgcgcagaagattgtgcctgacgccaaccaggtgttcatccctaaggaggagctgagcctggacgtgatcaagcagtaccgcgtgtgctgcccgcgcggcgccgacaaggtcaaggtgctgaaggacatgatcttcccgctgtgcgagaagctctggcataccatcattttcgtgcggacacgcgagacggcgcgctcgctgcatgctgtgatggagaaggaggggcacaagtgcacgtccatcgagggcggcatggacaagcaggcgcgcgacaaggtggtgaaggagttcagggatggcaccaccaagatcctgatctccacagacgtcctgtcccgcggctttgacgtcacccaggtcacgctggtcataaactttgacgt

SEQ ID NO: 3769 - DNA, 415 bp, Chlorella sorokiniana
  Clone ID: LIB3602-059-Q6-K1-A3
cggacgcgtgggtggccgactacaacatccaaaacgagacaacgctgcactcgatgctgcgcctgcgcggcagcatgcagatctttgtcaagacgctgaccggcaacaccatcactctcgaggcggagtcaagcgataccatcgagaacgtgaaggccaagatccaggacacggagggcatcccatctgaccagcagcgcctgatcttcacgggcaaacagatggaggactgtcgtacgctcgccgactacaacatgcagaaggagtccacgctacacctggtgctgcgcctgagcagctgcatgcagatctttgtcaagacgctgacacgcaagaccatcactctggaggtggagtcgagcgacacgatcgagaacgtgaaggccaagatccaggacaaggagggcatcccccc

SEQ ID NO: 3770 - DNA, 493 bp, Chlorella sorokiniana
  unsure (1)..(493): unsure at all n locations; Clone ID: LIB3602-059-Q6-K1-A4
cggacgcgtgggcggacgcgtgggccgggcagctaccgtgacgccatgagctcaaagacgccgctgggcaaggcgggggcgggggcctgcgatgagctggacgcgctcggcagcctgtagcgccagacgctggaggaggcggaagggctgctgaagaagctcggcttcaagggcaggctgtttgcagcacccccgcagcaggagcagcagcagcagggccagcagcagacggcggaggggcagtgaccaaagcagttgcagcggcaggcgtgccagacgggggagggttgatgagcaggctgtggcagcaggtccctccaactgaccgcgacccctgcagccgcattgtgccttgcaccttgcattcgacttattccatacaggtgtttacgctgcttgatgaaagctggttttacaccctgtagcaggctagattattccagtcacaaaatgtaaggacaggcaactcanccgactacaacatccagaagga

SEQ ID NO: 3771 - DNA, 534 bp, Chlorella sorokiniana
  Clone ID: LIB3602-059-Q6-K1-A5
gcgcaagggccccctggtggtctacggcaacgacgccggcatcagcaaggccttccgcaacctgcccggcgtggaggttgcctccgtggagcgcctgaacctgctgcagctggcgcccggcggccacctgggccgcttctgcatctggaccaagtctgctgtggagaagctggacaagatcttcggcaccaccgagaccgcgtccgagcagaagaagggctacaagctgccgcgccacatcatggccaacggcgacctggcccgcctcatcaactctgatgagatccagtcggtggtcaagccgcagaagaccggcaccgcccgcgccgcgctgaagaagaacccgctgcgcaacctgtgcgcgctgctcaagctcaacccctacgccaaggtggcgcgccgcgccgagctgctggccgcgcagaagggcgccaagtcggccaaggtggaggcggcccgcaaggccaaggccgccgcgcgccccgcggtgaagaaggtgtccaaggccttctacagcaccatgatcaccgactc

SEQ ID NO: 3772 - DNA, 529 bp, Chlorella sorokiniana
  Clone ID: LIB3602-059-Q6-K1-A6
gttctagatcgcgagcgggcgccctggcatctactccggcatcagcaaggcctttcgcatcctgcccggcgtggaggttgtcttcgtggagcgcctgaacctgctgcagctggcgcccggcggccacctgggccgtttctgcatctggaccaaatgtgctgtggagaagctggacaagatcttcgttaccaccagagaccgcgtcctagcagaagaagggctacaagctcccgctcctcatcatggacaacggcaacctggcccgcctgatcaactttgatgagatccagttggtggtcaagccgcataagaccggttccgcccgcaccgcgctgaaaaacaactcgatgcgcaacctgtgcgcgctgttcaagctcaacccctacaccaaggtggtgcgccgagccgagctgctggccgtgcagaacgtcgccaagtcggacaaggtggacgctgtccgcatggccaaggccgccgcgcgccccgcggtgaagaaggtgtccaaggccttctacagcaccatgatcac

SEQ ID NO: 3773 - DNA, 59 bp, Chlorella sorokiniana
  Clone ID: LIB3602-059-Q6-K1-A7
aaaaaaaaacgaaaagcgaacaaaaaaaaaaaaaaaaaaaaaaaaaaaaaaaaaaaaaa

SEQ ID NO: 3774 - DNA, 413 bp, Chlorella sorokiniana
  unsure (1)..(413): unsure at all n locations; Clone ID: LIB3602-059-Q6-K1-A8
gtgaccaagcgcgccgtgggcgtggagctgctcaagcaggtcaacgggcggtacatcaagaagcgcatccacgtgcgcatcgagcacgtgacccccagccgctgccacgaggagttcctgcgccgctgcaaggagaacgacgcggcgcggcacgcggccaaggtggagggcaagccgctgccggtgctcaagcgccagcccaagggcccccgcaccgaggccatcatgctggagaacgtgaagatggagaccatcacggccatcccctacgatatcctcaaggagggcgtgctctgagcgtgatcggcggcgacgttccgttgattgcggctgcagcttagtgagatgtaaccccgcagaacanaaaaacttgccaaaaccctaacaacccaacaattaaaaaaaaaaacatg

SEQ ID NO: 3775 - DNA, 284 bp, Chlorella sorokiniana
  Clone ID: LIB3602-059-Q6-K1-A9
ctctccacagaacaagcgaagatgcgcgctaagtggaggaagaagcggatgcggcgcctgaagcgcaagcggcggcggcagcgggccaagtaagcggcctgccccgcagcccagcagcgctgcggcgcctgggcgcagccgcccgctcgcacgcgtgcaacggcgctgcagcggccagccggcgtcacggagtccgggcgcccggcagccgccgatgaaatgtgacggccgagtgtgtaatgctcacgaccgtgaaaaaaaatacaatacaatataactaaaga

SEQ ID NO: 3776 - DNA, 533 bp, Chlorella sorokiniana
  Clone ID: LIB3602-059-Q6-K1-B1
ctcgaatccaacttcaccatcctgaacgagttccggtcaaacatggcggacttcaaggtgcacgagaacacgcaggtgctggtgcagttccgggacaatattctggccatcatcaatgccatggaggcgatgggaggggtcatggcacaaatgccgcagctgcccgtcaggctgaacgtcgatctggccaacaatttcctgccctcccgccccgccaacgtgcccgcctacaacctggcgatgccgccgccgcagcccgcgctcaacgcacccggcatggtgccctgctgagcctgctgagcatgcctgccctgcttagcctgccgtggccgctgcgcctgctgcggcggcgctgctgggcctgctgcgcctcagtttgccagcctaggcgctggaccgaggtgcgtatcatttcgtttgcaccattcagcgctgtatttgcagccttcggcgctgcgatgacgcctgccctgcccgccagccttcaacttacctctttgcaaagctcttcagcccctgcttatgctggccct

SEQ ID NO: 3777 - DNA, 528 bp, Chlorella sorokiniana
  Clone ID: LIB3602-059-Q6-K1-B10
ggggctacgccgatgcagcggtggccaccaaggccaacatctgggatgagctgggcgagctggtgaccagcgacgagggcaagcgcgagctggccaccctgcgcagcacctacgcagacatctcgcaaaagctggccaagctggcggcggacccggagcccatcaactgggcggcctggagcaaggagatcgaccccaagctggtgcaggagttcaagcaggcgtacgagaccatgaagctgcccaagtttgagggcaaccacattgctgaggccaacacccagtttgcggcgctgctcaaggaggcggaggcgctggaggcggccagccgcacgcgcattgtggagatccagaaagagctggccaacatccagaaggagaaggagcggatctccaccaccaccattgacgatgagctggcggcagaccccaagctggcagaggagattgacacagagatccagaagaactacttcatggtgtcctgagctgcgcgcccagctggcgcctgattgtcgctggagcgcg

SEQ ID NO: 3778 - DNA, 537 bp, Chlorella sorokiniana
  Clone ID: LIB3602-059-Q6-K1-B11
aaagatacaccaaatgcaaaaagaggacaccaaagaacaaacataagaaatgagctagacaaagctgaagaccaacgaggagggcaagcacaagctggtcttcctgcgcagcacctactcttacatgtcccaaattctggtcccgctggcggcggacccgtagcccatcaactgggcggcctaaatcaaggagatcgaccccaattttacacaggagttcaagcaaaccccctagaccatccaactttacaagtttgagggcaaacacattttttaggccatcacctaatttgcgaaggtgctcaaagcggctgtctttctaaaggtttccacccgcacgcgcattgtggagatcccccttgagctggccaacatccagaaggggaaggggtggttctccccaccagcattgtttatttgctggcggccgacccccccctgccttaggatatttacacttatttccagaccaactactccgtgttttcctgaaatgctctcccaggtggcccctttttggggttcgatctcagggct

SEQ ID NO: 3779 - DNA, 486 bp, Chlorella sorokiniana
  Clone ID: LIB3602-059-Q6-K1-B12
cggacgcgtgggaaaaaaaaaaaaaaaaaaaaaaaaaaaaaaaaaaaaaaaaaaaaaaaaaaaaaaaacaaaaaaagaaaaaaaaaaaaaaaaaatgtgtaccccctaaactttacccataacacaactaaataataatggcccgctccttttaaagcttccaatttaactaccccttccttcaaaccaattactttttttttagtttccccaaatttcattccattgcccccttttttccaccctcttatctggaaaaaccctgccttcccccacttaattccccttaaaaaacaaccctttttacccagttggtttttcacaaaaaagccccccccaaatccccttttcaaacatttcctcaccttaattattaattgaaaccccccttttagtcccccataaccccccctttaatttttttgttaccccaagcgaaccctttacatttgccatcccctttattcccgttcttttccttttttt

SEQ ID NO: 3780 - DNA, 530 bp, Chlorella sorokiniana
  Clone ID: LIB3602-059-Q6-K1-B2
atcgaatccaacttcaccatcctgaacgagttccggtcaaacatggcggacttcaaggtgcacgagaacacgcaggtgctggtgcagttccgggacaatattctggccatcatcaatgccatggaggcgatgggaggggtcatggcacaaatgccgcagctgcccgtcaggctgaacgtcgatctggccaacaatttcctgccctcccgccccgccaacgtgcccgcctacaacctggcgatgccgccgccgtagcccgcgctcaacgcacccggcatggtgccctgctgagcctgctgagcatgcctgccctgcttagcctgccgtggccgctgcgcctgctgcggcggcactgctgggcctgctgcgcctcagtttgccagcctaggcgctggaccgatgtgcgtatcatttcgtttgcaccattcagcgctgtatttgcagccttttgcgctgcgatgactcctgccctgcccgccagccttcaacttacctctttgcaaagctcttgaggccctgcttatgctggc

SEQ ID NO: 3781 - DNA, 533 bp, Chlorella sorokiniana
  Clone ID: LIB3602-059-Q6-K1-B4
ggccccctgatgaagatgaagctggaggacattgccaagcgcaagcacatgggcctgctggcgggcggcagcggggtgacgcccatgctgcaggtggcggaggaggcgctgcgccacaagctgcctgtcaagctggccatgatctttgccaacgtgtcggaggcggacatcattgccaaggaccggctggacgcgctggccaaagcgcaccccaagcagttcagcatccactacattggggacaaggccagctccttcagctggaagggcagcaccggctacatcaccaaggacctgctgaagcagcacatgccggcccccggcgacgacagcctcgtccttgtgtgcggcccgcctcccatgatgaaggtcatcagcggcgacaagctgcccgacaagtcgcatggcccgctcaccggcatgctgaaggacatgggctacaccgagagccaagtgttcaagttctgattctggagagccttcacccacgcacgcctgaaccatctgctctgctatcgttgctgctgagcagc

SEQ ID NO: 3782 - DNA, 335 bp, Chlorella sorokiniana
  Clone ID: LIB3602-059-Q6-K1-B5
cacaacccgctcactttgcatggcattctgcaagtgccacccccacggcccctccctttgacctccctccggctttgctttgccgcctcatgtttccctccgtctcccccttcccacttcatttctcctgcaagcgggcgtggctcatgccccctgcgctgccaccccatcgctgctggtctgtgaacctcgttttaattagcctgcgtccagtgcccgtttctgcggttttgtgaccctggtcttcctcccatgatcccagccctcgaatcgagagtgtgactaccgccagccatactatgccatcgtttgctcatatgtaatgatcagtttgc

SEQ ID NO: 3783 - DNA, 335 bp, Chlorella sorokiniana
  Clone ID: LIB3602-059-Q6-K1-B6
catgcccacactacagtatgctgcacccggccccggctgctgtgcgccgcgccattgtgtgcgtcacacgccgggcgcggctgccatttgtggctctgtcccattttattcgtgtgagtgagcactccatcctgctgccctgcttctggtgaactgtacctcacgctcataattgacacacagcctacaccattcaaatgtaatgtgcagcagcgcccgtttatgcggttttgtgaccctggtcttcctcccatgatcccagccctcgaatcgagagtgtgactaccgccagccatactatgccatcgtttgctcatatgtaatgatcagtttgc

SEQ ID NO: 3784 - DNA, 315 bp, Chlorella sorokiniana
  unsure (1)..(315): unsure at all n locations; Clone ID: LIB3602-059-Q6-K1-B7
ggcggcggatcagatcttcccactgctctcacacctgtggtccgccatgatgaaggtcacctcgctgacgcccgacatgtctggcaagaaggcggcgcggcggtggatgaccaagctgcacggcatgcccgcctcgtatgagctgaatgaggaagaggcgcgccagctgctgttcgacctgaaatcggcatacaatgagttcatgcagcagatcaagtaggcagccgtagcgcagacagagctggcaggaccaggcggcacggtaacgtgccggttccactgctgccgtncgncagccatgactgtacattactg

SEQ ID NO: 3785 - DNA, 481 bp, Chlorella sorokiniana
  Clone ID: LIB3602-059-Q6-K1-B8
acggctcacctcgcctgttcctcattgtccccgccgcccgcaggctccgccaagggcaaggccatcctggccggctggtccaactcgctgcagaagttctggcagctggtgccgccctccgaggccaactccccccaggcctccaaggcggccgacgaggcggcacaggccggcggcgtggccggcggcgtggcagtggccgcatccgcctgagcagcttgagcggcaaacgccggctgcctgtgccgcggccagtcctgggtgactcgcttgtgttgactgcttcccaagtggacgaacaagcccggcggcagagggagatgcagggttgcgccagtgttgcgccccccttgtcattcccgccgccgcggctggctggccgcccgccggcagccgcgctgcctgtacccttcccctcgtgtgttccgccagcggtggagacatttcgttcatatggcaccagagacctttcatttgcatg

SEQ ID NO: 3786 - DNA, 317 bp, Chlorella sorokiniana
  Clone ID: LIB3602-059-Q6-K1-B9
ctccatccagaatgagaccgtgaagctcaacctgatgggcaagtccaagaccatggagagcaaggactgggtggagccccagggccgcaagggcaagggctacggcgtgtaccgctttgccaacaagtacggcgccaacgtggacggctacagcccgatctacacccccgacacctggtccgagtctggcgactcttacaagctgggcaccaagggccttattgcttgagccggcctgattgtggtgctgctgagcgtgggcatcaacctggtgatctacacctctgccctgggccaataaatggcgacgccccccg

SEQ ID NO: 3787 - DNA, 339 bp, Chlorella sorokiniana
  Clone ID: LIB3602-059-Q6-K1-C10
aaaaaaaaatttttaaaaaaaaaaaccctggcccccaaacggttaaaaaaccaaaaaaggccttttcaaaccggcctttaaaaaaggtttttaaaaccttaaacctttgggaaaaggggttcccaaaaaaaaaaaattgtttttaaaaaatttttttttgaaaaaaccccttttttaaaaccccgttaaaaggggcaaaattaagaggggggggaaaaaaaaatttccccattaaaaacaaaaaaaaaggggggggaaaaaaaatattccccaaaaaggggcccaaattttccaaaaacacaccctcttttggggggaaaaattttgtggaagggaaaa

SEQ ID NO: 3788 - DNA, 156 bp, Chlorella sorokiniana
  Clone ID: LIB3602-059-Q6-K1-C11
gcgagtagatctagatcgcaagcgggcggccttttttttttttttatttttttttgattttcctactctccttttaagttttttttttaaaattttctgcgccccctcaccatccacttcaagacttaccttctcccctttcttccctttccattc

SEQ ID NO: 3789 - DNA, 314 bp, Chlorella sorokiniana
  unsure (1)..(314): unsure at all n locations; Clone ID: LIB3602-059-Q6-K1-C2
cggggcgacccacgcgggcggnggcggccatcactctggaagccaaggactttgtggcccatgcccgcatgatcatctgcgccaccaacccccttggctcctatcccagcaccattcgcggctcctaccctatcgacattgcccacattgtgatacactgctccgactctgtggataacgcgcagaaagagctggctctctgtttctccgagggcctgccggacaacacccccgtgctgcgcggacagatctactagtgaaccgcgcacagcatgctgtgagggcgcccaagcactgggcgcctgacagctaac

SEQ ID NO: 3790 - DNA, 534 bp, Chlorella sorokiniana
  Clone ID: LIB3602-059-Q6-K1-C3
tgcctatcgaggctggagggcggcagtcccaaggcctgctccgagccgggcggcagctgcgggctggaggagggtggcagcggcaaatgcgagcagaccgcgctagacatggaccgagacgaagttggggaggcggaggatttggtggaggcctactggctgcaggtcgactcctcgctgagccggctcaagatcctgcaggagcgcatcgtcaacacagagcacctcgtgaacctggatttggacgccaagcgaaacgctctggtggcactcagcttggcggtggacctgctgctcatgatgttcgaggtacacatggctgtcacaggcatcttcggcatgaacctgacctcgggcctggagcgctgggacccctacagcctgtggggagtcgcctcctttggcctgctgctgggaggcacgctgctggtcacagtgggcatgtacgccaagcgcaaggggctgctcttcctcccaagctttggccttagcccagtcagctacagcggcggcggcggcggcgtgggcggcaat

SEQ ID NO: 3791 - DNA, 534 bp, Chlorella sorokiniana
  Clone ID: LIB3602-059-Q6-K1-C4
gcggttccccaagtacaactccaagaccgacttctggcccttcttcgccgtcaacctggcgtcgggcggcctggccggggccggctccctgctgattgtgtaccccctggactttgcccgtacccgcctggctgctgatgtgggctccggcaagagccgcgagttcaccggcctcgtggactgcatcggcaagaccgccaagcgcgcgggccccatgggcctgtaccagggcttcggcgtgtctgtgcagggcatcatcgtgtaccgcggcgcctacttcggcctgtacgataccgccaagggcgtgctgttcaaggacgagcgcaacgccaacttcttcgcgaagtgggcggtggcgcaagcggtgaccgccgcggccggcgtgctgtcctatcccttcgacactgtgcgccgtcggctgatgatgcaggcgggcggcgagcgccagtactctggcaccctggactgctggcgcaaggtggcggcccaagagggcatgggcgccttcttcaagggcgcgctgtccaacgtgct

SEQ ID NO: 3792 - DNA, 519 bp, Chlorella sorokiniana
  Clone ID: LIB3602-059-Q6-K1-C5
attgcctgtggggtctcaggagcaggatggtgaagttcctgaagcccgggaaggtggtcatccttctgtccggccggtatgccggcaagaaggcggtcatcgtgaagaactacgatgatggcaccagcagccgcccctacggccacgcgctcgtgtgcggcctgtctaaggagccccggaaggtgatcaagcggtcgtccctcaagacccaggcgcgccgctccagcctgaagaccttcatcaaggtggtcaactaccagcacatgatgcccacccgctacacgctggaggtggacctcaagggcgtggtgaccgccgagtgcgtggacaacagcaccaagaaggtggaggccaacaaggaggccaaggcgctgctggaggagaagttcaagagcggcaagaaccggtggttcttcaccaagctccgcttctgagggagtttcttggagagcctaggttgcagcagccgtgacgtgacgtgctccttgccccgagacgccatgtaacgtcacaccccgc

SEQ ID NO: 3793 - DNA, 522 bp, Chlorella sorokiniana
  Clone ID: LIB3602-059-Q6-K1-C6
caaccgcctgaggacctatctcatgctgatggtcactgtggtcatcatgcaagtggccaacgacgcgcgtgtccagctggatgttgcagatggcctgcgcccggtcagcggcgacgtcaagacggacctgcgcgccgtgctcgccggcaccatcctgtcgctcatcttcaacttcgtcctcatcatctactggggcctcaccgagcacagcacccaggcgctgtcgctgggccgcggcgccgctgctgaggcgccggccccagaggcgccaaaggctgtggaggtgcccaatgtcaccactgtgtaagccaagccccacgtgcgtccagcagccggcggcctgttgtggcgcgcgttgacttccatgcgccgccacgaacagcagcagctgcgtccgtgccaggtttgccgactggcccattgccgcggcagtgcggcatggccgtccatgctcgatgtgtttgttcatgtattcgatcgcctgacctgatttgtcctccttgcacctttgcgagcacacgt

SEQ ID NO: 3794 - DNA, 508 bp, Chlorella sorokiniana
  Clone ID: LIB3602-059-Q6-K1-C7
gcctacgagctcagcaagcaccccgatgtcaaggttgccatcattgagcagggcgtggcgcctggtggcggctcctggctgggcggccagctcttcagtgccatgtgcatccgcaagcccgcggacaagttcctggacgagctgcaggtgccctacgaggacgagggctcctttgtggtggtgcgccatgccgccctcatgacctccaccctgctgtccaaggtgctggccgcccccaacatcaagctgttcaacgccaccgccgccgaggacctggtggtgaagcaggacgagaagaacggcaagtacgtggcgggtgcagtgaccaactggacgctggtgtctctcaaccacgacacccagatgtgcatggaccccaatgtgatcgagtccaaggtcatgatctcctcctgcggccacgacggccccatgggcgccgccggcgtgaagcgcctcatgcgcctgggcatggtggagaaggtgccgggcatgggcgcccttgatatga

SEQ ID NO: 3795 - DNA, 356 bp, Chlorella sorokiniana
  Clone ID: LIB3602-059-Q6-K1-C8
gcgagctgctggaaatcctgaagctgcccgtgctggtggtgcttgacgaggcgtacattgagttcagcgacgagcgcggcaatatgggctgggtggcgcagtatcccaacctcgtggtgctgcgcaccttctcaaagtgtgccgcgctggcgggcctcagagtgcggtatggcgccttcccgctgggcttgattgagtacctgtggcgcgccaagcatccgtacaacgtgtccgtggcagcggaggttgcggcgcttgcggcgctgaacaacctgccgtacattgagcgcgtgcgggacgcgctggtggcggagcgcggccggctgtttgagggccttgcaggcggttgcccttcc

SEQ ID NO: 3796 - DNA, 519 bp, Chlorella sorokiniana
  unsure (1)..(519): unsure at all n locations; Clone ID: LIB3602-059-Q6-K1-C9
aacttgcgctgccctgctgcaagctgaccctccgagctgaccctcccaagctgtggagcctgttgagcttaggcgtctcagttcccgcccgaattgattggtcgggcccggccgaaccgccgggcagttttgcttttcaacccttttccagacgaatctgatcggtcccttcccaacgaacggccccccatcctgcccctgctcttctttcatcccaaacacctctttgccaacagctgtgcgggcaaccgcccgcttttttgtgccctgcagcgccggccgatgccgcgcgcatgctcatgctcccaacacacacatgcacccccaaacacgcacccccaacccaacaccccaacacccccaaccaaccgtggcccacagcggccctcgccagattattaacttagccctgctgaaaactgcatgatgttagcttggcccccagtcaagcccgatgtgatgtaaatagagacgtgcnnnnnanaaaaaaataaaaaaaaaattaaaaaaaaaaaaata

SEQ ID NO: 3797 - DNA, 406 bp, Chlorella sorokiniana
  Clone ID: LIB3602-059-Q6-K1-D1
gctgctgccattttcgctgccgtcagccacagctgtgtgttggaccttcgtgcccctcccttcttgctgctgcctgtgctgctgcatgacgcatctccttgcctgctacccgtcttcgatgcaaccttcctagctactgttttttcgcacggctgcacccacgaccttgcccatctggcttgcgcccacctcgtttttgcgcctaccttttcccccggactgcacaccgctcggaccgtcttctgtgtatcactgccggtgctgttggcacactgttttgcccgcacatgctgcatgcgttttgatttgaggcaccgccccgtggtgcgtttatgtttcgctattcagcaattggccagtacattggttggcatgcttacatactacgttgtgatcaaccgattgt

SEQ ID NO: 3798 - DNA, 510 bp, Chlorella sorokiniana
  Clone ID: LIB3602-059-Q6-K1-D10
gccacattgtattcccaataagtaagccagcccatacaagacatacatgccacaacaataggcagcattatgataggtgatgcatgcacagcacacatgttgccgcaactgccctggcctgactctcgttggaggggtgagcgctcaacccctcccgccaacctgtcagtcttgagcgctgtcccacacctcgactgcaaccaccgtcgttatcaagcacaaattgcgctaactcgctgatgaaccttactgcaccccttgcatctcaccagttccctttgcccgaccgctctgtgatcacctgacttcgcttctgccactctttctcaaggccctatgctgcctatggttttatgcatgcatgcctgtatcccaggatcagaaggcaggcaagcgggcccaacttgcgcaacaccatctcaactgactccctgctttagcccgcctgcctaaggtgcatttcttctctatctctagcgcaactgtacatcagcctagcctgttttaaca

SEQ ID NO: 3799 - DNA, 529 bp, Chlorella sorokiniana
  Clone ID: LIB3602-059-Q6-K1-D11
agccaaccagccaaggagccaaggaaacgctgcctgctggcccgcaccccaaaccagccttcgaatttgcctccgcactgcactacagcagtgctgcgttggcgcccagctggtggcagctctgccaccacttgcatctgctgttggacctgctgcgcaatccagcaccctaagctgagcccagcggcatgcccaggtaccgcctggctgaagcccaccgctctccaatacgacctcctcacctgtttcttgttcatgctgtgtactgtagctgcgatagcgacttcgttttggcatgcctgtgtcatcctcccactctgctgcatgccttgctgctgcagcacgtggacactgtttctttgtactttgcacactagcgttgcttcccacctcatgcccacactgccacctctgcactgattgtagtacgaacgcccgcatttgctgagcgttgttggtgtggttggattcagcattgggcccatagctttgtcctgcaaagatgctagcgctctaccaattgacactc

SEQ ID NO: 3800 - DNA, 510 bp, Chlorella sorokiniana
  Clone ID: LIB3602-059-Q6-K1-D12
gttcctgactgaggaggagggcaagaaggtgctcaaggtggactgccactttggcaagcgcaagagcctggcgtgcatccgcacctgcacctcgtacgtgcagaacatgatcaccggcgtgaccaagggctacgagtacaagatgcgcctggtgtacgcccatttccccatcaacatcaacatcgagaacaagggcggccaggtggagatccgcaacttcctgtgcgagaagattgtgcgcgtggtggacatgctgtcgggcgtgacctgcgagcgcagcgccgtcgtcaaggacgagctgatcctgaccggcaacgacatctgagctggtgtcctgcagcagcgcgctgatccaccagaagtgcctggtgaagaagaaggacattcgcaagttcctggacggcatgtacctcagcgagcgcgggaccctggagaagcccgagtaagcggagcccgcacgttgcagtagaggtggcggcacgagcgcaacagtgcgcatcgctcacgccc

SEQ ID NO: 3801 - DNA, 537 bp, Chlorella sorokiniana
  Clone ID: LIB3602-059-Q6-K1-D2
cgtactcgtgttctgatctggagcgcatatgcgacgactttgcccgtcagtgcaaggagctggcaggtagtaaaggaggctgtcggtaacggagcttgcattctccctccgcagctgagcgctacgctccgtagtgtacctggcacccctgaggattgaattcatgatcattattgtacatcttgctgttacgactttgtaactcctactgtgcgcaccggactgaacaccgatcggaccgtattatgtgtatcactgacggtgctgttggcacactgttttgcccgcacatgctgcatgcgttttgatttgaggcaccgccccgtggtgcgtttatgtttcgctattcagcaattggccagtacattggttggcatgcttacatactacgttgagatcaaccgattgtaaaaaaaaaactttttactaaaaatgcataataaaaaaaaaggcaagaaccaaacgaccttactaaataaaaaacagcctaaaatagaaaatgggacgcaatactggtacggataaaaaaaggggggg

SEQ ID NO: 3802 - DNA, 523 bp, Chlorella sorokiniana
  Clone ID: LIB3602-059-Q6-K1-D3
gcggccgcggtggcggcatgcggcgcggcggcggcggcttcccgtatggcgagatggagatcgaccctgaggagcgctgcaacatgttcttcggtggcaacccattcatgggcggccgcgtgtacagttttggcggccagcccttccggcagcgggcccatgcagcacaccagcagcagcaacaccgcggcggcggcaccgcggcggccagcccgctgctgcagctggtgcagctggcgccgctgctgctgctgctgctgttcaccttcctgcagagccgctcgcagccgccctacagcctgaaccgcacgcgggagtacagccagcagttccagaccagcacttacagcgtgcccttctatgtgcgggacgcgcagcagctgcaccgagactacccgcccggcagccgcgagcgggtgcggctggagcaccagatagaaagcgagtaccgcggagtgctgcagcagcagtgctacaacgagcgcatgctgcagcaacgctaccattactatggccggcggga

SEQ ID NO: 3803 - DNA, 527 bp, Chlorella sorokiniana
  Clone ID: LIB3602-059-Q6-K1-D4
tcctgttcccgggcaagaccaacaacgagatgctcaagctcatgatggacgtgaaggggcccttccccaagaagaggatcaagatggcggagtttgcgttcaagcactttgagggcgacaccaacctgttttttgcgctgctggatgaggaccccgtcaccaagcggacagtgcggcgcctcatctccaaccccacggtgaagaaggactttggcgctcttctgggggggcagagtcccgaccgtcgtaagcttgctcatctgatcgacctgctggagcgcatgatgcacctggatcctgacaagcgcatcacccccaaggaggcgctgaggcaccccttcatcaaggagccgcccgtagtgtcccgggcagcagccaagtatacggcaacacttcgcccctgctgcgcctgatgatgagctgctgccccacttgacctacacacaggccgccacctggtttgggcagcagtgatcacgcaaggtacacacccactatgccatgtatcacaacaccaaccaaaaata

SEQ ID NO: 3804 - DNA, 517 bp, Chlorella sorokiniana
  Clone ID: LIB3602-059-Q6-K1-D5
cggacgcgtgggcgggtccgtgacgtcctgcgtgttcaccgaggtgaacaacttcgacattatcagcctcagccagcgctagcaagagcgacatcgattcgtggagcgaggcaaaggccgacaagtacacgttcttcaccatccaccaggtcgtgctgctggcgtgcgacgagctggagctgtacctgctctacaagctctcggcgctactcaaccccgaccggcccgacctgtggctgcaagtcagccacctatgccacgaccacggatgcatccgccgcacccacttcgttgtggagacggcgatcgagaacctccgccgcaacccgtgcaagctggccaagaagtgccgcggcgacagctgccctggcgagcaccgctgcttcagctgctgaggtggtcctggcctgtgccttctgtcaacgctctcgtgctagaggtgcggcgcgctgctggacgcccgctgtaggcacactgtactgtactgttacgagatgagcagagcccgctgtgcagc

SEQ ID NO: 3805 - DNA, 310 bp, Chlorella sorokiniana
  Clone ID: LIB3602-059-Q6-K1-D6
cccagccctgatgcagcaccgcacgtgaacaagctgatcaacgctgccatcccgctgggccacatgggccgccggtgggacattgccatggcctgcctcttcctggccagccctgccgctgccttcatcaccggccacacgattgtggtggacggcggcgagtggatgtgcaggccacccctggtgcccctagagctggtgtcacatattaaacgtggagcggagtcaaatagccctgcaatggagctggccggcggtggcagcggatgcagccgcacgcgcaacaagctttgaaccaacaaaaaatgat

SEQ ID NO: 3806 - DNA, 57 bp, Chlorella sorokiniana
  Clone ID: LIB3602-059-Q6-K1-D7
tacaattgcacattcaactaggcgcgtcagcacttacagacggtcggacacgtgggc

SEQ ID NO: 3807 - DNA, 534 bp, Chlorella sorokiniana
  Clone ID: LIB3602-059-Q6-K1-D8
cggttggctcttttgctgctctgcacgagctgtagccagctgcctgagcctgtttgcagttgcatcatgcctgcgtgcctgtggctgctcagctgggcggggccacgttgctgttgcacagccctcctgcattcgtgatgctgaaaccgacgttgctcccgcccctccccttgcccctcaccttgcgcagaacgtgtctgccttcctgctggacaaccagctgtgcaagaaggaccaggtcaaggtgcacggcttctaagcagccctgcgcccttgcgcccgcaccgcccaggctgcttgagtggcagctggctggcgcggccaccgtggcccccaaacctgcggcccctgcggccgggcagccacgctgcggctaggtagcgcgctcgcttgtgccggctggcgtcggcagcagcgctggcaagagtggcgcccagagtgttaggctaggcgcggcggcgcggaaagacccgtcggcgtcacacgcacacaagatttgtctatcctgttcagccccctctgtgtaccacatgc

SEQ ID NO: 3808 - DNA, 532 bp, Chlorella sorokiniana
  Clone ID: LIB3602-059-Q6-K1-D9
gacccatcctactgacgatgagtcgccagcccatccaggacatacatgccacaacaatggcagcattttgttacgtgatgcatgcacagcacacatgttgccgcaactgccctgccatgactcgcgttgcaggggtgagcgctcaagcgcgccccccaacctgccagccgtgagcgctgtccaacaccacggcagcaaccacagccggcatcaggcacaaattgcacttccttgctcatcaaccttcctgcaccccttgcatctcaccgttccctctgcccgcccgctctgtgatcacctgccttgcttcctgccactctgtctcaaggccctatgctgcctctcattttatgcatgcatgccgctatcccagggccggaaggcagccaaccgcgcccagtttgtgcaacaccatcccaacagactccctgtttcagcctgccggcccaaggcgcagttttcctccacctctagcgcaactgtacaccagcctagcctgtatcaccagcgaaagcatccaacaatcgccttc

SEQ ID NO: 3809 - DNA, 536 bp, Chlorella sorokiniana
  Clone ID: LIB3602-059-Q6-K1-E1
gcacctcgcccgctcccgccgcccccgccgccgcccccgccgccaccactggcagcagcagcggcgccgcggcaggcggcaagaagaagcgtcgcagcaagaaggcggccggcggttttgagatgggggtgggccccgcggcagcgcccgtcgcggcgtaagctgtgcggcgctctggcggagtggcggtgtgccatgcagcgcttgccgcccccgccggccctccctgctcttttgcccccttgcgctcacttctcttgtagcttcctttgccgccgcatgtgcgtgctcgctgtatgaacattcacgtttcattgcccataccaacgaatgccgttgcttcccctcagccttcttgaaccctccccccctggccccctgcaccgatttcaaagcttctcctccacctgcccctctctgcgtgccctcaccggcgtgcaacccccctcccagctgcacccttcctgagggtgcgctgggcctctccagttttgctaagccccacgcgagtcgacactcccaacacgtcatgacac

SEQ ID NO: 3810 - DNA, 462 bp, Chlorella sorokiniana
  Clone ID: LIB3602-059-Q6-K1-E10
cgaggacggccatatcggaaggcagccgtccttcccgccaggaccgcgctgagcatgctgcgcacgctgcgcgtgtgtggcaagcgtggcgcacagcgcggcgccaacgaacgatatacgttgcgttttacgctttgagagccaatgagagcgagagtgactgcctgtgatgagccatcagtgggactgccttgtggtcccgtgcgcttgcttattcccagcactgtgccctacccacattgactacccgcttgccctctgcatgcacccgtttgccaacgcacgacccccagtcggccgctgggcggtgcatgttgcgccccaagcttccgacgcgtacagcctgtattccacccaatacacaagcccttgacctatgccagtctttgtcttttgtgctgcccgccagggctcattaccactgcccctgactcccttttccactgtaacgccatccttttg

SEQ ID NO: 3811 - DNA, 530 bp, Chlorella sorokiniana
  Clone ID: LIB3602-059-Q6-K1-E11
cagctccaggctgtggtggacattttcctgggctacggcctcacttgggccaacctgcacgccgtgctgctgggctatgcgcccgtactgcgggtcgagaccagcgttgtgcgcctcacactcaagctgctgaccgatttcgaggtcgaccttggcagggtggtgcggtatccccgtgtgttcgtccacgacccagtacagtgcatcgggccgcgcctggcttacctggccgccttcaaaccggagaagcagtcgtggcagctggtgtccctgctgagccgcagcgacgacgagtttgcctcgctggtgtgccgccgcctgccggacgagtacgccgtgttcaaggacgagtgggtgcgccagttttacgagcaggtgcagctgccggccaaccgcggcggcggcgccggccagcgccccaacacgctcagccagcggctgtggagcagggaggtgacggatgagctctggctgtgatgggctcagcaagcacagccggctgcgattcccagccggcgctggctggtggc

SEQ ID NO: 3812 - DNA, 244 bp, Chlorella sorokiniana
  Clone ID: LIB3602-059-Q6-K1-E12
gcgcagatacaggctgttctggacattttcctgctctacggcctcactttttccaacctgcaccccatgctgctgagctgtgctctcaaactgtgggtcgacaccagcattattcacctcacactcaaactactgacctatttcaatatcgaccttatcataatttttcttattcccatttgttctaccaccatccattacactacctcaagctcactcctggcttacctttcctacttcaaac

SEQ ID NO: 3813 - DNA, 102 bp, Chlorella sorokiniana
  Clone ID: LIB3602-059-Q6-K1-E2
aaaaaaaaaaaaaaaaaaaaaaaaaaaaaaaaaaaaaaaaaaaaaaaaaaaaaaaaaaaaaaaaaaaaaaaaaaaaaagagaaaaaaaaaaaaaaaaaaagg

SEQ ID NO: 3814 - DNA, 516 bp, Chlorella sorokiniana
  Clone ID: LIB3602-059-Q6-K1-E3
gccagcaggtgggcaacgcgcgctttgccaccggccacttcctggaggccgccttcctgttcaagctgatggtcagcagcacggagctggaggacttcctgaccctcaaggcctacgacatcctggtggctcaagagtttgggcccacctggggcgccccgcaggccgcgcagcccggcggcggcccccgcagcaggatgtgagcagcgcggcggcggcgatggtgcagctgcaggctgcagcgcagtgctgcatggctgctgctgtggcggcgcaattaacggctgcacagccttgctgctcagccctcgctgtgataaacgacccatcaacttgtggcgcccaatgatacagcaccataatgccacgcttgtggtgcatgccgagcgaatgcatgcttgtagcggactgcccctgtatctttatagcgttttgttttgctgtgcatacccccatgctccgattttgatccctctgatatagcgattttgttggcgtgtgacagtgcatcagtgt

SEQ ID NO: 3815 - DNA, 338 bp, Chlorella sorokiniana
  Clone ID: LIB3602-059-Q6-K1-E4
aaaaaaaaaaaaacaaaaaaacactatgacaccaaaacaaatacatgaaggccaactaaactgttgaaccttatggaggggggcacttatctaacgcgtcttcgcgccgccaacgaactctatactctgccctctatacaattagctcccacctgttgcacaccgcatgccttgcaaaacccctgccgtcccccaactaagatgtgatgcctcccactgcctctttggcctgtggtctaactacatagaattcctgcatggatgctgctttcaaacagttgttaacacttaatcagcattgttactcacccttaactgtgacatacaacccatcaact

SEQ ID NO: 3816 - DNA, 533 bp, Chlorella sorokiniana
  Clone ID: LIB3602-059-Q6-K1-E5
ggagtgtccgcgcaggtcgcagccgccttcctgcgcacagcagcggcagcgcagcggcggcggctgcagcaaggcgatgcgcaggctgctgggcatgaggagggtgcagcagacgatgcagcagtggcggttatgagtgcaccgcggcggagcgagcctgtgctctcgcccgcgtgccgagccttcttggacgtcgcactgccagccgaccgctttgatgagttccagggcgccatgaccgcgaccgctgtggtcacgcagctggcggccattgagtcgagcctggggctgaaggagggcacgctgcacaacccagccgccgccagcggcaaggaggtgctcaccctgaccggctgggcagcgctggcgggcgtgtttgccctagccaccgtggtgctctctggagtggtctttggcgtgcgccgctggctgggcatgggcggcaacgccagccggaggggatataccctggtggttaagcaagagctggcgcaccaaggcggtcgctcgctagaagaaggcgacggcgggca

SEQ ID NO: 3817 - DNA, 509 bp, Chlorella sorokiniana
  Clone ID: LIB3602-059-Q6-K1-E6
cctggaccgccccacgctgaagagcaaggtcatcgactcgcccgaggtgctgtcggtgatcgactcgctgccccacctgcgcccctttgtctcctccctctacgactgccgctacgcagccttcttccaggcgtttgcggggctgacggacgcgattcgtgccgacgagtacctgcacccccacttccgcttctacatgcgggaggtgcgggcggtggcgtacgcgcagttcctggagagctacaagagcgtgacgctggccagcatggcggccacctttggcgtgtcccccgaattcctggacgcggagctggctgacttcattgtggccggccgcctgcccgccaagattgacaaggtggcgggcgtggtggagaccaacaggcccgacgccaagacggctctgtaccaggcggccatcaagcatggagacctgctgctcaaccgtgtgcagaagctgagcaaggtggtggacatcgagtaaacactcaaacaagagtgaatactcg

SEQ ID NO: 3818 - DNA, 534 bp, Chlorella sorokiniana
  Clone ID: LIB3602-059-Q6-K1-E8
acaccttcagccgcaaccacactgggctggacccagccaagcaagccttctgggacttcacctgggacgaaatgggagcctatgatgtgcctgccatggtctcctatgtcctggccgcctccagctgcaacagcagccgcctggcgttcatcggccactcccagggcaccactcagacctttgcagcgctggcgtcccacgcagagctgcgcagccagctcagctttgcagccatgctggcgccagcggtgcacatgcggcacatcagatcctaccccttgcaagtgctggcagccatggatgctgaccgggtgttcaacttgctgggagagtttgaattcctgcccaaccgggaggcggcagcagcgctgtttggccagatctgccgcaccacgccgctggcctgcgcatccatcatcactgccgttgcagggctgaacacagacaacatgaatgtcagccggctggagctggtggcccagtttgcgccatcaggcacatcagtgaagaatgtggcccactgggcgcaggcga

SEQ ID NO: 3819 - DNA, 300 bp, Chlorella sorokiniana
  unsure (1)..(300): unsure at all n locations; Clone ID: LIB3602-059-Q6-K1-E9
atttnggaacgacccacgcgtgcgacacaatcagcccaaccacactgggctgtacccaaccaaccaagccttctgagacttaacctgtgactaaagaggagcctattataaacctgccatgttctccaatgtcctaacacnactccaattgcaacaacatccgcctgtcgttcatccgacactcccaaaccaccacttatacctttacatcgctttctacccacgcagagctccgcagccagctcacctttccaaacatgcatactccaacagtgcacatgctgaacatcatatcctacc

SEQ ID NO: 3820 - DNA, 538 bp, Chlorella sorokiniana
  Clone ID: LIB3602-059-Q6-K1-F1
aaaaaaaaaaaaaaaaaaaaaaaaaaaaaaaaaaaaaaaaaaaaaaaaaaaaaaaaagggggcgcgctctatagaagcgcgggcttttatacccgcgcgtgtgccaccatatatcttttatatagtgacccaaaattaaaatactgggcccggttttacacaacgtcgactgtgaaaaccctgtggtgtcccacattaaaatcgttttgcaacatatccctttttccacatgtggtataatagaaaagaggcccacccatatcccttttcaaaacatgtgcacactcaatgtggaaagggacacgccctctatagcggcataaaacgcgcggggggtgtggggtacacgcacagtgacccctatacttttgagagccctatagcccgctctttttgctttttttcctttttttttctccacattttccgcgttttcccccgaaaatctaaaaatggggctctctttagggggcccatatatagttttacagggcctctaccccaaaaaaatttatattggggagaggtcacacatagg

SEQ ID NO: 3821 - DNA, 421 bp, Chlorella sorokiniana
  Clone ID: LIB3602-059-Q6-K1-F10
gcgagcgtctgctggaatgcttgtccgctagaaattttgagagccgcatgctgccccccgctccgccccacctgggaggccccccacctgctcctgctgcagttcacgggctgcctgaaggacgacgtgacgacgcggcgctggctggcgcagctgctggtgaacgtggggcacctgcaggacgcagccgcactgggcacggacgttgtggggcccacgccaccagtgtgaggtggctggtgctcctgcgctcaaaacctgccacgacctgcgctcaaaacctgcctcgacctgcgctcaaaacccgcctcgacctgcactctagataactgctttgcgcagcagctgctgtggttgccccctgacttgacagccttggctgccacactacgttgacagaactgtgtgacgcattacagtg

SEQ ID NO: 3822 - DNA, 303 bp, Chlorella sorokiniana
  Clone ID: LIB3602-059-Q6-K1-F11
aaaaaaaaaaaaaaaaaaaaaaaaaataaaaacaaaaaaaaaaaaaattttaaaaaaaaaaaaaaataacatcaaaggtaaaattattgggccgcgtttcttcacctcccacacttacaaacccttcctttccacccctttcttttttttttggtgccccctaattccatttccttgcccccctttttccacccccctgctggtaaaaccctgccttttcccaacttaatttctcttctacacatccctcttttgccagctgtcttattaacaattaggcccttaccaatcccccttcccaac

SEQ ID NO: 3823 - DNA, 532 bp, Chlorella sorokiniana
  Clone ID: LIB3602-059-Q6-K1-F12
agcggctgctgaaggaggcggaggcgcgcgaggctggccaggaggttgagaagaagaagcctgtggtggtcaaggacggcatcaaccacatcacgcagctggtggagagcggcaaggcgcagtgcgtggtgattgcgcacgacgtggaccccattgagattgtggtgtggctgcccgcgctgtgcaagaagatgggcgtgccctactgcatcgtcaagggcaaggcgcggctgggcaccgtggtgcacaagaagacggccaccgcgctggcgctgacggcggtgaagaacgaggaccagcgcgagttcgccaagctggtcgagtccttcaagaccatgtacaacgacggcccccgcgtcagctggggcggcggcatcatgggccccaagagccaggcggcgcagaagaagaaggagcgggctctggccaaggacgccggcctccgcgtgtaagcgggcagcacccacctgccgctcaccgcgcgccgggccgggacagcccggccagcagggtcggcgtgccgcgcgtgggc

SEQ ID NO: 3824 - DNA, 177 bp, Chlorella sorokiniana
  Clone ID: LIB3602-059-Q6-K1-F2
aaaaaaaaaaaaaaaaaaaaaaaaaaaaaaaaaggaaaaaaaataataaagaaaaaaagataacaaacacgtccgtggggggaaataatctatgctatcgtgccccctcatgccacttcattgctcttctatagacacccctaaatctggttcgctgctcgcgtttccacacttttg

SEQ ID NO: 3825 - DNA, 438 bp, Chlorella sorokiniana
  Clone ID: LIB3602-059-Q6-K1-F3
gggggcgtgtgcattacatcagaggcacaacagcgggcggcgggttggttttggtttggtaagggcgtgttcttcagggcgttgcatcatgaaatggcagcaaccgggtgatgctaatgggcagcacagaaatacggcgggcgcgcggcgcgccgcctgcagcagagacatggcacaaaaggagcacgggcggacaaagggcggcgggcgccggcgtctcatcaagcacaaaacaatgtcacagggagcctacctggccgcacgccttcagaccgcaccgcactgggcggcgggcaaggcgtggcggctccggcagtgagcaggacagacaggcagcacaatcaatcggggtggtgagagttgtggaggtttctggcggtaggctgggctggtggggcggccgcagaggtaccagccgcagctgcgctcggcttcagc

SEQ ID NO: 3826 - DNA, 533 bp, Chlorella sorokiniana
  Clone ID: LIB3602-059-Q6-K1-F4
agttcacgaaagtgaccaagttcgaggccagcggactggcgcgggtgcagggcgagttttatagccgtgtttgacaactccatggccctggggcacctggatgatcgcttccgcttcagggacccccacaacctgttgatcgggccctgcgagccgaaatcgcagttcgaaggcattgcctacgtgccagagaatgacaccttactgctgttgcatgaggccatccctcacaagaaaaccgagcggacgggcacctacaagcccttcattcgcgaggtgcgcatcatgaaggactacagcgattacgaggacgtggcatactgagagtacaacatcgagtttgtggacagcaacaaagggtttgagagcatacagtacatgcacacccccaacggaccctgactgctgggcatgtgcgagggcaaccactgagagggcggcgagaccggctaggacaaacgcaacggacgaatgctggcagctcaactgaaatggaatgaggacggcagctgcgtgtgggagcccagcaagac

SEQ ID NO: 3827 - DNA, 89 bp, Chlorella sorokiniana
  Clone ID: LIB3602-059-Q6-K1-F5
aaaaaaaaaaaaaaaaaaaaaaaaaaaaaaaaaaaaaaaaaaaaaaaaaaaaaaaaaaaaaaaaaaaacaaaaaaaagggagaaaaaaa

SEQ ID NO: 3828 - DNA, 345 bp, Chlorella sorokiniana
  Clone ID: LIB3602-059-Q6-K1-F6
cttcctggaggatggcaaggtgctgattggcaccaaccaggcgtgagctggctctgacgttggctgacatcaggcctttggttatggggccgcatggctgagctgggcgccccaatgtgtatggccggggcgcaggcccatgcgttcttgcctgcgccccccggccctgcatgtgtccctacgcgcctgccccgtgctcgggttttgttacgctgtgcactcctttgttctttactcggcagggactgattcccggccccacgctagttctcctgtgcttcaaaccctgcgcgcctgtaaacaggcaacatgtaaaaaaaaaattagaaaattacttttatggga

SEQ ID NO: 3829 - DNA, 88 bp, Chlorella sorokiniana
  Clone ID: LIB3602-059-Q6-K1-F7
cccattttcaaggcccgactgtacagtgcctttttgcgtccttatgccgatctggtaccaggacttaatgtgtaagaaatggtatgtt

SEQ ID NO: 3830 - DNA, 192 bp, Chlorella sorokiniana
  Clone ID: LIB3602-059-Q6-K1-F8
gtagcgtccaacccccctgcattgcttagcgcctcctgattgatattctgtctagcgcctccaacacactagctgctcgagccaaattgaaccccaccactgggcatcctggtgtaaagccaacctccaaaaaaaaaaaaaaaaaaaaaaaaaaaaaaaaaaaaaaaaaaggcggacgatataaaggaaaaa

SEQ ID NO: 3831 - DNA, 534 bp, Chlorella sorokiniana
  unsure (1)..(534): unsure at all n locations; Clone ID: LIB3602-059-Q6-K1-F9
ccctgtctctttgtctagtcgagtcatcttccccgcacttggcagggcgagggttcaccaacttcgccccctcagcgcccgtgctgccggccggttggggcggcccctgctgccgccccactcatcctgcttgctctgatgcagcttgtcccagcgcctgcaattcttttgaccccattcctttcttttgcccgctagtttgtgctgctcctatcttcgtcgcatcacatgggtgtactgccccacgtttcatggcccatccccactcacaccttgcctcccgcccgagcgcactaccccccccatccccacccccacattgctcgccgtctgaacgtagtcccaccaccgncactcgccccagccctgccccatattaaataacgctgcgccgaccgtgcggattttcctcccgagcattctagtgcctgcgcatttcaaggccccacgttttcttcacaatggcacctgccattcctgactgtaactacaacgcagcaaaaaaaaaaaaaaaaaaaaaaaaaaaaataaaaa

SEQ ID NO: 3832 - DNA, 486 bp, Chlorella sorokiniana
  Clone ID: LIB3602-059-Q6-K1-G1
cgaaataaatatataacataaaaaaaaaaataaaaaaaaaaataaaaaaaattaaaaaaaaacacaaataaaacccacataaagcagattattttaaacaaatttaaaaaacttcaaaattctttatacttactcgtcctcctctcttctttttccctcttttcccccccctttctttccctttctcttctttttttttctttcccctttattctttttccttgcccccccttttcccctttcttttctttaaacccccttcctttccctccttttttcccctccctctccctccccttttccccctctttatttttcccatataggcccgccttttttctccttttctcaaatttccccgcctctttggcccttcggtcccccccttttttgccgccctttttccccgccttttttcctttttcccccccctttccctttctttttttcctttcccttaacccccgctgtttcccttttttcccc

SEQ ID NO: 3833 - DNA, 531 bp, Chlorella sorokiniana
  Clone ID: LIB3602-059-Q6-K1-G10
gcgtgttcctcaaggtgaacaaggcgaccatgaacatgctgcagcgggtggagccctacgtggcgtacggctaccggaacctgaagaccgtgaaggagctgatctacaagcgcggctttggcaaggtcaacaagcagcgcatcccgctcaccgacaactcggtgatcgagcaggtgctgggcgacaaggacatcatctgcgtggaggacctggtgcacgagatcttcaccgtgggccccaacttcaagcaggccaacaacttgctgtggcccttcaagctgtcctcccccaagggcggcatcgacaagaagcgcctgcactacatcgagggcggacaggccggcaaccgtcaggagtacatcaacaacctggtgcgcgccatgaactgagcgctgagccggcgagcacagcgcagcgcgcgcagcacgcacagtgcggcgcgtgcagcagcctggacggagcggccccctgatgcctgctagccacggcactgttggccgggccagtcgtgaggccccgagcgcacccgaa

SEQ ID NO: 3834 - DNA, 331 bp, Chlorella sorokiniana
  Clone ID: LIB3602-059-Q6-K1-G11
ctctccacagaacaagcgaagatgcgcgctaagtggaggaagaagcggatgcggcgcctgaagcgcaagcggcggcggcagcgggccaagtaagcggcctgccccgcagcccagcagcgctgcggcgcctgggcgcagccgcccgctcgcacgcgtgcaacggcgctgcagcggccagccggcgtcacggagtccgggcgcccggcagccgccgatgaaatgtgacggccgagtgtgtaatgctcacgaccgtgaaaaaaaaaaaaaaaaaaaaaaaaaaaaaaaaaacaaaaaaaaaaaaaaaaaaaagaagcgcctaaactagatccaa

SEQ ID NO: 3835 - DNA, 530 bp, Chlorella sorokiniana
  Clone ID: LIB3602-059-Q6-K1-G12
aacaccgtgaccgtctcccccgacggctccctgtgcgcctccggcggcaaggacggcgtggccatgctgtgggacctgtccgagggcaagcgcctctactccctggacgccggcgacatcatccactccctctgcttctcgcccaaccgctactggctgtgcgccgccacccagtcctccatcaagatctgggacctggagtccaagtctctggtggacgagctgcgccccgagctgcccgagcgctccaagaaggcgcaggtgccctactgcgtgtgcctggcctggtccgccgatggctccaccctgtactccggctacaccgacggtgccatccgcgtgtggcaggtgggccgcgccatctaagcagctggccacggcggtcggtctcagctgccctgcgctgcagcaggtgctgccccagtggcaccccgcacctggctgtggcggcggcggcggcggcctgacgcacggcgcgcggcgcggcgccccccgcggcaggatttgtgacaggccctctgcacatcgaa

SEQ ID NO: 3836 - DNA, 538 bp, Chlorella sorokiniana
  Clone ID: LIB3602-059-Q6-K1-G2
ggacgatgcggatgacagcgacagcagcgattctgacgatgaggacgacgaggcggagctgctggctgagctggagcgcatcaagcgggagcgggcggaggaggcggcgcgcaaggcggcagaggcggctgccaaggcggaggctgaggagcaggcggagttggtgcgcggcaacccgctgctgcaggagaagctggcggcgcaggaccccagctttgcgctcaagcggagatgggacgatgatgtggtgttcaagaaccagacgcgcggcgagcccaaggcgcagaagcgcttcatcaacgacaccatccgcaacgacttccaccgccgcttcctggagcgctacgtgcggtgatcagagcagcacattgcactgcacgtgcatagcggcacgtttggaactgctctgcacgtgcggagcagcttgtggccgcgccgacggggccagcaggcgcaacagcggcggcggctgcgcgcacattagctgcctgcaaggcggtgcccccagcagaggatccgacactgtggtgccttttta

SEQ ID NO: 3837 - DNA, 505 bp, Chlorella sorokiniana
  Clone ID: LIB3602-059-Q6-K1-G3
aaacaaagcaaatgaacaaaaaacagaaacaattaataaaaaaaaagacaacgaggcagaaactgatgaataaaactagagggcatcaagcgttagcgggcgcaggatgtagttcccaaggcgtcagaggcggttgctattgcggaggctgacgaacatgcggagttggggcgcgggaacccactgctgcaggagaagatgccggtgcatgaccccagctttgcgctcaagcggagatggcactatgatgcggtgttcaataaccaaacacgcggcgagcccaatgcgcataagcacttgatcaacgacaccattcgaaacgacttccaccgtcttttcctgcatcactacgtgcggtgatcagagcatcacattgcactgcacgtgcatagttgcacgccctgaactgctctgcacttgcggagcatcttgtggtcgtgccgacggggccagcatgttcaacagaagctgtagaatggcgcacattatttggctgcaaggatat

SEQ ID NO: 3838 - DNA, 439 bp, Chlorella sorokiniana
  unsure (1)..(439): unsure at all n locations; Clone ID: LIB3602-059-Q6-K1-G4
gttgtttttctgtaccccacctactcaaccgcctgcgccccctgtcacctgcgctacgcgacatcgtcaccattggccctcaccacatttttccattcttccacattctgcttccacacttggttgtttacataacacagcgcttcatgcttccactactgggattgtccaatgagcacttccttcaccaaacgctacacctcaaccacctaccctgccccttgttcatcacactacacactacaatgcgcgcagcccactcactcacccgatgctcacagttattctcacttcacttcctcatccacttgctcgttacggcacatcttgggatttgaatttgcaaagcgcactcagaagccacagcaggcttgtggtgtaaacacagcaaagcnnatnatataaaataaaattaagttatttcttttaatttttaaaa

SEQ ID NO: 3839 - DNA, 528 bp, Chlorella sorokiniana
  unsure (1)..(528): unsure at all n locations; Clone ID: LIB3602-059-Q6-K1-G5
caacatgatctgcaaggtcatcggcacgcccaccgggcacgagctggcggcggtggccaacgacaagtcgcgagcctacctggcatccatgccctacttcccgccacaggacatgcagcagtacttccccgcggcctcgcctgccgccattgacctgcttaaccggctgctgacgttcgacccagccaagcggctcacggctgagcaggcgctggcgcacccctggctggcctcgctgcacgaccccacagacgagcccagctgcctgcagcccttcaactcgccggaggaagccatcggcgagcccagcctgcagcagatccgcgacggcatcgtgcgggagatgtgcatcttcaaccccgacatcctgcacgcggngcggtagcaccttggcagccaaaccagcacaagttgaggcatgctgcatgcacagctgcagcgaaaaagacatgtgcagtttgcaccttgacatccggcatgtggggcggtagtgcgcattgtggaccgtggcggctgctacgctgtcgg

SEQ ID NO: 3840 - DNA, 532 bp, Chlorella sorokiniana
  Clone ID: LIB3602-059-Q6-K1-G6
cacccaggtccgcaaggtgcccatcgcccagaagaaggcgcacctgatggagatccaggtgaacggcggcaccgccgcccagaaggtggagttcgcctacgacctgctggagaaggcggtgcccgtgtcgtctgtgttcacccagaacgagatgatcgacgccatcgccatcaccaagggccacggcactgagggcgtggtgacccgctggggtgtgtcccgcctgccccgcaagacccatcgcggtctgcgtaaggtggcctgcatcggcgcgtggcacccggcgcgcgtgggctggaccgtggcccgctccggtgccatgggcttcaaccaccgcactgagatgaacaagaaggtgtaccgcatcggtgtgaagggcgaggccagccacgccgccaccaccgagcacgacgtgacggtgaaggacattacccccatgggcggcttcccccactacggcgtggtcaaggaggactatgtgatgatcaagggcgcctgccccggcgtcaagcgccgcgtcatcaccctgcgc

SEQ ID NO: 3841 - DNA, 527 bp, Chlorella sorokiniana
  Clone ID: LIB3602-059-Q6-K1-G7
gacgccctgcccgcttttgcctactctcgctgggtgtggctggccaccctaggagctgcaatctactctggcctctctgcccagtggctggtggccgccttcggtgtgggatccctctggaagctgctcaatcagctgcagggcggcggcgccgtgcggccccagaatgccgctttcgccgccctggcggcctgggctttctacgcgaagcagacgccgctggttgcactggcagtgatggccgggcacatggctgcggaggtggtgtcttgagggcttttgactggacgaaatggtgtgggttggccactcctgcgcacctgcgcttttctcgaaggcatggtttgtattctagctgcacagtatgtttgccaggccatgttgctcacttgacgcacgttagtcgccctctgaccactatcgatcctgcaccctgtacactaaacatgctcaagctcgttcccatgcacatccttccatctggctagaaccgtctggcagcgggcaaaaaaagagtatcaccctgc

SEQ ID NO: 3842 - DNA, 532 bp, Chlorella sorokiniana
  unsure (1)..(532): unsure at all n locations; Clone ID: LIB3602-059-Q6-K1-G8
gcaacggcccgctgcgcggcaagggcgtctggaagatgcccactgggctggtgcaggcaggggaagacatcagggaggccgctgaacgagaggtgctggaagaaacgggcgtgcgagcgcgattcgactgcgtgctggccatgcgacaagcccacggcttcgcctttggcaagtccgacatgttcttctgtgtcggactgaagctggagccagggccgcaggagctgagcatgcaggaggatgagcttgtgggcgtgcgctggatgcccctagctgagtacctagccatcgacttccacgccagccgcccgctgctgcgccaaatccaggctgcatgcgttgcctgngcagatggcacgtaccggggcctgtgtgggcgcaagctggaggcgggtttcagcgggcggcaggacctgctgctgtttggagaagcagcagataggacaggcgcagataagctggcagagcgagacatgtggattgggctggacacagcagctgccggcggcggcggggccacggcattcaaact

SEQ ID NO: 3843 - DNA, 444 bp, Chlorella sorokiniana
  Clone ID: LIB3602-059-Q6-K1-G9
gattgtgtcgcatcaccacgagtttgtgaaccaggtgtgccaggagaagtggaccgtgggcggcggcaagctggaggtgaccggccagtccgcggccgctctggaggccgccaagctggagtggaagcgccaggaggagaccaccgacgccttcggcaacaccatcaagatcaaggcccccaagaaggagctgtcgcgcaaggagaagaaggccaaggccaaggccaacgccgcccgccgcgcgcgcggcgaagaggtgtctgacgacgaggatgactactgaggcggcgctttgccgctgcaaacctctcggtttctgtagcgccacgaccccaagtcactgctagccctttggaccgccttttgattgacccctccccctttgattgccaaccctgcctcccctgtaactcgaccgcatctgcttgtaagcctacacagagc

SEQ ID NO: 3844 - DNA, 537 bp, Chlorella sorokiniana
  Clone ID: LIB3602-059-Q6-K1-H1
cggacgcgtgggcggacgcgtgggcgcgactgcctgaccgcctgccagccctcccagccttcacagcaagcgctgggggcccctgctcgacctacgacgacccagaacagatcggtagcagcgctcagacatggagccttcacaagtgctgaacaagctgctggggcgcggcacagacaccggcggtgtggagttttggcggcagcccgagcgcagcggctggctgatgaagcagggcgagtttgtgaagacctggcggcgacgctggttcattctgaaggatggcaagatcttttggttcaagacggacattgtgggcccgagcacgcagccgcgcggcatcattgaggtgaacaagtgcctgagcatcaagggcgctgaggacgccatcaacaagccgcacgcgtttgagatctccaccaccgaccaaaacatgtacttcatcgccgactcggacaaggagaaggaggactggatcaacgcggtggggcgggccatcgtgcggcactccaagagcatgatggaccgcgaccaagt

SEQ ID NO: 3845 - DNA, 483 bp, Chlorella sorokiniana
  Clone ID: LIB3602-059-Q6-K1-H10
actgaatgaaactgaaagaacaaagagaacaagaacggccgtctggacatgctctaacatgcaagggctaattcaagcgaggccattgtgaccggaaagggccccctggacatccttttgcagcatttggaggagcccggggagttcaacttctacgccctgtacgccaactccctgtcgtaagcagctagtttggagcacctgcggcggccgaggcaagagcgctgagctgacacaaatcgcagctggcgaccgacgccgcctgacactagtgcccttgactcctatttccttatacacgttagcatgctttcccgactccgctcaatgttacctgtagatgcaattgtgcattaggcacaagatactagaataaaactccacccttacacgattgtgcctgttgttccatcctgtacgaaatagaggccgaactgttttaaaaacatccattcctttttttacagaacctagaacccaaaa

SEQ ID NO: 3846 - DNA, 525 bp, Chlorella sorokiniana
  Clone ID: LIB3602-059-Q6-K1-H11
atggacgagctggtgcccaaggcgctgctgtatgtggatgtggcgcagtacaccttcctggtgaatgaggagtcgatgaaggcgctggagagcatgcgtgcggctgcagacgagtgcaacgccgcggtggccaagtggcaggaggctgacgagcagcaggaggacactgcccgcaccaccggcggcacgctgcctgccgacgtggcggcgcgcctggagaagaagcgggccgtggaggcggcgcgcctgcagcgcctgcagcaggaccgcgaggcggcacaggcggaggcgcaggccggcctggcgggcatgcggctgggcgaggaggcgccggcagcggcggcagcgggcggcgcacagcccgccttcagcgcctccgccatccgcaacgccgccacgccggaggagagtgatgccaaggtgcaggcgctgtgggaggcggccgtggcgggcgatgaggaggcagctgcggtgctggatcacacggagcactttgccgtgtgagcagtgaccgcagcaggcgtg

SEQ ID NO: 3847 - DNA, 514 bp, Chlorella sorokiniana
  Clone ID: LIB3602-059-Q6-K1-H12
atggtcgatctggagcccagggcgctgctgcatgtggctgtacctccatgcaccttcctggtgaatgaggagggggtgctagcgctcgagagcgttcctgcggctgcacgacgagtgcaacgccgcggcggccaagttgattgacgctgacgagcacaacgaggacactgccctgaccaccggccgcacgctgcctgccgacttggtggcgcgcctggagaagaagcgcatcgtggaggcggagtgcctgcagcgcctgcaacaagatcgacaggcgggacacgcggaggctcacgccggcctggcgggcatgcggctggacgaggaggcgccggcagcgacagtagcggtcggttcacagtccgtcttctgttgctgcgccatccgcaacgccgacacaccggatgagagtgatgtcaacgtgcaggcgctgcgataggcagccgactcggccgatgaggaggcagctgcggtgctggatcacacggagcactttgccgtgtgagcagggacc

SEQ ID NO: 3848 - DNA, 337 bp, Chlorella sorokiniana
  Clone ID: LIB3602-059-Q6-K1-H2
ggtgtacaaccagccgcactatgcgggcattgacctgcccttcgatatctacaccctggccgacctcaagtccgggcggatggtcggcgtggagctgttccgcaacaccgagctcgaccccgagcgccgctgctaccccggcggcgccttcgaccccctgaacctggcgtctgacgacagcgagcgcacgcagaagctgcgcgaggcggagatcaagcacgcccgcctggccatggtctccttcctgggctacaccgtgcaggcctggtacaccggcgagggcgccctgagctccctcaacaagatcgacaacggcttctaagcagcccggcatgac

SEQ ID NO: 3849 - DNA, 538 bp, Chlorella sorokiniana
  Clone ID: LIB3602-059-Q6-K1-H3
gaaacaggcgctgcacgaggcggcccgcacagccaagaaggaagtcaaggcggcgcaggccctcattctccacgacgacctcaaagcgcgcaagcgggtgctggggcgactaggctacctggacagggagggcgtggtcacgctcaagggccggtttgccagcgagctgagcacgggcgacgagctggtgctgacagaaatggtgttcgccggcgtgttcaaggccctgcggcacgaccagctgtgcgccctgctctcctgcttcatctggcgggaaaagtcagaggctggcaacaaggtgcggcaggatctggaggcgccatatgcagcgctgagagagcatgcccgcaaggtggcgcgcacggtggccgactgcaagatggagatggacgctgatgagtacgtggagagcttacggccggacctgatggatgtggtggcggcctgggcgcatggcacccgcttcttcgacatctacaagatgatggacgtgttcgagggctccctggtgcgggccatccggcggttggaggagctg

SEQ ID NO: 3850 - DNA, 532 bp, Chlorella sorokiniana
  Clone ID: LIB3602-059-Q6-K1-H4
gcatcggttcggcacacacacgagcagggcaggtctggccccttgcattgatggtgcagggccttaccgcctctagcgcctaagagcgggcggagacgtttcggttgctgcttaagacacagcgcagcaacgggctgatgcatgagtcactcaatgcaaatgatctgagtgcgtgcagacgagagtggtttggctgagctaactcgatgcttgtggcgttggtggattccagcctacgatttgactgcactagagcagtagaggatcagcacaagatcaacattgtctgtcaggagaaagccaacccttctgagctgccaatgaacagcagtccgaaagacccagcctactgtgccagcctgctggccaccattgcttatgacaaggaaaccttgacagcacctgcatatgtatggcaccatgcaaaggcaatgtaagccatcactcgcggcaggcacccgcttcttcgacatctacaagatgatggacgtgttcgagggctccctggtgcgggccatccggcggttggagg

SEQ ID NO: 3851 - DNA, 504 bp, Chlorella sorokiniana
  unsure (1)..(504): unsure at all n locations; Clone ID: LIB3602-059-Q6-K1-H5
cgacaccttcgtccacgtgactgatctgtccggcaaggagacgctggtgcgcgtgactggtggcatgaaggtgaaggccgaccgcgacgagtcgtccccctacgcctccatgcttgccgcccaggacgtggccacccgctgcaaggagctgggcgtgaacgcgctgcacatcaagctgcgcgccaccggcggcaaccgcaccaagacccccggccccggcgcccagtccgcgctgcgcgccctggcccgctccggcatcaagatcggccgcattgaggatgtgacccccatccccaccgactccacccgccggaagggtggccgccgcggtcgccgcctgtgaggcgggcgcgctatgcgcgctccggccacagcccggatgctctgcctggcctgccgcgcccggctgccgcgcccgcggcctgatggcggcccctgccgcctgatgggcctgtggtgcagcagcggcgccggcacagcccaggcagcggngcgcccccgcct

SEQ ID NO: 3852 - DNA, 412 bp, Chlorella sorokiniana
  Clone ID: LIB3602-059-Q6-K1-H6
aaaaacattaaaacacgtagaactgatctgtccggcaaggagacgctggtgcacagtgactggaggcatgaaagtgaaggccgaccgaaacgaagtcgaccccctacgccgccatgcttgccgaccaggacgtggccacctcgatggaaggagctgtgcgtgaacgcgctagcacatcaagtctgctcttccatcggcggcaaccgcaccaagacccccggccccggttcccaatccgcgctgcgcgcaatgccccgctccggcataaatataagccgtattgaagatgtgacctttatccccaccgactccacccgaaagaagggtggccgacgcggtcttcgaatgtgaggcgggcgctctatgcgcactgcggccacactccggatgctctttctggcctgccgggccc

SEQ ID NO: 3853 - DNA, 503 bp, Chlorella sorokiniana
  unsure (1)..(503): unsure at all n locations; Clone ID: LIB3602-059-Q6-K1-H7
gggcgttggcgcgtgccgcagcgcagcagcgcggcctgttggccaaacttggaaactccctcgcccgggcagccggccctcccgcttcccgtcatcctttttcgcggcctgactcgctctgatcatgatcgaaagcaaacgttggctgctgcacgccgtcccaccaactcccaggcgcggcgccgccagttggcccgctgctcgcccgcacggggccacagtctcgcgctctatcccatttggttgaaggttaacaagatgcacagtgaagtccttgtgaaagataaccagccanaaaaaaaaaaaaaaaaaaaagggtgaacgaatacgtctttcaaaaaaaaagcaaacccgctaatgggaaatgaaaccacccctcggatggtataaaaaaacctggcagggtgaggatgtcaaccaaaaaaaaaaaaggggggcctttttaaaaaaaacaaaactaactttccggggtttgaaacctaaaattttttttaaggggcgcc

SEQ ID NO: 3854 - DNA, 536 bp, Chlorella sorokiniana
  Clone ID: LIB3602-059-Q6-K1-H8
gtgccgtgctgcgcccaccggcttacaagcccaggctgctgaccaccctctcagatagccagttcggttccaacgctctcttgaccatctgtagcgcagcgaggccctgtttccaataagccatgccccggcttttttgcccccgaaattgcttgccttcacacccacccctgtgcccagcgtcaaaccgttccccaccacgaaccctccagcctggctcagtggctggtcattcggactgccacccaggagtgctccatgctcctcttgtctccaacacccacccacataaccgccggcaggcaggcccagctcaagccaactgtgcaagctcccacggcccttgtccccccgtccccggctgccttttgatttgcgccgcccgcgcctcgcttgcttgatcgtacgtgtgccccttccgtccgggcctgtttaccctgttccctgcccctgcctccttttgagccgtccctctgcgcgtcccgtctgccacgcggcctgctcgctggcaccgccagccgcggccagcctttttg

SEQ ID NO: 3855 - DNA, 478 bp, Chlorella sorokiniana
  Clone ID: LIB3602-059-Q6-K1-H9
cctggctgagctgaaggtcaaggagatcaagaacggccgcctggccatgctctccatgctgggcttcttcgtgcaggccatcgtgaccggcaagggccccctggacaaccttctgcagcatttggaggagcccggggagttcaacttctacgccctgtacgccaactccctggcgtaagcagcttgtttggagcacctgcggcggccgaggcggcggctctgagctggcgcaaagcgcggttggcgaccgccgccgcctcacgctgttgcccttgaccctcttccctttacgcgtttgcatgcgttcccgactccgctgcatgttgcctgtgtgtgcaattgtgcatcaggcaaaagaaacgagaagaaaactccacccaaacaccattttgcctgttgtaccatcctgtacgaaaaggaggctgtagtggtgtaaaaacatcaaaaccctgcctaacatatgagccgaacatatgag

SEQ ID NO: 3856 - DNA, 136 bp, Chlorella sorokiniana
  Clone ID: LIB3602-062-Q6-K1-A1
agcccccgctcgctgctgcgacgctcatgtcctgaacgggccctcaaagcccgtaggcaggcagaatggcctgctccgcgctgtaccggcagtcgaagctgggtcagagcttggtggatgccctggatcagctcgt

SEQ ID NO: 3857 - DNA, 261 bp, Chlorella sorokiniana
  Clone ID: LIB3602-062-Q6-K1-A10
ccgaaggacgcgtggggcaagctggaccagatgctggacgaccaattcgccaccggccgcctgtacgccgctctgtccgcgcgccccggccagtgcggccgcgcggacggctacatcctggagggccgcgagctcgagttctatgtgaagaagatgcagaagaagaagggcaaggctgccgcgtaaagcgccgcctagcgaggccgcaacccccgggtgccacttgctggataggatcaagttgtaaggcaccaactcgca

SEQ ID NO: 3858 - DNA, 321 bp, Chlorella sorokiniana
  unsure (1)..(321): unsure at all n locations; Clone ID: LIB3602-062-Q6-K1-A11
ctncnacggacgcgtgggcggacgcgtgggtgcctcaccaacagttttcctttgcagccaacgtaccgcactgtgctccggcgccctgggattttgggcccagacccccggtgcattttccctctggtgtttgccacatgcatcgtttttcccacccacctccccattcgtgcccgtctgtgccgtgcttggagcacggctcctgcctgacttctctttgcacgaccttcatatgtcatggttggtattgcaagccaagtttctttgtaagatcgatgcactgaaaaaaaaaaaaaataaaaaaaaacaaaaaaaaataca

SEQ ID NO: 3859 - DNA, 292 bp, Chlorella sorokiniana
  Clone ID: LIB3602-062-Q6-K1-A12
accgtccggaaaacaagtagacggacacataaatacctaaccaacaaaaatactttacaaacaacaaaacacacactgtactccggcgggctaaaattttaaagcccagacccccggtgccttttccctctggtgtttgcctcatgcatcgtttttcccacccacctccccattcgtgcccgtctgtgccttgcttggagcacagctcctgcctgacttctctttgcacgaccttcatatgtgatgaacgctattgcaagccaagtttatttgcatgatcgatgcactgatt

SEQ ID NO: 3860 - DNA, 473 bp, Chlorella sorokiniana
  unsure (1)..(473): unsure at all n locations; Clone ID: LIB3602-062-Q6-K1-A2
ncacgactcattttcaaggacgccctgatcctcaaggcgccctgccccaactgcaacacagagaacaccgtgtacttgggcgacatcctcacaatccagggcaaccggaaggagaacaccgtgccgtgccagaactgcaagacgcagctgcggtttgacgcccagacgcgggaggtggaggcggttgaggaggccaaggcctgaagaggagccgcaacaacagccacatgccggctgtgcctttacccacgtttgtcgacaagctgtaccatgtatccacccgttcactgctcttttgtgcgcactgacccgactcgattttgcctccggtttcacacatcacgccctgctactttgcagtgccattactgcttgcctgatctaagataacaagttgcaagccatgatggtcgatctaaggtcacaagttgcgcgcccntntacaaaaaaaaaatatttaacatataataaaa

SEQ ID NO: 3861 - DNA, 454 bp, Chlorella sorokiniana
  unsure (1)..(454): unsure at all n locations; Clone ID: LIB3602-062-Q6-K1-A3
gtnccgcagtcaacacacgcagccgcagcgccaagctcagagttgttgagaagctgtaaggctggctggctgcaccgcgcctgctgtggcaggcaggcagctaacgcccaccagcagtacaagcttaggcagcctgcagtccaagctgcagctgcactggccagttttagcgcaaggggtggcgccccgccccgctgctcccagccgccgcacccacccatcttttgctcgtgtacactagcacgttttgcaagtttggtagatagcaagcttccagttcctgacgtcccgtcctgcactttgctaactgcagaggtgcaggcttgacctgcctgaccgacatttgtgctctcccttccctccatttgctgccctttcaaacgtgctctactcttgtttgtgtccctcttggccgctcgaccctcagccaactatgcaactgttgcacagagaa

SEQ ID NO: 3862 - DNA, 535 bp, Chlorella sorokiniana
  unsure (1)..(535): unsure at all n locations; Clone ID: LIB3602-062-Q6-K1-A4
nccgggagaatgccgtgctgctcaagagcttaagtaccatggaccggttcagcatgaactgggcagcacggctgggaggggcaaggctgatatcgcactttgtcaagctggccgctgatcgcctgccgggcgtagtaaagcgtggcgcaggggattcgctcggcccctgcgatgcacgttacctgcaggggaacgaggctgcccaggactggctgctgcgcttcatgacgcgtgcataccgtccgggcgtgcggggcgtgctgttggattatcgggtgctgggcggcgactggggcgggctggacgtgggactgattgcctgtcgcaccgccatctggcacggcgctggtgactgcgtggtggcgcctgcacatgcccagtggtggcaccggcgggtggctggatctgagctgcacattctgccagatgagggccacatcagcgtggtgggccggcacgctgagcggatctggcgggacctcctgcccggccagctgcagcccatagcggcagatgaatgaacgacgcaggatgt

SEQ ID NO: 3863 - DNA, 544 bp, Chlorella sorokiniana
  unsure (1)..(544): unsure at all n locations; Clone ID: LIB3602-062-Q6-K1-A5
cgnncacaaaaaaaagaaaaaaaaaatcaaaaacttaaatacaaaaaaaccaaaaaaaaataaaaaaaaacaaaaaaaaaaaaaaggggcaaagataaaaaaaaaactaaaaaaaaaaaaagggggggtcccctttaaaggatccaagtttccttccgcatgctatcaactcattcccttttttttagggtacctaaaattaaattcatggcccgcggttttacatcgtgcgcttaggaaaacccctggctttccccaactaaatcgctttgcagaaaatccccttttccccagctggggaattagcaaaaaggcccgcccaaatggcttttccaaacattggcatatcctaaagggcaaatgaaaccccccttgaaccggcacataaaccccggggggtgtgggggttccccgcatctgaactgttaaatttgccagatcacttacccctattctttgtgttttttccctttctttttaccccacgttaccgggtttccccccaaaagctttaaatggggggctccttttgggctacccatta

SEQ ID NO: 3864 - DNA, 206 bp, Chlorella sorokiniana
  unsure (1)..(206): unsure at all n locations; Clone ID: LIB3602-062-Q6-K1-A6
ncntccnacaattggctgcagggcaggagagcaaacctgcaagcagcatggctagctgagcagccagcagcatggcgtgccttctttctcacacttttgcactgtactaagcccagcagctgcctcaacgggctccttgctgttcttcctcaattgttccaaccatgatgagagtatgacacacagcagcctatgtgtaactttac

SEQ ID NO: 3865 - DNA, 380 bp, Chlorella sorokiniana
  Clone ID: LIB3602-062-Q6-K1-A8
ccttccagacgacgccgctgtggagggccccagcagggcgcgggcggggcgccgctccgccgcagctggcgaggagggccggcgccggcagtctacgcgcacccctgctgtggctcgcattgtggaggaggaggaggaagaggaggaggagagcgatagccggtcgcgacgcagcgggcgcgccaggcgcagcatggctgccggcgaggcacagccagtgctgagcagcgggcgcacgccgcgtgttgcgggtggcaagaagggcggcagccggctggcggcatgacccaggagacctgaagactgtgtgttgctttgtgcgtgttgattgcattcaatgttgcttgcagcccatgaaacgggcatgttatgcaatctag

SEQ ID NO: 3866 - DNA, 263 bp, Chlorella sorokiniana
  Clone ID: LIB3602-062-Q6-K1-A9
tctcccggacgcgtggggcaagctggaccagatgctggacgaccaattcgccaccggccgcctgtacgccgctctgtcctcccgccccggccagtgcggccgcgcggacggctacatcctggagggccgcgagctcgagttctatgtgaagaagatgcagaagaagaagggcaaggctgccgcgtaaagcgccgcctagcgaggccgcaacccccgggtgccacttgctggataggatcaagttgtaaggcaccaactcgcac

SEQ ID NO: 3867 - DNA, 471 bp, Chlorella sorokiniana
  Clone ID: LIB3602-062-Q6-K1-B1
ccgaggtgcgggttacacgcctcgctaaggccccgccggggggcgcccccggcaggcatgtggccgctttgcgtgggcgggcaagctctcaggagtcaatcggggctgctggggtactgctgctgctgctgcgggtgggcgtgggggtgcttacgccaccagctgcaccgcgccgccgacctccttgatcttcttctccgccagcttgctcacaaacttggcgcgcaccaccaccggctgctgcggcagctggcccttgcccagcagcttgaagtagccgtgcttggtgatgtcaatcacgggggcggccgcggtgtccttggccgccgccacgcgcgcgtcctcgcccaccagagcccacaccttgtcgaggttgatcacggggcagtggtacttgttcttgttcaggtggaagtagcgcatgcccaccttgccgaagtagccggggtggtacttgtcccacatgatgcg

SEQ ID NO: 3868 - DNA, 210 bp, Chlorella sorokiniana
  unsure (1)..(210): unsure at all n locations; Clone ID: LIB3602-062-Q6-K1-B10
ccnccatgacggtgcggccgatgaccgacctgtacggctgacgggcctgccagcaggcaacgagcaccctccttgggcagccgctgcccatcctgcgcggcggcctgatggctggctggtgcacgccatgcctatctgcgcggtagcggagctgtgctgacaagttctggcgcatttgataccttcaacattgtaaacactgcagcacgc

SEQ ID NO: 3869 - DNA, 452 bp, Chlorella sorokiniana
  Clone ID: LIB3602-062-Q6-K1-B11
cagcgcggcatctggcccctgggccgtaccctgaacaacgagtggtttgcggccagcgagagcctgatgagcgccgtgccccgccagggcagcgccacgccggtgcgcatgaaccccatgtcggagaagatcaacatgaagagcgtcacgtactgagcgcctcgctggcagcccccatggtctgaggcggcccgctggcagcggcaggggcctgaggccccacaccccgcagccgcgtgcgcctcggctgggcgggccagaatcgctgcccctcttactacactgagttttcgactcaaatttatgtcctatgcactcacccctttggttaaccctgtagcgcttgcctcgcaccctcgcccgccggggaagcccgctctgtacctctgtgccatgtctgtatacacgcttttgctggcgcgtctggggtgtgttaagctgcgcacctaaca

SEQ ID NO: 3870 - DNA, 541 bp, Chlorella sorokiniana
  unsure (1)..(541): unsure at all n locations; Clone ID: LIB3602-062-Q6-K1-B12
ngcgaagccccgtcaccctcagcagcgcaccgcaatggaggacgccggcccaagcgttcccaaggcaggcagccaggccgacatcctgatgtacggcaagccggtgcacgtgcacggcgacatggccaagaatgaagtgcaccgaccgcagcaccaccctgatacaatcaattacgctgcggtggccaaggaggagattcacgacgtggtggagcacccgccgccggtcaagctgatgagcggccgcgccactggtgtggaggcgtgggacaaggtcaactcgccaaaggccaggcacgactgagcggccagagtggcagagtggcggagaggctccagcagtgaacgcactgccgccggctggtgtccacagatcaactcaatctgttgagaccagctgctgcctacatccaagcttgcaatgctcactgccaacgcaacccacacagacgcgcctcccagcccaccagcagcctcgccggtgcacgctgcgctacgtgagttttccctcctgttcctccagtattgcactgccccccag

SEQ ID NO: 3871 - DNA, 370 bp, Chlorella sorokiniana
  unsure (1)..(370): unsure at all n locations; Clone ID: LIB3602-062-Q6-K1-B2
nnnnnccggcaacgccgcgcccgctgaggccgacatcaagaagatcctgtcttctgtcggcattgaggctgaggccgagcgcgtgcagaagctgctggccgagctggagggcaaggacatcaacgaggtgattgccgccggtaccgccaagctggcgtccgtgccctctggtggcgccgcggccgcgtccgctgcgcccgccgccggtggcgccgctgccgccgccgaggagaagaaggaggagaaggttgaggaggaggaggacgaggacatgggcttctccctgttcgactgagcgcacacggcggctccgggcggcggcggcgcacccgctgnaagagcggccctgcagctatcgcaatctggggca

SEQ ID NO: 3872 - DNA, 528 bp, Chlorella sorokiniana
  Clone ID: LIB3602-062-Q6-K1-B3
ccccccctttttttttttttttttttttttttttttttttttttttttttttttgcatttatgcttatgtttattgggtgtttaatcagttgagggggggcccggcctggccttcaaaacggaaaaaaaaaaacggcctcaaaggaaaagggagggccctgtgaagcttttaggaaaaaaagggcggaaaaactcaaatgccccccggcaggggggtttggtacatataccaaagagaagctcttgaggacccatataaggaaattgggtttataaaaccgcggaggggtcgtcccccctttggaaaagaaaaccaagggccaaaccccctttgaggagtttaaaaaggtggagaacccaaaaacacgcttttggggggtttttaaaaggacctttttttagggaaaaaagcccccccatatggcccgggggaaaaaaccgggaaccggaaccctttgtttaaaaacgaatgccccaaaagccacggcccccccctttgtccccaaggtttgaaaaaaaaccctaacc

SEQ ID NO: 3873 - DNA, 542 bp, Chlorella sorokiniana
  unsure (1)..(542): unsure at all n locations; Clone ID: LIB3602-062-Q6-K1-B4
ccgcntnctcgcgcggcgacggcgagggcgcgcgaaagacgatggaccgctcgctgcagtcgctgcctaagtttgagcacgtgcgcatgatctcgcaaacaggcctgctggagtttaagctgggcgaccaggagcgggggcggtcgttgtttgagggtgtgctgcgcaactaccccaagcgcctcgacctctggagcgtgtacttggaccaggaggtagcggcgggggaccagcagcgcatccgcgcgctgtttgagcgggccacccacctgcagctgccgcccaagaagatgaagttcctgttcaagcggtacctggactacgagaagaaggccggggatgcggccagcgtggagcacgtcaagcggcgggccatggagtatgtggaagcgcaggcagcggcgtgagcaagccgtgcggcttggccaggttgtacagcaggtgcagactgcggcactttgcgactcgaaagcagtgctgtgggcagccgacagcagagcatgcgcacatcgcacacttaagacagcaaactgcgcttgcta

SEQ ID NO: 3874 - DNA, 418 bp, Chlorella sorokiniana
  unsure (1)..(418): unsure at all n locations; Clone ID: LIB3602-062-Q6-K1-B5
cgtnaaaaaacgaagaacaggaaagacacacaaaaaaaaaatgagaccgatcgctgaaaaaaaataactaaaatagagcacgtgcgcgtgatctcgcaacaggcctgctggagtttaagctgcgcgaccagcatcgttggcggtcgttggttgaggttgtgctgcccaactaccccaagcgcctatacctatggagcgtgctcttgtaccacgaggtagcgttgggggaccagcagcgtatccacacgctgtttgagcggaccacccacctgcagctgccgcccaagaagatgaagttcctgttcaagcggtacctggactacaagaagaaggccgccgatgcggccagcgtggagcacgttaagcggcgggccatggagtatgtggaagcccatgcaccggcgtgagcaagccgtgc

SEQ ID NO: 3875 - DNA, 446 bp, Chlorella sorokiniana
  unsure (1)..(446): unsure at all n locations; Clone ID: LIB3602-062-Q6-K1-B6
ncgcagctggacttgtctgcggggcagccgcgcttctacatcatgcgcctgccgcgccgcggccgccgcttcgagcgcatcacgtaccacgcccaagtcacacagtgcctgggcgggctgcagccggcgagcccctggttcctggtggtggcgcggcccacgctctcggttgaagcctacccccgtcaggcggacctggctgccttccgcatcccacatggcgtgtttgtgaagatgcataaaggcacctggcacgcaggcccgctgtttgatggagatgggccctttgacttttacaatctggagctgtcggacacaaatgtgacggaccacaacacgcatgactatggcgaggcagagggcctggcctttgagatcctggactgatcagtggcgtggtgtactccgccacagggtgctcctgctgcatggctgcctgcacagat

SEQ ID NO: 3876 - DNA, 463 bp, Chlorella sorokiniana
  Clone ID: LIB3602-062-Q6-K1-B9
ccccttttataaaaaaaaaaaaaaaaaaaaaaaaaaaaaaaaaaaaaaaaaaaaaaaaaaataaaaaaaaaaaaaaaaacactggggggaacactaaataaggggcgctatggtgccccccttttttagcccccaatttcctcccccgtgctttcctctttatgctttttctttggggcccccttaggtcatttctttgtctgccgttttacaacgtcctgcttggtaaacccctgctttccccctttttaatccccttctgcctcatcccctttttgcctgctgggttcttcccaaaggggcccccccctttcgcctttcccaccttgtgcccctcctgtatgcatattgggacgccccctgtctcgcgccttttacccctgcccgtgggctgtttccccccacattggccccttcccttgccggccccttcaccccctttcttttattttttttcctttcc

SEQ ID NO: 3877 - DNA, 430 bp, Chlorella sorokiniana
  unsure (1)..(430): unsure at all n locations; Clone ID: LIB3602-062-Q6-K1-C1
naaggcggggctgcagcagtcggacctggtggaggtcatcaagctgggcgccattgcatgccccatgtttgcgctcaagggaccctcgatgattgagggcaactacccgccggccttccccctcaagcaccagcagaaggacatgcggctcgcgctggcgctgggcgacgcacatgcgcagcagctacctctggcggcagcagccaacgagctgtataagcgggcgcgtgcggcagggtacagcgacgccgacttcagcgccgtcatggatgcagtggcctcccgcaagtagagtggcactgcagccggcttcgcggtggcagcgctgcagcaccaatccagaacagccttgagcctcctgcagctgggacctgaccgttgaccatcgaactttacatttgagcatttcatgtggtaacgatacaacttt

SEQ ID NO: 3878 - DNA, 396 bp, Chlorella sorokiniana
  unsure (1)..(396): unsure at all n locations; Clone ID: LIB3602-062-Q6-K1-C12
ncnccccacgcgtccgtgctccttccccacaccgaccctgcaccttggccctcgtattgctgccgtccgtcgcctgccgtgccccgccagcccgcctcatggggcgctccatgcagctcacatccccctggcaggctggctgagcacttaggctagacagcagctgcccgttggcctccctgcacccggttttgctcccttcttgcttccacaacccgcttgcagcaacgttgctcgtgcactgctcccagcagccggtggtgctcaacgatggggtcacccggacacccgacctccgttgttgttgtttcattccagcattgcatgcccacgttgtgttgtttccagagccagtcagcctgtggaccaggcccagcctctgtaacccaagcaagc

SEQ ID NO: 3879 - DNA, 489 bp, Chlorella sorokiniana
  Clone ID: LIB3602-062-Q6-K1-C2
aaaaaggtggatcgggaccgagactgaggctgagagagcggctgcagcgccgcagcccggtctatgtgatggacccaacgctcggcatcctggttgatgcctgggacctagcaacacctccaatcatgcacgacccctgctgcgactagctgggcagctgagcagtgcagcaactcgcaacctggtcctctgcccggcgcctgcacagcaagccagtggcggcagcacccagcagcccgtgcagcggcctgctgctggatccacacattgagcagcggtgcgtttcgtttgcttgcattttgacttgattgactgccctgatttcatgcctcacctgtatcctgctgtagtgcctgcgcccatcaccctcacctttttgcccgacgccacttgtgaactgaccgcacgctggcatgcagccgctgccgctgcgcatgcactagctgtctccccgccgcccagtcagcagggcaaagccatttaaagaac

SEQ ID NO: 3880 - DNA, 534 bp, Chlorella sorokiniana
  unsure (1)..(534): unsure at all n locations; Clone ID: LIB3602-062-Q6-K1-C3
nctaggacggccggtctagcaggtactgggcagccatgacggcagctgaggtcaagctgttcgggaagtggagcttcgaggatgtggaggtgaacgacatctccctggaggactacattgcggtcaagcccaagtatgcgcgcttcaccaatcacagtgcgggccgcttccagaagcgccgcttccgcaaggcgcagtgccccatcgtggagaggctgaccaacagcctgatgatgcacggccgcaacaacggcaagaagctgatggcggccagcattgtcaagcacgcgtttgacattgtcaacctgctgaccgaccagaacccggtccaggtgctcgtggacgccatcatcaacggcggcccgcgtgaggatgccacccgcattggcagcgccggtgtggtgcgccgccaggctgtggatgtgtcgccgctgcgccgcgtgaaccaggccatctggctgatcaccaccggcgcgcgcgagagcgcgttccgcaacatcaagaccattgcggagtgcctggcggacgagctga

SEQ ID NO: 3881 - DNA, 530 bp, Chlorella sorokiniana
  unsure (1)..(530): unsure at all n locations; Clone ID: LIB3602-062-Q6-K1-C4
tncgcagcgtcgcctcgcaccgcgcgcacgagcttccgcgagacagtcctactacaggcgaccgcctttcgagcagcaacaacctactaccagggatgcaggcatgtgtgcgcttcttccagaaaatccaggacggctgctcgcgcgtctttgagaagttccgcagctggtacaagcggaacagccactgggtccagcccacctgcaagacggcactgattgttggtgtcaccgtggccgtggtgggcaccgcctttgttgcgccaccgctcgtctttgttggcgcagcagtggccactgtggctgctgcgatcaacctggctgatgtcgtggcatttcgtgacaactccaagccgtgagtctggcttgtcacgttgtacaggccgcggcctgtgcgcagcctgcgggacgcctggcaggacttccgctgctggtacatgaggcaccgccgcaaagtaagaaacgtctgcaggctggcagagttcgctggctgcatcctggccttctgtcctggttgcaccgcgattggc

SEQ ID NO: 3882 - DNA, 467 bp, Chlorella sorokiniana
  Clone ID: LIB3602-062-Q6-K1-C5
ccctcccctgggcccttggccctgtctgctacgaccccacccgctgccgcactgcggcgcaccctgctccttccccgcaccgacttgcactttggccctcttgctttggccgcccattgcctgccgtgccccgcccgcccgcctcatggggcgctccatgcagctcacatccccctggcaggctggctgagcgcttaggctggtcggctgctgcccgttggcctctttgctctcggttttgctccctttgcttccacaacccgcttgcagcaacgttgctcgtgcactgctcccagcagttggtggtgctcaacgatggggtcacccggacacccgacctccgctgttgttgtttcattccagcattgcatgcccacgttgtgttgtttccagagccagtcagcctgtggaccaggcccagcctctgtaacccaagcaagcaagcaaaaaataaaaaaaataagaaa

SEQ ID NO: 3883 - DNA, 359 bp, Chlorella sorokiniana
  unsure (1)..(359): unsure at all n locations; Clone ID: LIB3602-062-Q6-K1-C6
nagaaagccagcagccatgcagaccgccgctgtgcgcgcccccatcgtggcttcagcccagcagcagaaggccgcccccaaggcgaccgtggcggtcctgccccgtgtggccaaggccctgggtgccggtgtggcctccctggccctggcgctgagcgccaacgccgccactgtgaagctgggcgctgacaacggcgcgctggtgttcgaccccttcaacatcaccatctccaagggcgagtctgtgacctttgtgaacaacgccggctttccccacaacattggggtccatgaagaccaagtgcccttttgcgtgaacgccgaagcgatcagcctggaagactacctgaacgcccccg

SEQ ID NO: 3884 - DNA, 253 bp, Chlorella sorokiniana
  unsure (1)..(253): unsure at all n locations; Clone ID: LIB3602-062-Q6-K1-C7
ncnagtttgtgagcaagctggcggagaagaagatcaaggaggtcggcggcgcggtgcagctggtggcgtaagcacccccacgcccacccgcagcagcagcagcagtaccccagcagccccgattgactcctgagagcttgcccgcccacgcaaagcggccacatgcctgccgggggcgccccccggcggggccttagcgaggcgtgtaacccgcacctcggaaaaaaaaaaaaaaaaaaaaaaacaaaaacac

SEQ ID NO: 3885 - DNA, 384 bp, Chlorella sorokiniana
  Clone ID: LIB3602-062-Q6-K1-C8
aataaaagcaagctgacggaaaaaaagatcaaggaggacagaagcgcagtgcaactggaggaataagcacccgcgggcccacccgcaacagcggcagcagaccccaggggccccgattgacttctgacagcttgtcctcccactcaaagcggccacatgcctgtcttttgcgccccccgaaagcgccttaacgaggcgtgtatcccacacctcggaactgaaaaaaccctggcgtacccccctttattcgggttgtacgttttacccttttcacctttgggcgtaatacatacaaggccctaccctttcgcttttccaacctatttccactcctgtttcggaattgtacccccccctgtttgggaaatttatccccgccccttg

SEQ ID NO: 3886 - DNA, 532 bp, Chlorella sorokiniana
  Clone ID: LIB3602-062-Q6-K1-C9
gccgacgctgggcaatgatgtgtttgtggcgcccaatgcctccgtcattggagacgtgaagctgggcagcggcgcgagcgtgtggtatggcgcggtcatccggggcgacgtcaacagcgtgacgatcggggacaagacgagcgtgcaggacaatgtgttgatccatgtggccaagcacaacgcggcgggcaaggcgctgcccaccgtgattggcagccgggtgacgattggccccggcgccacggtgcacgctgcaacgattgaggactgcgtggtgattggcatgggtgccacgatcatggatggagccaaggtggagagccggacggtggttgctgcaggcgcactggtgccccccggcaccgtcatccccagcggccaggtctgggccggctcgcccgccaagttcatccgcaaccttgtggaggacgaggctgcctttgtggcggagtctgctgacaccaccgcacagctggcggcgctgcatgccgaggagaatgcgaaaagcttcgatgaggttgaggctgacaag

SEQ ID NO: 3887 - DNA, 298 bp, Chlorella sorokiniana
  unsure (1)..(298): unsure at all n locations; Clone ID: LIB3602-062-Q6-K1-D1
naagcaacaggcaaccatgccgtcccagaagcgcttcgccatcaagaagaagctggccaagaaggccaagcagaaccggcccatccctccttggatccggttccgcaccaacaacaccatccgctacaacgccaagcgccgccactggcgccgcaccaagctgggcatctaagcgcctcccacgaggagcagctgacggcagcagccccggcacggcaggcagtgcgctggccgcgcttgcaaggcagcccgtcagtggcatgatgacagcttaagcttgtaacgatggcctagcnna

SEQ ID NO: 3888 - DNA, 539 bp, Chlorella sorokiniana
  unsure (1)..(539): unsure at all n locations; Clone ID: LIB3602-062-Q6-K1-D10
ccgccggacgcgtgggcggacgcgtgggcgccgcgcctccctggtggtccgcgccgcggctgccagcgccgaggtgcccgacatgggcaagcgccagctgatgaacctgctgctgctgggcgccgtgggcgcgcctgccgtgggcctggccggcccctacgcgctgttcttcgtgccccccagcgcgggtggcggcgcgggcggcactgtggccaaggacgctctgggtaacgacgtcaaggccaccacctggctggcgacccacgctgtcggcgaccgctccctgacccagggcctgaagggcgacgccacctacctgattgtgaacaacgagggcgccattgagaagtacgggctcaacgcggtgtgcacccacctgggctgcgtcgtgccctggaacaaggccgagaacaagttcatgtgcccgtgccacggctcgcagtacaacgccgagggcaagaagatccgcggncccgcccccctgtccctggccctggcgcactgcgacgtgaacgacgacatcgtcaccttcaccgatt

SEQ ID NO: 3889 - DNA, 323 bp, Chlorella sorokiniana
  Clone ID: LIB3602-062-Q6-K1-D11
cccggggagcgcccctggctgtgcgaggctcagggggagcaatcagcagccgcactggcgggcctggaccggctggaggatgaggacatgcactggagcatggacattgtggcggtgcgctgcgccgagaagctgttggatgtggtggagggcaaaatgaacgccaagggtgggtgggccgacgacgtgcctagatgggaatttccttgcaaacgcttgccccccttgtaccttgtcttggcaaacctgcaggggcgtgaactgtcgtagaaacgcaaggaccgttgcggacaaagggcggcaattttaacccttttgggccg

SEQ ID NO: 3890 - DNA, 349 bp, Chlorella sorokiniana
  Clone ID: LIB3602-062-Q6-K1-D12
tctccaagagaacaaaatagaatgaacaaggctcaaaaaaaagacaaaacagcaaccgaactgaaaggacctggaccagaatggagggggaggacatgcactggagcatggacattgcggctgttcgctgcgccgagaagctgttggatgtggtggagggcaaagtgagcgctacggctgcttgggcctggtgacgtgcctagcatggcaattttctgccaatcgctgagctgcctgctgtctgtgctgcgctaccttttggggcgtgcagtgtagtaggaacgcgaggaccgttgcgcccttacagggcggcagttttgaccctctgtggtccgcggaatcacacttc

SEQ ID NO: 3891 - DNA, 471 bp, Chlorella sorokiniana
  unsure (1)..(471): unsure at all n locations; Clone ID: LIB3602-062-Q6-K1-D2
acgcgnnccttcatcaaccctcacccaacccatccacctgccacccatccactcaccttccctccgccacaacctctgccacccagtcaccacccatcacccgctcaacgccctccatgcaccatcctccccatccaccaaatctgccaccccaaacgcacgtccgccgctgcaccacctgccgccccctcacccgcacccatcttccacccgccacctttcctgccgctcaccgtcgcacatcctacctgccacacctcactccatgtccacccttcacccgcgcttcacacagcggctgctgccatgcaaagctgctgccaaacccatccatcatgctcgcacacccactcacccacacgtccaacgtatccagacccattttcaaggcccgactgtacagtgcctttttgcgtccttatgccgatctggtaccaggacttaatgtgtaacaaatggtatgttgaaaaa

SEQ ID NO: 3892 - DNA, 507 bp, Chlorella sorokiniana
  unsure (1)..(507): unsure at all n locations; Clone ID: LIB3602-062-Q6-K1-D3
acncnnntgctggatgatgacacatacctgggcgcggagaacagctacaacctgtttgcggtgcggcgtaacccagatgccgcagccgacgaggaccgcagccggctggagacggtagggcgctaccacctgggcgagtttgtcaaccgcttccagcacggctcgctggtcatgcgcctgcccgactcggagctgtcggccatccccacggtgctgtacggaaccatcaacggcgtgattggggtggtggccagcctgccgcacgccacctaccagctgctggagtcgctgcaggaagcgatgcggaaagtggtcaagggagtgggcggcttcgaccatgcgcagtggcgggcgttcagcaaccagcacatcccggcctcgccggcgcggcagttcattgatggagacctgcttgagcagttcttggacctcaagcaccagagcgcaaaggctgtggtagccgccatgcagggcgggcacagcggcgcaacagtcgattcagtgaca

SEQ ID NO: 3893 - DNA, 338 bp, Chlorella sorokiniana
  Clone ID: LIB3602-062-Q6-K1-D4
caggacgcgtcctccggcaacgtggaggccgcccgcatggtgggcgccaagatcgcggagctgtgcaagcagaagaacattgagaaggtgtgctttgaccgcggcggcttccgctaccacggccgcgtgcaggcgctggccgatgcggcgcgcgaggccggcctcaacttctgagcacctccccccgcccagcagcccgcagcagcagctcccctctttgtttcccttgcgcccgccatttttcggtcccgctcccgggccattcccggggcgcccgtccatacagccctggagaaatgacgcatatctgcaccaccctctgtagcactttatttggt

SEQ ID NO: 3894 - DNA, 57 bp, Chlorella sorokiniana
  Clone ID: LIB3602-062-Q6-K1-D5
tcctcataggacgccggcgtctagccggagcgcgctccttgtaacattcttgggccc

SEQ ID NO: 3895 - DNA, 58 bp, Chlorella sorokiniana
  Clone ID: LIB3602-062-Q6-K1-D6
ttaaaaaagacacacacgaaataaccggagcgcgctacatagaaacattattgagacc

SEQ ID NO: 3896 - DNA, 530 bp, Chlorella sorokiniana
  Clone ID: LIB3602-062-Q6-K1-D7
tgcgtgagcctgccgctgaccgactgcgtgctggagacggtgcctgaggacgacgcatacatgctgcagtttggccgccagtttgacgagctggccaccgaccccaacgcgcccagtgtggagcgcgacgactttgccatcgagctggccatgctggacgagtagagcgcctgcagcacaggcacgtgcgcaggcggcaccaagcgagctcgcgacagccgcctgccaacaagcccgctgcttccttgatggggcgctctatcttccctcgccctgcaatttgccactgctacttttgccccgttgctgctggacattgcccagcctcgttttgctcagctttgccattgcccccgcactttccacaagccactatgggcgctgccgtgcccgccatcacgtcatccagttccctttcatacgacgcttttcccgcctcttctcacgctgcgtggcattccccgcggccgtgtgccccgtctggtcctgaattttttcgagccctgactatgcttagcttgttacactcg

SEQ ID NO: 3897 - DNA, 411 bp, Chlorella sorokiniana
  unsure (1)..(411): unsure at all n locations; Clone ID: LIB3602-062-Q6-K1-D8
nnnagcaagcgggtgcagcacaaccggcgcttcgtgaacgtgagtggtgggcttgaccacgaagcgcggccccaacaggcaggaagctgactgcagcgccagcagcaaccgcaggcatgtgctgaacgcacggagcgcaagcgcgatccgcgcacagatcgccacccgagcagactgccagcgtcaacggcacctacgcaggaaggcgcgagctagcatgctagcagcgcgtactgaccaccacggtgctagcatgctgaccctgtatcagtatcatcagcaagtaagcagccaatgtgaatgccgaacgctcggttgtaacacagttctcaggctcgatttgctcagctttgccattgcccccgcactttccacaagccactatgggcgctggcgtccccgccatcacgt

SEQ ID NO: 3898 - DNA, 323 bp, Chlorella sorokiniana
  unsure (1)..(323): unsure at all n locations; Clone ID: LIB3602-062-Q6-K1-D9
cnatgattaaggaggtggccaagagccgcgcgcagcagatttacacccgcgcgacggcagccgccagctaagcagccacgcagcagtttggcagcatgctagtgcactcgttgtgcttgccaatctggtaacaggtccctcgcataaaacaaaaaatgctaaacaagaaagactgactgcaaaaaaagaacatacgcaaaaaaggaccaagctagcatgctacaaaacgcgtactgacaagcacaggtggtggcccgtttaaaaggtcccaggtttactaacgctgtcatgagacaatattacttttgtatggtggcacctaa

SEQ ID NO: 3899 - DNA, 539 bp, Chlorella sorokiniana
  Clone ID: LIB3602-062-Q6-K1-E10
cccaagtatgcgcgcttcaccaatcacagtgcgggccgcttccagaagcgccgcttccgcaaggcgcagtgccccatcgtggagaggctgaccaacagcctgatgatgcacggccgcaacaacggcaagaagctgatggcggccagcattgtcaagcacgcgtttgacattgtcaacctgctgaccgaccagaacccggtccaggtgctcgtggacgccatcatcaacggcggcccgcgtgaggatgccacccgcattggcagcgccggtgtggtgcgccgccaggctgtggatgtgtcgccgctgcgccgcgtgaaccaggccatctggctgatcaccaccggcgcgcgcgagagcgcgttccgcaacatcaagaccattgcggagtgcctggcggacgagctgatcaacgcggccaagggcagctccaacagctacgccatcaagaagaaggacgagatcgagcgcgtggccaaggccaaccggtaaacggctgttgcgcacccaccaaaacagcagcccgccacagccggcacccc

SEQ ID NO: 3900 - DNA, 118 bp, Chlorella sorokiniana
  unsure (1)..(118): unsure at all n locations; Clone ID: LIB3602-062-Q6-K1-E11
tccncgccatgtatcgtgtgccaagctgtacagcaacccttccttgtaccaccatgaccttctggctccggttcagcattggatcgcactgccatctgccctttaatcgcttctcatc

SEQ ID NO: 3901 - DNA, 540 bp, Chlorella sorokiniana
  unsure (1)..(540): unsure at all n locations; Clone ID: LIB3602-062-Q6-K1-E12
tcactantaagcaccccaacctgcgcgtcgcgtacgtggcgcagcacgcgttccaccacattgagaaccacctggacatgaccgggaaccagtacatccagtggcgttacgccaccggcgaggaccgcgagtcgctggacaaggtgtcgcgcaagctcaaggaggaggaggagaagaagatggctgaggtcaaggtggtggacggcgtgaagcgcgtggtggacaagctgctgggccgccgcaagcagaagcgcggctacgagtacgaggtgcagtggaagaacgaggcggagaccagctggctctcccgcgaccgcctcgaggagatgggcttctccaagatgctcatggacattgacatgaaggaggctgccgccgccggcctgctgggcaagcccctgaccgccaagaacgtggaggagatgctgggcaacctgggcctgcccgccgagtttgccacccactcccagatccgcggtctgtcgggcggccagaaggtgaagctggtgctgggtgccgccatgtggcagcagccccaca

SEQ ID NO: 3902 - DNA, 537 bp, Chlorella sorokiniana
  unsure (1)..(537): unsure at all n locations; Clone ID: LIB3602-062-Q6-K1-E2
nacaacggcgacgtgttttcctttgaggaccactacaggcacctggaggagtgccccgggctggccaccacctacatcgctcgaggcgccctcatcaagccctggctcttcaccgaaatcaaggagcggcggcactgggacatcagcgcaggcgagcgcctcgaatacttcaagcgcttctgctcctacggcctggagcactggggcagcgactcgcgcggcgtggagagcactcggcgcttcctgctggagtggctgtccttcacgcaccgctacatccctgtgggcctcatggaagtcctgccgcagcgcatgcaccaccggccccccctgtttgtggggcgctccgacctggagaccctgctggccagcgacaacgccgccgactgggtggccatcagcgagatgctgctgggccccgcgccccccggctttgtgttcacccccaagcacaaggccaactcgtacgcgtcgcgcccagcagccgccgacttccccgccggcctggcgcctgctgcagccagcgcttctgctggc

SEQ ID NO: 3903 - DNA, 537 bp, Chlorella sorokiniana
  unsure (1)..(537): unsure at all n locations; Clone ID: LIB3602-062-Q6-K1-E3
nagagtggaagctggcagtggggcaccacccctcttattccaacggcgagcacggcaacaacaccgacatcatccagcaagtggagccgctgttctggcgctacaacgtggccgcctactttgtgggccacgatcacaacctggagctgctcagtgtgcctgcccccgatggctccgcctgcagctacgctgtggtggtcacaggtgccggcagcaagacggaccgaccgcaggtcgggaccgcattttccaagtattaccaccccgatcaaggttttgtcggtgccaccatcacgccagacacgctgcggctggattacttcacattgcaaggcggcgagaaggcggcattcagcgccacaatacagcggccagccagcagctgaccgttgatcaatgcacctttctgagccgaactcagcttttacaacggactggtgaaaagtgaaatcaaatcgggactgtttcattcaactgcatgctacacctgactgaccctagaactgctgctacatacgttctacaatgccttttgta

SEQ ID NO: 3904 - DNA, 340 bp, Chlorella sorokiniana
  Clone ID: LIB3602-062-Q6-K1-E4
agaggaagctggcagtggggcaccacccctcttattccaacggcgagcacggcaacaacaccgacatcatccagggggtggagccgctgttctggcgctacaacgtggccgcctactttgtgggccacgatcacaacctggagctgatcagtgtgcctgcccccgatggctccgtctgcagctacgctgtggtggtcacaggtgcctgcagcacgacataccgaccgcaggtccggatcacgatgccacccgcattgcaagcgcctctgtggtgcgccggcgccaccatcacgccagacacgctgcggctggattacttgacattgcaaggctgcgagaa

SEQ ID NO: 3905 - DNA, 211 bp, Chlorella sorokiniana
  unsure (1)..(211): unsure at all n locations; Clone ID: LIB3602-062-Q6-K1-E5
ncacgcgttcgcgagctaaagagtataagagacgaacccacaccaaccaagataagacgaaaaacttgcacagaactaacacttgccgacataaaaccttggggcccctcgttcacatgactgcgcccgcgtcgcatgtcgtccctcgcgcgcatgctatgttgacatgtgaaatgcactattcacgggcaaaaaaattaacaacgaaaaa

SEQ ID NO: 3906 - DNA, 339 bp, Chlorella sorokiniana
  Clone ID: LIB3602-062-Q6-K1-E7
aaaaaaaaataaaaaaaaaaaaaaaaaaaaaaaaaaaaaaaaaaaaaaaaaaaaaaaaaaaaatgaccaacaaaaaaggggggaaattttaattcactgtatttgggccgcccttttttttgtttccttggcttcttctcccattcttgcggctcgttaacctcttcctttgtgccctcctatttacctttttttggccctcttttttccccgtcctgtttggtacaccctttgcgccccccacctttttctcctttgcaccctttcctcgtttttccaattgtgtttttacccttgttggcccattcggtccgccctttttaacggtttttccacccc

SEQ ID NO: 3907 - DNA, 257 bp, Chlorella sorokiniana
  unsure (1)..(257): unsure at all n locations; Clone ID: LIB3602-062-Q6-K1-E9
cncagctgccccacaccttcgcatgtctcaaggttgccgcgccgtaagcagagcacccttgggtgctcctatcctgcctttttgctgttgtctgctgctaccccgctctccaaggcggctgcacgccctgcagccccttgcgcatccccagctgcttttccctgctccctcagctgctgaagcagctatgccagtaccccataccttggcgccactcatctctggggcccgcgcgtgtctgtaattagcactacagg

SEQ ID NO: 3908 - DNA, 451 bp, Chlorella sorokiniana
  unsure (1)..(451): unsure at all n locations; Clone ID: LIB3602-062-Q6-K1-F1
ntggccatcgctctggagggcaaggacgtggtggcccaggcccgcaagatcatcggcgccaccaaccccctggcctccgaccccggcaccatccgcggcgcgtacgccatcgacattggccgcaacgtgatccacggctccgactctgtggagaacgcgcagaaggagctggcgctctggttctccgagggcctggtggacaacacccccgtgctgcgcggccagatctacgagtgaaccgcgcacagcaggctgtgagggcgcccaagcactgggcgcctggcagctagcagcggcaggcttgcgcccgagactcggtccggctccaaaaattgaatcgaaaaagctgacttgtcacattccattctggtccccttgtttcatgctgcatgccccacttggaattggcaagcaggaaccaatcagccttttgttacaaactgcgaacaaa

SEQ ID NO: 3909 - DNA, 542 bp, Chlorella sorokiniana
  Clone ID: LIB3602-062-Q6-K1-F10
cggagccaggctattggctcagggggccgcgtcttgttgtcttgctcggggcaggctcgcaggcgcggagcacgagccctgatcgcggctagcagcgtgggcatgcacaaaagcgtcgacttcgaagtccacggtatagtccaaggcgtgttcttccgagcgcacactgttgaccgtgcaaagtcgctggggcttgttggatacgtcatgaacacagcccagggcacggtgaaaggcgaggtgcaggggcggcccgaggcggttgagcaaatgaaggactggttgtcaacaactggctcaccgcattcagtcattgagcgctgcaacttcagcaacgagcgggagctggaaggcctggagtacacgcagttcagcacgcggcggcgatgagactgcggcagcggccagctttgattgcatgacccgccaaacagcagcgccgcagtagagacctgcggtggagagagctgcgggctgcagcttgcacgatagggccattcacttgcacagctgctgcaatggcctcaatgcaagttcgacgc

SEQ ID NO: 3910 - DNA, 444 bp, Chlorella sorokiniana
  unsure (1)..(444): unsure at all n locations; Clone ID: LIB3602-062-Q6-K1-F2
nccggctgtggctgagaaacttggggcgggacgaccggctcgtggccgaccatggcagggaggcgcggcaccccttcttggatgaaggcctggtgggcgccaccctggctgccccgctctggcacctggccgatctacgccagccgcccggccaaggcgacaagcgtgtgctgcgagcctgcctggcgcggctgggcctgccgcgggcggccgggcgggccaagcgcgccatccagtttggcagccggctggcggccaagtcaaataaggagctgtttggagggacccaccgcgccggcctggccaatgccgggtcagtgcggctgtcggcagtgccgctgccgcagccggagtgaggctgcgcagcatggcgagctgttggctttgagccgcttgcaagctgtgtgattggaactctgtacaacggatgtagtgccagcnggg

SEQ ID NO: 3911 - DNA, 530 bp, Chlorella sorokiniana
  unsure (1)..(530): unsure at all n locations; Clone ID: LIB3602-062-Q6-K1-F3
cncnctcaactgatgaccgccccaagtaatttttagccgatttcgatgatgagcgtgtgtgattgcctctgtggtctgtgctggtgcattttatgagttcctgcctcaggcccccggggggccgcggcgagaaaggccgccaacccccgctctctgctcccccacactgttgcgccccctgtactgtacttctctccccctcaccctctgggccagtatgcgccgctctgcctccccaccccgcgcgacggtgatccctcccccatccaaccaaccaaccagccggtccgaccctattgtcacacacacgctcttatcaccacgccactgcaatgatttgctatatcccactgcctcctcggtcccctctgtctctcagccccctaagttccccacctgcgaggcgcgctttgtcgtcctccccgcccccccttttttcaggcccccccttgcgctttctgccactttagttcgactgttggcaccaggcaccttgagcctcgagccgccaccgcaaatttttactggat

SEQ ID NO: 3912 - DNA, 478 bp, Chlorella sorokiniana
  Clone ID: LIB3602-062-Q6-K1-F4
gcggcgacagagcagccggtcaccatggtgcagcgcctcacctaccgccggcgtcacagctacgccaccaagtccaacaagcagcggatcctgcggacccctggcggcaagctggtgtaccagctggccaagaagaagacctcccaccccacctgccccatctccggccagcggctcaatgggctgcccgcggtgcgccccaacagcctgcaccgcgtgaacaagagcaagaagacggtgcaccgcgcgtacggcggccacctggcggcgggcgtggtcaaggagcgcatcgtgcgcgccttcctggtggaggagcagaagatcgtgaagaaggtgctgaagctgcaggctgccaaggaggctgcgcaggccaaggccgcggcggcaggcagcaagggcaagaagaagtccaagaagtgagcggcgcacgcgagcggacagttgcgccccatgctcccgctgtaatgcaccctcgatg

SEQ ID NO: 3913 - DNA, 493 bp, Chlorella sorokiniana
  Clone ID: LIB3602-062-Q6-K1-F5
cgtgcgacgcgtgggaaaaaaaaaaaaaaaaaaaaaaaaaaaaaaaaaaaaaaaaaaaaaaaaaaaaataagagatacatctgggggacacataatatggggcgcgtgctttcttctataattgcttttcttatttcgattcacttgccgaattttttcttcgttttgactgaccaaactttttgtggaccccctttgtttgcctcgttttttatccttttttcgcctcctgctttaatatcctgttgtcacacaccgatggcccttcccaatggcccttccccatggatggccaccctgactgtcttttttgccactccttttgcacgctcattgtggtcgtacgttgcggtgttaccgctccatttgccctctccattttcccgattcctttcgctgcttccttttcctttctactctttttttctggcttttctttgccggtttttcccttgaggtttcactttgggggttctttttagggctttccttt

SEQ ID NO: 3914 - DNA, 539 bp, Chlorella sorokiniana
  Clone ID: LIB3602-062-Q6-K1-F6
cgccggcagcagaggaactagcacatcagcaaccatggtgctggcgtgcgacatcgacctgctgcaccccccggcggagctggagaagcggaagcacaagctgaagcgcttggtagcctcccccaactcctacttcatggatgtgaagtgccagggctgcttcaccatcacgactgtgttcagccacagccagaccgtggtggtgtgccccagctgcaacaccgtgctgtgcgtgcccaccggtggcaaggcccgcctgaccgagggctgctccttccgccggaagggcgactgagcgcgcccccgctagcggcagtgttggcgctgggcagcggttattgtgatgtccacgggcagcccgtagcagcggcactcgcactcctctcttgttgggatggagcaacaccttgcacgggcgtcggaggagactgatcgcccacagtgaggagcacgcggccgggggcctccgcccctgcagccgcgtgtgaagagccacgagtatagcaccccgcgctgccaggcctcgcggccggcgcgca

SEQ ID NO: 3915 - DNA, 210 bp, Chlorella sorokiniana
  unsure (1)..(210): unsure at all n locations; Clone ID: LIB3602-062-Q6-K1-F7
cccncgcggcaaaaaatatataaaaaaaaaacaaaaaaaaaacaaacaaaaaaaaaacataaatacaaacaaaaaaaatgaaatggggccccaaaaacaatgggcggccctttcacagtttcacatttttacgtaccggggccccccccttcatatctcttttttacgcccccctagatccaattctctggctttttttttacctccttg

SEQ ID NO: 3916 - DNA, 537 bp, Chlorella sorokiniana
  Clone ID: LIB3602-062-Q6-K1-F8
aagcagcgctgcaggcgctggcccaggcgcgcaccgtggctggcaatgtgggctccgctcgcctcctggacaaggtgcaggctttcctgtccaaggatgaggtggcgcggcaagccttctccgctgccctgcttcgccgcttggcagcggggctgcagacagccactaacgatggcagcgccagcggccgcagcctcacccgcagcggcacccgccagcaggccgaggcactgctgcagcccaagttccgcctgatcctggaggagtgccagcgtgcgcggcggctgtccacgactgtgcacagccgcatggacatccatggggcggcgctggtggcaggtggcctgcgccacctgggcgccctgctcagcttcaaagagcagcagccagctgacagcgctgttgctcgtgccaccctggctgggctgcgctacgattttgacgtcatgcgctagcagctgagcgacatcgtggccgacgccacacagctgctcagcagcgcgctggagtccaacccctccgccaaccccttcggtg

SEQ ID NO: 3917 - DNA, 470 bp, Chlorella sorokiniana
  Clone ID: LIB3602-062-Q6-K1-F9
ccacaccccccaccaccgcccctgcttttacttgccgccagcaccgcccactggcacgaaatgcaccgcccgcgttgcctgtcctccattctgccccgcctgcgccccttggcgcggccctttctttcctccatcctcagtaaatagcggccccgcccgtcgctcgaccgaccatccacccctttgtttctctcctactatagggagctgtttgcagctgttggttccgcttctcgcccttgccgtacgtttgagccttgaacagacttagcccgctttgttgtttaggagcctgctggtagcctgaccccgatccatcccctatggcggcacattgtgcgcctgttttctgcctccatccactctcgttaccgactgtcgctgccgcgggcacgcgcgccacaggcgcttcgcttgagtggcccctgttgcgcgcgctgcgatgtggcctcctgtaacatgaatagccg

SEQ ID NO: 3918 - DNA, 540 bp, Chlorella sorokiniana
  unsure (1)..(540): unsure at all n locations; Clone ID: LIB3602-062-Q6-K1-G1
nnnncagacattcgtgacacacgggacaagaacattgagattctccgcaagctgcgagggccggagcagattgacaagctggtggaactgaacgtcatgcggcaggtgttcaatgtgtgcacgagccccatcgtgcagcaggcctgggacaatggccagacactggcggtgcatggccttgtgtatgcgctgagcgatggcatcctgcagcaactcacgccgcccatcacgtcacttggcgatttcgaggtgttctcccacgagaacgagctggatgggctgcgccacctcagcctgtctgtcctggagcacatgtcgtttgagcgagaggcgctgcgacgcaccagcatggatcctcacagcagccgctctaagcccttggcaacagaccatgaaccgaacggcgaggccaccagtgaggcgcctcaagccgctgctgttgatgggagctgaaccactgtatatttagcccttttgttgcagctgagatctgcctgngaagctggtcccttgcttgcgcctttgctttggctacagtag

SEQ ID NO: 3919 - DNA, 532 bp, Chlorella sorokiniana
  Clone ID: LIB3602-062-Q6-K1-G10
tgcgcaccgaacgcatgtgctggacctcgcgtgcacggccaccgtggccgatgtgaaggccgccatcaaggcgcgccagggcatacccgccgaggagcagcgggtgatgttcggtggcaagcagatggaggacggtctgtccctggaggcttgcggcatcagcgatgactcccagatgtacatcctgatgcgcctgctgggtggtgccaagaagcgcaagaagaatacctacaccaagccgaagaagcagaagcacaagcacaagaaggtgaagctgcgggtgctcaagttctacaaggtggacgacagcggcaaggtgcagcgcctgcgcaaggtgtgcccccagtgcggccccggcatcttcatggacacccacttcaaccgcgtgtactgcggcaagtgccacctgacgtacgtgtacgacaaggagggccagaccgcctaagcgccccgctcccccctgcggatgcacgcttagcagcagcacacgcggcggatgcgcacggcatgccggcacaccagccacggagcg

SEQ ID NO: 3920 - DNA, 501 bp, Chlorella sorokiniana
  Clone ID: LIB3602-062-Q6-K1-G11
gcagcagatgcggcagtgacatgcctcccattcattcaagtgtagccatttcttgctgtcaccagtttgccaggagcgtgtaaatgtgaccattgcaaaaaaaaaaaaaaaaaaaaaaaaaaaaaaaaaaaaaaaaaaaaataaaaaaaaaaaaaaaaaaaaaaagggctgcccattttaaaggatcaaacgtttcttacgtggggttgagaagcaatagattaatatctagacaaataagaaaaatcaaatgcacaagcttaaaaaagttaagcactgggaaaacagtgtctacaccgaatttaacagctttaaagaacatccccttttcaacgagtgccctaaatgcggaaaaggccatgtacatatccacctactaaaaatttgagcactgtgaatggcaaaaggtaccctccgtgtaccagaagattaaccacagcggctaaggtgcttactcgcaactggaacgcaacattagcaagagcacaagcgcccgatgct

SEQ ID NO: 3921 - DNA, 538 bp, Chlorella sorokiniana
  Clone ID: LIB3602-062-Q6-K1-G12
aaggcgccgcaggagggtaaagagcaaagatgccggcgggccagggctaccgcgcgcgtacgcgccacatgttcagccgcggcttcaggcagaagggcttcatcccgctgtccacctacctgaccaactacaagctgggtgactatgtggacatcaaggtcaacgccgcggtgcacaagggcatgccccacaagttctaccacggcaagactggctgcgtgtggaatgtgaccaagcgcgccgtgggcgtggagctgctcaagcaggtcaacgggcggtacatcaagaagcgcatccacgtgcgcatcgagcacgtgacccccagccgctgccacgaggagttcctgcgccgctgcaaggagaacgacgcggcgcggcacgcggccaaggtggagggcaagccgctgccggtgctcaagcgccagcccaagggcccccgcaccgaggccatcatgctggagaacgtgaagatggagaccatcacggccatcccctacgatatcctcaaggagggcgtgctctgagcgtgatcggcggc

SEQ ID NO: 3922 - DNA, 543 bp, Chlorella sorokiniana
  unsure (1)..(543): unsure at all n locations; Clone ID: LIB3602-062-Q6-K1-G2
ccccnncctgggacggcctgccggccggcctaaagacggaggtcggctcgccgcactgcttcctgtgcgagcagccgcagcggctggtggtgccgcacggggtgcgagggcagcacaaaatctggccgctggacaagcagctgcacaagaacgcacaacttgggttgaagcccgcccctaatggccgcgacttccgttggagcagctttggcgcgcctccaccgcctgggggcctgccgccgtcgcagaacaagaccaagtttgcagagcagcagcggcggcagagccaagcggcagagcagggtggcggcaaggcggctcgcactcccacctgcacctcccctcgctctgcagcggcagcaccaacagcagctacgccagcagcagcaggaggagcagcaggaggaggaaaagcggcagcatcggctggcgtgccccgcgctgtggctctccagcatgcgcagcaggcgcagcagcaggcggcggcagcagcggatgcgcaggctgcgcaagaccctgccaagcggctgcgagcagtgcaga

SEQ ID NO: 3923 - DNA, 326 bp, Chlorella sorokiniana
  unsure (1)..(326): unsure at all n locations; Clone ID: LIB3602-062-Q6-K1-G3
acncntccgagttggaggagtggcatgccagctggtccagcggcgagcagctggctgcgagcggcatccggctgaccagccgtgcactgtcggatcattacgccagccgcctgctggccgttctgactgagctggcgcagccaggggaggatagcagcgatgatgatgaggcagcagctgagggcgaggcaagtgtgtcccccagcaagcagccgctgaggctgtccagtgggcattcgcaccgccactccgactgaacagctcaggcgacatggcccctgctgtgcgccccgcttgctttcatccatgcaagtctttacacttca

SEQ ID NO: 3924 - DNA, 537 bp, Chlorella sorokiniana
  Clone ID: LIB3602-062-Q6-K1-G4
ctgcagcagccgcagtagggcagcagcagcggcagcagcagagcagtgcgtgcgacgccgttggtgcagccggccgctgtagctgtgccgcagcaagtggcgcaacagccagtgcctgggcactggcggcagccggcggtggccggcggcagctggcacagctgcatgcagccatctttccaagttaaccagacacagcgccattttagcttttcaagccagttgaatattcacagagcgcgcccttagtgccacttcacccacacatgattgttaagccaatgcgctatacaccggtagcatcgaccagcttagctcacgttcctctccctcccagttagagctctgctgtggttggtgcagtgcgggagccccgtgctggtcttcacctgcctctatgctgcctcaactccaagcaacacctgtgcccacctcaagccctcacactctaatctcctgattagcttgacaccccttctgcctcaagaatgcactccatccctgcccatcctccctcggaaattgctttttgtcggg

SEQ ID NO: 3925 - DNA, 477 bp, Chlorella sorokiniana
  Clone ID: LIB3602-062-Q6-K1-G5
cgcgccgcagccatttatgaattggttgaccaagtacgctctctgattcctctattctgcgcacttcccctaagtaccgcttgtgactcatttccacctgtcacaacagccgtactagtctccctgcctgtctctcatctttctcattcttcatccccagttcatcgcgctacgtggcgaggcgcgcaacacataaagtgttgcacgcacgtgagctgaatagcgacctcagcggtaaatagtaactatttgaaaaaaaaaaaccaaaaaaaaaagataaaaaaatagcactaaacaccaatagaatagaccaaaattaacataacgtacctataactaccaaataagagctctgctgtggattggtgcaatgcggtagcccagtgctggtatttacctgccggggggcggcctttaaaaagaaacaaaattttgtgcccgccttaagcagctatatttttttttttttgggcacct

SEQ ID NO: 3926 - DNA, 542 bp, Chlorella sorokiniana
  Clone ID: LIB3602-062-Q6-K1-G6
ctccacgagatgatcaagaaggcgctgtccgactgcaagaccatcctgtggaacgggccgatgggcgtgtttgagtttgagaagtttgcggcgggcaccaactccatctcccacctgctggccgacctcacggttaaccagggcgccaccaccatcatcggcggcggcgactcggttgcggcggtggaggctgcggccgtggcggacaagatgagccacatctccaccggcggcggcgcgtcgctggagctgctggagggcaaggtgctccccggcgtggcctgcctggacgacgcatgaagcggaggaggcagcacattgctgcttgtgggaggctcagcagccagccggccgcggttgtgaggcgctcgcccccgttgtcgcatcgcagcaagggagaatgaatcttttggtcccaccctgcttgcttcgtgtcatcgccatcaacaccttcgtttgcggtttgcaatggatataatgtgctctagccgcgagtgaaagaacgcatttacaaaaaaaaaaaaaaaaaagggcggccgttt

SEQ ID NO: 3927 - DNA, 543 bp, Chlorella sorokiniana
  unsure (1)..(543): unsure at all n locations; Clone ID: LIB3602-062-Q6-K1-G7
nnnagcccgaaatcatgaacggcaagaacatcctggactttgtggatcccgacatcgatgcgcggctcgaggcgctggagcgggaggaggaggcggccgccgccgcgcacgccgaggtgattggcgacggcatggaggaggacgagctggcccccgaggagcgcgccacgctgcagcagatccgggagaagaagaagaagattgtggcggagcaccggcgcaagaaggcggcgggcaacaacgcggcgccgatgccgcgcgctgtggacgcggagcggtcgcgcaccaaggagcgcatgactcgcgagctgggggcgctgggcctggatgcaagcgcggcagcggagcgtgcagcgcgcagccagtcgcggcgcggccgctccctggtgcgcaagcgcgggcgcagcgaggcggcggacgccgacatggcggcggaggagcagccgcagaagcgggtgcacagcagcaagagccgctcgatgtctcgcgggcgcgcgctgtcgctggcggcccccgagcagaccaagggcctgaaggatgcgg

SEQ ID NO: 3928 - DNA, 534 bp, Chlorella sorokiniana
  unsure (1)..(534): unsure at all n locations; Clone ID: LIB3602-062-Q6-K1-G8
nccgcggtggacgcggcgctgctgggcaagctgagcgacgagctcaagggctacctgtccagccgcttcacgctgcgctctggcgaccggccgcacctcatgaagttctgaggtgccagcctggcagctcgctcgcccagcaagcggcccggcggccgggcttgcttggcggcagcccgcgcggcacgcggcgggtccgtagtgcacggcccgacgagcgctgtgcggcggcggcatggcggncnnncccatncctcncgctgtgcacccggagcggtcgcgcaccaaggagcgcatgactcgcgagctgggggcgctgggcctggatgcaagcgcggcagcggagcgtgcagcgcgcagccagtcgcggcgcggccgctccctggtgcgcaagcgcgggcgcagcgaggcggcggacgccgacatggcggcggaggagcagccgcagaagcggttgcacagcaacaagagccgctcgatgtctcgcgggcgcgcgctgtcgctggcggtccctgagcagaccaagggcctgaa

SEQ ID NO: 3929 - DNA, 540 bp, Chlorella sorokiniana
  Clone ID: LIB3602-062-Q6-K1-G9
ccgaggagaagcgggtagccatgcagcgcaaggggcacggcacgtatgaggaggtggcggaaggcgactttctggaggtggtgaccaagacggagcgggtggtggcccacttcttccaccgagactttgagcgctgccgcatcatggacaagcacctgcaggcgctggcgccacggcactttggcactcgcttcatcaaagtgtctgcaccggacgcgcccttcttcgtggagaagctgcagatccgcatgctgccctgcgtggtcatgtttgtcaatggcgtggcggtggaccgcatcgttggcttcgagcctctgggcgccaccgacgacttcccaacctccgcggtggagaagaagctgctcaaggcggcggtggtgcagccgccggagcggcccaaggacgactcggatgacgagggggcgcagcagcgggcacgcaccatgcgcagcggcctgacgcagcaggcgcggcggcagcggacggagagcgacgaagactcagatttcgactgatgccagcgcagcaattccgcttgat

SEQ ID NO: 3930 - DNA, 538 bp, Chlorella sorokiniana
  unsure (1)..(538): unsure at all n locations; Clone ID: LIB3602-062-Q6-K1-H1
tncnctgacctgtaccacaccaacaaccgcaagccctaccactccatcaactttgtgattgcgcacgacggcttcacgctggcggacctggtgtcctacaacgagaagcacaacagcaacaatggggagggcaaccgggacggctccaacgacaacttcagctggaactgcggcgtggaggggcccaccgacaacgcggcggtgctggcgctgcgccagaagcagatgcgcaacctgcacctggcgctgatgctgtcccagggcacacccatgctgctcataggcgacgagtacggccagacgcggcagggcaacaacaactactacggccacgacaccgcgctgacgcactacgactgggaggccttggaggaggccaaggagaacggctggttcaggttctacagcgagctcatcaagttccggcggcagcacccgctgctgggccgcggcgagttcctcacaaaccaggacgtgacgtggcacgaggaccagtgggataacccagagaagccgtttctcgccttcacgctgcacg

SEQ ID NO: 3931 - DNA, 544 bp, Chlorella sorokiniana
  Clone ID: LIB3602-062-Q6-K1-H11
tccgcgcgacggcaccgtgaacgtgtacaacggctgcttccccggcttcaaggacgtggaggagtttgaggactacatggacggcaagtacgagttccctagcgactcggcggcggtgggcatcacgctcagcgtgctcttcttctcctccctggtgctggtgggctttggcctgcccaagtttgtgaagcagcccctggccaagggcaaggccaaggtgaagggctggtttgtgcgccgccccgccccgcccaagctgcagccgcccgcggcgccggccgccgctgaggcacaggccgagggggaggccaaggctgacgccccctcctcgtaaacctgccaagtgcagtgcgcactggcgcccccgtacagttatctgttcatgcatgccgacacgcatgccactgcttcctgctacttccctgcttttcgcacacctgcagtctgcactgcctgcaacttgaactcaactcccattgttgcaccgtttccaccaagagcacctctgcttacctgttcatgccctctgcttcagtaattacag

SEQ ID NO: 3932 - DNA, 340 bp, Chlorella sorokiniana
  Clone ID: LIB3602-062-Q6-K1-H12
gcagcaaacgtgtccaaggccgacctgcgcgagaagctggccaagatgtacgacgtgaaggacctgaactgcgtgtgcgtgttcggcatgcgcacccagtttggcggcggcaagagctccggctttggcctgatctacgacaacgttgaggtggccaagaagttcgagcccaagtaccggctcgtgcggaacggcctggcggaggcggtgcagaagtcgcgcaagcagatcaaggagcgcaagaaccgctccaagcctctgcgcggcgtcaagaagtctggcaagaagtaagcagcccgaggagcgcgccacgcgcgcgacctgtaacacattgccttcg

SEQ ID NO: 3933 - DNA, 92 bp, Chlorella sorokiniana
  Clone ID: LIB3602-062-Q6-K1-H2
acgcgtccaagaaataaacaaaaaaaaaaaaaaaaaagaaataaaaaaaaaaaaaaaaaaaaaatgtggcgcccgatctatagagaccgggg

SEQ ID NO: 3934 - DNA, 539 bp, Chlorella sorokiniana
  unsure (1)..(539): unsure at all n locations; Clone ID: LIB3602-062-Q6-K1-H3
nagacgcgtgggcggctcctggctgggcggccagctcttcagtgccatgtgcatccgcaagcccgcggacaagttcctggacgagctgcaggtgccctacgaggacgagggctcctttgtggtggtgcgccatgccgccctcatgacctccaccctgctgtccaaggtgctggccgcccccaacatcaagctgttcaacgccaccgccgccgaggacctggtggtgaagcaggacgagaagaacggcaagtacgtggcgggtgtagtgaccaactggacgctggtgtctctcaaccacgacacccagatgtgcatggaccccaatgtgatcgagtccaaggtcatgatctcctcctgcggccacgacggccccatgggcgccgccggcgtgaagcgcctcatgcgcctgggcatggtggagaaggtgccgggcatgggcgcccttgatatgaacaccgccgaggactctgtggtggaccgcacccgcgaggtggtgcccggcatggtcatctgcggtatggaggtggctgagctggacg

SEQ ID NO: 3935 - DNA, 540 bp, Chlorella sorokiniana
  Clone ID: LIB3602-062-Q6-K1-H5
cacgcaacctaaagcgcatcctgcgctgcacgcagatcatggggcgcagcgagaacgacgagctgtcggcgtcgcaggtcttctacccctgcatgcaggcagccgacatcttcttcctcaaggcggacatctgccagctgggcatggaccagcgcaaggtcaacatgctggcgcgcgagttctgcgacgactgcaagcccaagcggctcaagcccgtcatcctgtcgcaccccatgatgcccggcctgctggagggccaggagaagatgtccaagagcgaccccaactcggccatcttcatggaggacacggagcaggaggtgaagaccaagatcaagaaggcctactgcccgccgcagcaggtcacgggcaacccctgcctgtcgtacgtgcagcacattgtgctgccctggtgcgagaagttcgaggtggagcggaaagaggacaacggcggcaacaagacctacctcacctacgccgagctgtgcgcggactacgagagcggcgcgctgcaccccggcgacctcaagcccgcgctgg

SEQ ID NO: 3936 - DNA, 563 bp, Chlorella sorokiniana
  Clone ID: LIB3602-062-Q6-K1-H6
cgaattcccggtcacccaacgtccgcacaagcaggagacgcggcagatgctcaacctgcgctggggcgtgtgccccttccgcatggactgtgcggagaacccgacagaccgcatctaccatgcattccagctgctcaaggcgcgcgggctgatcgctactggcgatctcttggtggtggctgcggacgtgagggaagagtggactgatggtctgaccgacaccatacgcagtgagcaggtgcggcactgtaattcgacaggtctgccagcggcggctggatgccagcaacgaaggatgctatcgtcacttgctacacactcttcatggaggacacggagcaagaggtgaagaccaagatcaagaaggcctactgcccgccgcaacaggtcacgggcaacccctgcctgtcgtacgtgcagcacattgtgctgccctggtgcgagaagttcgaggtggagcggaaagaggacaacggcggcaacaagacctacctcacctacgccgagctgtgcgcggactacgagagcggcgcgctgcaccccggcgacctcaagcccgcgct

SEQ ID NO: 3937 - DNA, 537 bp, Chlorella sorokiniana
  Clone ID: LIB3602-062-Q6-K1-H7
agttcccgctcgactgcccgctggaggacagccgcgtgcgcctgcactacagggtcaaggcggagggagcttcagactggctgctggacagtcagggagcagacggccaggcggcgccgctggagtttgagaccggcatgggcgaaatgcccgaggcgctggacatgtgtgcacgactaatgctgcggggcgagctggccgttgtcaccgcaacctggcgctacgctttcgagggccgggacgatgcgccgcagggcctgccagcaggcgggcgagtgcagtttgaggtggagctgctgggctttgaccgggaggccaacgagcatgcgctggcggggcccgccaagctggagcgcgccggcaagctcaaggaccagggcaatgtgctgtacaagcagggcaagacacggcttgcgcgcgccaagtacggccgcgcgctcaaggtggttgagcgtgccatggacctggagaccgaggagcagctggcggcggcctcccgcctcaaggcctcctgcctgctcaacatggcgcggtgtg

SEQ ID NO: 3938 - DNA, 444 bp, Chlorella sorokiniana
  unsure (1)..(444): unsure at all n locations; Clone ID: LIB3602-062-Q6-K1-H8
cccnaggcccacagggcatggaaggcatggtggcttgcgccatcactgcagcagcgcaggcgctgcaggcagagcctgccatcacttcatctatcgttgccctgttcttcagggatgacattctgtcctgggcagctcggcgcagtggagcgcgctgcatcgcggcactgaacgccagcctgaagacctcccagctggagacgtgcgtggcctggaacaccgcaacctgcctgaaccgtgtgggcaccatggcacctgcacgcaacggccatccgcagcagggcacccggactcttgtggcataagcagtaacgcctgccaatctgagtcgcatgtgccctacgtggtttgcctggctgtaacacggccacctgcccgttgctgcccttgcatgtaacacacacagtgtgaacgagttgcgcgcgccaagtaccgncnnncgct

SEQ ID NO: 3939 - DNA, 541 bp, Chlorella sorokiniana
  Clone ID: LIB3602-062-Q6-K1-H9
ctccgggctacaacagcctggagttttacgctgctgatgctgctcaaagcggcacatcctgcgcacgtcacgctgctgcgaggcaaccatgaaagccggcggatcacacaggtgtatggcttctatgacgagtgccagcgcaagtatggcaatgcaaacgcatggaggtactgcactgaggtgtttgactacctcacgatatcggctgttgttgatggcagtgtgctgcgcgtgcacggcggcactgtctccagatgtgcgcacgctggaccaagtgcacatgattgaccgcgtatgcgagatcccgcacgagggaccgttttgtgacttgatgtggtcggatccagaagacatctagagctgggctgcgtctccccgtgtagcatgttgtctgtctggcgggaaagtcgcaacagagtataatgcaatataagggctacatctgatctgccgtgcacatcaactggtgcacgaaggattgaaatacatgttccaagatagatccttagtaacggtatggacggcacccaactactgctat

SEQ ID NO: 3940 - DNA, 93 bp, Chlorella sorokiniana
  Clone ID: LIB3602-046-Q6-K1-A1
aaaaaaaaaaaaaaaaaaaaaaaaaaaagggggaaagatctaaagacccagagttacgaacgcgggccggcggacgtaatgggtcgtggtcgc

SEQ ID NO: 3941 - DNA, 424 bp, Chlorella sorokiniana
  Clone ID: LIB3602-046-Q6-K1-A10
aacaaaaaacaaaataactgatccccgcagaacataacccaaatgaacatactaaaaagtgcccaactggaccgaggccggcaaggtgttcgccgagagccaaaactcacatccccttctactccctgctcatggtgcatcttgatcctgttcaactttgatgagatcaagcgctggtaggacatcaagcgccccggaagacactccgagccccgcagcttactgggctttgagtcatccttcaagggcacctgtgtcagcatgctacccaggccgcccacttaaccccttccgactgggcaacacaacctaagtggccatggatgacctcatttggcgcgagattcaaaaccgccgtcttgccatgttggccttactgggcttactgtactagcacgcccccatcggcaagggccccattgac

SEQ ID NO: 3942 - DNA, 465 bp, Chlorella sorokiniana
  Clone ID: LIB3602-046-Q6-K1-A11
gtcccctgtagtggagcagcccgccttcagccatgggtaagactcgcggtatgggagctggccgcaagctgcggctgcaccgcaaggacgagcgctgggcggacaaggactacaagaagtcgcacctgggctccgagtggaagaagcccttcgccggcgcttcgcacgccaagggcatcgtgctggagaagatcggcattgaggccaagcagcccaactccgctatccgcaagtgcgcgcgtgtgcagctgatcaagaacggcaagaagattgcggcgttcgtgcccaacgacggctgcctcaacttcatcgaggagaacgacgaggtgctcatcgccggtttcggccgccgcggccacgccgtgggtgatatccccggcgtgcgcttcaaggtggtgaaggtgtccggtgtgtccctgctggcgctcttccgcggcaagaaggagaagccccggaactaaacgg

SEQ ID NO: 3943 - DNA, 385 bp, Chlorella sorokiniana
  Clone ID: LIB3602-046-Q6-K1-A12
gtcccctgtagtggagcagcccgccttcagccatgggtaagactcgcggtatgggagctggccgcaaggtggggctgcaccgcaaggacgagcgctgggcggacaaggactacaagaagtcgcacctgggctccgagtggaagaagcccttcgccggcgcttcgcacgccaagggcatcgtgctggagaagatcggcattgaggccaagcagcccaactccgctatccgcaagtgcgcgcgtgtgcagctgatcaagaacggcaagaagattgcggcgttcgtgcccaacgactgctgcctcaactttatcgaggagaacgacgaggtgcttatcgccggtttctgccgccgcggccacgccgtgggtgatatcctcggcgtgcg

SEQ ID NO: 3944 - DNA, 462 bp, Chlorella sorokiniana
  Clone ID: LIB3602-046-Q6-K1-A2
gatcaacccgtactatggcaagacctcgatgacgggcctgcgggagcacttcaaggcggtgctggccgagggccccgcaatcatctacaacgtgccagggcgcacagggcaggacattcctgacgatgtcattctggagctggcccagcacaagaacttcctcggcgtgaaggagtgcacaggcaacgcacggatcgagaagtaccacaatgctggtgtgctgtgctggagcggcaacgatgatgaggcacatgctgggcggcatcagcatcatgcgcagggtgtcatcagcgtgaccagcaatgtcatcccgggcctgatgtcaagcctcatgaacgggcgtgacgatgcaacggcagagagcctcaaggagcttattgcctggctgttctgcgagcccaaccctatcccgctgaacaccgcgctggccatgtgtgggcttgttcgcccgattttccggct

SEQ ID NO: 3945 - DNA, 226 bp, Chlorella sorokiniana
  Clone ID: LIB3602-046-Q6-K1-A3
cacgcgtcaacccaacgtaggcctacggcacggggcccccgccggcccgccaaggcggcaccctggcgagagctggcaccgcaactagggcgctgtccttggcaccgggggggctgagaaggcacactggaagaaagaagcgcgcgagtggtgggagcgataacccatgggggtccccaaccgcgcagtgtgtgcaaagacctaccctgcgcagcgactggagcgc

SEQ ID NO: 3946 - DNA, 469 bp, Chlorella sorokiniana
  Clone ID: LIB3602-046-Q6-K1-A4
gacgcagcggacagagcagccggtcaccatggtgcagcgcctcacctaccgccggcgtcacagctacgccaccaagtccaacaagcagcggatcctgcggacccctggcggcaagctggtgtaccagctggccaagaagaagacctcccaccccacctgccccatctccggccagcggctcaatgggctgcccgcggtgcgccccaacagcctgcaccgcgtgaacaagagcaagaagacggtgcaccgcgcgtacggcggccacctggcggcgggcgtggtcaaggagcgcatcgtgcgcgccttcctggtggaggagcagaagatcgtgaagaaggtgctgaagctgcaggctgccaaggaggctgcgcaggccaaggccgcggcggcaggcagcaagggcaagaagaagtccaagaagtgagcggcgcacgcgagcggacagttgcgccccatgctcccgctgtaa

SEQ ID NO: 3947 - DNA, 152 bp, Chlorella sorokiniana
  Clone ID: LIB3602-046-Q6-K1-A5
cggacgcgtgggtgctacccacctgtttcagaacgtgcagtttgccgattttccagcccaccacgagccatttgcttttttcgctgctcagtgtcagtttcggccaaggagtggattacgtactccgtcatgctttgtaaaccctcaacgtg

SEQ ID NO: 3948 - DNA, 440 bp, Chlorella sorokiniana
  unsure (1)..(440): unsure at all n locations; Clone ID: LIB3602-046-Q6-K1-A6
gagcagcacgccattctgcctctgagcgtttgagcggtcaaccctagaacaaacaagatgcttgcggcacgccggcaggcagcgcttggcgctctggaggggctgggaatgctgtgccaggcgctgcagtcacaatcttttggcagcaggcccgcgggccaggcccggttaagggccggaggccggccttcggcggcggcaacttgcggccgccgagggcacgctcgaacaaccgaagaagtttcaacaggatcagcttgtggcgcggcaggacaagtgggtggaggtggttgaccgcaacaccaagtgagggccttggcagatctgttcaggcccgcacgcatctgctctgcaagcaggctagcagccgttgtgcgagcatcgcccgtcccccaagcatntccttccctgctgctgcagcctgccatacttgtggaatc

SEQ ID NO: 3949 - DNA, 256 bp, Chlorella sorokiniana
  Clone ID: LIB3602-046-Q6-K1-A7
gcgcactccgccaacctgctgacctctgacattgacgaggccgacaagcccttctgcaccggcaagcgcacccccgagggcttttactacgtcaactgcggcgtcaagctcgccattgcccgcggcctggcctatgcgccctacgccgacctaatctggggcgagacctccacccccgacatggaggaggcccgcaagtttgttgagggaatcctgtccaagtccccaaccaggatgctggcctacaactgctcgc

SEQ ID NO: 3950 - DNA, 463 bp, Chlorella sorokiniana
  Clone ID: LIB3602-046-Q6-K1-A9
ggcgtggccggcatcctggtccccgcggagctgacccgcgtgggcgtgctgaacgtgcccgactgggccgaggccggcaaggtgtacgccgagagcgagaacgccatccccttctcctccctgctcatggtgcagctgttcctgttcaactttgttgagatcaagcgctgggaggacatcaagcgccccggcagccaggccgagcccggcagcttcctgggctttgagtcgtccttcaagggcaccggcatcagcggctaccccggcggccccttcaaccccttcggcctgggcaacagcagcaaggaggccatggatgacctgaagtggcgcgagatccgcaacggccgccttgccatggtggccttcctgggcttcctgtcccagcacgccgccaccggcaagggccccattgacaacctgattgaccacgtgtcggacccgtgggcggcgaatttctgct

SEQ ID NO: 3951 - DNA, 466 bp, Chlorella sorokiniana
  Clone ID: LIB3602-046-Q6-K1-B1
gccggctacggtgatgtgggcaagggctgcgcctccgccatgaaggccgccggcgcacgcgtgattgtgtcggagatcgaccccatctgcgcgctgcaggcgtccatggagggctaccaggtggcgcccctggaggacgtggtctcctccgccgacatcttcatcaccaccaccggcaacaaggacatcatcatggccgccgacatgtccaagatgaagaacaacgcgatcgttggcaacatcgggcacttcgacaacgaaatcgacatggccggcctcatggggtggcctggcatcaagcggcagaacatcaagccccaggtggaccgcttcatcttccccgacggccacggcgtgattgtgctggctgagggccgcctgctcaacctgggctgcgccaccggccacccctcgttcgtgatgtcctgctccttcaccaaccaggtgattgcgcagctggagctgt

SEQ ID NO: 3952 - DNA, 458 bp, Chlorella sorokiniana
  Clone ID: LIB3602-046-Q6-K1-B10
cccccgagctgctgcagcgcaacggtgccgccaacttcggcgaggctgtgtggttcaaggctggcgcccagatcttccaggagggcggcctcgactacctgggcaaccccaacctggtgcacgctcagtccatcgtggccatcctgctgacccaggttgtgctcatgggcctgattgagggctaccgcgtcaacggcggcccggccggcgaggtggtggaccccatctaccccggtgaggcctttgaccccctgggcctggctgacgaccccgacaccctggctgagctcaaggtgaaggagatcaagaacggccgcctcgccatggtgtccatgtttggcttcttcatccaggccattgtgaccggcaagggccccgtgcagaacctgtccgaccacctggcctccccctccaccgacaacttctactccctgtacgccaagaccctggcgtaagcg

SEQ ID NO: 3953 - DNA, 62 bp, Chlorella sorokiniana
  Clone ID: LIB3602-046-Q6-K1-B11
aaaaaaaactgctgaaaaaaaaacgaagccaacaactaaaaaagaggctgagaggaaaaagg

SEQ ID NO: 3954 - DNA, 58 bp, Chlorella sorokiniana
  Clone ID: LIB3602-046-Q6-K1-B12
aaaaaaaaataataaaaaaaaaaaaataaaaaaaactataaaaataaataaaaaaata

SEQ ID NO: 3955 - DNA, 344 bp, Chlorella sorokiniana
  Clone ID: LIB3602-046-Q6-K1-B2
gcggtcacacactgctatgcagacacatactcaagctctgcccttaaagcaccaccttcacgcggctatgcaccaggggacactatcgcatgcgtgactctgctgcgcccacggtggcttaccaagggtggcctctgcctgacatggcactcatactccgccactttgctcacacccacctttgacaatggcatgatcttggccgacgacatgtccaaaatgaagaacaactccaccgttggctacatccgttccttgaaaaacaaaaaaacaaatggccggcctcatgaggtggcctggcatcaatctttagaacatcaaaccccaggtggaccggtttatct

SEQ ID NO: 3956 - DNA, 431 bp, Chlorella sorokiniana
  Clone ID: LIB3602-046-Q6-K1-B4
caacctgctgcgctgcgtggatgtgcgccgatttgaggtgcggcacacgctgtctgcccccagcttcagtgtgggcggcgcttggaccacggcatgcttcagccccacagagcagcaggcagcagcaggctcagcagacggcaccgtgttcctctgggacattgccaaatccaccgtggctgcccggctgcgagaccccaagcagctgcagccggtggtggcgtgcgcttggtgccccttgggtctgccactagtgtcctgtgacaaggcaggcggcatcagcttctggacgggacgaccctccaagcgcggtggcggcagcggcagcacaagcacggtgcggtagcgcagcaaactggccagaggcagaccttagattgcatctgactgttgcaaattgtactctgttgcctgtattccctgtatttttg

SEQ ID NO: 3957 - DNA, 467 bp, Chlorella sorokiniana
  Clone ID: LIB3602-046-Q6-K1-B6
cgcttgaccaccattaagggcaaatcgcaagacacagttccacagtacgcgaaacaacatccggagctgaaatgcgacatagtgcatgtcgacggagatcacatctcgccgaacgcctacattgatattaaaaacttcaaagctatggcccaccagcacacaattgtgcttgcggatgacgctaatgaagcagacgtattacaggacatgcaacgagccgtggatgagggcatcactgagccctgggaggtttatgtggcgggtgatgtaacagactcccgctttacttcgttgcccaggtacacaaagcatttcagcatgacgcgctacaaatggccttcagcagccgagccgtgagctgcaggattggcttgtggcttgccattatctcagttgttccaactgaacattcttgcttgtttttgttttccttcgcatggcttgtgcaccacaactgttgtttgctt

SEQ ID NO: 3958 - DNA, 459 bp, Chlorella sorokiniana
  Clone ID: LIB3602-046-Q6-K1-B7
gacgccggcatcagcaaggccttccgcaacctgcccggcgtggaggttgcctccgtggagcgcctgaacctgctgcagctggcgcccggcggccacctgggccgcttctgcatctggaccaagtctgctgtggagaagctggacaagatcttcggcaccaccgagaccgcgtccgagcagaagaagggctacaagctgccgcgccacatcatggccaacggcgacctggcccgcctcatcaactctgatgagatccagtcggtggtcaagccgcagaagaccggcaccgcccgcgccgcgctgaagaagaacccgctgcgcaacctgggcgcgctgctcaagctcaacccctacgccaaggtggcgcgccgcgccgagctgctggccgcgcagaagggcgccaagtcggccaaggtggaggcggcccgcaaggccaaggccgccgcgcgccccgcggtg

SEQ ID NO: 3959 - DNA, 468 bp, Chlorella sorokiniana
  Clone ID: LIB3602-046-Q6-K1-B8
cacggcctgctctgcggcccttcatacctttgtacctttctgtatcatcttgcagcaatggcagccggctgcatctttctaacatcgtcaccggcccactcgtttgtgccatgcccacctgcctccaacgtcacccttcatcaaccctcacccaacccatccacctgccacccatccactcaccttccctccgccacaacctctgccacccactcaccacccatcacccgctcaacgccctccatgcaccatcctccccatccaccaaatctgccaccccaaacgcacgtccgccgctgcaccacctgccgccccctcacccgcacccatcttccacccgccacctttcctgccgctcaccgccgcacatcctacctcccacacctcactccatgtccacccttcacccgcgcttcacacagcggctgctgccatgcaaagctgctgccaaacccatccatcatgctc

SEQ ID NO: 3960 - DNA, 322 bp, Chlorella sorokiniana
  Clone ID: LIB3602-046-Q6-K1-B9
cacgacatgctctacttccatgaaaacctgcccaagctgctgcgacccggaggcatctactcatttttcagcggccttgcaccagacaacatgttcttccacctggtgtatggcgagattgcacgcctggagctgggcaggctagggctggagaccagctactcttcaatgcctatggatgccttagcttccaagatttgggagggcgtggacaaccgctactggcgcctgtccgtctacttcttgcccacctgcgtgctgaaggcggtggatggagaggcacacgcaaaccaccatggaggggatgccgcagcatcagctg

SEQ ID NO: 3961 - DNA, 156 bp, Chlorella sorokiniana
  Clone ID: LIB3602-046-Q6-K1-C1
taaaaaaaaaaaaaaaaaaaaaaaaaacacaaaaaaaaaaaaaaaaaaaaaaactatcaaccattctcaaagggtgcgaactttcctacccgtgcgtgcgccgccttcattcttttatccttttccctcccttccattccctggccttcctttttc

SEQ ID NO: 3962 - DNA, 326 bp, Chlorella sorokiniana
  Clone ID: LIB3602-046-Q6-K1-C11
ggcggcggccgccgctgaggcgccgcggcggcgagcgctcgcggggcaactgctcctcgtgcgcggccgcccggccctgctgtgtaccccacccctccccacccacctcacccacgcaccctcaccgaacccctcggctttcattgctaacgtcctttcgcttccgtcagttttgctgtttgctccatgctgctcgctcccgagcgccccctagctcgctccatattaaggcatgagcttctctgcccctgatatcgcccccttgtctgtactgcgcacttgcctgcgaattgcagccgcgcccccacctgtaactgcgcttcagc

SEQ ID NO: 3963 - DNA, 55 bp, Chlorella sorokiniana; identical to SEQ ID NO: 979
  Clone ID: LIB3602-046-Q6-K1-C12

SEQ ID NO: 3964 - DNA, 469 bp, Chlorella sorokiniana
  Clone ID: LIB3602-046-Q6-K1-C2
gagcagctggaggttcaagatgacgacccgcttcaaggccaaccgcaagaagcgcggccacgtgtcggcgggccatggccgtatcggcaagcaccgcaagcacccgggcggccgcggtaacgctggtggccagcaccaccaccgcatcatgtgggacaagtaccaccccggctacttcggcaaggtgggcatgcgctacttccacctgaacaagaacaagtaccactgccccgtgatcaacctcgacaaggtgtgggctctggtgggcgaggacgcgcgcgtggcggcggccaaggacaccgcggccgcccccgtgattgacatcaccaagcacggctacttcaagctgctgggcaagggccagctgccgcagcagccggtggtggtgcgcgccaagtttgtgagcaagctggcggagaagaagatcaaggaggtcggcggcgcggtgcagctggtggcgtaagcaccc

SEQ ID NO: 3965 - DNA, 464 bp, Chlorella sorokiniana
  unsure (1)..(464): unsure at all n locations; Clone ID: LIB3602-046-Q6-K1-C3
gtggagacccgcttccaagccccgctgaacatgacagccgctgcctgcaaccagcttgcgatgagcatgccactgctatgtgtgctgtgccaggttcttgagcggcttgccggcgtcgtctgcttgcagtttttagcagcaggctggctcgcagctgctgccggtgagaccatgggcggctgtggctgctagcttcgagcatgcactggcccagtctgcgcatgctcacgcnttttttttgtatcaacccaaacaatacctgggcttggaccaatttggccgtttaactgatggggggccccacgggccgccttttatatacacatgcaccacgcatttttcccaaaccccttttattctgcactgaattccatgccacccaagtattcaccaatacccctttgtggaccctctcttctttatacaagcacacacgtggggtgtgtgcgctctctgtgctctgt

SEQ ID NO: 3966 - DNA, 166 bp, Chlorella sorokiniana
  Clone ID: LIB3602-046-Q6-K1-C4
aaaaaaaaaaaaaaaaaaaaaaaaaaaaaaaaaaaaaaaaaaagggcggacagatataaaaggaaacaaaataacgaacacatgaatgaaaaagaaaaaaatataatatagaagaacactaaattaaattaaaatggggggggctttttaaggggttcaactgttt

SEQ ID NO: 3967 - DNA, 465 bp, Chlorella sorokiniana
  Clone ID: LIB3602-046-Q6-K1-C5
tagagctgcacccctggctgcagtggcgggacgaggtggcgttctgccaggctgagggcattgtgctggaggcctattctcccctggccaaggcgcagaagctggcagaccccacagtggcaggcatcgcgcagcgcctgggcgtcacgccggcccaagtgctgatcaggtggagcctgcagaagggctttgtgccgctgcccaagagcaaccacgcggagcggcagcgcaccaacctggacgtgtttaggtttgagctctcggatgatgacatggcggcgctggatgggctggagagcgggctggtcactgggtggaacccaatccgggacgaccccgtgtgacggtttgggtttgggcaaggctggcggcagcggcggcggcgctggggcagctcgtcagcaacccgaagctgctggcagtgtcgcagctcggccgcggctttgggcacgcgtctccctgctg

SEQ ID NO: 3968 - DNA, 336 bp, Chlorella sorokiniana
  Clone ID: LIB3602-046-Q6-K1-C6
caatttgttgtctgtcgtccggcccacacccttttgtttgaacatgctccttcccttgcacccgtactagctacccaaacttgatccaaacccccttgtgtatgccgcatgccgtataacccccttgctttacgctctcacagtcccccttgccttaacaacgcttccacaatacgcacacgccacaaggcttacgcggcccaacgcttgcaatctgctcgtgtactggctggcttgcaactgcctgcccgtgagcgccttgcccctcctgtacgaccaccaccccacctgtacactcctcacgctctaccgaaacctctgtaaacgcctcctggt

SEQ ID NO: 3969 - DNA, 199 bp, Chlorella sorokiniana
  Clone ID: LIB3602-046-Q6-K1-C7
tccggtaaaaataaataaaaaataaaaactttttattaaaaatataaaaaaaataaaatattaaaaaatggggattattataaaaggggtcttatcttttttaatttcttttgtcttttttttatcctcttttttttttttttatttaatctttttttttttgattatttttttttttttatttatttatcactctttt

SEQ ID NO: 3970 - DNA, 364 bp, Chlorella sorokiniana
  Clone ID: LIB3602-046-Q6-K1-C8
ggttaactcgattggctaacatggaccaaaggtgggctattggatgcggagcggtgcggcggcaaccaaaccatggtgcatttggagcggagtggtgcgagtgcccgtttatgcggcaaaagtacacatgggcatggcaaaggggcagggcaggggacaaggaaagaagcagcggggacagggttcctgtgaaggctgaggcttcaggggaggtatacaagcatcgacggtttgcagtgtcgttctcatggtgctatgcggcggctggctgcccacggctggccggcagggcgcaggccgcggcacgcctggcggccgtgtttcggctgtttagcctggcagatgcctcaactgttttggggct

SEQ ID NO: 3971 - DNA, 466 bp, Chlorella sorokiniana
  Clone ID: LIB3602-046-Q6-K1-C9
agaacggcggcaagttccctgtgcaccccaagcaggagaaggccgccgctgaggcgtccaagaagcccgccaagttctaccccgcagaggatgcgccccagcctctggcgcgccgcgtgatccgccgcgccgccaagctgcggccgtccatcacccccggcaccgtgctgatcctgctggcgggccgcttcaagggcaagcgcgtggtgttcctgggccagctgccctctggcctgctgctggtgaccggccccttcaagctcaacggcgtgcccgtgcgccgcgtgaaccaggcgtacgtcatcgccacctccaccaaggtggacgtgagcggcgtggacatctccaagtttgacgacgcctacttcaagagcgccgagaagaagcagaagaagcagagcgaggagggcttctttgccgagaagaccgagaaggcgccgctgcccgctgagtatgtggccaacca

SEQ ID NO: 3972 - DNA, 224 bp, Chlorella sorokiniana
  Clone ID: LIB3602-046-Q6-K1-D1
gttttctgctgcctgagcgcccctgctcatgcgcctgcccccatgctgcaacgttgatcccccccaagagtgatgccatgcatgctcgcaaaactgaacccgcacacatgtcgatgcccgatggatacacacatacacacataccaccctgccgcatcccgctgccttctgtgcatggcgcatgcagacgcactgcccccctcctgtaacctcagtttggggca

SEQ ID NO: 3973 - DNA, 442 bp, Chlorella sorokiniana
  Clone ID: LIB3602-046-Q6-K1-D10
aaaaaactaaatgcacaaaaagaatgaaacaagactgaaaccaaaatactaaaggaaaacaaaggaggacaagtgccccatgtgcacgtgagcccattgaagccttaatcatgcgcgtcttctaaaatgggccaggctgcgcgcggttcatcactgactgccacagtagaccgtggctccgctgccaagcacacggtcccctcggtagcagaagcaaaagctgctggttgtactgttgtatcttcgcagcatattccttcctctgagtttgctcacgtgccgtgccaggctgtttgttacccgtgcgtcgtgctgttagaatgcaccgttagtgacagctgcatttatacctttgctgcctcttccagctcgtcccctcttcaatcatgcacagcagcatgccatgtacacttctggacgtgcttgcacgctcagcgctgtt

SEQ ID NO: 3974 - DNA, 465 bp, Chlorella sorokiniana
  Clone ID: LIB3602-046-Q6-K1-D12
ggcggcatgcacctgttgctgcacgagcgagcagaatcagccgactgcatcctaggattcctgcatgcctgcctggtgcaggagtgctgcagcggcggctgtggcaccggcaccagtagcggcagcagcagcagcgaaggcggcagcgggggcagcagcgatgcgtccgcctcagagcagcgccaccagcagcagcagcagcagcaaagcaaggcaggggggcccacgtctgagcagctggcatacagcctggcccaggcgcagcagctgctgccgggcctgctgactgcgttggaggcggccggctgggacgaccaaaaggtggtgctggagcccaaacgccgccgggtggtgtggtgagctcggtcagagctggctacataggcagcagcagcggctgaatgaggaagctgctcctgcaggcctgcgctgccctgcgccctctggaccctcttgctcttgtgt

SEQ ID NO: 3975 - DNA, 465 bp, Chlorella sorokiniana
  Clone ID: LIB3602-046-Q6-K1-D3
gcgcttcctctggctagctttgaacatggtgcccatccgcctgatcatagtgggatggcgcaagggcgtcagcaagctggacgctgccctggtggacaaggaggatgaggaggctgtgcagcagtacgagaagcgccggggaaccaagcacggcatcatgaaggccccctacgtgatcatgaacctgtttagaaagattggcggcaagaagaagaagacgaagagcggcagccaggcagcagcacaggagcaggaagacccaaacactgcgccgcaggctgtgccgctgccgggcagcggcggcggccaggccgggtacgcagtggtctgagcggcacagtggtctgagcggcacagctgcgcctgacgtgtggacctaatgaacgtctctggcaaggtgcacagcgcttgcctgtgctgcacagttggttgtccatactgttgtcctatcatctcattgcgtgt

SEQ ID NO: 3976 - DNA, 465 bp, Chlorella sorokiniana
  Clone ID: LIB3602-046-Q6-K1-D4
gttgatgaggccctgaagcgcctgccccaggacgtggtggatgcgcgcaaccagcggctgaagcgcgcgtgcgacatcaacatgaagcactctgagctgcccaaggacctgcagcagctgcagacgccctttgagttctacatgaaggacacgctggatctggtgaagctggagtcggacgagcgcctggctctgggcgctggcaagccgtacgagcgccacctgccctgagcgctgccctcttgcctcggccgcccccgctcggctgctgttgccacacgctagcctaggggcctggggctgcgcagcagcgcgctttgcaagcggcagcccgccgtgctcccttggcatgctgacgctgcctcggcggctgccgctgcgctgtgctgaatgcaaccccgtgctgtgtgtttcctgttccaacgctgtctctcttccgctaagtactgatcccgcttacgcaca

SEQ ID NO: 3977 - DNA, 406 bp, Chlorella sorokiniana
  Clone ID: LIB3602-046-Q6-K1-D5
acacggagcactttgccgtgtgagcagtgaccgcagcaggcgtgggccgccaaccaggcggcggcggccacctgcgtcagcagcccagcgtccgatggtagtggcaagacagtggctgcagtggcagtgcatgcccagccctggcacgccaggcggagcgcaagcggcggcgccacgccgggcggtgagggcgtcaatgcggggcagcggtgatgtgcgcgtgccctgctcacatcagctggaaacgtgtgtgtgtgtgaagttctgtctcatttcgctcagcaactgtgcaaactgtcttgtaacgtgaaggtagtgaaaaaaaaaaaaaaaaaaaaaaaaaaaaaaaaaaaaaaaaaaaaaactaaaaaaataaaaaataaaaatgtgctaaattcaaaaagaa

SEQ ID NO: 3978 - DNA, 466 bp, Chlorella sorokiniana
  Clone ID: LIB3602-046-Q6-K1-D6
cgccaaccgcctgaggacctatctcatgctgatggtcactgtggtcatcatgcaagtggccaacgacgcgcgtgtccagctggatgttgcagatggcctgcgcccggtcagcggcgacgtcaagacggacctgcgcgccgtgctcgccggcaccatcctgtcgctcatcttcaacttcgtcctcatcatctactggggcctcaccgagcacagcacccaggcgctgtcgctgggccgcggcgccgctgctgaggcgccggccccagaggcgccaaaggctgtggaggtgcccaatgtcaccactgtgtaagccaagccccacgtgcgtccagcagccggcggcctgttgtggcgcgcgttgacttccatgcgccgccacgaacagcagcagctgcgtccgtgccaggtttgccgactggcccattgccgcggcagtgcggcatggccgtccatgctcgatgtgttt

SEQ ID NO: 3979 - DNA, 381 bp, Chlorella sorokiniana
  unsure (1)..(381): unsure at all n locations; Clone ID: LIB3602-046-Q6-K1-D7
gaggtgccccttaccgggcggcaccccatgccgagccacttgctcagcccaagaaccttgcttgcttcagtgccgccctccaataatgccttgcaatgcgtgaggccaagctacatgtcctctgattcgcgctaaccaccaagattgcttattcttcgaccccatcaatcgctgctcctgctctaaaagcgcaacatcacacacgggcatgcacaccctcctgcctcccagtggcacctgttgcgtgggcccgctcacatgcgcacccctcactccaaactgctcttttatacctcttccctcatctttttcacaatccagtcaagtctactgctgcatccaatgcgcacgccgcacatttaacattgtggcagcnnanaa

SEQ ID NO: 3980 - DNA, 211 bp, Chlorella sorokiniana
  Clone ID: LIB3602-046-Q6-K1-D8
ctgtcctcatctctggtcctgttggacatcctcagaatttcattgatttcagtgtgccccccgtgccccgagggcttgctgccctgagcagcgccctcgagtggcccctgtccccgcgatcgatgcgcgatgtgcccctcgtgattgggtgctgctccaattgtagcagcccacccctgactagcgaccctatgtaaatcttttcactgtg

SEQ ID NO: 3981 - DNA, 437 bp, Chlorella sorokiniana
  Clone ID: LIB3602-046-Q6-K1-D9
cggagactcggtgcacaagtgcctgtgccgggactgcgccgcgatgctcaaggaaaacaaggtggccaactgccccatgtgccgcgagcccattgaagccttcatcatgcgcgtcttctaaatgggccaggctgcgcgcggctcatcactgacggccacagtagaccgtggctccgctgccaagcacacggtcccctcggtagcagaagcaaaagctgctggttgtcctgttgtatctccgttgcatattccttcctctgtgtttgctcacgtgccgtgccaggctgtttgttacccgtgcgtcgtgctgctagaatgcaccgttagtgacagctgcatttatccctttgctgcctcttccagctcgtcccctcttcaatcatgcacagcagcatgccatgtacacttctggacgtgcttgcacgctcagcgctgtg

SEQ ID NO: 3982 - DNA, 418 bp, Chlorella sorokiniana
  Clone ID: LIB3602-046-Q6-K1-E10
gattcttacagccaaacgccgggccacattgatacccggcggcgggcttgaagcacagcggcgctcagatgcgccccagtggtgccaacatgtaacaaacgcagcatgcgcagcgcgcaccaggggcgggcctcaggcctgccatgccatggcgtgcaccgcgcgcgcagcgggagcgagggaactagcacagcggaagcagtcggggtgcatgcaagcaaaggcagttgagctggcgcggggtcacacatgccctgtccgcaaggggcggtgtagacgcagggctgctgtgcggccagcccagcgaacgccgaagccgcctcacttcttctgctccgaccgcaggccgccgatgggcaggcccttgcgcttcacggagaagttgtctccatagcccaggaagcgctttggccgctgg

SEQ ID NO: 3983 - DNA, 252 bp, Chlorella sorokiniana
  Clone ID: LIB3602-046-Q6-K1-E11
agcctgttcgcctcgtttcattccctgcagcccaacgcccgcggcgggcctggcacctgccggcctgcgcgggccattttatctctgttgaaagccagcccgcaagccaatgtgtgagccaacgcacaaaaaaaaaacaaaaaaaaaaaaaaaaaaaaaacaaagacaaaaaaaaaacagaacgaatggctgataggaatgaagcaagaggaaccagcgcataaagaaaacgaagtaacatagcaaaatgga

SEQ ID NO: 3984 - DNA, 235 bp, Chlorella sorokiniana
  Clone ID: LIB3602-046-Q6-K1-E2
cgccactcttctgcatgtttctattagctcccggctccggcattccgccctcccagcgcacattgacgctgcgtgggcgggcgccggcggcctttgttaggtcccattcattcctttctgctgcttgtgttctcccctcgcctgcggcggcggtgggcagcaacggccttcgaatccgtctgccccgctgccacctctcagcatgactccttgcaatgtgtaaggcccagctttg

SEQ ID NO: 3985 - DNA, 413 bp, Chlorella sorokiniana
  Clone ID: LIB3602-046-Q6-K1-E3
atctggaccaagtctgctgtggagaagctggacaagatcttcggcaccaccgagaccgcgtccgagcagaagaagggctacaagctgccgcgccacatcatggccaacggcgacctggcccgcctcatcaactctgatgagatccagtcggtggtcaagccgcagaagaccggcaccgcccgcgccgcgctgaagaagaacccgctgcgcaacctgggcgcgctgctcaagctcaacccctacgccaaggtggcgcgccgcgccgagctgctggccgcgcagaagggcgccaagtcggccaaggtggaggcggcccgcaaggccaaggccgccgcgcgccccgcggtgaagaaggtgtccaaggccttctacagcaccatgatcaccgactcggactacgtgggcgaggacta

SEQ ID NO: 3986 - DNA, 385 bp, Chlorella sorokiniana
  Clone ID: LIB3602-046-Q6-K1-E4
gcgggcggtgccggtgcccgggcgtgcagttgagcagcccgacggcgacatcatgtacggtgccggccagcagcagggcggcggcgcctaccagccgcccaatgtggcggctgtgtgatgcggccgccttggccagggtgcatgaagctgaaccctcgtcccttcttacagccagcgcggcagaccgaccatcgtggctgtagttttgcatcagctgccggaagtttacgatgatgtcctgccaaattcgccacgcaaggcaggcgtgcatgatagatatacgatttcagttgctgtttcgtctgcctgtttgtatcttctcacccactcacccaagctccaagtcaaatatcagagtccagctccctgtaaagcaagcctgtgc

SEQ ID NO: 3987 - DNA, 438 bp, Chlorella sorokiniana
  Clone ID: LIB3602-046-Q6-K1-E5
ccgcggtcggtgttacacgggtctcccaatgcaacaccagggtgtgaggtgtgtgccggggcgccggcttgccctgccagcgcagcgccccagcggccactggggtcccaactctcatctatcctcgcgtcagggcgctgctgttacgctgctgctcctgccgccgcggcgcgcggggcggcgggcatggggaggccgctcagtaggccttgccaaccaccggcttggccaggaagtcggagtactcctgcagcgggctcttggtgaacacggtctcgcgccagaggtcgggggtgaggaagccgtaggtgttggccagggcgtaaaaggtggccttcacaaagttgcccagggtgcgggtggagccgcgggagcaggtgtagcagtcctcaatgccagccatctgcagcaccttcttgggggtgcgggccgccacaa

SEQ ID NO: 3988 - DNA, 331 bp, Chlorella sorokiniana
  Clone ID: LIB3602-046-Q6-K1-E6
cccacgcgtccggccaactgcccgatgatactccacggcggcccttgccatctttcagccatgcaaaccgggcgccttttcttctgcccgtgcgttgcttccgtgcatttgaatacttccctccaatcgccgccttcctcagcgtccgttctgtactgatcagcgcctttcacccccgaaccaagttttgccattttcgtgtacctgcctgcccgctcatgcggctgcgctcgcgcccccggttttgaaaacgccagtagtgatgtgactttgtgcccagatagcgccacgcccaaccggccacaggcgccccatgtaaagccgagaacgt

SEQ ID NO: 3989 - DNA, 464 bp, Chlorella sorokiniana
  Clone ID: LIB3602-046-Q6-K1-E7
cgccagcctgggcaagtatgctgacccgctgctggacctgctggataaggccaatgtggtgcggtggcgcgtgttccgggaggcctgctgcccctacgaaggctcctacgtcaaggacctgcagtgcctggggcgcgacctggcgcagacgatcattgtggacaactcgccccactcgtacatcttccagccggagaacgcgctgcccatcggcaccttcatcgacgacatgcaggaccaggagctgctggactgcctggacctactgctggcggttgagaaggtggacgatgtgcgcgcgcacctgggccccatcctggcgcgcaagcaggcggggctgctggcctcattcacccaggcagtggggaatctggcggccagctcgctggggatgctgcagaagccgaatcagaacgacaacagctagcgctgtatggcgtggactactgatgctacgtgggcac

SEQ ID NO: 3990 - DNA, 466 bp, Chlorella sorokiniana
  Clone ID: LIB3602-046-Q6-K1-E8
cccccaacgacgtgaccatccccgccggcaacaccggcatggacccgtcccagaccagcttcttccaggtgctgaacatccccaccaggatcaccaagggttccgtggagatcactgccgacgtgcacctgatcaagaccggcgagaaggtgggcgcctccgaggcgaccctgctgtccaagctgggcatcaagcccttcagctacggcctggtcatcctgcaggtcttcgactccggcagcctgtacgaccccaaggtgctggacatcaccgacgacgacctgggcaacctgatcaccgcgggcctgcgcaacgtggccgccgcctgcctggagctcatctaccccaccatcgcctcggtgccccactccctcatcaacggctacaagaacgtgctggccattgccgtggagaccgactactccttcccccaggccgagaaggtcaaggcgtacctggccgaccc

SEQ ID NO: 3991 - DNA, 463 bp, Chlorella sorokiniana
  Clone ID: LIB3602-046-Q6-K1-E9
gcagtggcactggagacaccagggcgggcggcaccctgtgagccaagctcccctggcggtcagtctgcaggcaacggcctggtgggccgggcgggggctggcgctacacccgacggcgccgcaccagccgcagcagcaacctctgggctggcgggcaactcagacgaaggcgacctgtttgacttgctgatggcttgcgctgaggcaccaggggctgatgatgcgggcctcaccggcgagctggtgtgccagtaccaggaggtgctggatgcgctgccgccgccggcacgagccaccaaggaggagcgcctgcggaagcagctggctgcacagaagattggcaatgcagtggctattatgcagatggcggtgaagctagcactgggcggagggctgaagagctgacgcgctggcctgtctacagtgcgcaccggccgctcaagttgccggctagctgtcgcgc

SEQ ID NO: 3992 - DNA, 436 bp, Chlorella sorokiniana
  Clone ID: LIB3602-046-Q6-K1-F1
gcgcgatgcctgttacaaaaccctccgcccgcacgtggcagccaatacagttcaaacccttcttcctccctctggttgctgattcatgcgcagcggcagcacagcgtaccgtgccactactcagctggccaggccgttctgccctctgttctgttctgccccggatatgaactctaccgtcgtgcactcttgattcaccatcctatcaacttcgtgcgtcacgtagtgcccccctgtccactcgcgctcctctgtccatttgcgctcctctgtccatttgtgcttaccgcttgctcttgccgcactcgccaccccttggcgacattcatctcctcacccacacagcatgcgccttttgctccacgtcgtgccgcgctgcgttcagaacgttgaaaacagcatgacatatgggaaaaaaaaaaacaaaggctgaaaa

SEQ ID NO: 3993 - DNA, 402 bp, Chlorella sorokiniana
  Clone ID: LIB3602-046-Q6-K1-F10
catgaacacaacccccgcttgcgcgctagccagctgcaacagccaaatgtgtgcgagactgcacccagctgtgtaccccgcgcgccgcgctgggcgctgcccccctcgctgatccctcccgatttgctacccctaccccgctgctattctgcgtaccgctctttcctgtgttcctggtaagccacccctgcctaggcccgcttccaatgcacatgcctgttgccctcctccctttccaacaccaacaataaagtgcatttgtcacagctgttactgcatgcaacgccagataggaaaaaaaaaaaaaaaaaaaaaaaaaaaaaaaaaaaaaaaaaaaaaaaaaaaaaaaaaaaaaaaaaaaaaaaaaaaaaaaaaaaaaaagggcctttttttggatcgcaa

SEQ ID NO: 3994 - DNA, 473 bp, Chlorella sorokiniana
  Clone ID: LIB3602-046-Q6-K1-F11
aaaaaaaaaaaaaaaaaaaaaaaaaaaaaaaaaaaaaaaaaaaaaaaaaaaaaaaaaaaaaaaaaaaaaaaggggaaaaaaaaaaaaaaaaagaaaaaaaaaaaaaaaaaaaaaaaaaaaaaaaaaaaaaaaaaaaaaggggggggcttttttaggggtccaaattttttttccggttttttgcaatttattattttttttttggggccccaaaattaaatttatttgcccggtttttaaaaatttggaattgggaaaaaccttgggtttcccaaattaattggttttgaaaaaattccctttttcccaatttgggttattaaaaaaaggccccgcacatttcctttttcaaaaaatttgccaaccttaattggaaattggacccccctttttacgggctttttaagcgggggggttttggggtttaccccaaggttaccctttaattttgcaaggcctttagcccctttttt

SEQ ID NO: 3995 - DNA, 337 bp, Chlorella sorokiniana
  Clone ID: LIB3602-046-Q6-K1-F12
ggagaaagccccctacgtcaagaaggccgaggccgacaagaagcggtacgaggcagagaaggccaagtacgggtccagcaagtgagcgcggcaaccgacatgcagccgactcacccaccgattcccacacccgccctcggcggcacctcttaccgcggctcggcagcgcgccgtgccgcctgacctcttgaccctcatctctgtacgccaccactaagcccgcagctgcaaaacctgccctcgcctcggatttttgcacacccacggacgccctcctctccccaacacatatacttggaccacactgcctctggccatgttaaatcgctgtgtacgc

SEQ ID NO: 3996 - DNA, 467 bp, Chlorella sorokiniana
  Clone ID: LIB3602-046-Q6-K1-F2
ggcggcaagcagctggaggacggcctgtccctggaggcttgcggcatcagcgatgactcccagatgtacaggctgatgcgcctgctgggtggtgccaagaagcgcaagaagaagacctacaccaagccgaagaagcagaagcacaagcacaagaaggtgaagctgcgggtgctcaagttctacaaggtggacgacagcggcaaggtgcagcgcctgcgcaaggtgtgcccccagtgcggccccggcatcttcatggccacccacttcaaccgcgtgtactgcggcaagtgccacctgacgtacgtgtacgacaaggagggccagaccgcctaagcgccccgctcccccctgcggatgcacgcttagcagcagcacacgcggcgggtgcgcccggcatgccggcacaccagccacggagcggcggggcgtccctggcagcggcgcagcgcctgcaagcccttctgttg

SEQ ID NO: 3997 - DNA, 394 bp, Chlorella sorokiniana
  Clone ID: LIB3602-046-Q6-K1-F3
gcgcggacgcgtgggttctgcccccctgctgcggatgctccgctgggcgtccccctgtgcgcacatttgggccggccctttcggcaggttttgcaccacactgacacacacttgacacttgaccctcttccgtgctttgccatgctgcgggcgctgccattcagcgcccctatcgcttttggtcgctgtattcctgcacgtgcccagcttctgcatccatgtgcacgtgttgattccgcacaccttgctgagctcgcaacgctgctgcagttgccccaaaccaacccaaccagccatcctcaaccttttgcacagcccatgcatggccgcagcttgaatagcatgctttctatgcctttattgatagcccgattgaattgtccacgattgttac

SEQ ID NO: 3998 - DNA, 380 bp, Chlorella sorokiniana
  Clone ID: LIB3602-046-Q6-K1-F5
ggtgaagagcggcaagaagaaggtcaagattgaggtggaggttgagggcaagctgtccgaggatggcaagtctgttgagctggagatcgagatcgaggccaaggagggcgaccgcaaggagagccgcgagctggagtactcggtgcccctgtgataaaccactgaaccagcctcaaatctgtacagctgctgcataacacctgctggccatttgtagttgggcgtttgccactccacttgctgcaactggatcaggctgcactgcctgctgttgtgcgtgctgctcaaatgttgcctctcttccatgtgctggcatgccatgtctcgtgttgctttgctgctgtgttggtttaggtgcatacgttatggcagagacatgt

SEQ ID NO: 3999 - DNA, 452 bp, Chlorella sorokiniana
  Clone ID: LIB3602-046-Q6-K1-F6
gcgcaagaacggcatcaagaagccgcagcgccagcgctactccagccgcaagggcatggaccccaagttcctgcgcggaccagcggtacgccaagaagcaccaggccgccaagaagtgagctcgagcagcaggctgcagccagaggcgcagcggttcttgccagcgcccctctgcctctgatgttcactcccgtgtaatgcttcgttgacaaaaaaaaaaaaaaaaacaaaagaaaaataaaaaagatgaaaatgaaaaaagatgaaataaaaagaagaagagagtgcagaaaaaaaagaagaaatctattacaatgtgcagaaatgccaagatatgatgatgctttgctgggggggccgttttaggggaataaatttttggtcccgtgatttgaaaaatttttttttttttttagggcaactaaaataaaattaatgggcggggttttaaa

SEQ ID NO: 4000 - DNA, 448 bp, Chlorella sorokiniana
  Clone ID: LIB3602-046-Q6-K1-F7
accgagttgggcaggagaagttgaagggtcgaatcctggtgcccaatccctacagcatcacccctggccgtgctgcacacagtctgctgccgccgcttttgtcctgcctgctcacagggctgagcggctcgggtcctgcttttgtctacctaatgatcgaggcgctggcggatggcggcgtggcggcgggtctgccgcgcgagactgccctggcgttggccgccaagacagtgaagggtgctgcacagatggtgttctctgatgacgccacctcagaaagcggcatggtgcacccgggtgtgctcaaagaccgggtggccagccccgcgggcaccaccattgcaggtgcgggcctgaatgagggctttaagcgctagggggacatgctgtgggaggctggagagtgtgacgtgtgctgttgcttgaggaggctggataatgtgctgtg

SEQ ID NO: 4001 - DNA, 448 bp, Chlorella sorokiniana
  unsure (1)..(448): unsure at all n locations; Clone ID: LIB3602-046-Q6-K1-F8
cggacgcgtggggccggtaaggtgcgcggccagacgcccaaggtgcccaagcaggagaaggcgaagaccgggaagggccgcgcccgcaagcggctgcagtacaaccgccgcttcgtgaacgtggtggtgggcttcggcaagaagcgcggccccaacagccagtaagctgactgcggcgccagcagcagcggcaggcatgtgctgaacgcacggagcgcaagcgcgtcccgcgcacagccgccaccgaagcggcctgccagcgtcgacggcagcgaggcagcaaggcgcggcctggcatgctagcagcgcgtactgcgcgccacggcgctagcagccgcaccctggaacagcatcagcagtaattcagcagcccacctgcatgccgaacgctccgctgtaacaggttctcaggaaaaaaaaaanaaaaaaggagaaagaaaaatgtgct

SEQ ID NO: 4002 - DNA, 467 bp, Chlorella sorokiniana
  Clone ID: LIB3602-046-Q6-K1-F9
gcagccagaaggcgctgtccatccccaccggcctcggcatggtctgcgcctcggacaaggcgctggcgggcatgaagacggccaccagccggcgcgtgtactacgactttgccgacatgctgcgcaccaaccccaccggcaacgtgccgtacacccccatcctgccgctgctgtacggcatggaggcgtcgctgaagctgctgcgggacgagggcatggccaacgtggcggcgcgccaccacaggctagcggagggctgccgcaaggccgtggagggctggggcctgcagacgctgtgccgcgacccgcgctggaagagcgacagcctgacggtgatcgaggtgccgcagggcgtggactcgcaaaaggtggtggacgtggcgtacgccaagtacaacctgtccctgggcattgggctggcggacgtgaagggcaaggtgttccgcatcggccacctgggcaacatg

SEQ ID NO: 4003 - DNA, 55 bp, Chlorella sorokiniana
  Clone ID: LIB3602-046-Q6-K1-G1
gcgaaaaaaaaaaaaaaaaaaaaaccaagaaaaacaccaaaaaacgggcgcgaca

SEQ ID NO: 4004 - DNA, 461 bp, Chlorella sorokiniana
  unsure (1)..(461): unsure at all n locations; Clone ID: LIB3602-046-Q6-K1-G10
ccattctttctagccccgctgaaattacccgcccgtctccaaccgacaacttgttgcactgtggcatctggcactcccaacggcccgcctccgccgcttgcacgccagccccctacacctctcaaactgtgcgatttttggccgcccatcctctgctctcgtgggcgaccctcaaatgtgcgaccttctttgcgcttttccctgaatcaaatacccaagcctaccgcagcactccgtctccccccttcatttcctctgcctgcacccacttgcccgccttgctgatatgtgctttctattacgagtcaaccattggtatgcatgactgagtgtacctcttttccactacttgttgacctgatgcatgcagttgccaccagcgagtgggatgtaatgcaaacatgctgcananaaaaaaaaaaaaaaaaaaaaaaaaaaaaaaaaaaaaaaaaataaaatat

SEQ ID NO: 4005 - DNA, 408 bp, Chlorella sorokiniana
  Clone ID: LIB3602-046-Q6-K1-G11
aaaaaaaatataaaaaaaaaaaaaaatacacaaaaaaataaaaaacaaaaacttaaaaaactaaaaaaatctcgcgctcttaaaaagcccagctacgtctctttcacaccataacctatacacctttcaaactgtgcgatttttggacgtccatcctctgctctattgggcgaccctcaaatgtactaccttctttgcgcttaaccctgaatcaaatacccaaacctaccgtatcactccgtctcccatcttcatttactctgtctgcacccactttcccgacttgctgttatgtgctttctattactagtcaaccattggtatgcatgactgaatgtacctctttttcactacttgttgacctgatacatgcactttccaccagccagtagcatgcaatgctaacat

SEQ ID NO: 4006 - DNA, 469 bp, Chlorella sorokiniana
  Clone ID: LIB3602-046-Q6-K1-G12
agaaactcgcgagcagcggccctgtagccccagcccactcgaacggccgctagtgccctgtcacctggtgcaggcgccaatacaaacgtctagactagcagcagcccagtgcagcagaagcagcagcagcggcagcagcagcagcgatggaggaggccggcggcgagaaccaggtgaagcgcgagggcggcggcggcggcgaggccatgtcggtcaaggtcaaggaccagaacggcggcgaggtggtgttccgggtaaagccccacaccaagtttgacaagatcctcaacgccttttgctctaagaagagcgtggaccctgcccaagtgcggtttgtgtttgagggcgagcgcgtgaacccccagagctcgccacaggacctgggcatggaggactgcgacacaattgatgcgttcctggagcagattggcggctgctgaagcaatggcagcactgcacagcataccca

SEQ ID NO: 4007 - DNA, 457 bp, Chlorella sorokiniana
  Clone ID: LIB3602-046-Q6-K1-G2
cggacgcgtgggcggacgcgtgggcagacccaggctacaaccccaacatggccaagacggggcgcagctggtgcgacacggtagagaacaagaaggcttcgcccggcatctgggactaccacctgcagtctgagaaggctgagcgggaggcgagccacgacgtggcgcgcgccgccttcaagtccatgggcgcctccaccactccccaaggcgatgtgctggatgcctctgccctgcgcaagatgtttgcctcggaccgcgtggaccagctgatggccatggccgacaagaacaaggacggcaagatcgacttcaaggagttctgcgacctgatccgcaagtacccctgcgactgagcgatacataaggcagatgcacggaccaatccctgcaataaatgcaccgtttcacaccgggccacgggcgcggcgctgattgacgcgttcccaagtaaact

SEQ ID NO: 4008 - DNA, 468 bp, Chlorella sorokiniana
  Clone ID: LIB3602-046-Q6-K1-G3
gcggcggtgggagtggtgtccaagcgcggcagctggtactactgcggcgagcagcgcctggcccagggccgcgagaagacgctggacgtgatcaaggaggacgcagaccttcgctgcaagattgaggcgcagacgcggcaggtgctggcgggcaaggacatcaacgacatttacgaaggggaggagcctgtggtggaggagtcgtttgcggagggtgatggcgtgctgcgggagcaggtgccctctagctgagcggcgcagcaggccccagcagcaatagcagcgcacggcagtggtttaccagcgccgcgcagcagggccgaacgcaacagcagtaccaccggagagcacccatatcatgtgccggcatgccacccacacattccctcaccccgctcgtattgtgcaaacccttcttacgatgtatatgattcccctcccgccatgcttctcctcctgccattcctt

SEQ ID NO: 4009 - DNA, 473 bp, Chlorella sorokiniana
  Clone ID: LIB3602-046-Q6-K1-G4
gcggaaggccaacggccagatcctggccatcaacgagatctttgagcgcaaccccaccaccgtgaagaactacgggatctgggtgcgctaccagtctcgtaccggctaccacaacgcctacaaggagtaccgcaacaccaccctgaacggcgctgtggagcagatgtaccaggagatgggcagccgccaccgcgtgcgctccccctgcatccagatcatcaagaccgccacgctcacggcgtcccagtgcaagcgcgcggccacgcagcagctgcacgacagcaagatcagcttcccgctggcgcgcaaggtgctgcgcccctcgtcccgcaagttccgcaccaccttcaaggcggtgcgccccaacgtggccatctactgagcgcctcgccccaaggcggctcgcggccacactggcggcagcagcggcggcggcggcgacccagcttgtgctctggagcggcgccgctgag

SEQ ID NO: 4010 - DNA, 256 bp, Chlorella sorokiniana
  Clone ID: LIB3602-046-Q6-K1-G5
gcgctctccacagaacaagcgaagatgcgcgctaagtggaggaagaagcggatgcggcgcctgaagcgcaagcgggggcggcagcgggccaagtaagcggcctgccccgcagcccagcagcgctgcggcgcctgggcgcagccgcccgctcgcacgcgtgcaacggcgctgcagcggccagccggcgtcacggagtccgggcgcccggcagccgccgatgaaatgtgacggccgagtgtgtaatgctcacgaccgt

SEQ ID NO: 4011 - DNA, 342 bp, Chlorella sorokiniana
  Clone ID: LIB3602-046-Q6-K1-G6
gcggtcaaccctgctgatccagaccccatctcttaccactcttgcctcccatcacacatgcacaacgtgagcgggcagtagctgaaccggtgtgggccgcacacttgtgttacatggctctttgtcccagagtactccacattttttccagcaccaacataccccttccagttcgcctttttttctagtgtaacgtgcgccctgcaaaaacaataaagaattgattgctgcgaactgcttagacacaaattattgcacaaagtacctgcaaaaaaaaaatgacgtggggccgttatagagtgaccaaactatgttccgcgttcttgcgaagctatgactttt

SEQ ID NO: 4012 - DNA, 465 bp, Chlorella sorokiniana
  Clone ID: LIB3602-046-Q6-K1-G7
ccactttcggcggcaagaccaaggctggcaccaaggccggcaccaagaagggcacccagaagcaggccaggaccaagaaggctgcccccaagaagtcttcctctggcgccagccagtggtacggccccgaccgccccaagttcctgggcccctacagcacgaacttcgtgcccagctacctgaccggcgagttccccggtgactacggctgggatacctctggcctgtcggccgaccccgccaccttcgctcgctaccgcgagatcgaggtcatccatgcccgctgggccatgctcggcgccctgggctgcgtcgtgcccgagctgctggacggcaccaaccacattgcctggttcaaggccggcgccgagatcttcggcgacgacggcatccagtacctgggcatccccggcctgatcaacgccaagtccatcgtggcgaccctgatcgtgcaggtggtgctca

SEQ ID NO: 4013 - DNA, 447 bp, Chlorella sorokiniana
  Clone ID: LIB3602-046-Q6-K1-G8
aaaaaataaaaaacaaagaccaaagctgacaccaaggccagaaaccaaaaaagacacccaaaaacaaaccacgcaccaagaacgctgcctctaagaagtctaactttggcgccacccacttgcacggccccaaccgtcccaagttcctcctaaactacaatacaaagcgtcgtgcccagctacctgaccgactagtaaacccgtgactacacctaatatacctctgtcctgtcaaacgaccctttcaccttctgtcgataccgcgaaatcgacgtcatccatgccctttgcaacatgctccgcaccctgaattgcaaatggcccgagctgttgaacggcaccaaacacattgcctgtttcaaggtcaccgccaaaattaccggtaacctcggcatccactaactgcccattcctttcctgatcaaccctaagttcatcgccacgacc

SEQ ID NO: 4014 - DNA, 447 bp, Chlorella sorokiniana
  unsure (1)..(447): unsure at all n locations; Clone ID: LIB3602-046-Q6-K1-H10
gcgcctgccccctgcccagcgggcatgcccacactgcgcancggccgtgcagcctatcaatgtggaggacacacaccacattgtgtttgagtgcgtgttgtatgctgacctgcgccagcagtacccccagctcttcccgcccacaggcagcccccgccctctcctgtcagccctcagccagctcagcctgcagtcctttctggaggccaacgacgcagccgcagccacagcgcactttgccagcgcatgccggcggcgggcgcggctgcagcttgggctggccccttagctcctcccctcccccattcccacattgctctccttttgctacacctcttggttcctctcttgctcttccttacttgctaactgccatacggactagtgttgcctgtcagtgctcaccggcacgcatccctgctcgagacacgttgctttccctccttt

SEQ ID NO: 4015 - DNA, 472 bp, Chlorella sorokiniana
  Clone ID: LIB3602-046-Q6-K1-H11
gcggtgggccagcccacgcccagcggcctggtggcgccccaggagccgcagctgctgctgccggagcacgagtgcggcctgagcgtcaagcagatgcaggtgctgggcctcaccaacgaagccaccggctttggcgcccgcctgccggaggtcaaggcggaggcgctgcgcgccaaggccttctatgtaggagatgaggtgacggagaccaagcggcaggtggcgcgcatggcggttgacacaaaggcgcccggccaggcgccgcccgatctgccctcgctgctgctggacggccgcatctgctacatcggcatgtcgctggtgcctgcggtgacggagctggtgatcagcgagctgctgtggctcaactactcggcgcccgacaagccggtgtacgtgtacatcaactccaccggctcgcagacgatgcagggcgaggctgttgggtttgagacggaggccaccgccatca

SEQ ID NO: 4016 - DNA, 470 bp, Chlorella sorokiniana
  Clone ID: LIB3602-046-Q6-K1-H12
gggcgggcggtgggccagcccacgcccagcggcctgtggcgccccagagccgcagctgctgctgccggacacgatgcggcctgagcgcaagcagatgcaggtgctggcctcaccaacgaagccaccggctttggcgcccgcctgccggaggtcaaggcggaggcgctgcgcgccaaggccttctatgtaggagatgaggtgacggagaccaagcggcacgtggcgcgcatggcggttgacacaaaggcgcccggccaggcgccgcccgatctgccctcgctgctgctggacggccgcatctgctacatcggcatgtcgctggtgcctgcggtgacggagctggtgatcagcgagctgctgtggctcaactactcggcgcccgacaagccggtgtacgtgtacatcaactccaccggctcgcagacgatgcagggcgaggctgttgggtttgagacggaggccaccgccat

SEQ ID NO: 4017 - DNA, 472 bp, Chlorella sorokiniana
  Clone ID: LIB3602-046-Q6-K1-H4
ggcgaacatgttcaagctcatgcagaagaaggcgctggacatttacatgcagcaggcagggggcagcgacgacgaggcgcccacttcctccggctcctccgccacagcagcagcggcggcaggcgcagccgacggcgcggctgccgctgacggaagcggcagcgagggtgacggcagcggcggcggtgccagcaacacgccggtggcggacagcattcggcgcaagctgcgggaggagctgcagccgctgcggctggaggtggtggacaacagccaccagcacgcggggcacgcgggctaccgtggcagcgcgggatacagcggcgagacccacttcaacgtggaggttgtcagctctcggtttgaggggctgaccagcatcaagcggcaccgcctggtctaccagattctggaggcggagatgcgcagcccggtgcatgcgctgtcgctcatcaccaagacgcccgctgag

SEQ ID NO: 4018 - DNA, 470 bp, Chlorella sorokiniana
  Clone ID: LIB3602-046-Q6-K1-H5
gcggcgacaacgagccggagctgacgccaaagctggaagaagctcgggacaacaccattgcgctggcgctgcaggggggcgcggtgcagcaggagtgcgggctgcccatcacccccgaagagtttgtgaccagcaccctcaagtttgggctgaccgaggtggtgtaccagtgggcgcgcggcacgcccttcaaggacatttgcgggctgacagacgtgatggagggcagcattgtgcgggccatggtgcgcctggacgagacgtgcagggagttccgggatgctgcgcgcgtcatgggcaacactgccctgttccagcagatggagaaggcgtcttccgccatcaagcgggacgtcatcttcgccgcctccctctacgtggcgtgagtgtggcagaaagtgcagcggcagctttgagcattagcagaggtatcctgttcatgtctgctgcggaacattgtaaaacaactc

SEQ ID NO: 4019 - DNA, 474 bp, Chlorella sorokiniana
  Clone ID: LIB3602-046-Q6-K1-H6
gcggtgggcgccaagaaggcgggcgtggacttcttccctcactgcgtccacctggtcagctgggagaaggagaacgggtcgtccgaggcgctggaggcggcccgcatcgcggccaacaagtacatggtgaagaacgcgggcaaggacgccttccacctgcgcgtccgtgtgcaccccttccacgtgctgcgcatcaacaagatgctttcgtgcgccggcgcagacaggctgcagacaggcatgcgcggtgcgttcggcaagccatttggtgtgtgcgcgcgcgtgggcatcggtcagatcctgctgtccatccgctgcaaggacacgcacgctgcggtggcggaggaggccctccgtcgtgccaagttcaagttccccgggcgccagaagatcgtggctagcaggaactggggcttcactccctacctgcgcgacgattacttggagtggaagcgtgagggccgccttgtgaac

SEQ ID NO: 4020 - DNA, 467 bp, Chlorella sorokiniana
  Clone ID: LIB3602-046-Q6-K1-H7
tgacggcggcgacgacaacaccggcggcgatggcgctgagcagcctgctgatccccccactcccgccggcgggggtgacgacaccccggccgatgacaccccggccgatgacaccccggcggacgacaccccggccgacgacaccccggccgacgacaccccggccgacgacaccccggccgacgacaccccggccgacgacaccccggccgacgacaccccggccgacgacaccccggccgacgacaccccggccgatgatactccggccgacgacaccccggccgacgacaccccggccgacgacacccccgcggacgacaccccggcggacgacaccccggcggacgacaccccggctgacgacaccccggccgacgacaccccggctgatgacgatgtgctgtgagagcctggccaacagccctaaacagccggcgtgcagcaggcagcacccccgagcgctg

SEQ ID NO: 4021 - DNA, 367 bp, Chlorella sorokiniana
  Clone ID: LIB3602-046-Q6-K1-H8
ggatgaccacctggccgaccccgacgccaccaacttttggctggactacgcccccaagaccgccggcatcggctactaagatgcttccgtcgcttgactggcgccccccgatagcccgcccgatgagattacggccactcacggcaacaggcaccacaggcgtgtgtactatatgactcctgcggacattgctggcggcgaaccttgcttgctttgatgcttgctctagaggcctaggcaccctaccatgcaacacatgaacctccaccacccctgacaacccaagtcttaacctgtgtttgcgcgccgcgaaggcacaacacccaaaaagacaacacccaggaggacgaacaccccaaatgacaac

SEQ ID NO: 4022 - DNA, 388 bp, Chlorella sorokiniana
  Clone ID: LIB3602-046-Q6-K1-H9
attcccgatcgacccggcgggcgggctaaccacctgaccgtccccgacgccaccaacttctgggtggactacgcccccaagaacgtcggcatcggatactaataaacagcggacgctgcactcccgccgcccgataccccgtccgctgagtttacggacaatcacgtcaacaggcaccagccccgtctgtactttatgactccttcggctattgctggtggcgcacctcgctttgtttgatgctaacttcagcagcactacggaccctaccatgcaacacatgaacctccaccacccctgccaacccaagtcttagcctgtgtttgcgcgcggtgaaggcaaaaaaaatatattaaaaataatcaaaaaatacgaaaaccaaaatgaa

SEQ ID NO: 4023 - DNA, 287 bp, Chlorella sorokiniana
  Clone ID: LIB3602-047-Q6-K1-A1
ggagccagtccctggacagacaatcctgcccgctgcatcgtgcattgtgtgtcgtgcggcccctatccatgtctggccttcgtccccttctttcctgacgagcacgggggctgccgctgctccgtccacatagcacagacgttagagcaggtttcactttgcccggcggcgggcccctcccgccgctctttttcctaggcaggcaccagcaggttgggcatcacttttctttccctctccagtctcgcatccctttgtgtcggcccccatgtgaaagcctcaagttc

SEQ ID NO: 4024 - DNA, 311 bp, Chlorella sorokiniana
  Clone ID: LIB3602-047-Q6-K1-A10
aaaaaaaaaataaaaaaaaaaaaaaaaaaaaaaaaaaaaaaaaaggaaagacaaaaataaaacaaacaagcaaacatacggggacatacagggggggtcgctcttctgtatccacccttacattcccttgcgtgcgacgtccttgcctttgtttggggctgccaaattcctgtccattgccggctttttcgcctcgcagtgcttgcccaaacccccggttgccccattttactagagttccgcaccatccgtctttcccaaccttggggcattctgaatgggccttcacacccgccctttaccagcacttt

SEQ ID NO: 4025 - DNA, 416 bp, Chlorella sorokiniana
  Clone ID: LIB3602-047-Q6-K1-A11
gatcccattgtttccttgctttctgcctcgagcctctgacgcatgccgatacgatctggcgcggcccgccctgtactgccctgccgccccctctcccacctgtgcccaacccaacccgtctgactacgcgcccattgccagtaggtagcgatagcagcgcactcctccctccctgtgcggcgcggcccggctcgtgcgttcgccgctcggcccggccgccgcccctgtgtacactagcgatcaaatttgcaccactgttcgacgcgccacccgttttttttgacgcgacccgcgcaagcgcctgtaccaacagccccccgcctgccctgccgcggcgcccattggatgatgtacccagctgcgcggccacgcgcgccgattgagaagagccccaaccgatgtaacatcaccgcttt

SEQ ID NO: 4026 - DNA, 431 bp, Chlorella sorokiniana
  Clone ID: LIB3602-047-Q6-K1-A12
cctcacacctgctgcgtaccacagtttcccatggtgccccctgtccccctgcccgctgtcctgccgcaaaggatgcctgttggtgcatgtgcgccggccctctgacatcctaagcgcgcctcagtccttctctctcacacccccctctctcactctgcgacctggcctgtcctcgcctgcccataccccccttcaccctcctttcgttctttcgttccctggttcgatgcgattcagtgttgccccttgtgtaaccagtgcgaccaacaaaaaaaaaaatagacacaacccaaacaaaaaaaaagaggggcggccgctcgcgatgtacagctagtgtacatattgagcgatggacccagctgcgcggccacgcgcgccgattgagaagaaccccaaccgatgtaacatcaccgctttagacaaaaaaagat

SEQ ID NO: 4027 - DNA, 408 bp, Chlorella sorokiniana
  Clone ID: LIB3602-047-Q6-K1-A2
gggcagagccgcaggcaggctgtcacgtcgctggaagcgaatgcgcttgccgccgccaactccagcaagggtgagaagaagaaatggtccaagggcaagctgaaggagaaggtgaacaacctggtcctcttcgacaaggccacctatgagaagctgctcactgaggtgcccaagtacaagatgatcactccctcggtgctgtccgaccgcctgcggatcaacggcagcctggcgcgcgccgccatcaaggagctgctgggcaaggggctgattaaggaggtggccaagagccgcgcgcagcagatttacacccgcgcgacggcagccgccagctaagcagccacccagcagtttggcagcatgctagtgcactcgttgtgcttgccaatctggtaacaggtccctcgc

SEQ ID NO: 4028 - DNA, 450 bp, Chlorella sorokiniana
  unsure (1)..(450): unsure at all n locations; Clone ID: LIB3602-047-Q6-K1-A3
gtccgaaaaaaaaaaaaaaaaaaaaaaaaaaaaaaaaaaaaaaaaaaaaaaaaaaaaaaaaaaaaaaaaaaaaaagaaaaagggggaaaaaaaaaaaaannaggggggggctgaagagaacaaaagatatcntaaaaaaaagggggggggcttttttaggggaccaatttttcttaacggtggttgggggggatatattttttttttgggggcccaaaatttaatttggggggcgttgttttaaaaaggtgggaggggaaaaaaccggggcttaccgaatttaatttctttgggaagaatcccctttttggcagtggggaaaaaaaagaaagggggcaaaaaggggcgcctttaaaaagaatgaccaataaaaaaagnncacggcgctagcagccgcaccctggaacagcatcagcagtaattcagcagcccacctgcatgccgaacgct

SEQ ID NO: 4029 - DNA, 489 bp, Chlorella sorokiniana
  unsure (1)..(489): unsure at all n locations; Clone ID: LIB3602-047-Q6-K1-A4
cgccgtccgcctggcagtcgttggagagggcactggcaaggtgtttgaggcggcggcggcggatggggcgccgcagccgcagtttgtgccgtctgtggccaacgctgagcacttcgggccggagctgccattcgttgagggcggcagcaagcgggtgctctaccctgcatccaacaaggcatccaccgagctgcagtctggcctggagaagcgcggatttgaggtgctgcgcttgaacacgtacgacaccgtgcctgtgactcaactggatgctacggcgctggaggcagcaaagcaggcagcagtggtcaccgtcggctcgccctccgccatcaaggcctgggtgcagattgtgggtgaggaggccactcagggcatgtcaattgcctgcatcggctccacctcggctcgggcagcagagaagctgggcctacagcgcatcaagtatcccgatgcgccaggcgtggacacctgngcggcagtggtgga

SEQ ID NO: 4030 - DNA, 358 bp, Chlorella sorokiniana
  Clone ID: LIB3602-047-Q6-K1-A5
aggacggcaagttccacctgattctggtggagtcccgcatccaccgcctggctcggtactacaagcgtaccaaaaagctgccgcccaactggaagtacgagtccgccaccgcctccgcgctggtgcagggctgagcgctcgcctcgcgcgtgagctgacggctgcagccacggctatctccaactggtgtgccagcaggcatcaccacgaagcagccgcagctctccagctggctctgcctgcgtttgcagcccctggcttgatgtgctgctctcttgcatgcatgcgccaagcgcatgtgtaaagctgctgcagacaaaaaaaaatacaaaataaaagccaaaaaacaaaaagagag

SEQ ID NO: 4031 - DNA, 488 bp, Chlorella sorokiniana
  Clone ID: LIB3602-047-Q6-K1-A6
cagctaccgaatggcccctggtgggcgtgggagtgctggtgtttaaagagggcacgcagcagtgcttggtggggcagcgcaaagggtcccacggcggcggcgagtgggcgctgccgggcgggcacctggagcacggcgagagtttcgaggaatgtgcagcgcgagaggtgctagaggaggcaggcctgcagctggcggccccccagtttgcttatgcggtgaacagcgtgttccccagcggggcgcactatgtcaccgtgtttgtgcgggcggaggtgcccgcggacgcccagccgctcaactgcgagccccacaaatgcgagggctgggagtgggttgagtacgacagcatcccggagcagtgccagccgctgttcatgccgcttgccaagctgctggacagcccgtaccgccccttccctcaatgagcagcgagcctgcctacttgcactgctgttggccgcagccgaaactcccgccccttgaag

SEQ ID NO: 4032 - DNA, 488 bp, Chlorella sorokiniana
  Clone ID: LIB3602-047-Q6-K1-A7
gggcagtgccgcaggcagcctgtcgcggcgcttcgacccaatgaagcgcacccgcagcagcggcgctgggctgcgcagcaatgacatggagcgggcggcggcccagctggtgcagcaggccggcttggcggcgcaggcggccgcccaagctgccgcggcgcaggcggcggcggggccgtctggccgggaggcagcccctgctggcggcgcagcggcggcagcaatcggcttcagaggcttccccaagctcaactccggcggcggcagcggcagtggagttggaacacactccctcacccgagcgatcagcaagcggcggacgagcggcacggggggcggggcggtggccggcactgccaccgggcctccctcaatccctctgttggaacccagccctctggaccgaggcttttcagatgtgctggtcacacctgccttctccagcaatgaaattcggctgctgctggaggcgctcaacccgcccaagt

SEQ ID NO: 4033 - DNA, 386 bp, Chlorella sorokiniana
  unsure (1)..(386): unsure at all n locations; Clone ID: LIB3602-047-Q6-K1-A8
gggaagaaaaagaagaaaaaaaaaaaaaaaaaaaaaaaaaaaaaaaaaaaaaaaaaaaaaaaaaacagcaaggaaaaagagggaaaaacaaagnnngggcaagcagacagagggaagagaggnancanataggcgggccaggaggacagacagggtgccggggggcacgcagatggaacgccgggacgaccgtacgcaacgggtggaacggggaaaacccgggcggaacccagctaaagaggcaggcacaacacaactcctggcgaagagggggaaagggagaaggggcacgccccgacggccaagcgaacagcaagcacgggatgaggggcaaagggggcggggcagggaacggcccagaaaccgcgccggacgaaggggatacg

SEQ ID NO: 4034 - DNA, 463 bp, Chlorella sorokiniana
  Clone ID: LIB3602-047-Q6-K1-A9
gccttgccgactgcagcagacatctgagcaaccatgggtaaggtgcacggctcccttgctcgtgccggtaaggtgcgcggccagacgcccaaggtgcccaagcaggagaaggcgaagacccccaagggccgcgcccgcaagcggctgcagtacaaccgccgcttcgtgaacgtggtggtgggcttcggcaagaagcgcggccccaacagccagtaagctgactgcggcgccagcagcagcggcaggcatgtgctgaacgcacggagcgcaagcgcgtcccgcgcacagccgccaccgaagcggcctgccagcgtcgacggcagcgaggcagcaaggcgcggcctggcatgctagcagcgcgtactgcgcgccacggcgctagcagccgcaccctggaacagcatcagcagtaattcagcagcccacctgcatgccgaacgctccgctgtaacaggttcttcgg

SEQ ID NO: 4035 - DNA, 505 bp, Chlorella sorokiniana
  unsure (1)..(505): unsure at all n locations; Clone ID: LIB3602-047-Q6-K1-B1
cggagagaattggggggannnncgcgtcgcgggaaaaagaagaatgaagaaaaaaaaaaaaaaaaaaaagaaaaaagagaaaaaaaaaaaaaaaaaaaaaaaaaaaaaaaaggggggaaaaaaaaaaaaagggggggaggataagaggggggcacgctgacgtgggccgcattataannncatatatttgcaaaggggtaattaaaataaaagggaggggaaagggttttaaaggggggggtttggaaaaagctgggggtgggaaaatttagggggttggaaggagaatcccgttgtggaacatagtattatgtcgatggggcggaagacatgcaggatgcggagctgttgcccaaccaaaagggtgaaaggaaggatgggtaaaggggagcataaatggaggggggagtgaaggccaccggaaggggggcttaaaaactgggggggggttaaatttccgatcctttaggcgcctgctttttgggtttcctaacggtggttgttt

SEQ ID NO: 4036 - DNA, 328 bp, Chlorella sorokiniana
  Clone ID: LIB3602-047-Q6-K1-B10
gcgggactcgccacagctcctcgcctttcaagcctttcaggctggcgtaacgctgtccgcagcagccgccagtcagctgcaagtgtacttcagcctttgttgaactcgctgccgcctctgattgcgccagtcagcagctactttgcccaacacacgccggggggttccctgggcgggcttccatcccgagcaataatgccatgcagcgctgaacgccacacgacacacccctttcagagaactgcctttcatctcgccctcagctgccatcccctgcctagcgcgatagcgtgcatgcaggcatggcacatgtaaatacactgctgag

SEQ ID NO: 4037 - DNA, 468 bp, Chlorella sorokiniana
  Clone ID: LIB3602-047-Q6-K1-B12
aaaaaaataaatcaaaaaacaaacaatctaaaaaaatccaaactaacaaacacaaaacatacaacaacctaactcaaaacataaaaacacctaacattcaattcactgacacccaatttccaacggggcccccctttttaacgctcccattttccctccccctcccttccgcccccatatttttttttttcgcccccctaattcctttcccctcccccccctttcccccctccctacttggaaaccccctgccttcccccccttactccccctttcgccactcccccttttccccggttgtcgtattaccacacagccccccccctacccccttccccaccctttccccccctcctttggctatttgccccccccttttccctcccttttaagctcgccgggtgtggttgtaccccccagggtcccttttccatttcccggccccttttcccccgtccttttcctttt

SEQ ID NO: 4038 - DNA, 498 bp, Chlorella sorokiniana
  unsure (1)..(498): unsure at all n locations; Clone ID: LIB3602-047-Q6-K1-B2
gcgcgctgcatgccgctcctgcagcatggcgctacgttgactcaggatgccctggtggctgtatcatcgcacgaaacgatgcagacgcggtcgaggctcgctctcggcgggcgaagcacacattcaagtcctctcaatgcantggcctgatgaaatagtgggatcttggcgcanncgctgcgtgcgctggcccagcctgagtggccacggcgggccatacctaggcgacaacttccaagctntnngcagcagccaagaaatctgcggtgcacaaagcagcctnnggcggcgtttggcagcgtaccaactacctgcctttgcngaagaagtgaacgcttgagcaacagcttcgcgcctannacccacccttgatacctcnngctgtgcgaaatctcgtatcgactggggccggcnnaccagcacctnngtcgacttcnntggtgcgtnngcgcattgaccnnncagctggacttttctgnntggcacttgggcncnntg

SEQ ID NO: 4039 - DNA, 354 bp, Chlorella sorokiniana
  unsure (1)..(354): unsure at all n locations; Clone ID: LIB3602-047-Q6-K1-B3
gcgcggacgcgtgggaaaaaaaaaaaaaaaaaaataaaaaaagggatatcgatagtggggacatgtgcttgagtacacatgtgggcaacgctataattcttatgatagagttgtcttattttattacgttgcccgttgtttttggccgtcgtgactgaaagtaccgtttggtaacacaatttaatnncctagcttaatatccttgtttcacatgctggtttagtaaggtggagtcctgcaccaaacgcccttcccaatcgttgttcccactttttggcgaatgtgactggccatggggacgcgcattaaacccgcttattaagcgggttacgtgcagtgtttccgctcaacttg

SEQ ID NO: 4040 - DNA, 493 bp, Chlorella sorokiniana
  unsure (1)..(493): unsure at all n locations; Clone ID: LIB3602-047-Q6-K1-B5
gcggtcaaaccccatgctccctaaccaggcacgtgtccatcctggtgcctgaagccatcgacccctccaatgacccctttgccggccgccgcccgcagcgcctgcccaacggttcctggcccgcacaggtgctggacacggagttccagggccgccacttcaacgcactgacggaggcacgcctcaaaagcgactccttctactttggctacgacaaggacgccggctttgtgcggtaccttgagctggccaagcagaacggcctgacgcgtgatggcatcgttaaggcggccaacgaaatctttccgacggcgtactacggcctgcgtacccagaagagcggcgtggcgttcaagtacattgagtacccagcggngcacgagctgttcaacctgactgccgacccccacgagctgcacaacatctacgccaccgcccctcgggagttgatcacggacctggctgccaccctggccacgctcaaagtgtgcaa

SEQ ID NO: 4041 - DNA, 467 bp, Chlorella sorokiniana
  Clone ID: LIB3602-047-Q6-K1-B6
aaaaaaaaaaaaaaaaaaaaaaaaaaaaaaaaaaaaaaaaaaaaaaaaaaaaaaaaaaaaaaaaaaaaaaaaaaaaaaaaaaaggaaaaaaaaaaaaaaaaaaaaaaaaaaaaaaaaaggggggggccgttttaagggatcaaagtttacttccgcgtgattgcaacgtaatagtttttttatggggcccccaaaattaatttaatgggcggtggtttaaaaacgtgggaattggaaaaaccttggggttcccaaattaaatcgctttgaagaaaatccccttttcccaagttggctaaaaagaaaaaaggcccgaacagatcgcctttccaaaaatttgcccaccttaatgggaaaagggaaccccccttgaaggggccaataaagcgcgggggttggggggttaaccccaagggggaccgttaaatttgcaagcgccttagcgccggttctttaggtttttttcc

SEQ ID NO: 4042 - DNA, 486 bp, Chlorella sorokiniana
  unsure (1)..(486): unsure at all n locations; Clone ID: LIB3602-047-Q6-K1-B7
gcgggaatcagcgtggtgggatctagcagcgcaggcggcaagccttaccgcccatacttcccagccggcggcgcggcgcgcccccgcttcccaaccacagcagccgcgctgggcacgctgccctttgccgcagcgcagcggccctacctggccagccggtattactacaacaggccggtgtatggctttggnagaagccctttcctgccctactccacctttctgttcttcccgctgctgtacggcgcctcccgcactggcacacagtacgcggtcgccccggcggtggacatgcagcaggcggtgctgctggacaactctacgactgccattgcgagggtggacctgccgccgcctgaggccagcggcgtgcagccggtgctggtatccctgccgcacttcaacgagaccgcgcagtacgatgcaattgccaccatttcagagagcgaccttgcagtgaccgagggcctccagcaggcgatagca

SEQ ID NO: 4043 - DNA, 487 bp, Chlorella sorokiniana
  Clone ID: LIB3602-047-Q6-K1-B8
cccaccgcgccggccagggtgccttcggcaacatgtgccgtggcggccacatgtacgcgcccaccaaggtctggcgccgctggcaccgcaagatcaacgtgaaccagaagcgctacgcggtggtgtctgccattgccgccagcgccctgcccgcgctggtcatggcccgcggccacaagatcgaggcggtgcccgaggtgcccctggtcgtgtccgacgctgctgagagcatcaccaagaccaagcaggcggtggagctgctgaagaaggtgggcgcctacgccgacgtggagaaggccaaggcctccaagaacctgcgccgcggcaagggtaagatgcgcaaccggcggtacgtgcagcgcaagggccccctggtggtctacggcaacgacgccggcatcagcaaggccttccgcaacctgcccggcgtggaggttgcctccgtggagcgcctgaacctgctgcagctggcgcccggcggccacct

SEQ ID NO: 4044 - DNA, 365 bp, Chlorella sorokiniana
  Clone ID: LIB3602-047-Q6-K1-B9
atctcactctccattgttgcgttcctgctgcaccccaagttttgcgagttgcaacatgtgcctgtgttgctctgctctcctcgcttcctttgctggcagcactgcggttttcgccaccgtaccccccttgtgttttcccaccgcccacccaagtgtggtttgtttgttcccccaccaccctcccccaaacccgacccaaccagaaccaagcatcagccgcaaacgatatgccacgcacaacacctcccctccaggctttgcaaagcgtcgtgcgcagcaggtcccaccctattttcgcatggatgatgatgatgtgtagcgttagccatatgtgtgcgtgtgggcgttttgtaagtgcaggaagc

SEQ ID NO: 4045 - DNA, 195 bp, Chlorella sorokiniana
  Clone ID: LIB3602-047-Q6-K1-C1
atctcactctccattgttgcgttcctgctgcaccccaagttttgcgagttgcaacatgtgcctgtgttgctctgcggtcctcgcttcctttgctggcagcactcccgttatcaccaccttactcgacctgaaagaggcctctgtcgggctaaggaactccgccaagtactttgatgcccaccaagcaaaggccag

SEQ ID NO: 4046 - DNA, 480 bp, Chlorella sorokiniana
  unsure (1)..(480): unsure at all n locations; Clone ID: LIB3602-047-Q6-K1-C10
gcggcgggtgccgcagcctctctgggccagccaaatgtggctttgatgctggctgagcatggcctgcaggcgcaggggcaggggcaggggcaggacgagccctaccaccgcgccctgctgcacctcaccgcggcccaggcgcttgtgcagggcggcgctggcgggtccacattccctgtggcagcgctgcaggcgcacctggaggctgccaaagctgccaaggcagcatgccgtgcgtggctgcccacagcgctcaaggtgacgctgcggaccgtgcggacgggcgtccgcgtcactgatgagcagattcaagcggcccagcagttccagccctgctgctgcaggcgcgccgcaccacgctgcccatccaaccccctagagcgccgattggtgtgctggtggcaacggnggccgtcacgccgccgcctggccagcaggcgcatcagccccagcgcgactgccgctcaagctgccccgtct

SEQ ID NO: 4047 - DNA, 490 bp, Chlorella sorokiniana
  Clone ID: LIB3602-047-Q6-K1-C11
ctctagtcgacaccttcacgcacccagaccatgcagacgctcacggtcgctcaggcagcgcggcctgtggtcgcgcccaggcggcgccaggcccggccgctgtgcagccagcacgctgatgggcgacgcaacccggcgcaccgggcgccaccagctccccgcgcgacgggcgacgagcggcaggcggcggcggcccgcgatcaggcaccgcacggcggcgccggcgtggaccggctggcggcggcccagcgcgaaatcatggagatgaaggatgagaaggccggccagcgcgacctgaccgcttccgatgacgagtggcagcacatgccggtgcagaagaagtggtttttggaattcaaaaatttcctgtactcgtggctgggcactggtgtggagcctctgtgagtgcctggtgggcaggcacggtacagcctgtagcctcaaacctactcgagaaggtgtggctgtccacagcagcagctgatggctg

SEQ ID NO: 4048 - DNA, 490 bp, Chlorella sorokiniana
  Clone ID: LIB3602-047-Q6-K1-C12
acccgctctatgagaagcggcccaagacgttcggcattggcggcgacctgccggccaagcgcgacatgcgccgctttgtgaagtggcccaagtacgtgcgcatccagcggcagcggcgtgtgctgaaccagcgcctgaaggtgccccctgccctcaaccgcttcacccgcacgctggacaagaacatggccgagagcctgttcaagctgctgatgaagtaccggcccgaggacaaggcggccaagaaggagcggctgctgaaggaggcggaggcgcgcgaggctggccaggaggttgagaagaagaagcctgtggtggtcaagtacggcatcaaccacatcacgcagctggtggagagcggcaaggcgcagtgcgtggtgattgcgcacgacgtggaccccattgagattgtggtgtggctgcccgcgctgtgcaagaagatgggcgtgccctactgcatcgtcaagggcaaggcgcggctgggcaccgt

SEQ ID NO: 4049 - DNA, 490 bp, Chlorella sorokiniana
  unsure (1)..(490): unsure at all n locations; Clone ID: LIB3602-047-Q6-K1-C2
gcgcggacgcgtgggtgcgggccctggtcgcgatcctcctgcttgtgctggtcgtcggagcgctggccaggaagtacgaagaccctgtgaccagctgcatcaagaggtcgaagtgcgcgtccaagaagttcaagccggtctgcgctcgcaacgccgccactcaggacacctggggaggtttccccaacgattgctacaggaagtgcgccaatgccgcccatgactttggtgtggattgggtgaagggccactactaccgcgtgcccaagtactgcaagaccaagtggctggcctaccccgtggagtgctccacttgctccggctactactaggcaactagctgagcaaggcagggcagcctgaaacaggctcccatgtgccgacgctgctggcggcatgaggcacagcaccaagaaaggcangcttcaagggcggcgttgtgctggagcaggcatggccgccagtctggagcgccagctacagcacgttg

SEQ ID NO: 4050 - DNA, 413 bp, Chlorella sorokiniana
  unsure (1)..(413): unsure at all n locations; Clone ID: LIB3602-047-Q6-K1-C4
aaaccggggcgacccacgcgtggcgaagaaaaaaaaaaaaaaaaaaaaaaaaaaaaaaaaaaaaaaaaaaaaaaaaaaaaaaaaaaaaaaaaaaaaaaaaaaaggaagcggaaaaaaaaaaagggggaagaggaacaaaaaaaaaccncaaaaaaaaagaagccgaacaaacacaaaaacaaaaacnaggaaaaaaacggaagaggggagaaaaacaaaagaaagaaaaaacgaaaaaaaaacaaacaagaaaagggaaaaaacagcgagaagaaaaaaaaaaagaacaagaagaaaaaaaaaacgacaaaagaaagagaaaaaaacaaggaaagagaaaaaagacgagaagaaaaacgaaaaaggaaaaaagagcaaaaaaaaaggaagaaggaagaaaaaaaaacaaaaga

SEQ ID NO: 4051 - DNA, 490 bp, Chlorella sorokiniana
  Clone ID: LIB3602-047-Q6-K1-C5
cccacgcgtccggcggcgcagtggcagccgcccccaggcctgtctatcatgccatggactggtgcaccggaacagttggaggcacttgaggtgctgcggcagcgcctggcggccagcccatacccagaggccgccgaggacgaggccacgctgcgctggttcctgcaggaccgcaagctggatgtggaggaggctgaagagaagctgatcaaaatgctgcgctggcgccgcgagtttggtgccgacttcatcagctggacggacgttgcgcgcgaggcagccaccggcaaggcttacctgcactcgcacttggatgtgagcgggcgccctgtgattgtggtgcgggcagccaagcacctcacagacgcgtcaaacctgcaggacagccagcggctgtgtgtgcacctgatggaccgagcgctggagcggctggagagcgccaacgccagctcacagggccaggaggtgcagacggtgctgggcatttttg

SEQ ID NO: 4052 - DNA, 470 bp, Chlorella sorokiniana
  unsure (1)..(470): unsure at all n locations; Clone ID: LIB3602-047-Q6-K1-C6
agctggcgcgggtgttcaaggagaaggctgctcaggacctggaccgcatccgcaagggcaccagcaagacgcgggagaagctgggggtgattgaggagctgtttacgtactggaacctggacgacgcggacgagacgctggaggagctggaagacgcactcattatgtccgactttgggcccaagaccgcgttcaagattgtggacggcatccgggacaaggtcatggctgggcagctcaagacgggggagcagatccgtgcggagctcaaggcctccatcgcatcgctcctgcagcagcgcggcggcagcgcggagctggcgctgcccgaggccaagcccgcggtgctgctggtggtgggcgtcaacggcggcggcaagaccaccaccatcggcaagctggccaacaagtttgcctcggngggcgccaaggtggtgctggctgcgggcgacacgttccgtgccgcggcg

SEQ ID NO: 4053 - DNA, 489 bp, Chlorella sorokiniana
  Clone ID: LIB3602-047-Q6-K1-C7
gcgccaagcctggcggcaaggtggctgccgaggctgccaaggccgaggagcgcaacggcagccccagcgtcggtggcaagaagatcagcggcaacgtggcgtccatctttggcagcgtattcagcgacctgaaggagggctatgtggggctgtggcactccgcccagcactttgatgcccaccaagccatggccagcctgcaggaccggctggccgccgggcaggcggcgcaggcgcaggcccgcgcggccgccgcggtcgccgcagacagcagcagcagcggcggcgccgcctccaccgcagccaaggcggcagcgaagcagcaggtggcattgaagatgccggctggtaagcgccagtcagcagtcagctaggcagcagcgccgcagcatcagtacgccataaaaacagcccagcccgagcagccgcttcacgcgcagcagcaagcagtctcccacgtagtaacccacggctcgcagtgctgcacct

SEQ ID NO: 4054 - DNA, 488 bp, Chlorella sorokiniana
  Clone ID: LIB3602-047-Q6-K1-C8
gcgccggcgaaacctcggccctgccgctcagcatagcatgacagcagggcggcagccacccacgccgtggagctttctggatggcatgctccagcactgctggtctgcaactctggctgattggccggcggtgcagctgtacatgcggccgatggctgcactgtgatgcggatgcaggcagcaggcagcgattgcagaggcccagcatgctgactcagcacgtgcaagctggcatagagtgtgcagcagagccactgccaccttcggcgctgctacagtgctgccacttccagcacctgccgctgacctgttgtcgcttctgcccacgcttccatccctgccgcagaagcgcgtggcggactgcgagaccgacccctcgcagcccgagtgccgggtgtacgatgactgagcgtagtccgcgtgggctgagcctaggcagcagctggccaaccctgttctagcgcccctcgagccgacgaagcttcatc

SEQ ID NO: 4055 - DNA, 487 bp, Chlorella sorokiniana
  Clone ID: LIB3602-047-Q6-K1-C9
gttccctgtgcaccccaagcaggagaaggccgccgctgaggcgtccaagaagcccgccaagttctaccccgcagaggatgcgccccagcctctggcgcgccgcgtgatccgccgcgccgccaagctgcggccgtccatcacccccggcaccgtgctgatcctgctggcgggccgcttcaagggcaagcgcgtggtgttcctgggccagctgccctctggcctgctgctggtgaccggccccttcaagctcaacggcgtgcccgtgcgccgcgtgaaccaggcgtacgtcatcgccacctccaccaaggtggacgtgagcggcgtggacatctccaagtttgacgacgcctacttcaagagcgccgagaagaagcagaagaagcagagcgaggagggcttctttgccgagaagaccgagaaggcgccgctgcccgctgagtatgtggccaaccagaaggcggtggacgcggcgctgctgggcaagctg

SEQ ID NO: 4056 - DNA, 488 bp, Chlorella sorokiniana
  Clone ID: LIB3602-047-Q6-K1-D1
ctctgatcaaggcgctgaggccctaccgacaggccgagttgaagtatttcaagcccaagccggatttctacccgctgctgactgtggtgggcgtggcggcttccactgtggtctactgctcctaccgagccctggcacacaaccccgacgtgcacctgagcaagatccacaagcacgacgagctgagcgagagcgcggagcacatggagcgcgccgaaaagtactggcacagcatcttccgcaaggcgtggcttagccgcgtgcacgacggggacgtggtggacgcccgcatgatgcgcgtctaggcagtcgagacgcgtctaggcctggaggcagccccccgcctctgtgccacaccatgccaatgttaattgaaccccgccaacatacagcaacttcgagcgagccactcacaacaagacggcagcagctggagcgcgccctgttaggaagccgccgtgcccagctgcatccaactactggcgaga

(The sequence listing continues in the following parts.)

1. An isolated nucleic acid molecule comprising a nucleotide sequence of SEQ ID NO: 2 or complement thereof.

2. The isolated nucleic acid molecule of claim 1, wherein said isolated nucleic acid molecule encodes a Chlorella sarokiniana protein.

3. The isolated nucleic acid molecule of claim 2, wherein said Chlorella sarokiniana protein is a homologue of a 60S Ribosomal protein.

4. The isolated nucleic acid molecule of claim 3, wherein said isolated nucleic acid molecule a nucleotide sequence of SEQ ID: 2.

5. (canceled)

6. A transformed cell having an exogenous nucleic acid molecule which comprises:
(A) an exogenous promoter region which functions in said cell to cause the production of a mRNA molecule; which is operably linked to
(B) a structural nucleic acid molecule, wherein said structural nucleic acid molecule comprises a nucleic acid sequence of SEQ ID NO: 2 or complement thereof; which is operably linked to
(C) a 3′ non-translated sequence that functions in said cell to cause termination of transcription and addition of polyadenylated ribonucleotides to a 3′ end of said mRNA molecule.

7. The transformed cell according to claim 6, wherein said cell is selected from the group consisting of an algal cell, a plant cell, a mammalian cell, a bacterial cell, a fungal cell and an insect cell.

8. The transformed cell according to claim 7, wherein said cell is an algal cell.

9. The transformed cell according to claim 8, wherein said cell is a Chlorella sarokiniana cell.

10. The transformed cell according to claim 7, wherein said cell is a plant cell.

11. A substantially purified nucleic acid molecule consisting of a nucleic acid sequence of SEQ ID NO: 2 or complement thereof.

12. A substantially purified nucleic acid molecule comprising a nucleic acid sequence having between 100% and 90% sequence identity with a nucleic acid sequence of SEQ ID NO: 2 or complement thereof.

13. The substantially purified nucleic acid molecule of claim 12, wherein said nucleic acid molecule comprises a nucleic acid sequence having between 100% and 95% sequence identity with a nucleic acid sequence of SEQ ID NO: 2 or complement thereof.

14. The substantially purified nucleic acid molecule of claim 13, wherein said nucleic acid molecule comprises a nucleic acid sequence having between 100% and 98% sequence identity with a nucleic acid sequence of SEQ ID NO: 2 or complement thereof.

15. The substantially purified nucleic acid molecule of claim 14, wherein said nucleic acid molecule comprises a nucleic acid sequence having between 100% and 99% sequence identity with a nucleic acid sequence of SEQ ID NO: 2 or complement thereof.
